United States Patent Application Publication US 2009/0311680 A1 - sequence listing, part 11

SEQ ID NO: 173403 - DNA, 627 bp, Saccharomyces pastorianus
cctgttgttcattgttcgtccaacctgcccatcactccatatatctatgagcgtctagtatattttattaaggcaagctctatatcaagctgcatatctgacaacttacttcttgttaataaaaccttcaacgacggaggttgtccaccacatattaacttctgcaatgatgagataattaacccaacagcgggtcaaacagtgattgaattagttcttaatgcaaaaaaaggtgaattaggctcgggttatctggctgttgaccacggaaaaaaggttgttattctagcatttagaggatccacaacaagacaagattggtttagtgattttgaaatatatcctgttaactattctcccctttgcgttaaggaatatcgtaagcttatagaggaaggaaaaatcagagaatgtgaaggttgtaaaatgcatagaggatttctaaggttcacagaaactctcgggatggacgtctttaaaaaaatggagtcgattctggaaagctttccggaatataggatcgttgtcactgggcactccttgggggcagcattagcaagtttggctgggattgaattaaagataagaggctttgatccattagtagctgacattcgcaacaccaaa

SEQ ID NO: 173404 - DNA, 126 bp, Saccharomyces pastorianus
gaatctatatttctatttactaatatcacgattattcctcattccgttttatatgtttcattatcctattacattatcaatccttgcacttcagcttcctctaacatcgatgacagcttctcataa

SEQ ID NO: 173405 - DNA, 291 bp, Saccharomyces pastorianus
gcggataattttaggtatgatagtgatttggacgacgatgagaacgggtccgtcattttacaagacgacgactacgacgatggaaacaaccatatcccctttgaagatgatgacgtttacaactataacgacaacgacgacgatgacgaaagaatcgaattcgaagatgatgacgatgatgacgacgatagtatagataacgacagcgtcatggataggaaacaaccccacaaggctgaagatgaaagtgaagatgtggaggatgtagaaagagtttcaaagaaaatataa

SEQ ID NO: 173406 - DNA, 1617 bp, Saccharomyces pastorianus
acttcatctttgaatagtgatcaggcaactttgacagggtcgaggctacatatgagtagttcattgtcccagcaaaagaaccctgcagccattcataacgtcaatggtgtgtttacattactggcggaatgctattcccctacgtgcacaagagacgctttgtgttactctatttcgtgtccaagacgtcttgagcaacaagcaaggttaaatctgaaaccaaatggcggcctgaaacgtaatatatcaatggcattggatgatgatgacgaagaaaagccatcttggacaagttccgtatctaaagaggattgggaaaacttaccaaaaaaggaaataaaaagacaagaggctatttatgaagtttatatcacggagaagaactttgtaaaatcattagaaattacaagagacacattcatgaagactttggctgaaacaaatattatttcagcagatattagaaaaaatttcatcaagcatgtttttgcacatataaacgatatctattcagtgaatagacgttttttgaaggctttaactgataggcaaagaagttcaccagttgtgagaggaattggggacattgttttaagattcattccattttttgaaccatttgtttcatatgtcgcttcaagaccatatgctaagtacttgattgaaacccaaagatcagtcaatccctattttgctagatttgatgacgatatgatgagctcctccttacgtcatggtattgattcgtttttatctcaaggtgtttcaagaccaggtcgatatatgctattggtcaaagaaatcatgaaatctactgaccccgagaaggacaaaagtgattatgaagatttaagcaaagccatggatgcattaagggattttatgaaaaggattgatcaagcaagtggtgctgcacaagatagacatgatgtaaaattgttgaaacaaaagattcttttcaaaaacgaatacgttaatttaggattaaatgacgaaaggagaaaaattaaacatgaaggtatactatcacggaaggagttgtcaaaatcggacggaacagttgttggtgacatacaattttatcttctagataatatgctcttatttttaaaggccaaagcagttaataaatggcaccagcataaggtattccaaaggcccattccattgccattgttatttgcatgtccaggtgaagatatgcctgcgttgaggaaatatattggagaccacccagattgttcaggaactgtaattcaaccagaatacaacacgagtaatcctaaaaacgcaataactttcttatactacggtgccaagcagagatatcaagttacattatatgctgcgcaatacgctggattgcaaacgcttttggaaaaaataaagcaaggacaagcagctattataagcaaaacggagatgttcaatgtaacgaaaatgagcgataggttcttcgattacaccaacaaaattaacagtgttacttcctgtgatgggggtagaaaacttctgattgcaacgaactctggattgtatatgagcaacattaaaagacagcagaataaagatcatagacataaagctctgcttttttttcaactccaatccaactag

SEQ ID NO: 173407 - DNA, 84 bp, Saccharomyces pastorianus
gaggattgccgccaagctggcgctgccgttcatagtgagggcttcgagcgcgacaattggtgggtggtggcccagaagagatga

SEQ ID NO: 173408 - DNA, 123 bp, Saccharomyces pastorianus
tgcatcttttccgctgacttgggagtagagtacagctgcgcggagtcgcgtattacaaatcttgtactttgcattctgtgcatacgtgaggaaaaagcagcacctgttgtgaaaaaaagataa

SEQ ID NO: 173409 - DNA, 390 bp, Saccharomyces pastorianus
atgcaagttctcatcggaacgaaattagtgactgaaggaattgacattaagcaattgatgatggtgatcatgcttgataatagacttaatattattgagctcattcaaggtgtagggagactaagagatgggggcctctgttatctattatctagaaaaaacagttgggcggcaaggaatcgtaagggtgaattaccaccaattaaggaaggctgtataaccgaacaggtacgcgagttctatggacttgaatcaaagaaaggaaaaaagggccagcatgttggatgctgtggctccaggacagacctgtctgctggcacagtggaactgatagaaagaatggacagattggctgaaaaacaggcgacagcttccatgtcgatcgttgcg

SEQ ID NO: 173410 - DNA, 72 bp, Saccharomyces pastorianus
atgggtaaaggtaagccaagaggtttgaactccgctagaaagttgcgtgtccacagaagaaacaagtatgta

SEQ ID NO: 173411 - DNA, 81 bp, Saccharomyces pastorianus
atggtctctagcgggatcgaaccgctgatccccgcgttattagcacggtgccttaaccaactgggccaagagaccagaaat

SEQ ID NO: 173412 - DNA, 90 bp, Saccharomyces pastorianus
atgaagcagaaaaaatttaactccaaaaaaagtaatagaacagatttatcaaaaagaggagattctcctaatataggaatttccaaatca

SEQ ID NO: 173413 - DNA, 639 bp, Saccharomyces pastorianus
agtacatcttcgcagccaacctctactttgcagccaagcactattccacaatcaacctcttcttttcaagcagaatctactttgcaagccgtctctacgcaacaaactgctatgtctgtttctgcaggtactagtgaggatgtgcaacaattagctactacttctacctctatctcctcctctccttcccctaccactacgtctacttccacacaaaatatcgtgagtggtgtcggtgaagccaatgttgaaggcaacactcaaagtcagcatcattctcaccaagcagctgcgacttcaactttgaatcaaccaacgactacctcaattgcttctcaggcgtccaccgaatcaaccaatacacctacgtcgtcctctacttcttcctctacttcttcctctacttcttcttctacttcttcctctacttcttcttcttctacttcttcctctacttcctggttcgtatcttgcgtggaattcgtgactcggatactaccatcacagcaggaaacagctacgacctctgaagggtactcgagttcgggacctgatagaatttattctgcaaagggtaatgtacattcaccagataatgatgatggctattgtaagtctgcagacgcggtctgttcttga

SEQ ID NO: 173414 - DNA, 93 bp, Saccharomyces pastorianus
ttgccaacctcattttgcgtaatcgagaagttttgttcagagaaccgaagcgaggaattgacgagtatctggaaaacgattcttttcttcaaa

SEQ ID NO: 173415 - DNA, 252 bp, Saccharomyces pastorianus
atgcacggcacttgcctcagcggtctataccctgtgccatttacccataaagcccacgattatccacattttaatatctatatctcattcggcggccccaaatattgtataaatgcccttgatacatacgttataccacttttgcaccatatactaaccactcaatttatacacacttatgccaatattacaaaaaaatcaccactaaaatcacctaaacataaaaatattctactcttcaacaataataca

SEQ ID NO: 173416 - DNA, 357 bp, Saccharomyces pastorianus
actccgggtttaggtatggtttatttgatgcttactggtgttattgcagataaattacactctcgttggtttgcgattatttttactcaggttttcaatatcattggtaactccatattagccgcttgggacgtcgcagaaggagccaaatggtttgcatttatgctgcaatgttttggttgggctatggctcctgttttatactcttggcagaacgatatttgtcgccgagatgctcaaactagagctattactttagttacaatgaatattatgggtcaatcatctaccgcatggataagtgtccaggtttggaaaacagaagaagttccaggtattaaagggttcagtcactgc

SEQ ID NO: 173417 - DNA, 96 bp, Saccharomyces pastorianus
gccagaaaaagaatttctaaaaatgagcggtacgagaatcgaacccgtgtccccaccttggaagggtgggatgataaccactacactaaccgcccg

SEQ ID NO: 173418 - DNA, 1110 bp, Saccharomyces pastorianus
agaaaatccatggtaaagacggaaatcctcattgaagaacctttgaatcctactaccgatatcaagtcttttataaactcatacaaccatggcaaagcgtatagtctaggtgaaactcaacatttacattattatcagttgccatttccatggagggaaaacagatacataatccatggctataggttttacaatacccattccaaatctttgctgtctatttttaactggtacggctggcataatgaaacttcaaatatttggtctcatttgttaggagccatttatataatctacttggcaatttacgatttccctcagtctgaagtttggcggaattcccaggttccaccacaggctagatggattgttttcatgtttttggcagctgcgttgaaatgtatgctaagctccgtgttttggcatactttcaacggaacgtccttcttgaagctacgttctaaatttgcgtgtgtcgactatagcggtattacgatcttaattacagcttcgatattgacaactgagtttgttaccatgtattcatgttactgggcgatgtgcacttacatgggtatttctctggcgctgggtgtatttggtgtgtttatgaattggtcgcctcgctttgatagacctgaagcaaggccattaagaattagattcttcattttgttggctactatgggtgtattgtcgtttttacatttgatatttttgactgatcttcattatgctgcaacgctatttagccccgtcacatacaaatctgttgtttggtatttggttggtgtggtattttacggttcgttcattcctgaacggttcagatctgacgttcaggttgataagaccattccaacaaactacgaattatctactgatttagaaatcatcacaaagcaaagggaaattcattttagagaggtgccaacagcccattccaaatgcagttcctgtccgtctcatgccaaatcatttaaatctctatggtgggttgactattttggttgttcgcacactttttggcatttcttcgtagtgttgggtgtcatcggccattatagagctattttagatatgtttgccaagaggtggattttgtcatga

SEQ ID NO: 173419 - DNA, 183 bp, Saccharomyces pastorianus
gtaagttatgtggaagttataaaaaatggtgaaacaatatctagttgtttccagccgttccagaaaaacgaaaactatggtacaataacttcagcaaacgagcagataacgccggtcattttccataatttgatcatggatatggtactacccaaagtagttccgatcaaggggaacaaagtt

SEQ ID NO: 173420 - DNA, 168 bp, Saccharomyces pastorianus
atggcagcgacaccagcagcgattgaagttaatttgaccattgtatttgttttgtttgttagtgctgatataagcttaacaggaaaggaaagaaaacagacatattctcaaaagcatacagttgaagcagctctatttatacccgttcctctatcagtcatcactact

SEQ ID NO: 173421 - DNA, 714 bp, Saccharomyces pastorianus
atgaaaaacagatatactgatgcggtacacttgacgaggtatgccgcttggtcaaacaataagagagaccaagatacttctagtcaggctttaatcgatgagatctttggcttgtattcccccttccaattcttatcgctccaaggtatcggtaaatgcttccttaattatagatctaaaacgaagtgcgatgccttccctaaaactgccaaggaaactttatacatcatgctgagattttttgacatttgtttccatcatctcaaccaaggttgcatatccatagccaacccgctagaaaactacttacaaaaaatgaatcttttgccatcaactccatcctcagtgtcatctgcaggaagtccgaatacagcacatacgaaatcgcatgtagccatagtgataaacaacttacctcaaccctttgtgcaagacataacggggataagtaactcagaactactacataaaatcaatgacgacacgaacatgtttggaattttattggaaatgttgcatgtactcagaaattcgtaccagaatttcttaatagaagtaacgtctaatcctatggtcaaaagcacgcaatcaaaagatactttgcaagagtttattcattattgccaagcagtggaggcgctgattgccttatgctacagttattataattccacattatacaactacgtggactttacatgcgacctaacgcat

SEQ ID NO: 173422 - DNA, 102 bp, Saccharomyces pastorianus
atgcgtactttcactgactttgtttctggcacacctattgtaaggagtcttcagaaaagcaccataaggaaatatggatacaattggcaccctacatgtttt

SEQ ID NO: 173423 - DNA, 207 bp, Saccharomyces pastorianus
atgttcttgtttctgaacgaatcatacatctttgatagacttcgtatgtggagtactgttttatggcgcttatgtgtattcgtatgcgcagaatgtgggaatgccaattataggggtgccgggtgccttatgaaacccttttccgtgcctgtatttccgttttcgtcgaaccaagaatatccgtattgtagatgtgacccgggatcc

SEQ ID NO: 173424 - DNA, 237 bp, Saccharomyces pastorianus
gcattcagagcttactattctcagtttggcgccggtgttaagcagaacatcttgtcttctttactttctgaggaatggcacgcggacaaaatgcagcacggaatatgggactacttcgcgcaacagtataattttataaaccctggttttggttttgtagagtggttgacgaataattatgctgaagtacgtggtgacggatattgggaagatgtgtttgtacatttggccttatag

SEQ ID NO: 173425 - DNA, 129 bp, Saccharomyces pastorianus
ttaaattcctttgaagattattacggaaagccctctgaaacgccaaaaatggaggaagagaaattggaagtaacaattcggcacgcatcctgtgcggaattagtacaggataacaatcacacagaggaa

SEQ ID NO: 173426 - DNA, 96 bp, Saccharomyces pastorianus
gttggaataaaaatcaactatcatctactaactagtatttacgttactagtatattatcatatacggtgttagaagatgacgcaaatgatgagaaa

SEQ ID NO: 173427 - DNA, 1413 bp, Saccharomyces pastorianus
atgagtttcgttaagcaagcatgcgactgttgtcgcgttcgccgaataaagtgtgacggtaaaggaccgtgtagtcgctgccttcagcatgatttgaagtgtacataccttaaacagttaaagaaaagaggtccaaagtccatcagggctcgaagcttgaaaaaaatagccgatgtacagaaagctagtaatggtggcactacgatagctactgcggaagaatccacgaaggttccaaagaggctaatcgaccaatgcctaaggctttaccacaataatctgtacgttatatggcctctgctctgttacgaagatcttcacaggcttctggaagaaaggtatgatgactgttatgtgtactggtttctggtagctctctcggcagccactcttagtgacttgcaaactgaaatagaatctaaggagggagcttccttgactggaaaacagctatgtgacctttgtatgtcattacaccaccgttttgatgacctcaggggtagcgatgtttttagaataatgacgtattattatttgcatcgttgttttgctcaatcttctgatacaagaacttcgtacagactctcttgtgaagccattagcctcatcaagatcgccggatttcatcgcgaggaaacgtatgagcgtatctcgttcaatgagcagcagcttagacggaaggtgtattatttgcttcttttgactgaaagatattattccgtgtatatttactgcgcaacaagcctggatgccacgatatcaccaccgcaacctgaagttgtaactgaccctcgactttccttggatagtttcctcgagatgatcagagtatttactgtagcaggaaaatgtttttttgattcattagctgccaactccgtaaacgtttcttgtactgaagactccctcaaaaaaatatggagggaacttcatacaacgtcacttgaaatagagccatggtcgtacggatacatagacatttcattttcccggcattggatcagaacactggcttggaagctagcgcctctaacaaaaggtatacgaaccggtttcctttcaaacactaataatgcgctcataccagtcaaaattgccaaagacatgttggttgatacatttttaaccccaaaaagcttctatgaagttcacggccccggaataccaacaaaggcgctagaagtagcgaatgcgttggtagacgttgttatgaatcagttagaccagaatatgaaattggaggctttgaacgttttgcacgatatatccaaatttgttttttctttagaacactgtgatagtcggctgatcaagatatttaccgctaaatgtcaaactgcccttatttctatacctatttctagaccactagaattaagcgatgattctgaagaagacactaataaaattctt

SEQ ID NO: 173428 - DNA, 138 bp, Saccharomyces pastorianus
atggaggcggaagtttcagctaccgtgtccgtggcgtattcaaccattgttgtcaaggctgaaaaggcggatgcacgggcattgaactcattatcaattctatttgcagcaccgatcaaaccatctacaagagcggga

SEQ ID NO: 173429 - DNA, 222 bp, Saccharomyces pastorianus
tctaaagccaacgtgaatttcatgcattcaagtactacaaacgatctgatcaagtcaaattttgaaagctattttaaattgatggccgaagactatgaaacttttgacttgagagcctggtcgagacaaagacctcgaaaatttcagcttgtggaaaaaaaaaaaatcactaaaaaccctgctaatagccatcatccgcataaaaatggcaaattatcattt

SEQ ID NO: 173430 - DNA, 255 bp, Saccharomyces pastorianus
atgtataagaagctggctattgccacattgctctattccgcagattatttaccaggtgtgtttgcccttggtcaccaagtgaataaattgttagaggaagcaggcaaaaaaggcgacattgaaacatgcctcattgtgacgacctctctatttaatgacactttaagcgagctagccacgaatattttacaatcaatatacaccacaatcgtgttggtagagcctttagatagccaagaagaaagcatacagaag

SEQ ID NO: 173431 - DNA, 552 bp, Saccharomyces pastorianus
gctgctattgcttacgctcaaacccaagcacaaatcaacgaattgaacgttgttttagatgatgttaagaccaacattgccgactacatcaccctatccaacactccaaattcaggtctttccttggaccaaattccagctggtattatggacattgctgggcaattgattgcaaatccaagtgatgactcctacaccactttgtactctgaagtggacttttctgctgttgagcatatgttgactatggtcccatggtactcttctagactgcttccagaattagaagcaatggatgcttctctaactacctcaagttctgctgccacatcttcaagtgaagttgctagctcttctattgcttcatccactagctcttctgttgcaccatcctcaagtgaagttgtcagctcttccgttgcaccattctcaagtgaagttgtcagctcttccgttgcttcatcctcaagtgaagttgccagctcctctgttgcgccatcctcaagtgaagttgccagacctgcaggcatcaagctgcatgccgtcgtttac

SEQ ID NO: 173432 - DNA, 96 bp, Saccharomyces pastorianus
gcacctgagtttcgcgtatggtcacccactacactactcggtcaggctcttaccagcttaactacagttgatcggacgggaaacggtgctttctgg

SEQ ID NO: 173433 - DNA, 756 bp, Saccharomyces pastorianus
gtgaacaaaggccagcttgatgcattaagcacgtcaagtaacaacaagaccgatgccttgggcaacagcacagccaacaatcttggcggtggatcaagctatgacagcactacaggtgctgtaagttcaccaacctatgtcaccactaaaactgacggcacaacagttaatgctagcaatgtgggtgatgccttaaccaacctgaacaatgaagtggttaaaccgattacctttgcgggtaacagcggcagtgttgaccgtaagttgggtgaaaccctgaatatcacaggtggtctgacagcctcaggttcgaactcgaatgtgaagactgtgatcagtggtaatactgttgacattcaacttgcagatgcgcctgtatttgcagggaagttgacagcaaacggactggatgctaatggtgagaaagttaccaatgttggtgcgggcacagcagccactgatgcagtaaacaaaggccagcttgatgcattaagtacgtcaagcaacaccaagactgatgccttgggcaacagcacagccaacaatctgggtggtggatcaagctatgacagcactacaggtacagtcagctcgccaacctacaccgtgaatggcaacaacgtcaataacgtgggcgatgcaattactgcactggacaaaggctggactttacaaagcaacgggttaaatgcggctgcagtaaaagctggtgatacggttgatattggtacggttgcaggtgaaacgaacctgaaa

SEQ ID NO: 173434 - DNA, 162 bp, Saccharomyces pastorianus
atgatgataataatatttatagaattgtgtagaattgcagattcccttttatggattcctaaatcctcgaggagaacttctagtacattctacatacctaatattattgccttattaaaaatggaatcccaacaattatccaaaaatccacattcttttcat

SEQ ID NO: 173435 - DNA, 186 bp, Saccharomyces pastorianus
atgatattaggtaaacagaatatactaaaagttctccacgaggacataggaatcctcaaaatggaatgtatatttttacatactaatattacgattatccctctttctattttatatgtttcattatcctatcatattatcaatctttgcatttcagcttcttctaactttgatcacagcttctca

SEQ ID NO: 173436 - DNA, 1077 bp, Saccharomyces pastorianus
atgcttacgaatctatcccaattaaatgaaacgttaaaagaggctttatccaattacatgatacaaagaacatcagaagtaatcacggaattgaacacacaatatgaaaactcgaaaagggagtttgaaaagaatcttcaaaaaaacctattacaagaagtagacgaattcaaagaaaacttgaccaagcaaaaggacaaagaactagaagaaaaattaaaggcgaatgaagaattgttacaagccaaacatgcaaatgaagtgggcttactatccatcactcaagtcaaagaatttaataaaattatcaaagacaaaattgagaaggaaagaaatggcagattagctcatttagaggaaataaattctgaagttaacgacctcagcaaatccatcgacagatcgagcaaaatcttaagtaaaaacgaggctctagtgcaattaactttccaagtagatgagatcaaatctaggattaacaacaataacttacccgatgtgaatatcgacaaggaactatccagattgaaacttctttccaatcttctctctaccttcaacaaaaaatcttgttgcgacgatggcgactgctgctcctgcaaaaagggtaataagaatgaaggcaaggaagggaagatatcatgcaaatgcaaaccaaagacaaaccctccatcgctattaagcgtagctttagatgaattagaatccacatgtagcggtaaaaaaatcttatcgaatgagcagatctataacaggtggaacttactggcagatgactttaagacagcctctttattgccaccaaattccggtattttggggcaattaaccgccaaagttttttcccttttcttattcacaaagacaggtaatccttcaaatgccacggatttcgattctgtttatgcaagagtcggcgataacttgagggtatccaacctcaacgatgctgtagaagaggttgtctccctaaagggttggcctcataaagtttgcgaaagctggatcgaagatgctagaagaaaattagaagtccagcgcctggtagagattcttgactgtgaaataaggacgttg

SEQ ID NO: 173437 - DNA, 390 bp, Saccharomyces pastorianus
atggaaccgctatcaatacccaaaaacagatctattgtgaggctcactaaccagttctctcccatggatgatcctaaatcccccacacccatgagaagtttccggatcaccagtcggcacagcggtaatcaacagtcgatggaccaggaggcatcggatcaccatcaacagcaagaatttggttacgataacagagaagacagaatggaggtcgactctatcctgtcatcagacagaaaggctaatcacaacaccaccagcgattggaaaccggacaatggccacatgaatgacctcaatagcagcgaagttacaattgaattacgagaagcccaattgaccatcgaaaagctacacaggaaacaactacactacaaaaggctactcgat

SEQ ID NO: 173438 - DNA, 309 bp, Saccharomyces pastorianus
atggtcgtaattaacggggtcaaatatgcctgtgaaacgtgtatcaggggtcacagggcggcgcagtgtactcacactgatggtccgctacagatgatcagacgcaagggaagaccatcgaccacatgtggccattgtaaagagctgagaagaaccaagaacttcaacccatccggtgggtgcatgtgtgcctctgcacgacggccagctgttggcagcgaggaagatgaaacacgatgtcgttgtgatgagggtgaaccttgtaaatgtcataccaagaggaaagcagccggaaatcaaagggagggt

SEQ ID NO: 173439 - DNA, 93 bp, Saccharomyces pastorianus
atgtctttaccagctacttttgatttgaccccagaagatgcccaacttttgttggcctctaacgcccacttaggtgctagaaacgttcaagta

SEQ ID NO: 173440 - DNA, 123 bp, Saccharomyces pastorianus
atggaatcgatacttctacataataatattacgattattcctcattccgttttaaatgtttcattatcatattacattatcaatctttgcatttcagcttcctctaacttcaatggcagtttt

SEQ ID NO: 173441 - DNA, 300 bp, Saccharomyces pastorianus
atgtctgactatttcacgtttcctaagcaggagaatggcggtatctcgaagcagcctgcgacaccaggttcaactcggagctcttctagaaatttggagttaccgaagaactatcgttcatttggtggtagtagcgatgaactggcatctatgtattccgccgactcccagtacttgatggatatgattcctgattcattgacgctgaaaaatgagccagcatctggaaatacgcaaatgaacgggccagatggcaaagagaataaggacataaaacttgacgagtatatattacccaag

SEQ ID NO: 173442 - DNA, 864 bp, Saccharomyces pastorianus
tattctcgcgatcatgacttaaagggcgaagaataccaaaaaatggaatattccccttacgacaaagcaggtatcaacagagatgcaaaaaatgcatcccaagctatgcaaccacatcttcatgttattaaattttttgcttcccatttcgagggcacactatttcaaagtgactttttattgaaaattttcacgaaatgtgcgctttatggtatcaagaatctgtataaggcttcactacacccgttcgctagaatgattcgccacgaattattgttattcgcgactctcgtactaaacgcaagttataagcagggatccaagtatatgggccgtttgtcgcaagaaatcacaaacggtgccctaagttggtttaaaagaccagtagcgtggccattcggctcaaatgagctgaaaatcaaagcagatttatctgttactagggaccttttccttcagctcaacaaattaagctcgctaatgtcacgtcattgcgggaaagattacaagatcctgaactatttcttggcaagcgaaatccagcagattcaaacctggcttactccgactgagaagattgaaggagccgacagcaacgagcttacaagcgatatcgttgaagctacctttgctaaagatccaacattagcaataaatctcttacaacgatgttatagcaagaaagctgaggatgttttagtgggcttagttgcaaaacatgctttaatgtgtgtggggtccccaagtgctcttgacctgttcataaaaggaagccacctgagcagtaagaaagacctacacgcaaccttatactgggcgccagtgagcccgttaaaactctatcaaccattttccgttcccgaa

SEQ ID NO: 173443 - DNA, 192 bp, Saccharomyces pastorianus
atgaataatgaaatcacggctagtaaaattgatgatggtaataattcaaaaccactgtcacctggttggacggaccaaactgcgtataacgcgtttggaatcactacagggatgtttaataccactacaatggatgatgtatataactatctattcgatgatgaagataccccaccaaacccaaaaaaagag

SEQ ID NO: 173444 - DNA, 501 bp, Saccharomyces pastorianus
atgagtcaagtggcagacacgagtctaaaagttggtatatgttggtgtgatgtgagtactggggagatatttgttcaacaagtgtatcttagagatttggtttctgcaataaccagaattcaacctaaggagattttattagatgaaagattacttgagtttcatatcgagtcagggacgtggtatcctgaacttgttgagcttaaaaaattttttataaaatatcagaaaatgcccagtcaacatcgcactattgaatcattctatgggctgtttaatttgggaggtaaagaagcaacggaaaggcaattgataatccaatttcaaacttttactcagaaggagttagctgctttgaggaatacattaatatacgtaagtaatcatctacctgatttctctattaattttcagattcctcagagacaattagcaacggcgataatgcaaattgattcaagtaccagcactgcacttgaattgcattctactgtaagagac

SEQ ID NO: 173445 - DNA, 426 bp, Saccharomyces pastorianus
atgaaacacattacctcaaactttttcagaaaaaaacttggtattcctggaaaactgaaaagaagaagccattataatcccaacgcagagggccacaccaaagggaattcttctatattgagttccactactgatgtaattgataacgccagctacaggaatattgcaatagatgaaaatgttgacataacacataaagaacacgccattgacgaaataaacgagcagggtgcatcaggtggtgaatctgttgtggaaggtggatcgttattgcatgacattgaaaaggttttcaataggtccagggcaactaggaaataccatatccaacggaaattaaaagtgcgccatattcaaatgctctctatcggggcttgctttagtgtcggattatttttaacctcagggaaaaccttttcaatgtca

SEQ ID NO: 173446 - DNA, 87 bp, Saccharomyces pastorianus
ggtgaatttgaggtaattgttgggattccatttttgataaaggctataatattaggtatacagaatatactagaagttctcctcgac

SEQ ID NO: 173447 - DNA, 465 bp, Saccharomyces pastorianus
gtcaatatggaccctaatgacgtccacgaagaagaagagtttgtggatgaagatgatacttatgtttctttgaatcctattattagatgcactcccgatcggtacttcagcaaaggaccagcgaaagatatccccagtgaaccattctgtacacctcgtgaaaattccgactggaaagttggcaagacttatttcgtcacttggtatacaaggtttttcgaagacgagaattctgatacagtcgctgataaagtccgtgtccatttgtcttatgtcaaagaaaaatccgtagagatgggaaatcacaagagggatatttctggaacatttttcacatctgaatggattgacaatgtcgatggcctactgccaattgaaatcaaagaagattggttgcagaatacatacgagcgtagaataatgtcggggatccattatagagtcggacctgcagcatgcagctgc

SEQ ID NO: 173448 - DNA, 144 bp, Saccharomyces pastorianus
ctattacgattatttcttcttccgtcttatattttttattgtcctattacatcatcaatcctcgcatttcagcttccattatatttgatgactgtttctcaatctttatgttatcttcttacaccgtatgtgatgatatactaa

SEQ ID NO: 173449 - DNA, 1743 bp, Saccharomyces pastorianus
ggtgctaaggtctcgaagtttttgaaatttctggaaatccctgttgaaaatagaaactccatcagttttttgaagaacccagatttgcagccaattaaggcggaacaccaaacatgggggttctggtccaatttcgcatactggggggttatgtccttctctgtgggtacttggctttgtgcctcgtctgcattgacctctgggctgagttatccagagactattggtacgtttattatcggtgatgtgttgactatcgtattcaccctggccaattcaagtcctggttacgactggaaggttggttacacgttggctcagagatttgtcttcggtatcaatggttccgctttcggtattatcatcagagttttgatgagtattgtcaactatggttccaacgcttggttgggtggtctttgtatcaacatgatcttagattcctggtctcatcactatttgcatttacgtaacactttgtccccaagtgtcgccatgactactaaggagttgatcgggttcattattttccacgtcctcactgccttctgctacctaatgaagccctaccgcatgaactatatgttgatctggtcatgtgtggccaccttcttctccatgctgggtattgtgatctatttgacccaccaagctggcggtgttggtgactcgttcgcctctacgaagtcaaccctcactggttctaaaaaggcttgggcttgggtctacatgatctcatactggtttggtgccgtctctccaggctccaccaaccagagtgactactcgaggtttggttcttcccaaactgccatctggctcggtaccatctgtgctctaatgatcccgagcactttggttccagtatttggtctcattggttcttccactaccgaaaagctatatgggaaacaaatatggatgcctatggagattttcgactactggttaaaggacaactattctgcaggtgcccgtgctggtgccttcttctgtggtgtttccttcgccatgacccaaattggctacaacatctccaactgtgggtttgctagtggtatggatttggctggtttgttgcccaagtacttcgatattaaaagaggtgctattctaactgcatgtctctcctgggcttgcttgccctggaacttctacaactcttcgtctactttcttgactgtcattagttctttcggtgtcgttatgactcctatcatctctgtcatggtctgcgataacttcttgattagaaagagacaatactccgtcaccaatgcctttattcttaagggtgaatactatttcagcaagggtgttaattggagagccatcatcgcctgggtttgtggcatgactcccggtttaccaggcattgcctggcaagtcaataacaattatttccacaacgccggtattgtaaacttctactacggtgattcattcttctcatttttgatctcgttctttgtctattgggggctatgtctagtgttccctatgaaaatcgttgtcagacatgatgacaaggattattatggtgcatttactgacgaagaagcaagaaagaagggcttggtcccattcagcgaaatctctgaagaagaaatcactgcttacacattaggcaaaggatacaccactggccatgaattcagacctgacggatccggcgacgaaacacctgaattagccaaaactagctctgaaaacaccatcgagtttgaaatagtttcatcaaaa

SEQ ID NO: 173450 - DNA, 363 bp, Saccharomyces pastorianus
tccatagctgcaccagcgttcttggaggtagcagaggaggagctattagtagatttttctgcagaagaggaggcctttgcagaagaggaagctgcagaagaggccttggaagaagcagatgaagcagcagatgaagcagcagatgaagcagcagaagagccagaagacttggcagagctagaagacttggcagagccagaagacttggcagagctagaagacttagcagcttcagaagcagaagaggaggcagcagaagaagattctgaagcagaagaagaagcagctgaagaggattcagaagcagaagaagaagcagctgaggaagcagtggcagattcggaaccagattcggaaacggat

SEQ ID NO: 173451 - DNA, 777 bp, Saccharomyces pastorianus
cagagatcttacgattcggtggacttcttcgagattatggatatgttagacaagaggctgaacgataagggcaaatactggagacacgttgccaaatcgctgaccgttttggactatcttgttcgtttcgggagtgagaactgtgtgctatggtgcagagagaatttttacgtaattaagacattaagggaattcagacacgaaaatgagtccggatttgacgaaggacagattatcagagtaaaggctaaagaactcgtctctctgttgaatgatgaagaaaggctacgcgaagagaggtctatgaatacaagaaacagaagggcggacagagctgctaggccaaggccaagaagacaaagaacaaggagcaacccacacgattcttctccctcttaccaggacgatttggaaaaggccctagaggagagcagaattactgctcaagaagatgaacaacgtagaagagaactggcccagtacgacgatgaagatcctgacttccaagctgccttacaactaagtaaagaagaagaggagttgaagcaattgcaggaactacagagattacagaagcaacaacagtctctgtctcaatttcaagctcctttacaacaacaacaaccacaacaacaaccagcgtactacgacattttcggtaatccaatctcccaagatgatacttacagtatcagtaccaacaggaccaggaacaagcaatggcgcagcaaagatggctggagacctgcaggcatgcaagcttgcactgccgtcgtt

SEQ ID NO: 173452 - DNA, 402 bp, Saccharomyces pastorianus
ttagctctcaaaacacttcattacgatcaagagattagtgaattaacggaaaggattttagacttaaataatgaaaacgacagattacttattagtgtttctgatctaacaagtgaaattaattccttacagagcaatagaactgaaagaataaaaattcaaaagcaacttgatgacgccaaagcatctatttcttcgttaaaaagaaaagtacaaaagaagtattatcaaaaacagcatacttccgatactacagtaacatctgatcctgattctgaggggaccactagtgaagaagacatttttgatatagtgatcgaaattgaccacatgattgaaacaggcccctctgtcgaggacatttctgaagatcttgtcaagaaatactcagaaaaaaacaat

SEQ ID NO: 173453 - DNA, 114 bp, Saccharomyces pastorianus
atgtgtcttttcgatcaaggcaaagcagtcttcattcgtaccatatgttggccagaccttttcgtagttggcaatatcgtaacccatatcatcttgtggcgagtcgtagaatgg

SEQ ID NO: 173454 - DNA, 798 bp, Saccharomyces pastorianus
cctcgagcagcagtagcagcagcgactccgaatcaagttcgtcatcatctagctccagctccagctccagcgactctgattcctctagcgactctgattcttccagcgattccgattccgactccagttccagcggatcctcttcctcttcctcttcctcttcctcttcctcttcctcttcttcttcttcttcctctagctctagcgagtcttcctccgaatcggaagctgaagacgacaccaagaagagatcgagagaatccgataatgaagatgtcaaggagactaaaaaggcaaagactgaaccagaatcttcatcctcttcctcgtcagattcaagctccagtgagtcctcttcatcttccgactccgactccagctccagctccagctccgactccagctccagtagttcctccgactcagaatccgactcgagctcaagctctggctctgggtctggctctagttctagttctagcgactcttcgtcagattcggattcagaatcggactcgagctcaagttctagctctagctctagctctagttctagcgactcttcatctgattccgactcagactcagactcagactcagactcctcttcttcctcgagttccagttccagctccaactccagctccagctcgagctccagtgaatcctcatcatcatcatcatcatcatcatcatcatccgactccgactccgactccgactccgactccgactccgactccgattctgaaacaaagaaaatatcaaaagatgagcccaaggccgaagaaacccctg

SEQ ID NO: 173455 - DNA, 150 bp, Saccharomyces pastorianus
cacacggatgctacagtatataccactctcaaacttaccctaatctcactttccactccatcacccatctctcaccatcagtaccaaatgcactcgcatcattatgcacggcacttgcctcagcggtctataccctgtgccatttaccca

SEQ ID NO: 173456 - DNA, 252 bp, Saccharomyces pastorianus
acttactcatcaccctctgcaccaaatagcatcatcatatcgagatcgttctggtcgagtgtttcctctgcgggggcttcatcaagttcgcgcaccaccttgttctcttgtatgtgttcccgttcatgcacattatcctcgtcctcatcgttttcttcgtcatcctcctcgtcttcgtccacttcatcctcttcctcttcttcttcctcttcctcttcttcttcctcgacgttatttgcagtttctgcgtca

SEQ ID NO: 173457 - DNA, 162 bp, Saccharomyces pastorianus
atgaatacttttattttggcccaagttatgaagtgtgaagatatccttgaatacaaggacgacgctgccatcaaagccgccggtaagttgatgcaaaagggtaaggaatacgttgtcgaagacggtgacgttatttacttcagatccggtgctggtaagaat

SEQ ID NO: 173458 - DNA, 180 bp, Saccharomyces pastorianus
atggcagcgacaccagcagcgattgaagttaatttgaccattgtatttgttttgtttgttagtgctgatataagccctactaggaagaaaaaaatgagtgcatattcacaaagacagggggtcaagtctgctctatttatacaaattccttcaccagctggtgctgcccaaacgagccac

SEQ ID NO: 173459 - DNA, 213 bp, Saccharomyces pastorianus
atgtcttctaaggttgatttatataatagcgcgagtgaatctacacattcagcccaagatgcaagacaacagacacctacagcatttgcagcatcaagagatgtcaatgggcagcccgaagctttgctaggtgatgaaaatccaattgagccagaggaaaaggccaaactaaaccatatgactttagactcatggcagccattgaccccaaaa

SEQ ID NO: 173460 - DNA, 225 bp, Saccharomyces pastorianus
atggagcttttcatgtttgctatttccttagacaaaatcaccaacgaactcactgtattcaatacacatatatcagtccctgtgcaaggcatcgatgtaatagacattatgtctcatgaaagattgggtagaattttcttcgtaggccaggccactggcctgaatatctgggagttgcactactcagcttccgacgactggttcaatagcaaatgtagtaaggtc

SEQ ID NO: 173461 - DNA, 219 bp, Saccharomyces pastorianus
tcatacgcacacggatgctacagtatataccactctcaaacttaccctactctcacattccactccatgacccatctctcaccatcagtaccaaatgcattcgcatcattatgcacggcacttgcctcagcggtctataccctgtgccatttacccataaagcccatcattatccacattttaatatctatatctcattcggcggccccaaatattgta

SEQ ID NO: 173462 - DNA, 336 bp, Saccharomyces pastorianus
tcattgacgacagttgtggccgtagaaacgatggcaggagaggtggtctcggaacagacaccagattcacaggaagtaactgtaactaaagtagtttgctttgttggctctgtggtagacataggacaccatgtagtgtattcagtagcgacgccgctaacagtggtcgtagcagtagaaacgatggcaggagaggtggtctcagaacagacaccagattcgcaagaagtaactgtaatcaacgtagttggttttgttggctctgtggtagacataggacaccatgtagtgtattctgtagccacgccactaaccgtagttgtggctgtagaaacg

SEQ ID NO: 173463 - DNA, 465 bp, Saccharomyces pastorianus
cccttccagccttggtatttaaagactataccagctactttgattgctggtatctttccatttggctccatcgccgttgagttgtatttcatatacacaagtttatggtttaataagattttttacatgtttggtttcctctttttctctttcctcctattaactttgacaagttcactcgtcactattttgatcacttatcattccttatgcctggagaactggaagtggcaatggagaggattcataattggaggtgccggttgtgctttgtatgtgtttattcattctattttattcaccaaatttaagttgggtggattcacgactattgtcttatacgtgggatactcctcagtcatttcattactctgctgtttggtacggggtcaattggctttatcagcagtatgctctttgttagaaaaatctactcatccattaaagttgactaggccaacgaaa

SEQ ID NO: 173464 - DNA, 402 bp, Saccharomyces pastorianus
gtcattcccgtcgtggtcaagaaaaatgcacaaaagtttctgaccttcgttgaagacgaaccagatttccagagcggaccaatcccttctaagtatcttattcccaagaaaatcaacttgatggtctacacgttgtttcaagtacatactttgaaattcaatagaaaggattacgataccctttctcttttttacctcaacagaggatactataatgagttgagttttccgtgtcctggaacgttgtcacgaaatagcgagtgccaggccgaacgacagctctacgatgcgtactttcaccaactttgtttctggcacacctattgtaaggagtcttcagaaaagcaccataaggaaatatggatacaatttggcaccctacatgtttttgttactacacgt

SEQ ID NO: 173465 - DNA, 120 bp, Saccharomyces pastorianus
ttacaggggccctacagaaagtacattccctataatattttccaacaatgtggaattggtcacttaaatacgcttgattatattttcgcgtttttgattgttataccaatttcacattaa

SEQ ID NO: 173466 - DNA, 357 bp, Saccharomyces pastorianus
attgacagcagtgacaatgacgctcagaataagaatgctagtgaaattgctcctgagtatttaacaaacttgcaaaattatctgccacgaaagggttcaagagcgaaaatagtttctgacgaacaagaagttatcgaattgaattcttccaatgcttcagagtatatgtatgattgcatgaatagaaagttctttacagatgatgcaaaagaacggatttctagaaacaacttcaatcagggagctgaggaagaccctctaaacgacccattcgcttcaagtagatctttatcattgccgtcctcgggagcagatgctgtcaaaaggaagaagaccctaccaaggctactaaaaatc

SEQ ID NO: 173467 - DNA, 363 bp, Saccharomyces pastorianus
atggtcaaattagcttctatcgccgctggtgtcgtcgccatcgcttccggtgccgccgccgccaccaccaccctagctcaatccgacgaaagagtcaacttggttgaattgggtgtctacgtctctgatatcagagctcacatggcccaatactacctgttccaagccgctcacccaaccgaaacctacccagtcgaagttgctgaagccgttttcaactacggtgacttcaccaccatgttgaccggtattgctccagaccaagtcaccagaatgatcactggtgtcccatggtactccaccagattgagaccagccatctccagcgccttgtctaaggacggtatctacactgtcgccaaa

SEQ ID NO: 173468 - DNA, 222 bp, Saccharomyces pastorianus
agaaagagaagaaggacaagaaggacaagaaggaaaagaaggaaaagaaagacaagaaggacaagaaggaaaagaaagagaaaaaggagaagaaaagaaagtctgaagacggtgattctgaggaaaagaaatctaagaaatctaagaaatgattctcatcactccatctcatcctatatatttaacagctttcttttttttcaaaaaactttttctattatt

SEQ ID NO: 173469 - DNA, 240 bp, Saccharomyces pastorianus
atgatcaaggctatagtattatgtatacagcatatactagaagttctcctcatggatataggaatcctcaaaatggaatccatatttttacatactaatattacgattattcctcattccgttttatatgtttcattaaatcctattacattatcaatccttgcatttcagcttcttctaacttcgatgacagcttctcataacttatgtcatcatctaacaccgtatatgataatatat

SEQ ID NO: 173470 - DNA, 1284 bp, Saccharomyces pastorianus
aaaacgtatgatttattggtaccactaccagaaagaaaaccattaaaactacatcgctcttcaagtacgatggacttggaaatcaaagatattcgcccggcgcatgtcagctcgttcgaggatttaaaaagctacattcaatcagttcaaaattctggcaataggatgggatatagtagtgaagcagaacggtcaagatcgcatgtcgtttttcagctacacatagagcagagaaatagagggcgtgacatactgaaaaatagttctttatatttaatcgatttacatggagcagagaaatttgataaaaggactgaaaatacgctatcacaagatgcactaaaaaaactaaaccaatccattgaagccttaaaaaatactgtagagtgtttggaaattaaaaacctggattcaatatatagtgcgaaagcatcacatagctctacctaccgcgaatctcaactaacggaagttttacaagactctcttggtggcaacaggaaaacgaaagtgattctgacttgctttttaagtaatgtgccaactactctatcaacacttaagtttggtgacagtatccgccaaattaataacagagttatggataataccagcggtttgaatttgaaaaaaaaaatggacttatttgtgcaggacatgaaaattaaagatgataattacatctcccaaattaacattttaaaggccgaaattgacaccttgaaaggtcacagcagccaatctgtctccaaggaggacttagcaacgaaatatgatgatagcaaaaaggaaaacacaaaactaaagctacagttggacagtattgcacagttattgaacagattgaccactgaaaatcccaataatagcatcaatgacgaagtttctgaaatattaatgaagaggtgtgagcaaatcgctcagttagaattatctttcgaccgacaggtaaatgctaattcaaaattggaaaaagagctagaatacaaaaaatccaaagaggaagcattagagtccatgaacgttaaactactagaacaaattcaacttcaagaaaaggagattcaagaactgctaaccactaatgctatcttaaagggtgaattagagactcatactaaactaaatgagacacgaaatgaaagaataaaatacttggaaggctctgtcacagagctcggaattaataaatcagcaaccccatcgcccagaaaaggatccgtaagctcatcatcgggaaataccatgtcgcatattgaagcaggttctgaattatctaaatag

SEQ ID NO: 173471 - DNA, 108 bp, Saccharomyces pastorianus
tctgagctattcaaatatctaaagacattaaacgggttcgcttctacattgtctagcgatgtgctcaggtcgatttctagaaagtttctgactctagaggatccccgg

SEQ ID NO: 173472 - DNA, 150 bp, Saccharomyces pastorianus
gaagaggtaaccggtcaaggcagtcggtccgaagacgtactagaagatgggcaaattggagaacctggacaagaagaagaaggtgctgtcgaaggacatgaacaagtcggacaccagcaaagtgagtctcttccccaacaaacaacagct

SEQ ID NO: 173473 - DNA, 189 bp, Saccharomyces pastorianus
atgcacggcacttgcctcagcggtctataccctgtgccatttacccataaagtccatcattatccacattttaatatctatatctcattcggcggccccaaatattgtataactgctcttaatacatacgttataccacttttacgccatatactaaccactcaatttatacacacttatgttaatatt

SEQ ID NO: 173474 - DNA, 111 bp, Saccharomyces pastorianus
atggcagacacaccctctgtggcagtacaggccccaccgggctatggtaagacggagttatttcatctccccttgatagcactggcgtctaagggcgacgtgaaatatgtg

SEQ ID NO: 173475 - DNA, 117 bp, Saccharomyces pastorianus
caaccagttcaactgaagcaaccagttcaactgctccaaccagttcaactgacgcaaccagctcaaccagctcaactacttcaactgctccaaccagttcaactgacgcaaccactt

SEQ ID NO: 173476 - DNA, 573 bp, Saccharomyces pastorianus
cgtatcattgtgggctcatacgagcacaacattttgtgtttatccttagatatcccaaatcaaaaggaaaatgatgcagcaaagacaccacattttatgccaatatttcattttcaagcccattcgttgagtattaaatgtttggctgtttcaagaagatacctagtttctggatccaatgacgagcacatcagaatttatgatttgcaaaagaggaaggaactgggtactttgttaagtcatcagggctctattactgctctacaattctcacatccagcttcttccagtgaggatgctgctgtttcaaaggggagcaagaatagcaaatggttattatcagcatcagaagaccacaaaattatggtttggagagtaaaggactgggaaacagtggggactttaaagggacacacggcaagggttaatgatgtggatattcaccccaccaatagaattgccatcagtgttagtgatgaccattctatacgtctttggaatttgatgactctaagaaatgctgctgtactaaaactaagaaaagacctgcaggcatgcagcttgcactgccgt

SEQ ID NO: 173477 - DNA, 183 bp, Saccharomyces pastorianus
ataacatcatgcaaaattgaagattcgtttttgtggattcctaaatccacgaggaaaatctctagtataatctatatacgtaatataatagcattaagaacaatggaatcccaaaaattatcgtctgatttttacagggtaatactaaaaacgcttgctgttatcttaagctctatgtattta

SEQ ID NO: 173478 - DNA, 360 bp, Saccharomyces pastorianus
gtcaaattaacttcaatcgctgctggtgtcgctgccatcgctgctactgcttctgcaaccaccactctagctcaatctgacgaaagagtcaacttggtggaattgggtgtctacgtctctgatatcagagctcacttggcccaatactacatgttccaagccgcccacccaactgaaacctacccagtcgaagttgctgaagccgttttcaactacggtgacttcaccaccatgttgactggtattgccccagaccaagtgaccagaatgatcaccggtgttccatggtactccagcagattaaagccagccatctccagtgctctatccaaggacggtatctacactatcgcaaactag

SEQ ID NO: 173479 - DNA, 99 bp, Saccharomyces pastorianus
atgggatctgctaaggataaccttaccttttgtaagtttggtggtaagagatataagaacctaaacggtttaaaatatcacagaggtcattccactcat

SEQ ID NO: 173480 - DNA, 390 bp, Saccharomyces pastorianus
atgtcacattccggagctgccatttttgagaaagtttctgggataattgccataaatgaggatgtttcacccgcagaattgacatggaggtctacggacggtgacaaggttcacacagttgtcttatccactattgacaagttacaagctacccctgcttccagtgaaaaaatgatgttgaggctaatcgggaaagtggatgagtcaaaaaagagaaaagacaacgaaggaaatgaggttgtgcccaaaccgcaacgtcatatgttatcgtttaacaatagaacagttatggataatatcaagatgacccttcaacaaatcatctcacggtataaagatgcagatatctacgagaaaagagaagaagagaggagtctgcgcaaaacacag

SEQ ID NO: 173481 - DNA, 411 bp, Saccharomyces pastorianus
atgtatttggataaaagactaacattttacaaattaatttttgatgcaaaggcgtccaattcggtaatcaagaatatcgacaactccattactaatgatgttgcaaaattatgcgatgcgacatgctccgtttttgcaaacattgcaaagccagttattgatttaatattcttttcggtttatttacgtgataatttgggaactgtgggagtagcaggtatatttgttaattatttcattactgggtttattttgaggaaatacacgccaccattaggtaaattggcaggcgagagatctgcttcagacggcgattactacaattatcatctaaacatgatcaataatagcgaagagatcgcattttaccaaggaacagcagtggaaaggacgacagtcaaagagttgtat

SEQ ID NO: 173482 - DNA, 216 bp, Saccharomyces pastorianus
atatgttttagttctaagtatcgttgtctggagcaagcaaagaaaagcagacctgtatgtgcaactttcctgttttccattaaaatctcaagaaccgaccccttgactgtgctcatatatcaagtatcggttttaaagtcccctaattgtgataattgcaagaacgacagtcagaaagatattttttttttctttctctttacctatcctccataa

SEQ ID NO: 173483 - DNA, 288 bp, Saccharomyces pastorianus
  modified_base (223)..(223): a, c, g, t, unknown, or other
  modified_base (280)..(280): a, c, g, t, unknown, or other
aaaagcaaccgcaggagtttacgtgacatggggaataccattggtcgaaataatataccaagtgacaaggacaatgtctttgtgagattgagtatgtcccctttgaggacgacaagccaaaaagagtttttgaaaccacctatgaggatatcacctaacaagacagatggaatgaagcatagtatacaagtaacaccaagaaggattatgtcgccggaatgtntgaagggctatgtctctaaggaaactcaaagcctggataggcctcagttcaaaaatntcgaataa

SEQ ID NO: 173484 - DNA, 138 bp, Saccharomyces pastorianus
atgcacggcacttgcctcagcggtctataccctgtgccatttacccataacgcccacgattatccacattttaatatctatatctcattcggcggacccaaatattgtataactgctcttaatacatacgttatacct

SEQ ID NO: 173485 - DNA, 222 bp, Saccharomyces pastorianus
tatacagtatatatactagaagttttcctcgaggatataggaatcctcaaaatggaatctgtatttctacatactaatattaagattattcctcattccgttttattccttattccgttttatatgtttcattatcctattacattatcaatccttgcatttcagcttcctctaacttcaatgacagcttctcataacttgcgtcaccatttaacaccgtat

SEQ ID NO: 173486 - DNA, 132 bp, Saccharomyces pastorianus
ttgctaccattaattttcttagtctgtttccgtgcaagtaatgtcttcaaactgcaggaagagtcagtcgaagcacaattgtcatggaatttcccaacccaagaaacggacaaatctaactcagacgtctag

SEQ ID NO: 173487 - DNA, 885 bp, Saccharomyces pastorianus
attggtgatttgtcaagacccattggttcttctatcaaatatatggcgttccagtttacctgtctattagctattcctgccttcatctattttctcattttcagcgtgcatattaagacattaaacgtgaatggtattagtagtagcttttttcccgctgagtttagaaaaactttaaaatacaacaacgttattaaagagactgtggcagaagttgcagtgggttccgctgtttcactgaatcatgttggaacggcaggtggttacttgcattctcatcttcacaattatccggctggttccatgcaacaacaagttactttgtatcctcacgtcgaccaaaataacaaatggattattgagctggctgaacatccaaatgaaaatgtcacaagtttccaaaatttaaccgacggtaccataattaaattaagacagcttaagaacggctgcaggttacactcacatgaccacaaacctccagtttctcaaaatgcggattggcaaaaagaggtgtcatgttatggatacgagggcttcgaaggtgatataaatgatgattggataattgaaatcgataaaaaaagatcagagccgggacctgcccaggaacatattagggctattgaaaccaaatttaggctgaaacattatctaactggttgttacttattttcacatcctgaaaaactacctgagtggggatttgggcagcaggaagttacatgtgcatactttgcaagggaggacttaactttatggtatattgaagaaaacgaaaacgaaatttctttgccaaatccagagaaggtttcttataagaaaatgagcttttggcagaagtttgttgctatccacaagttcatgttctaccttaacaattga

SEQ ID NO: 173488 - DNA, 1494 bp, Saccharomyces pastorianus
ttggctgccggtttgtctgattgggtcgatttcggtgtcatctgtgctttactgctattaaacgcatctgtcggatttattcaagaattccaggcaggttccatcgtagacgagctgaaaaagacgttggccaatactgcaacagttattagagatggccaattgatcgaaattccggctaatgaggtagttcctggtgagattttgcaattggaaagtggcacaattgctcccgcagatggccgtattgtcactgaagactgttttttgcagatcgatcaatcggccatcactggtgaatccttagccgctgaaaagcattacggtgatgaggtgttctcctcatccactgtgaaaaccggcgaggcttttatggttgttactgccactggtgacaataccttcgtcggcagggctgccgccttagtggggcaggcttccggtgtagagggccatttcactgaagtattgaatggaattggtattatcttacttgttctagttatcgctactttgttgttggtctggaccgcatgtttctatagaacggtcggtattgtaagcattttgagatacactttgggtataaccatcattggtgtcccagtcggtttgccagcagttgttaccaccaccatggctgtcggtgcagcttacttggctaagaagcaagccattgttcaaaagttatctgctattgaatcccttgctggtgttgagattttatgttctgacaagactggtactttaaccaaaaacaagttatctttacacgaaccctacactgtcgaaggcgtttctccggacgacttgatgttgaccgcttgtttagctgcctctagaaagaagaaaggtttggatgctattgataaggcttttttgaagtcattgattgagtatccaaaagctaaagacgccctgaccaagtacaaagttctggaattccatccgttcgatcctgtctcaaaaaaggttaccgctgttgtagaatccccagagggtgaaagaattgtttgtgtcaagggagctccattgtttgtcttgaagactgttgaagaagatcacccagttccggaagatgtgcatgaaaactacgaaaacaaggttgctgaactagcttctagaggtttccgtgctttaggtgttgctagaaagagaggggaaggtcactgggaaatcttgggtgttatgccatgtatggacccccctagagatgacaccgctcaaacaatcaatgaggccagaaaccttggtttgagaatcaagatgttaaccggtgacgctgttggtatcgcgaaagaaacgtgtaggcaattaggacttggtacaaacatttataacgcagaaaggttaggtctgggaggtggaggtgatatgcctggttcagagttggctgattttgttgaaatgccgatggtttcgcagaagttttcccacagcataaatacagagtcgttgaaatcttgcaaaacagaggttacttggttgctatga

SEQ ID NO: 173489 - DNA, 120 bp, Saccharomyces pastorianus
atatatatacttttagtcatgatattaattctgcaaaaacaagattactgcatcacagcttatgcagtaatctgtccgtcatcatcgtcatcgtcatcgtcgtcgtcttcgtcgtcgtca

SEQ ID NO: 173490 - DNA, 345 bp, Saccharomyces pastorianus
gctactattactactgaaataataagcgagatcagcgctgtcaatgacaacgtcaatgttgagatggcagcaacctcgggcagcaagcatctcttggcagatcccggtaaccacccagcagaacatttcaagaatcgaatgtcacggttaaggttccagtcgcgggaatacctcaccaaattcacaaacaatcaatcaaatttcttatattcattacaaaaaaggcatagaacaccgcttagagatatttatttcaagtacacgtcgttcatgggtgctcatactttctacgtcatcgcattgcccatgcccgtgtggtttgggtattttgatgtaactcaagac

SEQ ID NO: 173491 - DNA, 159 bp, Saccharomyces pastorianus
atccatggcccatctctctctaaatcagtactaaatgcactcacatcattatgcacggcacttgcctcagcggtctataccctgtgccatttacccataacgcccacgattatccacattttaatatctatatctcattcggcggacccaaatattgta

SEQ ID NO: 173492 - DNA, 114 bp, Saccharomyces pastorianus
atgaaagctaagggtaagttgttagccaaagttggtgaggatccaatgactacttacgtcaaaaagagatcccacaaactgaaaaaaatagcaacaaagttttgggggaagcat

SEQ ID NO: 173493 - DNA, 294 bp, Saccharomyces pastorianus
atgaagcttcaatttttttcctttattaccttatttgcttgtctcttcacaacagccatttttgcgaaagaggacacggcagaagatcctgagatcacacacaaggtctactttgacattaatcacggtgataaacaaattggtagaattgttatgggattgtatggtctcaccacaccccaaaccgttgaaaacttttaccagttgaccatttccagggaccctaagatgggttatttgaactctatcttccatcgcgttattcctaacttcatgattcaagggtggcgattt

SEQ ID NO: 173494 - DNA, 114 bp, Saccharomyces pastorianus
atctacccaggtagaggtactttatttgtccgtggtgactccaaaattttcagattccaaaactccaaatctgcttcgacctgcaggcatgcaagctggcactgccgtcgttta

SEQ ID NO: 173495 - DNA, 432 bp, Saccharomyces pastorianus
atccccgatgtgactattaaacgcggccctttgaggtcttttctcataacaaaaccctgtgataatttgagttcattacgaacagttacttcatctaaggaaaagcttctagttggctgtttactgatatttactgctatcgtaaggctacacaatatctccctgccaaatagtgttgtttttggtgaaaatgaagttggtacatttgtttctcaatacgtgaacaacatattcttcaccgatgttcatcctcctttagtggcaatgctatatgcaaccgtgtcctctgtttttggttataaagggcttttcaattatgggaacattggtactgaatacacggcaaacgttccatacgtcgcgatgaggttcttttctgctactttgggcatcgtgacctgcaggcatgcaagcttgcactgccgtcgttta

SEQ ID NO: 173496 - DNA, 324 bp, Saccharomyces pastorianus
atgagcggtatagcagaagacgctgaagaaggttacggtgatgttcccactatcgctagggaggaggcttccgaatctaaagtagaagtagttatcgacatgttttgtaccgctgctatggttaatttctcattgactccaatgcgcctattttatcattggacagtgttcaccaataatccaaagttaaccaatgtctctatgttagcatacgcagcacttatatctatctggtggttttcagtatggaaggaaagagcgtgtagaatccaaaagaaggcccaatttccaagatgttcgaggatgccctgctttctttgtcgt

SEQ ID NO: 173497 - DNA, 144 bp, Saccharomyces pastorianus
gaattgtgtagaattgcagattccattttatggattcctaaatcctcgaggagaacttctagtacattctacatacctaatattattgccttattaaaaatggaatcccaacaattacatcagaatccacattctcatcagtaa

SEQ ID NO: 173498 - DNA, 381 bp, Saccharomyces pastorianus
actgtcacttatgatggtgaagagggtgtcctggctgccaaaggtagacatgtaacctgccgtgactccaagagccatccctattgtcgaagccatgccgccctagtgttggccgatgccctcttgatccaaaagtcagagagttctccagatccgtggttcattaaaaagatgaaggcaactacatcatgttttttaactatttttatctgtatacatacaaggaatagaaaacacgttttttattatcagttttttgattttcgtatcggttggattatactatatattagatatacaaaattttttatattgaattattcttttctgttactttatagaatcacggaaactaataaaaagcttacaaatcttcagtaa

SEQ ID NO: 173499 - DNA, 1782 bp, Saccharomyces pastorianus
aaaggtctatcttcaatattgaatagaaagagaaacgaaagtgattcgatttccagtaaaatcaagcataacttgggtgctgctgaatgcaactctatagagttgcatgaacaagctaaaaagactgattttgaccttgtacataccgagtgcgtcccagctacgacaattctaaacgacattaaagatggcgacacccccgatattctttacactatggaggatgctagggaagccgacgaaagtgaaagaacaatgccacttataaaagctttgaaaacatatcccaaagcagcggcttggtcattattagtttccacaacattgatccaggaaggatacgatactgccattcttggggccttttatgccctacccgtctttcagaaggagtacggctttctgaatagcaagacaggggaatatgaaatttcagtttcgtggcagattggactggctttatgctacatggcaggagagattgtgggtttgcagttgacaggcccctccgtggatttaatgggtaatcgttacacattgattatggcgttgtttttcttattggctttcattttcattctgtactttagtaaaagtttaggaatgattgctgtgggacaagcattatgtggtatgccatggggttgttttcaatgtttgactgtctcttatgcttctgaaatctgtcctttagccttgagatattatttgacaacctattcgaacttatgctggttattgggccagctgtttgctgccggtatcatgaagaattctcaaaacaaatacgcagactcagacatgggatataggctaccctttgctttacagtggatctggcctgttcctttggcaataggaatttttcttgcccctgaatcaccatggtggctaatcaaaaaaggaaggctcgatcaggcaaagagatcacttgaaagaacactaagcggcaagggagtcgagaaagaactactcgtggttatggagctggataaaataaaagtcactatagaaaaagagaaaaagcttgcaagtgaagagggttcctatttggattgtgtgagagacaaaattaatcggagaagaacgagaatatcctgcgtttgctggatcggccaaactgtttgcggtgcatcacttatcggttattcaacatacttttacgaaaaagctggtgtaagcactgatacagctttcacttttagtattatccaatactgtctgggtattgttgcgacatttttatcctggtgggcctctaagtactttggtagatatgacctttacgcttttggactagcctttcagaccattatatttttcattataggcgggttggaatgttcagacactcacggcgctaagatggggagcggctctcttctaatggtcgtcgcgtttttctacaacctggggattgcccctgtcgttttctgcttagtctctgaaataccatcttcgagactgaggactaaatcgatcattttagctcgtaacgcttataacgtggtaagtatggtggttgctgttttgatattgtaccaactgaattccgagaaatggaactggggtgcaaaatcgggttttttttggggagcattttgccttgccactttgatttgggcttacattgatctacccgaaacagccggtaaaacttttattgaaattgatcaacttttccaacttggcgtcccagcaagaaagttcaagtcaacggaagtggatccgtttctcataaaaacagactctggtgatatcacacatgaagacctaaagtaa

SEQ ID NO: 173500 - DNA, 930 bp, Saccharomyces pastorianus
ctaaaatactaccattcaatgggagatacatcgaaaaaaaggtttttgacaattaagaaggggtaccacggtgacgcctttggagccgtatcagtttgcgaccatgtcaattcaagacatggtacttataacggatttctccctgaaaacatattctgcaaagccccagaagtccgctttgattgttgtgaaaaggacgttaggaaactggttgaggaactcgacgtaaaaccattcgctgagattattaatacacaccatagtgaagtttctggtgttgtgatggaaagcatagtgcagggtgctggcggtctaagaatgtatcatccatacttcttgaaacgtgttcgtgagctctgcgacgaactcgatattttgttgatccttggcgaagtcgcagtagggcttgggagaaccggcatgctctttgggtttcagcatgcaggaatagtgcctgacatagtctgtctagttaagactttgaccgccgggtatttgacattatctgcaacagttaccaccagaaagattggtgatcagatctccaatggacctgagggctgcttcatgcacggacaaacctatatggccaatccgttagcatgcgctgttgcaagtgaaaacttatcgattttgatggaaggtaaatggaaatctcaagttaaacaaatagaagcacagttgaaaaatgagcttttgcccttactggaacaccccatcgtagctgacgtgagaatcctaggggctataggtgttgtcgaggtcatgaaacgtgtgaacgtcgaagtcctgcaagagcggtttatcaaggcaggagcatggattagacctttcggtaacataatctacattctgcctccatatgtaattacttctgaggggttgaccgtcttgacagaagctattcgatccgttcttgactttatttag

SEQ ID NO: 173501 - DNA, 336 bp, Saccharomyces pastorianus
gcagttgttggtgttttgacaacaatgatggtttcgtcagttggtacaccgttggttccagtgacagtagtcatctcagtagacgtagaggtgaaagtgccagtccatggctcagttgtagttatgatggtgttggcagttgtaggtgttctgatgacgatgatggtttcatcagttggcaaaccgttggtaccggtgacggtggtcatttctgtgggtgtagatgtaaaagtgcgagtccatggttcggtcgtagttatggcagtacttgctggtagtaggtgtagtgacaacaatgatggtttcgtcagttggtacaccgttgggtgccagtga

SEQ ID NO: 173502 - DNA, 189 bp, Saccharomyces pastorianus
atgactacagacaacgcgaaagcgcagctgacttcgtcctcagggggcaacatcattgtggtttctaacagactgcctgtgaccattagcaagaacagcagtacgggccagtacgagtacgccatgtcgtccggggcgttggtgaccgcgctggaggggctgaagaagacatatactttcaagtggtac

SEQ ID NO: 173503 - DNA, 816 bp, Saccharomyces pastorianus
atggttctcttctccatattggaggctcacaaattgtggcatacccaaaatggttataaagtgctggtcattttcttctattatttttgggtcataacgctagcatcctttatcagaacagccactagtgatcctggcgttcttccgagaaatattcatttaagccaactaagaaataattatcagatcccgcaagaatattacaacttgataacactaccaacacattcttcaatttcaaaagacattactatcaagtattgtccatcatgtaggatatggagaccacctcggtcttctcactgttccacatgtaacgtctgcgtaatggttcatgaccaccattgcatatgggtcaataattgcataggaaaaaggaactaccggttctttttaatattcctgttaggtgcaatactttcgtccgtcatattattaactaattgtgccatccatattgcacgggaatcaggggggcctcgcgattgtcccgttgcaatattgttactttgctatgcagggctaaccttatggtatccggcaatactgtttacttatcacatatttatggcaggtaatcagcaaacaacaagggaatttttgaaaggtattggatcgaaaaaaaaccctgtattccatcgtgtggtcaaggaggaaaacatatataataaggggtcctttttgaaaaatatgggtcacttgatgttagaaccaaggggcccaagctttgtaagtgccagaaagccacatgaagctggagattggagatttatggatttatcgccagcacacagctttgaaaaaatacagaaaata

SEQ ID NO: 173504 - DNA, 135 bp, Saccharomyces pastorianus
agggttgccgaggtgccgtatgttacccttttccgtgccgtgttaagtttccgttttcggtcaaaaagatatccgaattttagatatggaccctcgttcagaagcttattgtctaagcccatattcagtctgctc

SEQ ID NO: 173505 - DNA, 588 bp, Saccharomyces pastorianus
attgagcactttgttgatccgttgaataagtcacatgcaaaattcaatgaagtgttaaatgaggagattccactactatcacgcagattacaggaaagtggtgaagtccaactgcctgtgaaaatgactataggagaggcagtgaattctggaatggtagaaaatgaaacattgggatattttatggcaagagttcatcaatttttgttgaatattgggatcaacaaggacaaattcagatttcgccagcatttgaagaatgaaatggcacactatgccacagattgttgggacggtgaaattttaacatcgtatggttggattgaatgtgtcggttgtgctgacagggcggcttttgatttaactgtacactccaagaaaacgggaagaagtctgacggtaaagcaaaagctagatacaccaaaagaaagaaccgagtgggttgtggaagtgaataagaaatttttcggatcgaagttcaaacagaaagcaaaattaatcgaatctgttttgtcaaaattttcccaggatgaattgattaggaggcatgaagaactggaaaagaacggtgaatttactgtcaagtaa

SEQ ID NO: 173506 - DNA, 735 bp, Saccharomyces pastorianus
aatcaaaatattcagcgtatgggtagaacaggcagaaaacgagatggtaagatagtactactgtttagcagtaatgaatcatacaaattcgagcgtgctatggaagactattcaaccctgcaagcgcttatatccaagcaatgtattgactataaaaaatcagatcggataatccctgaagacattattccggaatgtcacgagacattgatcacgattaatgatgaaaacgaaataattaatgaaatggaagatgttgacgaagttattcgttatgcgactcagtgtatgatgggcaaaaaggtgaagccaaaaaaagccataacaaagaagaagttctttatgcctgataatgttgagaccagtattgttagtgcaagcactttaattaataagttcttggtgaatgaaagtggcgggaaacaactagtaacgagtaatgaaaacccaagtaagaagcagaagatttttaaagctttggataatctggagaatgattcaaccgaggaagcttcctcctcattagaaactgaagatgaagaagtcagtgatgataataatgttttcattgcggaagggcagaatggatgccaaaaagatttggaaactgccattatgcacactggcgaaagtcttaccacactcaagccacttcataattttgaacgccctaatatggctttatttgtgaatgattgtggtcttccaactaaaatcgagaaaaatgtgaagaca

SEQ ID NO: 173507 - DNA, 87 bp, Saccharomyces pastorianus
tcgaggactttaggaatccataaaagggaatctgctattctacacaattctataaatattattatcatcattttatatgttaatatt

SEQ ID NO: 173508 - DNA, 1227 bp, Saccharomyces pastorianus
ttttcagattatattaaatactgcagagtgaatccgcaaatgatttcattaggattgacttccttcaccaaaaataataatatccaactagccgtggaattttacactcaagcgataactaaccctgatactttccccattactgagaagcaactttttgaatttcttcgatgtctgcaaaaatacttggacatatctgatatgaagcatgttttttttatgtggcttaaagtgaaatgtagtgatgaggagttttcttcgactaatctcccatcgatcaaaactcttaccataatgcacagaatgtttttacggcatcccaacacagatgaactgagagattttttgactcatccggtggttgtaagaacgggatatacttccagtgtgcaatttgatttagttgagttttgtcactctttgtattccacagagaggagtatggaaaaaagcattgatgacttaagaatcaaggaaaacgtccacaaattcgtcatcaagttaaataatgacatttcgatacgaagagaactttacatgtcagttgttaaagcttatgtttccaccaacaacttttcaagtctaaagaatgtcttggaaaaaatacagaatgacaaatatattgacatagatggttctttccatttaagcatttctagatattttgtcaatactaatcaattcgaagcgctgttcaaatactattttaccattattaaaaatggcaatggtaaaacccgattgcggcctgcgttcattcaacaattatggtcatgtgctgtaaatgtgtatccaatgctaacaaaagaaatcacaaatgacatattagtgacattgagaaaggatgagtacggaaggagacttgtatggttgtacacatttttacaagaagaagcccgtatttatacgaggaagatcaatgggggagaggagtcctctttatcacgatttaatgtgatcgatttcgagagatttgaagaatttaagaaaaaagtttctcgcaatgatgtgtacggagcagagtcggtaatttcgaatagcttgaaagacggtattgcgccccaattttgttttttatacgctgttttggaactatgtttgagcagttctttaaccaacatggcacatgtagttgataagataataaggaccaggttctgttatatcccaattaaaagtcgatatattatggttgaaatgggacgttgtttccagttacagtcgacg

SEQ ID NO: 173509 - DNA, 648 bp, Saccharomyces pastorianus
ttgtcatcagactcgtcaagaagctcatccagcgatacgcattcgacgggcaccacgggaaccacaggcgtcgaacctgtagatttcaccggtgaaggtgccaaatacacaactgctacggagggcaatggtggtgcagatttagcgattcaaagaacgacgactatgaattctgctgcagaatcagaggttaatatcacgagacgattaactaaaatccttactgggtctgttaacgagcctgaccgtgtagaggttgattataccaattgtgcccccatgggtggtgacagaccttaccctccatcgttgccgagcagagacctgtacgaggttacttttgatggtcctaacgacccactacatccatttaactggcccatgaagaagaaagtgctgctatgtctggtcttatgtctggattgtattgccattgctatgtgttcttccatttttgcctctgcagtgccgcaaatctgcgagatataccacgtcatcgaagttgtcgccattttgggtatcacgctttttgttcttggatttgcggcctcaccggtgatctatgctccgctttctgaattgtacggtagaaagggtgttttggtttatctgcgtttggatttgcccttttccaatttgctgtcgcta

SEQ ID NO: 173510 - DNA, 483 bp, Saccharomyces pastorianus
aaaagaaattgtggacaaataataacgctttttagctcgagaagattacaagccaaacgccttaaagatgttgaatgggtcaagttgcacaggctattacagagagcactttttagacagttaaagagatggtactggcagttcaatggcgtaattgcgctgggacaatttgtaacgttgggttgtacactagtaacattgctggcaaatgtgagggcactgtatatgagattatgggagattaatgaaactgagtttataagatgtggatgcttaataaagaacttaccgagaacaaaagcaaaatcggttgtgaacgatgtcgaagaacttggagaaattatagatgaagatattggcaacaacgttcaagaaaacgaactagtgataacgtctataccaaagcctctgacagagaactgtaagaagaaaaagaaaaggaaaaagaagaacaaatcagccattgatggcatattcggataa

SEQ ID NO: 173511 - DNA, 285 bp, Saccharomyces pastorianus
atcgattgttcccacggcaacagtaataaagatttcaagaaccaaccaaaggttgccaaatgtatttatgaccagctgacggagggtgagaatagtctctgtggtgttatgattgagtccaacataaatgaaggtagacaagatattcccaaagaaggtggcacagagggattgaagtatggttgttctgttacggatgcttgtattggctgggagtccaccgaacaggtattggagctattggcagaaggtgttagaaacagaagaaaggccttgaaaaaatag

SEQ ID NO: 173512 - DNA, 123 bp, Saccharomyces pastorianus
atggggatatattcattttggatcttggataggcattgtaactgtatatttgatagagaatggacatgggcgtccaatagcgcaagtggtacaataaaatccaaacagaatgaagaagatgca

SEQ ID NO: 173513 - DNA, 804 bp, Saccharomyces pastorianus
cctgcaggtccttcatattcgtcatcgtcattgtcttcagatttctcgtcttcaattacctctacatctgcttcatccaccataaccccagcttcacagtattcagacttgaagaaaaccataacaagcattatagagggccaaacaattctttccaactactatacaactataacatactcaccaacagcttcagcgtcttcgaaaaaaagcgcacaacactcaggtctatctaaaaaaaatcgcaatattgttattggttgtgtagttggtattggtgttcccctcttaattattttactagtgttgatatacatgttttgcatccggcctaagaagacggatttcattgattctgatggcaaagttgttaccgcttatcgtagtaacttctttaaaagagtttggtatttcttattgggtaaaaaatttggtgaaaccgacaaattcagctctgactctcctataggcaacaacaacactcaaacttttgacgatattgatcccgaagacatacttaacaatgacaacccttacaccgctaagcatagtaacgtcgaaggctatgacgatgatgatgatgaaaacttgccatctgctttttataatagcggcaccaatgatcaatattcgcctgctaaatctgcgtcatattcgatgtcaaatagcaacggtcaagacgatagtgaccaagatcacgctgatggaataatacataatggagaaatccatcgcgtttatgatgacagcgaaagcagcatcgacgaaaactattacacaagaccgaataacggattaaacatt

SEQ ID NO: 173514 - DNA, 381 bp, Saccharomyces pastorianus
caaaacggtagaatgaaagataatgctataatcgtcacaacgaactctgcaaatggcggatatcaatttcctcctccaacgttaatatcgcctccgatgtcaaatacttcaataaatggttcaccatccaggaaataccataggcaacgatatccaaataaaagcccagaaagtaatggattgaaccttttttcctctaacagtggttatttgagagattctgaactgctttcattttctccacaaaattataatttaaacttggacggcttgacttataatgaccataataacatcagtgataaaaacaataatgataaaaaaaatagtactggtgataacatattccgtctgttcgaaaagacttccccggtgggctaa

SEQ ID NO: 173515 - DNA, 102 bp, Saccharomyces pastorianus
aagtctattgaagaatgggaaggtgatgctatcgaatcggtcccttatttggcaagtgatgaaaagggttcaaactataaggaggccacacaatcccattag

SEQ ID NO: 173516 - DNA, 381 bp, Saccharomyces pastorianus
tcttcttctggagtaatggtcaagtccaaagattgttggtattgggcttccggagataaagtcaaaaggacggattcttggaactcatcgtcctcgtcatcgtcttcttcatcatcctcactttcactttcagccttcttgcctttactcttctttttcttttgggttttttcctcttcttcttcctcagaggattcttcgtctatttcgtcttcatcaaaatcaccacctaaaaaatcatcatcttcaaagtccgggtttcttttgataattcttaaagtcgatggtttgttctcttcatcgatggcttccgggttcaaagcagccatagtaatacgaacggtgatgggcatcgtgacgtcgattgctggaaccggggta

SEQ ID NO: 173517 - DNA, 414 bp, Saccharomyces pastorianus
atgggtagtaggaataacgaaaatgaaaatgagtcaagccgaaggataaagaatgaatttcttgttcagtggtcatccttgtccagcgcagcggctggttcaaacaaaagtaacactaacaattctgacaccaatggcgacgaagatgatacaagggtactggtacttgccgcgacaaacttaccatggtctattgatgaggctgcaaggagaagatttgtgagaagacaatatatcccattaccagaggaccagaccagacacgttcaatttaagaagcttctttcccatcaaaagcacacgttaaccgaatcagattttgatgaactggtaaagattactgagggctattcaggaagtgatataacgtctttagcgaaggatgctgccatgggtccactacgaagatctggg

SEQ ID NO: 173518 - DNA, 1263 bp, Saccharomyces pastorianus
atgatgaattttggaatgtggagagtggtcggacttgattttagagatacaaaagaaccagatagtgagaatattactccgtcagtaagtcccgctaacggcgatcgcaaacttactgaaataacaaagttacctaatattacacgtcctacaaatgcctatcaatcggaagatgcgagaagtaatagcgatttgtcttgtaactctattactacaaatgaaatgacaccgcaggcatactacgaaggttttactggctacatcaaaccctataaagaatcaaatggtgcatcccataaatttgaaagtgaccttccgcatgctgaaatatatagggtttcctcgacttattcaagcccaggcgcattggagttctcgcgaatagacggcagttccctctcatatagtcgtatatcgaaaaatagcgatggcagaagttatagaagaaaaaggaaagcggatatgaatgagttgatttccaaatacagtgccgccgaaaaaataaggcaaggtgaattagatttatcaagaccactatccttgactgaagaagttggaagcaggaacgcaagtattggtaatgtgcacactggttataccgatgaaagttccatcgaagaagaaaattgcactaatatggccaccgacgggaggggtagcctctccttcttgatagagagacacaatctcaaatggttgcagtactttattataaattgcctcaggccagcatctctgggggcaatactaggaataatatgtgcattaattccctgggttaaagcatgcttcgtaacgacatatgttcacgttcataaggcgcctgatggagaacctgttctgaattttttaatggattttacagagtatattggaaatgcatgtgttccattggggcttctattacttggcggaacgttggcaagattagaaattaagtcattgccacctggatttattaaatccgccttattgatgacatgctttcgattaattgtcattcctattattggcgtcctatgggtaaataaactatattcgatcgattggctggatacgggcatgggaaaatttgacatgatattaacgtggtccatgccgagtgctactgctcaagtatatttcacagcattttatacgccagcatgtggtgatcacattcaaatgaactgtttgtccgtcttatttgtcatgcagtatgcgattcttttcatcactgtggcgtttgttgttacatataccttaaaggtcgatttaaaagtt

SEQ ID NO: 173519 - DNA, 93 bp, Saccharomyces pastorianus
aacaccgtatatgataatattgttggaataaaaatccactatcgtctatcaactaatagttatattatcaatatattatcatatacggtgtta

SEQ ID NO: 173520 - DNA, 120 bp, Saccharomyces pastorianus
atgaatgaaaccttttatgaaaccagaattgtcccagctattatcaatgtccgtgaatggcttgaccatatggaggcaaacgatccttcacctagtgtaactaacccactcgaaacttca

SEQ ID NO: 173521 - DNA, 135 bp, Saccharomyces pastorianus
ccaagtgagccatggtcaaccttaactccttctgctactacctcatgcggcgttactgaatttacttccttcttcggtatcactgtccaaacaattacaacaggatctaccacggttaagagagacgttttttct

SEQ ID NO: 173522 - DNA, 180 bp, Saccharomyces pastorianus
gtaagtgcagggcgacaaaagttaaccatcgaacaaaagcaggaaatcataagtggattacgcaaggagctagacgaaatttattctcagagaatcagaaagaaggaaactgaaaaaatctcaaatggatcaggtggagagggagaacaattctactacaaatgtaatatccttccatag

SEQ ID NO: 173523 - DNA, 246 bp, Saccharomyces pastorianus
attaaagacagcgagttcatagatagtttggtggatgaagaagaagaggaagatctctttctccttttctcgacatcgggattaaagtcctcatcgtcattgtcatcctgttcttcaaaggcggcgaaatcttcttcatcaagatcctcgatttcctcttcctcttcgtcctcctctccattttcttcctcgtcatcattgtcactgtcattgtcattttcattttcgttgtcgttgtcgttgtcg

SEQ ID NO: 173524 - DNA, 159 bp, Saccharomyces pastorianus
tggtcaacaaacaagtccagcaacagcagcaaattcagcaacaacagcagcaacaacagcagcaacagcaacagcaacagcaacagcagcaacagcaacagcagcaacaacagcaacaacagcaacaacaacagcaacaacagcaacaacagcaacaac

SEQ ID NO: 173525 - DNA, 330 bp, Saccharomyces pastorianus
agtttgaatattgtaattcgtgataatttgattgaaaattctgcaaacatgggtgatctatttaggtcagaattgaagaagctacaagccaagtataatcaaatcggtaatattagaggtcgtggtttaatgactggtgttgagattatcaagccggaaaccagagaggctgatggagaattggctgggaagctagcggacaggatgatggaacttggactgtctgcaaatttgatatctgttcctgcgtttggaggtgtctttagaattgcaccccctatcaccatttctaaagaagaaattatgcaaggtgtggaaattttcaataaa

SEQ ID NO: 173526 - DNA, 342 bp, Saccharomyces pastorianus
aacaacaacaacaacaacaacaaccacagcaaccacagcaacagcaacaaccacaacaacaactacaacagcaacagcaacaacaaccagtacaagctcaagctcaagcccaagaagaacaattatctcaaaactactatactcaacaacagcagcaacaattcgctcaacaacagcatcagttccagcaacagtatttgtcccaacaacaacaatatgctcagcaacagcaacagcatccacaacctcaatcacaacaacctcaatcacaacaacctcaatcacagcaaagtccacaaagtcaaaaacaagggaacaacgtggctgcccaacagtactaca

SEQ ID NO: 173527 - DNA, 792 bp, Saccharomyces pastorianus
atggatttaaagattttggaagatttatgcaatatttcttctttgtatgaagtaccgtttggaaaacacattaaccaccacgaccacaataatgccggtaacggctgcgatggttcgagcacaggaaataacgaaaacggtaaccaaacaatgaatcttctattatcaagcattaatagatgcaaccctaaaaataatcttaatggaagcaataacaatacggctggagcaacttcaactgatcatcaacaccatcaccatagaatacagtttcattctcacaaaccaaatagaaacaatattatgaacaattcagggattagcgcggcgaacacaacagccgatctaactaacaacgatttaaatgacttaatttcaagagagtatagttatgaaagatttagaaatcaaagtgagcccccttcgctacccaaagtcactcatcagaatcagaaaaatcgtagatcttggcctacaaaagatctagaatctactgatttcagctctttggaagactcattaccttctagtatctctcctcctatacagacaacaagcactataaatttcaactggtgttttaaagaagagaaaaacaatgacttaaaatgcaaatggaaagaatgtcctgagtcttgtagctcactatttgacctacaaagacatcttttgaaggatcatgtctctcaagatttcaaacaccctatggaaccattagcttgtaattgggaggactgtgatatccttggagatgatacatgtaccatagtgaaccatattaattgtcaacat

SEQ ID NO: 173528 - DNA, 417 bp, Saccharomyces pastorianus
tctgaagagcatttggagctaacaaagaaaatgctaactgagtatagaaatcccgccattgaagctttagactcagatcaggagttaatcaaagatctcttggtctctttgacattaagaagattaggtcatatccaagaaggttgtgatatattggatgaaaaggttctacctaagtttttctccattcaaaatggcaaggtcaaatatataaagaaaactgaagatccatgggcctatccgactgcactttatgaacgcgctctatttacatggaagttggagggcatggatggccttccagagagtaaagaatggttactgagggctcagggctacgcagatgattatgaattgagtacgagagtaggtatgaaaattaaggctgccattgaccgcgttgaccattcattgtaa

SEQ ID NO: 173529 - DNA, 1560 bp, Saccharomyces pastorianus
atgggttacgatattgccaactacgaaaaggtctggccaacatatggtacgaatgaagactgctttgccttgatcgaaaagacacataagcttggtatgaaattcatcaccgacttggtcatcaatcactgttccagcgaacatgaatggttcaaagagagcagatcctcgaagaccaatccgaagcgtgactggttcttctggagacctcctaagggttatgacgccgaaggcaagccaattcctccaaataattggaagtcctattttggtggttccgcatggaccttcgatgaaaagacacaagaattctacttgcgtttgttttgctccactcaacctgatttgaattgggagaatgaagactgtagaaaggcaatctacgaaagtgccgttggatactggttagaccatggtgtagacggctttagaattgatgtcggaagtttgtactccaaagttgtaggtttaccagatgcccctgttgttgacaaaaactcgacttggcaatccagtgatccatacacattgaatggaccacgtattcacgagttccatcaagaaatgaatcaattcatcagaaacagagtgaaggatggcagggagattatgacagttggtgaaatgcaacatgcttccgacgaaactaagagactttatacgagtgcttcaagacacgaacttagtgagttatttaacttttcccacactgatgtggggacttcacctttgttccgttacaacttggtcccatttgaactgaaggattggaagattgcccttgctgagctgttcaggtacattaatggtacagattgttggtcaacaatctatctggaaaatcacgaccaacctcgttcaattacgagatttggtgacgattctcctaagaaccgtgttatttctggtaagttactctctgtgttgctaagtgccttgaccggtactctatatgtgtatcagggacaagagcttggccaaatcaatttcaagaactggcctgttgaaaagtacgaggatgtcgaaatcagaaacaactacaatgcaattaaagaagagcatggggaaaactcagaggagatgaaaaagtttttagaagccattgcccttatctccagggaccatgctagaacacctatgcaatggtctcgtgaggagccaaatgctggtttttctggtcctagtgctaaaccatggttttacttgaacgactctttcagagaaggcattaacgtcgaagatgaaatcaaggatcccaactcggttttgaacttctggaaggaggccttgaagtttagaaaggcgcataaagacattactgtgtacggatacgatttcgagtttattgatttagacaataagaagttgtttagcttcacaaagaagtacaacaataaaacattgtttgcggctttgaactttagctctgatgcgacagatttcaagattccaaatgatgattcatcgttcaagttagagtttggaaactatccaaagaaggaggtagatgcctcttccagaacattgaagccatgggaaggaagaatatatatcagcgaa

SEQ ID NO: 173530 - DNA, 279 bp, Saccharomyces pastorianus
gcagcatggctaaattctaccgaatccaatacgtatatccactactcaacatgttggggcacaagtgattacacacttaatatctctgttatagatgctactacagagaaattggttgacactagattattaacaacactcgagaatgcaaccgcttggattaactcaaactctattgatgaagacgaagatgatatgcctcatgtcactaacgtagcagaccggcttgatggattatcccttagcaagcgcgtatatagcatctgtcactacgaattt

SEQ ID NO: 173531 - DNA, 333 bp, Saccharomyces pastorianus
tatcaatcattattggattcccattgtttctacaatcatccctcgtcgccgaattttcaatctacttcattctcgagcgcagctcctttctcgggaatttcccaagcttctgatatttttgactatgaaaacgaagatagtgatagtaatcagattgcgggagaaatagacaataattcgtttcctcctcacttttacttagatgaggatgataaatctgcatgtctcagtgatgacgctttgattgatcatcacagaaataccaacccatttataaatactttcagttcatctccacccatcctttcccaagaggttgatcgatggcgactt

SEQ ID NO: 173532 - DNA, 114 bp, Saccharomyces pastorianus
agattaacaaaattattcaggaaattcgatactaatcaagaaggcattgcaaccatacagtacaaagattttatcgatgctacattatatttaggtcgtttcctacctcattga

SEQ ID NO: 173533 - DNA, 81 bp, Saccharomyces pastorianus
gccttgttggcgcaatcggtagcgcgtatgactcttaatcataaggttaggggttcgagccccctacagggcttacttttt

SEQ ID NO: 173534 - DNA, 132 bp, Saccharomyces pastorianus
aaatataaggataccctttattcaggtatctcgaagtcatttggaatggaaccagcaccactgactgaaatgcaaatatatatgagaaagaaatgtttgatcccggaacctctaaagtcaacaaaatatgcg

SEQ ID NO: 173535 - DNA, 771 bp, Saccharomyces pastorianus
tcggtagtaaactcgttggtttcttgtacgggttcaccggcatttttcgcaggctcactggtatcttccacaggttcattggaatcctccacaggcttgttggcatcctccacaggcttgttggcatcctccacaggttcactggtatcttccacaggttcattggcatcctccacaggttcattggcatcttttatagactcatttacttctggagtttcaacttcagcttctggacgtccaaattccattgctgcatcatctgcaggttcgttattttcccttgcactttctgtggttatgttgttttcagctacttcttcagtctgtacaaatccattatcagcttgttcgttagaatgtgtatcggtatcctcacttttctgtcccgttgcttcttcatttggagaactttcagccacaacttcattcggttcttctaccacggcttctgcggaagagtccgctttgttttcctctatattgggagtaccaacaggttcgcttttcaaacttcttacggaggggttgacggtttcgatggtggtttcattctccaaagccgtcgaagcatgcaatggatcttctacaggacttactggggcagtttcatgtccactcttttctccttgctccttagcttccgaaggattaccctcattgtcattatgtgatgcaacctgttcgacatctgttgtgtcctcgggcatcttattttcatctgctacttcggctaccggctcattctcctttgagtacgaaagttcttcc

SEQ ID NO: 173536 - DNA, 216 bp, Saccharomyces pastorianus
tatgcacacggatgctacagtatataccactctcaaacttaccctactctcactttccactccatcacccatctctcaccatcagtaccaaatgcactcgcatcattatgcacggcacttgcctcagcggtctataccctgtgccatttacccataaagtccatcattatccacattttaatatctatatctcattcggcggccccaaatatagta

SEQ ID NO: 173537 - DNA, 354 bp, Saccharomyces pastorianus
atgtcagttgcgccagtaaccgactggagattttacgattctgtttatactgagaggtacatgcatactcctcaagaaaactttgatggatacgtagaatcaagcgttcataatgtcactgctttggcacaagcaaatagatttttgttgatgcacggaacaggagatgataacgttcactttcaaaattccctaaagtttctggaccttttggatctaaatggtgtggaaaattatgacgtccacgtctttcctgactcagatcatagtataagataccataatgcgaatgtaatcgtttttgacaagctattggattgggcaaagcgtgctttcgatgggcaatttgtcaaa

SEQ ID NO: 173538 - DNA, 372 bp, Saccharomyces pastorianus
gatacaggtaagacctgttacggtatagatgatactttgagggctttatatttgggtgcagtggagaagttaattgtttttgaaaatttgaaaactgtcagatacacatttaatgacgctgagggcaatgaggtcgtaaaatttgtggaaccagaaactaagggtaaaccccacgccattgacaaagcgactggccaagaaatggatgctgtctctgaagagccttttatcgaatggctagctgctaaccacacgatccatggtgtcattttagaatttgtcacagagaggtcttctgaaggtagtcgattcgttaccgagtttggtggtattggtgctatgctacttaataaggtcaacttttatacttga

SEQ ID NO: 173539 - DNA, 117 bp, Saccharomyces pastorianus
gaacggaacatatgtgatcatggaatagagtttacgaatcctacggatgttaatagaataaattcgctgttcagtggtaagcagtaccaaagacagtgcactccaagaaacccccga

SEQ ID NO: 173540 - DNA, 588 bp, Saccharomyces pastorianus
aacatcgaaaacatagagctcaatgctgccataggtcaagatgggatctccgagtctagatttgtcgtaatttttgagaaactatcgaaaatcactcgttttgtttttttttggataaattttgctactccattattgttttatttaaaagagcaacacccaaaagtcgccatcttcggactggcgcgaaatggcttaactttggcagcggtcccatttatcttagtgcgtaatttcaatggattatcaaagaagcaagagccaaaaagatgttcaaaagccatgtgttctcgctgtgctgctaggaagcaccatcctaaattgttctctttcaaattttgcttaattatgctggtgctgccctgtttcccactctattcggcttttagaatcaattttttctttagagataaccagaccattgatctataccgattgttccaactactcggctggcagattagtgtaattgttagtgtgaatataaccactttttactacgaacaattccagtcgcataatggccctcttgaagtgaatagtgacgcctttgaaagggaagctgtagtcgagagcaaaatcgtttag

SEQ ID NO: 173541 - DNA, 219 bp, Saccharomyces pastorianus
atgattgttgggattccattgttgataaaggctataatattaggtatacagaatatactaaaagttctcctcgagggtagaggaatcctcaaaggggaagcgatatttctacataatattattacgattattcctcattccgttttatatgtttcattatcctattacattatcaatccttgcacttcagcttcctctaacttcgatgacagtttctca

SEQ ID NO: 173542 - DNA, 549 bp, Saccharomyces pastorianus
atggactgttccctggcattgaaaaatgaagatatagataaagtgatgggacatccttcgagtagtaagttgatggattcttcaatcaaaagttttgttcaaaaacataatcgtaactataaatggtgcccgtttgctgactgtaaatccatcgtgcacttgcgagatacgtcatcattaccagaatatacccgtttgcattattcacctttcgttaagtgtaattcatttcatagattctgtttcaattgcggattcgaagttcattccccagcagattgtaaaataaccactgcttgggttaaaaaagccagaaaagaatcagaaattttgaattgggtcttgtcccacactaaagaatgtccaaaatgttctgttaatattgaaaaaaatggtggctgcaaccacatggtttgctcaagttgtaaatacgaattctgttggatttgtgagggcccctgggcgccccacggtaagaacttttttcaatgtacaatgtataagaataatgaggataatcaaagtaagaaccctcaagacgcttataaa

SEQ ID NO: 173543 - DNA, 327 bp, Saccharomyces pastorianus
atgccatatgtgctgctgccactaattctttccgcagcgcttccttcagatggaacaatggatatggttatcaccgatgcaagaacctcgttgacgaggatggcaccaatcctgctgggactagataagggttcccatgttttacaaccggaagtcttacactctaaaattttggcatacaagataataccaaagctagggaacggcttgttctctgtcgatggcgagaaatttcctctagagccccttcaagtcgaaattatgccacgcttatgcaagacgttactgagaaatggccgctatgtggacacagatttcgattctatg

SEQ ID NO: 173544 - DNA, 258 bp, Saccharomyces pastorianus
tcttcgtttaatttctgttttcttagcgcatcctctgcaattaatctttgtctctcttcttcttctttttctttctgtagcttttcttgttctagccttttctgttctctaatacgtttcctttcttcttccctcttgcgttttagttcctctttctgtttccgttgtttttcttgcatttcttctctccgctgctgctcttccaatctacgctttctctcctcgtctttcttccgtttggcttcttcaacctttttc

SEQ ID NO: 173545 - DNA, 327 bp, Saccharomyces pastorianus
gccaactacgaaaaggtctggccaacatatggtacgaatgaagactgctttgccttgatcgaaaagacacataagcttggtatgaaattcatcaccgacttggtcatcaatcactgttccagcgaacatgaatggttcaaagagagcagatcctcgaagaccaatccgaagcgtgactggttcttctggagacctcctaagggttatgacgccgaaggcaagccaattcctccaaataattggaagtcctattttggtggttccgcatggaccttcgatgaaaagacacaagaattctacttgcgtttgttttgggggatcctctag

SEQ ID NO: 173546 - DNA, 402 bp, Saccharomyces pastorianus
ttggagaaagcaggagtaaaagatatagatactgcacggatctacccagatagcgaaaaaatccttggcgaattccgggttccaagtagatttactattcatacaaaggctagcggattttcagctggatgtttaacaaaagataacattaataagtctattgaagagtcgttgagcctgctaggcgttccaaatgttgaaacatattttttgcactcgccagaccctgaaactcctattgaagaaactctcggcgcaataaactctctgtatgaacaaggtaaattcaaaaagtttgggttatcaaacttcgcaacggaggacgtgaagcgcatccacgaatatgcaaaaagcaagaattacgtcttaccaacagtgtatcaaggaaactataacgcgttc

SEQ ID NO: 173547 - DNA, 1302 bp, Saccharomyces pastorianus
atgggacaggacgatttactttttagtatggatgatgttctacaagaggtcttcagaatacagctctatttgaataagatgctgccgcacaactctcacaaatggcaaaagccatccccctttgactccgcaaacttactacttaacttcagagactggacaactgacaatgctctcctccaagagttgctactatcctatcccacaattaataaaaacaaacacaaaaatcactccgtccctcgtctaatacaaatctgggtagagtcttattggcaagatagtgagacaacattaaaagatatcctcaatttttggtacagtcacttggctgaatattatgaataccaagaactgtttgcagacatagttcagctgtttataaacaaaaaaagaacgaggcaattgaagattcattacattggtctaactgataaggaaatcgaagaaaataaaccgcccctggactacgaaaacttatttctccaatacgagatagacaaaacgaacgcaaatgatgaattgtgcggtgcaactgacctcagtgatttacttttccaatggaaacagggtgaacctctagaagtcgaagccttcgctctaaacgtatctccatggtcacttgcaaagacattgactctcttagaatcttctctttacttggatattgaaacaatagaattcacaagacatttcaaacacaacgatacaacaattgactccgtgtttacgctttccaaccagttatcgtcctacgttcttgagacaactttgcagcaaacgcacaccatttcctactggttacaagttgcactgtcttgtctatacttacgaaacttaaactcacttgcttcaatcattacatcattgcaaaatcattcaatagaaagactatctctcccgatagatgttaaatcagaccacctttttcagcgcctaaaagtcgtcgtacatccaaacaacaactacaacgtttatagaagaacaattaaacatattttccacagtcagcttccttgtgtaccttttacatcactgcttatcagggacattaccttcataagagacggaaacgatacattcactaaagatggtaataacgtgaatatgcaaaagttcaaccaaatcacaaagatagtcgcttttgcgcaatatttacaacaaaagcaatatgaagatatacactgttcaaatactactgcaagaagcttattaggggctatgataaaggtgcacactttatataacgacaacaaagacagggcgtatcaagtcagtatagctaaggttccaaggcttacc

SEQ ID NO: 173548 - DNA, 84 bp, Saccharomyces pastorianus
caagcttatgatttaaagtcaagagtacaagtggaccaaaatgcagacgcatcagtagaacagaatattcttgctgtactttga

SEQ ID NO: 173549 - DNA, 1179 bp, Saccharomyces pastorianus
tacgaaatcacttcgcagtggcaaattggcttgaacatgtgtgttctttgtggtgaaatgattggtctacagataaccacttacatggtcgagttcatgggtaatcgttatacaatgattacggcgctttctcttttgactgcttatatctttatcctttactattgcaagagtttggccatgattgctgtaggacaaattctttcggctatgccatggggttgcttccagagtctggctgttacctatgcttctgaagtttgccccctggcattgagatattacatgaccagttactccaacatttgttggttgtttggtcaaatttttgcttctggaatcatgaaaaattcccaggagaatttgggaaactccgacttaggttacaagttaccattcgccttacaatggatctggcctgcacccttaattattggtatctttttcgctcctgagtcgccttggtggttggtaagaaagaataagatcgtggaagccaaaaagtctttgaacagaattctgagtggcactgttaccgagaaggagatacaagtggatattactttgaagcaaattgaaatgaccattgagaaggaaagacttcgggcatccaaatcggggtcatttttcagctgtttcaagggagttgatggaagaagaacgaggcttgcgtgtttgacttgggttgctcagaacagtagtggtgcagtattacttggttattcgacgtacttctttgaaagagcaggcatggccactgacaaggccttcactttctcgctaattcaatactgtcttggtttggcaggcacgcttggttcctgggtaatatctggccgtgttggtagatggactatactgacctatggtctttcattccaaatggtttgtctatttatcattggcggaatgggttttgcatccggaagcagtgctagtaacgctgctggtggcctactgcttgctttatctttcttctataacgcgggtatcggagctgtcgtttactgtattgttgcagaaatcccatccgcagaattaaggaccaagaccattgtgctggcccgtatttgctacaatctaatggccgtcttcaatgctattctaacgccctatatgcttaacgtgagcgactggaactggggtgccaaaactggtctatattggggtggctttacg

SEQ ID NO: 173550 - DNA, 117 bp, Saccharomyces pastorianus
tctctacaagaagttctcctcgaggatctaggaatcctcaaaatggaatctatatttctacatactaatattacgattattcctcattccgttttatatgtttcattattacattat

SEQ ID NO: 173551 - DNA, 465 bp, Saccharomyces pastorianus
cctaagaaagattgggagttggtagaccttttggtcgttaatgaaattgagggtcttcaaatcgtggaaagtgtatttgataatgaacttgttgaagaaataagggagaagataaaggacgactttttaggagaatatcgtaaaatttgtgagcttttgtatgaaaaactcatgaatcgaaagaaaagaggaattgtggttatgactttgggttcgagaggggtgcttttctgttcgcacgaaagccctgaagtacaattccttccggctattcaaaatgtttcggttgttgatactacaggagctggagatactttcctgggcggtttggttactcaattgtatcaaggagagaccttgtctacggctataaagttctctactctagctagttcattgaccattcaaagaaaaggtgctgctgaaagcatgccactgtataaagatgttcagaaagatgcataa

SEQ ID NO: 173552 - DNA, 1392 bp, Saccharomyces pastorianus
atgaatcaacctcaaattggcacttacaatgtaggtacacagttaacagttgggtcacatcaggttgagatcattaaatatctaacaagcggtgggttcgctcaagtatattccgcgttaatcaacccacctgacccacattctaattcaagcgttgcatgcttaaaaagagtcattgttccagacaaacctagtctaaacactttaagagctgaagtagatgctatgaggttgctgaaaaacaataggtatgttgtatcttacattgattctcatgcagctaaggcaatgttacataatggttcgtatgaagtattcgtcttaatggaatattgtgaaagaggtggtctcattgattttatgaacacaaggctacaaaacaggcttcatgaatttgaaattttgcaaataatgagccaagttactcaaggagttgccgctctgcatgctttgcaacctccgttaattcaccgtgatataaagatagaaaatgttcttatctcagccaataatgagtacaagctttgtgactttggttctgtatgcggtattataaggcctcctaggaattcacaagagctatcatatgttcagcaagacattttgaaaaacacaactgcacagtaccggtcgccagagatgattgatacatttcgcggtctgccgatagatgaaaagtcggatatatgggcgctgggtatttttctatataagctttgctattacacaacaccgtttgaaaagggcggtgatcttgccatattaagcggaaagtttgaatttccattgtatccgaactacagtgaacagttgaaaggcttaatacgtgatatattggttcaagatccgcgccataggcctaacgtttatcaactactgaagaggatatcaattatgcaaaatgttccgtgtccaataaatgacatacaagtggttcaggcgcccagtagccatttgaatttgaccgaacttcatcagctttcggcaacacaaaatattctaagcttgaactctcccacaaccatggaaaatacgatgccgaacgctacatttcaaatcagcatggctgataatactacaacagcacaaatgcatcctaatagaaaaccatcacaaatagcatatgacgctagcttcagtaattccgccaaaggttctcaaccactttttgacaaatcacagaatatgtaccacgcattggatcctccacttgttgaaccgctagcgagtagtgtttcaaataatgacaacgaactcaaggcaaattccgcaaccaagttaaagcaggcaattgtctctgaagcacatacttttaggcagaataattcaatagactttccactacaaaacataataccccagtacgaagattcttcttcctcttcagatgat

SEQ ID NO: 173553 - DNA, 468 bp, Saccharomyces pastorianus
tacaacaagaacggttcatcggagcctcgactaaagacgcttgacggactcacttccgagcgctggattcaatggttaggccttgaaagcgactaccattgttcattctccagtactcggaatgcggaagacgtagtggcaggtgaggcggcgagttcagatcatcatcaaaaaatttcaagagtaacgcgaaaaaggccccgagagcccaagagtacaaacgatatcctcgtcgcaggccagaaactctttggcagctcctttgaattcagggacttgcatcagttgcgcttatgtcatgaaatatacatggcagacacaccctctgtggcagtacaggccccaccgggctatggtaagacggagttatttcatctccccttgatagcactggcgtctaagggcgacgtgaaatatgtgtcgtttctgtttgtaccgtacacagtgttgcttgctaattgcatgatc

SEQ ID NO: 173554 - DNA, 708 bp, Saccharomyces pastorianus
atgcaatctcatttagaaaataatgatgctgatgaaaatatcaaactagacaagttgaaccaaagcatctctgatgagcctaatgcatctttagtatcagggaatatcactcttcctgaagacatgttcaagtctcacttttattatttattatacgagatttctcactttaaattaggtatgttttttgtcattttacttgtaatttcaatttcatcggttctaatctttaatgttaacgatggtaacctcatcgtattcatatttttgtttttgttttcaatttttggttcaatagcgtcattgattacatttaacgaatcgattaaagatgaaaactttaaaataaaactgttactggaggtaataacacgtaaaccgccggtagaggggatagaatggaggactattacacacaacatgaatcaatatatatgcgataagggatattggcctactccatactacttttactgtgaacatggttgctataatagttttcgtgacctaattaaagcaaagaatcccgatgcacattcggatccatcaaccggcgatggggctgataaacaatttattacggatgcgagagacgctccgaatgatggcgacccaattttagaagaatattttattaaggcagctgaaattcaaaaacaggccgtacgagaatattggaaaaagcagtatccagatgctgatgtgcct

SEQ ID NO: 173555 - DNA, 114 bp, Saccharomyces pastorianus
atggaatccatatttctacataatagtattacgattattcttcactctgttttacatgtttcattatcctattacattatcaatccttgcatttcagcatcctctaacttcgac

SEQ ID NO: 173556 - DNA, 996 bp, Saccharomyces pastorianus
atggagcgaacaaatacaacaacattcaaatttttttcattgggaggaagtaacgaagttggacgatcatgtcatatattgcaatataaaggtaaaacagtgatgctcgacgcaggaattcatccggcatatcaaggattagcttcattacctttttacgatgaatttgatctttccaaagtcgatatcttactgatatcacatttccatttagaccatgccgcttcacttccgtatgtgatgcaacggactaactttcaaggcagagttttcatgacacatccaaccaaagccatttacagatggctactgcgggattttgtaagagttactagtataggttcttcatcctcctctatggggactaaagacgaaggtctattctcagatgaggatttagttgattctttcgataaaattgaaacggtagactatcattctactgttgacgtcaatggtatcaaatttacggcattccatgcaggccatgtattgggtgcagcgatgtttcaaatagagattgctggccttagggtgttattcacaggtgattattcgagaggagtagatcgtcacttaaattctgctgaggtgcctccactttcatccaacgtattaattgtggaatctacctttggtaccgctactcacgagccccgtttaaatagagaaaggaagctaacccaactaatccattccacagtgatgagaggaggccgtgttctactgcctgtttttgctttagggagagctcaagaaatcatgcttatactggatgagtactggtctcaacatgctgatgaactcggtggtggacaagtcccaatattttatgcatcaaatttggcaaaaaaatgtatgagcgtttttcaaacctatgtaaatatgatgaatgatgacattagaaaaaaatttagagactctcagactaatcccttcatattcaaaaatatatcttatcttagaaacttggaggattccaagaatttggtccca

SEQ ID NO: 173557 - DNA, 195 bp, Saccharomyces pastorianus
gacaagaaacaagaacaagaaaaccgcgcggacgaaggcgacaagcccaagccatgctgtgtttgcaagcccgagaaggaggagcgtgacacctgcatcttgttcaacggacaggactccgacaagtgcaaggagttcatcgacaagtacaaggagtgcatgaagggctacggcttcgaggtcccaagcgcgaac

SEQ ID NO: 173558 - DNA, 126 bp, Saccharomyces pastorianus
atgttgactggtattgccccagaccaagtgactagaatgatcaccggtgtcccatggtactccagcagattaaagccagccatctccagtgctctatccaaggacggtatctacactatcgcaaac

SEQ ID NO: 173559 - DNA, 165 bp, Saccharomyces pastorianus
atgaggcctcttttgaaattacaagaaaattctgttatcttaagaactccacaatgccagacagactataagatcacgtcagattacattcaagatcttttacctgatttcgaccagaccaatccggatgcttggttatctgaacaaaaggcctccaagaatttc

SEQ ID NO: 173560 - DNA, 360 bp, Saccharomyces pastorianus
atgcgagttctcatcggaacgaaattagtgactgaaggaattgacattaagcaattgatgatggtgatcatgcttgataatagacttaatattattgagctcattcaaggcgtagggagactaagagatgggggcctctgttatctattatctagacaatacagttgggcggcaaggaatcgtaagggtgaattaccaccgaacaaggaaggctgtataaccgaacaggtacgcgagttctatggacttgaatcaaagaaaggaaaaaagggccagcatgttggatgctgtggctccaggacagacctgtctgctgacacagtggaactgatagaaagaatggacagattggctgaaaaa

SEQ ID NO: 173561 - DNA, 186 bp, Saccharomyces pastorianus
tgctgctgctgctgctgctgctgctgctgttgttgtggttgctgtttctgttgtggtttctgttgtggttgctgctgctgctgctgctgctgttgctccatctcttttaacagcagctgtctcttcttagactttcttattggcttgtacttgtattctgggtattttctctcgtgttctaacttt

SEQ ID NO: 173562 - DNA, 204 bp, Saccharomyces pastorianus
caggattttgaatccctgcatcagtccgttaagaaaaataagctcgctgacaagttgaatgcagaagaactttacatggtcaagggccgtaatgagccttgtaatatggaacaagtagcaattgtcgtatcggaagtcaaggacgtggatctggctactttgatagataccacgtggaagacgacctgtaagatatttggagag

SEQ ID NO: 173563 - DNA, 891 bp, Saccharomyces pastorianus
atgggaggtgaagacgaaatattaagcacgatggaggatattgcggcagtttacgatgtcctggtaattggttgcgggcctggtggctttactgcagcgatgcaggcttcgcaagcaggtctgctcacagcatgtgttgaccagcgtgcctcgctggggggcgcctaccttgtagacggggcagtcccgtccaagaccttgttatatgagtcttatctttatcggctgctacaacagcaagaacttatcgagcaacgtggcacgcggctgtttcctgcaaaattcgatatgcaggcggcccagagtgcactcaaacataatatagaagagttgggcaatgtgtataaacgtgagctatctaaaaataatgttactgtgtataaaggcacggctgctttcaaagatcctcaccacgttgagattgcgcagcgcggcatgaaaccgttcatcgtagaggcgaaatatattgttgtggcgaccggatctgcggttattcagtgtcctggtgttgcaatagataatgacaagataatttcatctgataaggcattgtcactggattatataccttcacgttttactatcatgggaggaggtacaattggactagaaatcgcatgcatattcaataatttgggctctcgggttactatcgttgaatctcaaagcgagatctgtcaaaatatggacaatgagttggcttctgccacgaagaccctcttgcagtgtcagggtatagcttttcttttagacactagagtgcagctcgcggaagccgatgctgccggtcagctgaacatcaccttgcttaacaaggtgtcaaagaaaacatatgtacatcattgcgacgtcttgatggtttctatcggtagacgtcccctgctaaaaggt

SEQ ID NO: 173564 - DNA, 132 bp, Saccharomyces pastorianus
gacaatcggatatcgcacaacagcaacaacagcaacaacaacaacaacagcaacaacagcaacagcagcaaccagacatcgcgcaacagcaacctcaacagcaacttcaacttcaaccacttcagccacaac

SEQ ID NO: 173565 - DNA, 282 bp, Saccharomyces pastorianus
acttcttcttctggagcaatggttaggtccaatgattgttggcattggccttctggagacaaagttaaaagaacagattcttggaactcgtcgtcttcgtcatcatcttcatcgtcttcgtcactttcactttcactctcgctttcaactttcttgcccttgttcttcttcttcttttcagttttttcttcttcttcttcttcttcttcagcaggggattcttcgtccatttcgtcttcatcgaaatcaccgcccaaaaagtcgtcgtcgtcgtcttcaaaa

SEQ ID NO: 173566 - DNA, 453 bp, Saccharomyces pastorianus
acaaactgtatcaagtttcgtaccgaatgtgtattcactcaacaagacttaaggaacaacagatattctacgacttacgtagaagctttacagagccagattcggtctttgaaagaacagttgcaaatattaagttcctcgtcttccacaattgctagcaatgctctctcctcgttaaaaaacaacagtgatcatggtgatgctcctaatgaaaaaatcttaaagtatggcgaaacagaacaatcagcactaccatcatctgaaagcaacgatgagaatgagtctgatgcgttcaccaagaaaatgccttccgagagccctccaccagttggcacaaatagtatatatccatcagattccttgtctataataaaaaagaagacggatggaagcacaagataccagcaacagcaggtcagcctaaacaattatctcaggaagtccccttatctt

SEQ ID NO: 173567 - DNA, 129 bp, Saccharomyces pastorianus
aacatgaacacgaacacgaacacgaacacgaacacgaacacgaacacgaacacgaacacgaacacgaacacgaacacgaacacgaacacgaacacgaacatggaaacattcaagaaaagaaagagcagg

SEQ ID NO: 173568 - DNA, 309 bp, Saccharomyces pastorianus
ggcaacactttccatagatcctggtatgttcctcaaggtgctcgtgtttacactgggaagttccagtgctctaacgatacctatgttagatacgtcatcaacgacgctgtcgttccaattgaaacctgttccactggtccagggttttcttgtgaaataaacggcttctacgactttgctgaaaagagagtagctggtactgatttccttaaagtctgtaacgttagcagcgtcagtaactctactgaattgacctttttctgggactggaataccaagaactacaacgacactttattaaaacagtag

SEQ ID NO: 173569 - DNA, 1059 bp, Saccharomyces pastorianus
tatttagtggatcgaattggtagaagaccagtccttcttgctggaggtgtcataatggcaatagcaaatttagtcattgccatcgttggtgtttccgagggaaaaactgttgttgctagtaaaattatgattgcttttatatgccttttcattgctgcattttcggcgacatggggtggtgtcgtgtgggtggtatctgctgaactgtacccacttggtgtcagatcgaaatgtaccgccatatgcgctgccgcaaattggctagttaatttcatctgtgccctgattacaccttacattgttgatgtcggatcacacacttcttcaatggggcccaaaatattcttcatttggggcggcttaaatgtcgtggccgttatcgttgtttatttcgctgtttatgaaacgaggggattgaccctggaagagattgacgagttatttagaaaggccccaaatagcgtcatttctagcaaatggaacaaaaaaataaggaaaaggtgcttagcctttcccatttcacaacaaatagagatgaaaactaatatcaagaacgctggaaagttggacaacaacaacagtccaattgtacaggatgacagccacaacataatcgatgtagagggattcttggagaaccaaatacagtccaatgatcatatgattgcggcggataaaggaaatggctcgttagtaaacatcatcgatactgcccccctaacatctacagagtttaaacccgtggaacatccgccagtaaattacgtcgacttggggaatggtttgggtctgaatacatacaatagaggtcctccttctatcatttctgactctactgatgagttctatgaggaaaatgactcttcttattacaataacaacactgaacgaaatggagctaacagcgtcaatacatatatggctcaactaatcaatagcccatctactacaagcaacgacacatcgttctctccatcacacaatagcaatgcaagaacgtcctctaattggacgagtgacctcgctagtaagcacagccaatacacttccccccaataa

SEQ ID NO: 173570 - DNA, 276 bp, Saccharomyces pastorianus
  modified_base (258)..(258): a, c, g, t, unknown, or other
tctgctaagaaaggtgctacacttttcaagactagatgtctacaatgccacaccgtggaaaagggtggcccacataaggttggtccaaacttgcatggtatctttggcagacactctggtcaagctgaagggtattcgtacacagatgccaatatcaagaaaaacgtgttgtgggacgaaaataacatgtcagagtacttgactaacccaaagaaatatattcctgtaccaagatggcgacctgcaggcatgcaagcntggcactgccgtcgttta

SEQ ID NO: 173571 - DNA, 183 bp, Saccharomyces pastorianus
gcggaggacataaagaaacccgccaaaattgcagtttcgccacatcggacactacagagctcaccagggagtgataatagttctaaaagctctcgcagtagggggaatctgttatctgtggaagctagaagaaaagttacaccctccacctacctagaagatatgttagagggtaaggaaaca

SEQ ID NO: 173572 - DNA, 243 bp, Saccharomyces pastorianus
gccgctgctggatctttgattggtattggtgaaattgttcttttgccgctggacgtgttgaagattaagagacagaccaatcccgaatcgttcaaaggtagaggtttcatcaagattttgagagacgaaggcctgttcaacttatataggggattggggagtggacggttgccagaaatgctcccgggttcattcgcccttataggtgggaatgcttccgccaaggaatatatctggagttga

SEQ ID NO: 173573 - DNA, 1299 bp, Saccharomyces pastorianus
atgcctgcaggtcattcctccaaagcatatgttatagcagtagcagaagtatattttccaacagaagctttatcatttcttcaggagttaatccttgacagcaactcaactctatacaacaatcctcaaaccccgctacgaaccttagctggcctaatcgatagtagtattcccttaggaggtttaacgttgtatggatccaacaatgggtgttctatatgtgattcatcaccgagtgtttcagattcttcaaataaaagctcaacagggaacgctggaactaatgagtacggctctttagacgattttgctaactcattaaccgatcatatgccttggagaattacaaaaagatttatcatatatctaacttgtttgacagctggcgtactcatgtggttactacttgcattgcttgctttccgtcacaggaacattttattaggaagacgtccgagaaattgtattgaaaaaactcccaataatgaaagaggacttgaaggtattggggttagcacctcccgctcatcttctgaaaaccataattataacgaaaagaatacaaacaatgaaagcgaaagctttcacttaatggaagacgatcgatatatcgccactggagaaaacacgatttatagcgccacccacggattgcattacaccgtagatgaagatggcgacttattttatagaaaatcgatgcctgatgattttgacgaaataaatgaaaatgaagattcgggtatagatagcattttaagagaatgcgtgtatgacaaacatcaagatacgaccgaggcttatttaaacgacgaagaatcgatctcaagcaatctagatgttgatgaaaatggtaatattaggttatacgacacttattccgatgaagatgaaccaaactgttcccatttgcaagacgaagttatcgaagactacaataacagccatgtgtacaaaatgcaacttcaaggattagaaatcggttcatatactacaggagatgatccaaacacaggaaacttgatcacaaacgagttctcttcaggtagtcagacgtgcttgccaagcaccgcctatactactccgcttgatacagattcaatcaaattacacattttaggtcatgcaggctcttcattgcagaaaccagttcaagcctttatttctaaccacgaagagcttgaaatagaggacattgatgacaatggtagtgtctcagacattcaagtcgaagagttagatgctttagatgaggagctttacaagagaatgtcaaagattgtaaaacaacagaacaac

SEQ ID NO: 173574 - DNA, 477 bp, Saccharomyces pastorianus
aaatcaggaacggtctcgctcaataatactgttaaagatgggtctcagacacctactgttgattcagttactaaagacaacacggcaaacggtgtgaactcctccattcctactgtaactggctcttctatccctcccgctagtcctactactgtatccgccattgaaagtaatggactgtcaaatggttcaactagtgcagctaacggtttggatggcaatgcatctacagcgaatctagctaacggaaggccgttagtgacaaaactagaggatgcaggcccagctgaagaccctactaaagttggaatggtcaagtacgacggaaaagaagtgactaacgaaccggaatttgaagaaggaacaatggatccactagcagatgtggcaccagatggaggcggtagggccaaacgaggaaatttgagaaggaaaactcgtcaattaaaagttctgatgagaacgccaaaaagctga

SEQ ID NO: 173575 - DNA, 99 bp, Saccharomyces pastorianus
gatagagccagagacgaagcggacgaagacgaagaagacgcgaacgcaagaagctccggtaagaagaaggacgccaacaaaggggaatctctgatctaa

SEQ ID NO: 173576 - DNA, 240 bp, Saccharomyces pastorianus
tcaaatgcaacagcaacaacaagcccaggcgcaagctcaggctcaagcgcaagctcaagcgcaggctcaggctcaggtgcaagctcaggctcaggcgcaagctcaggctcaagcgcaagctcaagcgcaggctcaggctcaggctcaagcacaagctcaggcacaggctcaggcgcaagctcaagctcaagcacaggcccaggcgcagcaacagccccctcaacagccacaaactcaagc

SEQ ID NO: 173577 - DNA, 456 bp, Saccharomyces pastorianus
gtgctggtagagatcatgatggttactactggactcaggggtagagttgacgacgttgtaaatgtttccggtcatagattatccacatcagaaattgaagcatccatctcaaatcacgaaaacgtctcggaagctgctgttgtcggtattccagatgaattgagcggtcaaaccgtcgttgcatatgtttccctaaaagatggttatctacaaaacaacgctactgaacacatcacaccagataatttacgtagagaattgatcttacaagttaggggtgagattggtcctttcgcctcaccaaaaaccattattctagttagggatctaccaagaacaaggtcaggaaagattatgagaagagttctaagaaaggttgcttctaacgaagccgaacagctaggtgacctaactactttggccaacccagaagttgtacctgccatcatttctgct

SEQ ID NO: 173578 - DNA, 690 bp, Saccharomyces pastorianus
gaacatttactgataacgaagaacaattctcaacagcagaaggactattcacacgtgccatgcaaattttttaagatgggcaattgccaagctggctcgtcttgtcccttttcccattccccagatattatcagttctgcgaataatttaccttgcaagtatttcgcaaagggtaactgtaaattcggtaacaagtgtgttaatgctcatgtgctgccaaatgggttcaagatgaacagtaaagaacctattgacatcactcccccttcacaaaacaactacttatcccatgctagatcagcttctttctctacctacacgtctcctcctctgtctgcacaaacggaattctctcactctgcttcgaatgcaaactacttttcctcgcaatacctaatgtattcgcctcagaaaagtccagaggccctatatactgaattcttttctcccccttcgtcttcttcttcgtacatcaactataactataataactccaacattaatgcctattctccagtctcttcgtcttcatctaacatttggcaagagcaaggccaaactacgttatcgaatccgagtgtgaatcagaatttaaggtatcgtacaggccctgcaattcaagaagaatcagataatgaaattgaagatttacttattcacaatttcaattccagatactgtcatgaatga

SEQ ID NO: 173579 - DNA, 411 bp, Saccharomyces pastorianus
tctatacagagtaatactgccctagaaaagaagaagagaaagcctgatacaatcaaaaaggtaagcgacgttcaagttcaccatactgtacctaatttcaataacagttcagagtacatcaacgacatagagaatcttataatatctaaactgatagacgggggaaaggagggtattgcagttgatcacattgaacacgccaatatctcggacagtaaaacagatggaaaagttgccaataagcacgaaaatattagtagcaagcttagtaaagagaaggttgagaaaatgattaattttgattataggtatattaaaaccaaggaaaggactagtatgtataattatttttttttttttttttatgttcttgccagtggaggaatgtttctttcgtcacaaccggagtga

SEQ ID NO: 173580 - DNA, 222 bp, Saccharomyces pastorianus
gccaagccagaggacgttaagaggagaagctacagaaattacggcctagatttgattagaggtaaaattgtggacgagattcacgctggtgttcttgagccaaccataagcaaagtcaaatccttgaaatcagcattggaggcttgtgtagcaattctaagaattgatacaatgattacagtggatccagaaccacccaaagaagatccgcacgatcattga

SEQ ID NO: 173581 - DNA, 81 bp, Saccharomyces pastorianus
gcaaaggcaaagtgttccgaaagaggggtcgtcatcaatgcagaagacgttcagcaggctttaaataagcatatgaactaa

SEQ ID NO: 173582 - DNA, 126 bp, Saccharomyces pastorianus
atggatcatccacgtaagtggcaccgtaagctcgtcaatggcaacagccactttatttataagagccgcggtcattttgttagcatctcttctcaactttggcagcacaatttcacgatattcaac

SEQ ID NO: 173583 - DNA, 135 bp, Saccharomyces pastorianus
ataaattttgtcataactgttgggattccactgttgttagagactataatattagatatacagataatactagaagtcatacccaaagatatagaaatctacaaaagggaatcggtgtttctacacaatatcatt

SEQ ID NO: 173584 - DNA, 168 bp, Saccharomyces pastorianus
gatttctaccaagaaaaattcggtaagaatgatataaatggcctgctatttctgtatcgctatcgcgatgatgttccgatcggaagctctaatttgaaagaaatgattattagcagtctttctcccttggagcctcactcccagaacgaaattctacagtattacttg

SEQ ID NO: 173585 - DNA, 216 bp, Saccharomyces pastorianus
aacgacagtaaccgcaaaattcgctttggaacacataaaggagcttccggaagatccaccctaacattcttcgatgcgatcgaaactggaaagtggacttggataacattgagtgaaacatataatgagttgacgtatgagaacataaggaagcaatgtcaaatgaaggataacagtatcattgaaaaccacttaatccagttacaagatattttc

SEQ ID NO: 173586 - DNA, 324 bp, Saccharomyces pastorianus
acttcaaccttattaatttcttcttcttctttttctgccttgttatctatgcttttgcttggctcttctggggtcacctcaaccttattaatttcttcttcctctttttctgccttgttatctttggtatttacttcttcctctttttctttttcagccttgtcttctgttttgtttactgtttcattttctatctcattttctgttttcctttctgctccatcatcttcgccttccactttgccttgtacttcctcttgtacatcttctatcgatttattttctgtcacatcttcttcattgttcgctacgctatcttgtttt

SEQ ID NO: 173587 - DNA, 390 bp, Saccharomyces pastorianus
ctgatcattgtttgtgatgatcctacgaaagcaccacaattcgatttggacaataatcatgtcattacatgggtagagattatagatgggtttggtaacgatccagagttccaatacacaccgccagatgacaattctgatgacaagaaactgtttgcgtacgtagcctcaccatggaatggaactaacagcttcaatcagatatgcctggtgagtaacattgcggaatttatcaagagttttcccctaggtaacgaattgaatagcagtgatcatttaaccatctcagcaaaattagcaagttccagtgcaagcttacaaacctgggggaagctcttcgctgtcttgctacacggtggtctgcatcatttgtcgatcgacggccgattg

SEQ ID NO: 173588 - DNA, 87 bp, Saccharomyces pastorianus
aaaatcaactatcatctactaactagtatttacgttactagtatattatcatatacggtgttagaagatgacgtaaatgatgagaaa

SEQ ID NO: 173589 - DNA, 240 bp, Saccharomyces pastorianus
gcatttacagcttcttcagtcttatcattaaccgattcttgttttacgccattggaggcgtttgattctgtctttgcggtgccagctgtatccgttacgtcttcaaattcatcttccaatgcattttctctagcagtttcatcgttatcatccataacatcttccatctcttcttcctcttcttcttcctcatcctcttcttcttcttcctcctcctcttcttctttattgagctttgct

SEQ ID NO: 173590 - DNA, 144 bp, Saccharomyces pastorianus
atgaaacccttttccgtgcctgttaagtttccgttttcggtcaaaaagaatatccgaattttagatttggaccctcgttcagaagcttattgtctaagcctaaattcagtctgctttaaacggcttccgcggaagaagcatttc

SEQ ID NO: 173591 - DNA, 135 bp, Saccharomyces pastorianus
atggagatgctcttgtttctgaacgaatcatacatttttgatagacttcgtatgtggagtactgttttatggcgcttatgtgtattcgtatgcgcagaatgtgggaattcctattataggggtgccgaggtgcct

SEQ ID NO: 173592 - DNA, 297 bp, Saccharomyces pastorianus
aagcttgaagccctgggtgttccgttcgaagtgaaggtggtgtccgcgcatcggacgccggatgtgttgttcagttacgccgagcaggcgggcccgcgtggcctgcgcgcgatcatcgccggtgccggcggggccgcccacctgccgggcatgatcgccgccaagaccgccgtgccggtgctgggcgtgccggtgcagtccaaggccctcaatggcatggattcgctgctgtcgatcgtgcagatgccggccggcatcccggtcgctaccttcgccatcgccatgcgggatcctcta

SEQ ID NO: 173593 - DNA, 1107 bp, Saccharomyces pastorianus
atggtcttgataaatggcataaagtatgcctgtgagaggtgcataagaggccatagagtaacaacatgcaatcatacagatcaaccgcttatgatgatcaaacccaaaggtagaccttccactacatgcgactattgtaaacaacttcgaaaaaacaagaatgcaaatcctgaaggtgtttgcacgtgtggccggctagagaagaaaaaactggcacagaaagccaaagaagaagcaagagctaaagccaaagaaaaacaaagaaaacagtgtacctgcgggactgatgaggtttgcaaatatcatgctcaaaagagacatctaagaaagtccccttcaagttctcaaaagaaaggaagatccatttctcgttctcaaccaatgtttgaaagggtattgtcttctacttcacttgacagcaatatgttatccggccacggagcactatcagatacctctagcatactgacgagcacatttttagacagtgagccgggtgttggtaaaatttcaaaagattaccatcatgtcccttcattggcctccatttcatccttacaatcctcgcaatcgttagatcaaaatttcagtataccacaaagcccgccgttatcttcaatgtcatttaattttctcacgggaaatatcaatgaaaccaaccaaaatcacagtaatcatcagcattcaaaatcaggcaataactggcaagatagttcggtaagcttgccagcgaaagctgattcacgtcttaacatgatggataaaaacaactctgtgggtcttgacctattaggccattcaaaacgaatatcgccgatatcaaactctcgtgtgggcgaagttagcgttccgctagaagaatatattccttctgacattgatggggttggaagagttactgataaaagctctttggtctacgattggccatttgatgaaagtattgagagaaatttcagtacaaccgcaaccgctgcaactggtgaaagtaagttcgacattaacgacaactgtaatagaattattagcaaaagttatagtaagactaatagtatgaatgggaacggtatgaccaatagcaatattaataatatcaacagtattggc

SEQ ID NO: 173594 - DNA, 126 bp, Saccharomyces pastorianus
attattcctcattccgttttatatgtttcattatcctattgcattatcaatccttgcacttcagcttcctctaacttcgatgacagcttttcataccttatgccatcatctctacaccgtatatga

SEQ ID NO: 173595 - DNA, 366 bp, Saccharomyces pastorianus
atgaataagatcaaatcaagccagaagaactacctacaaaaaagcaatttctataatttcgaaagaaacggcactgaatgggaatatatatttgcatcgaactcagcttgccctgattataataacacagctgttaataatgatgtgatttcatcacttaactattgcatcagtgatgaaagatttgagataactgcagcgatgtgtgtggttttgaagctatctcaagattgttcttttgatgtgaggcttcagcgaagtagaaacgggccatataagtatatctgggatatgccttgtggacaattacaacaacacattggttacgagaatggtatatgctataatagtgaaagtgaaatgcta

SEQ ID NO: 173596 - DNA, 108 bp, Saccharomyces pastorianus
gatatactagaagttctcctccaggatttaggaatccataaaagggaatctgcaattctacacaattctataaatattattatcatcattttatatgttaatattcat

SEQ ID NO: 173597 - DNA, 2169 bp, Saccharomyces pastorianus
atgtgtagtatttttgggtactgcaattttttgattgaaaaatcgagaggtgaaataattgacacattgatcgagggcttacaaaccttgggatacagaggttatgactctagcggtttatcaattcaaggtgacgaattggggtctcttaacatttataaacagactggtaaaataggcaatctagaggaagaaattgctctccgcagccccaatagggacctgccattcatttcccactgtggcattgcgcatactaggtgggcaacacatggcaaggtgaagcgtgccaattgtcaccctcataactctgatccgtctaacgaatttgttgtaattcacaacggtgtcatcactaactttaataatttgaaggttttgttggccagtaagggccacgtgtttaaaagtgacactgataccgagtgtattccaaaactatacaagcacatttatgacataagcattcagctagggtataaccttgatttccatgaattaacgaacttggtgcttaaagaattggaagggtcttacggactgctttgcacttcttcccacttcccagacgaagttattgctgcaagaaagggctctccgctagctattggcgttaaaagtaaagcgaagttgaaggtagactttgtcgaagtggaatacttggatcaaaaagaaaactaccttgagattaacatgtcaagtgatcctaataattattcagcccggacttctgtaaactataatgcttgcttaagaaaatcccccccactacgctcgcaatgtgtgaaggtccctacatatgatgaagatgtctttagcacgaatcacgcatcatccagagaattattgtcagaaggtgagttgccacaacccatagaattttatttgtcatccgatttctcttcattaatgcaatacacaaataaggtgttgtatttggaggatgatgatattgctcacatctatgacggagaagttcatattcattgctctcgaaacgaccgcggtgatctaccgttcagaacaatccaaaccatagaatcagagctgttacaacttgttaaaggttcttacgataatttcatgcaaaaagagatatacgaacagcctgaaacaactggaaatgtcatgcgaggaagaattgacgtctctacgaatcgagtaattttgggtggactagaacactggatgttcgagttgagaagggcaagaagaataataatgattgcatgcagagcctcttatcatgcgtgtctagctactcgtgccatcttcgaggaattaattgagatccccattggtgttgaattggcttcggattttattgaccgcaactgctgcatcttcagggacgatgtttgtatatttgtttctcaaagtggagaaacatcagacacgatttgcgctttaaactactgtttaaaaaaagaggcaattaccgttggagttgttaacactaccggttcttcaatttcaagatttacgcattgtggcgttcacataaatgcaggcccagaaaaaggagctacgtcaacaaagtgttatactagtcagtatattgctttggttatgattgctttatgtctatcagaagataaggtgtctcaagtcgaaagaagaaaggaaataatacaaggactaattttgatcccaaagcaaatcgaagaagtgttcaggctggaatcaacaatcattgatttatgtgataatgaactccgagaccaagaatcggtattggttttgggaaggggtttccagtttgcgtctgctttagaaggtgccttaaagatgaaagagatttcctatgttcattccgaaggtcttctagcgggtgagccgaaacatggagtctcagatctggtggatgaggctttatcaatcattgcatttgcgaccaaagactcgctctttcccaaagtcgtatcttccatcgagcgtataatagcaagaaagggcaatccgattatcatttgtaacaagggagacaagatatgggagcagaaaaaactacaaaaaaatttcgttacgctcgaagtaccacagactgtgaactgtctgcagggagtgctgaatatcattcctttgcaattgatttcctactggttagcagtcaaaagaggtgccgaccttgattctccaatagaaccggcaaagacatccaccgcacaa

SEQ ID NO: 173598 - DNA, 1296 bp, Saccharomyces pastorianus
atgtcgattttctggaatcttgtgttgtttcctgagtggggtaccacatatttgggtaatacgactattgatgctatgaatgagctccataagtccattgactattcgataaatttcttcattgcagttgacccgcacaatagtagccagttgtacagtagagatcctgtttcgttaggcaagctattgaagatgaagtcactgatttcttctaaagttaacaactgtcgagtagtacttcacgagtgcatttatgagtttacttacgcttatgtttcgccaactaaactaaagccaatcatatctactttggaaaatttgacagtcttcattaatggattagttaatacatgccaattagaatttattttattggcaagacatgataacaagctcaggcctgatgatgtcgcagctttgacactgccaaagaacaaagaaatcagctttgcaaatgctgagaagttgttgaaagttattgacaagttgcatccagtgatttatagtctacaccggacaatgagtgaatgcatgtacatagcaaagttggtacttgctcatgcatttgatgtgaaagtttcaagggttcattcctgctcaatgttcaaagatggtaacttcccaacattcagtaataacgccaataatctgcccaatgatgttgacatccagaacaagatcaatgacctgaagcaggcattagaagaatgtaaagcaaaattcaagtcagaaatgttaagttttgatattgatattatgagtcctagtgatgaaatatttttgttgtctagctttctactaaattttaggcaaactgcagattcaactttggtaattatggagtccgtcaaggacattttagtcaaacgtcaattacaagagaagaagggctggctgagaggcaaaagactttggtttttagtgttgaccaactacgagacattttctatctggttaaaaggcgataggaactcagtgactgaaaatgatacattaaagggtacgttcaatggtaatactaatggttttgctcatgacacagttattagaaggcctgattatgaagagaatgaacttttatctcaaaaagtttcatcgaataagaacattgtaaaagatgatgcatcgctagatctgccaatgacaagtgaacccaaaggaaattcatcttctacctctgacacttcttcgtcgccattaacgttaacgaaaacaactacgttcggaactaatagaacttccaggaggcaaggcagattttcttttatgtccatgcttatttcaattgataagttc

SEQ ID NO: 173599 - DNA, 165 bp, Saccharomyces pastorianus
actccactccatggcccatctctcactaaatcagtaccaaatgcactcacatcattatgcacggcgcttgcctcagcggtctataccctgtgccatttacccataaagcccatcattatccacattttaatatctatatctcattcggcggccccaaatattgta

SEQ ID NO: 173600 - DNA, 789 bp, Saccharomyces pastorianus
gataatcttgaaagacaaaagcaggagcaacagcatgctcaattgcaaagacaacaagaagaagctagacatcaacaagaacaattgaagctacaacaattgcaaagacaactacaagaggaagctcaattacaccagaagaggcaagaagaagcccaattacaacagcagcaagcccaattgctacaacagcaagcccagttccagcaacaacaacccttgaagcaaacaaggactgggaaccagtctatatcggataaatacagcgacttgaataccttgttagcaactggtacagggattcatacttttggtaacactggagaggcacgtattcctgcacaacatacaaagacaggcacgtttataaattctcagggtacaggctacaaacaggttactaatgaacccaagaacaacccttttttaagcaaccaatacactggtttaccaagcacaaatatcgtgcccacgcaaacagggtacgggtttggtaaccaacctcaaagtcctcctactaattctcctcagcaaaatcctactggtataagctactctcagccacaacagcaacaacagccacagcaacaaccgcaatacatgcaaaatttccaacaacagcaacctcaatacgcccaaaacttccaacaacaaccacaatacactcaaaattatcaacaacaaccacaatacattcaacctcatcaacaacaacaacaacagcagcagcagcaacagcagcaacagggatatactcctgaccaaggtgtaagcttaattgatctttga

SEQ ID NO: 173601 - DNA, 72 bp, Saccharomyces pastorianus
agagaactagaaaagttctactccactcaaattgaagaattgccatccgacatcgctactttgttgaactaa

SEQ ID NO: 173602 - DNA, 339 bp, Saccharomyces pastorianus
attgtaaggagtcttcagaaaagcaccataaggaaatatgggtacaatttggcaccctacatgtttttgttactacacgtagatgagctatcgattttttctgcataccaagcaagtttacctggcgaaaagaaagtcgacacagagcggctgaagcgtgatctatgcccacgtaaacccattgagataaagtacttttcacagatatgtaacgatatgatgaacaaaaaggaccgattgggtgatattttgcatattatcttgcgagcatgtgcgctcaatttcggggcgggtccccgtggtgacctgcaggcatgcaagcttgcactgccgtcgttt

SEQ ID NO: 173603 - DNA, 135 bp, Saccharomyces pastorianus
ctcacttcgccaccgatctggactatttgcaacaacccgtccaacagcaacaacaacaacaacaacaacaacaacaacaacaacaacaacagccaggacagactcaaagtctggaacaagaccaggatcaggagc

SEQ ID NO: 173604 - DNA, 528 bp, Saccharomyces pastorianus
ctttcgatttcttgcatatgtttattattcagctctatatcctttttccactgcgattggtactctgtaagccattcttctttttcaagcatatgcttttgttcaacatcgttcaacatttcctgtaaagtggaagggttcatggtgattttatttcttacctcttctattttatctaaaagcgacgctctttcattttcaaactgtttaatcttcataaatttcaatttctcaatttttgttttgtattcattttccatttgtttcagctcttttttattagatgccgctagctgctttaaatgtatttcatgtccttcattcatgaactgcttctttgacaaaaattcttctttaatcgagataagttcattgtttttcaaattcagttgctgttcaatttttatcttttcttcacgaagggtttcaaatttgagattaacggcattgattttctctttcgtttctgttagttcatctttgagtaaatctagtgttgcctttttctcaaataagattgcttgtgtt

SEQ ID NO: 173605 - DNA, 108 bp, Saccharomyces pastorianus
atgcagtggcacagaaacaaccaggaatactatagtcataggcaatacaaggtatatattggctatgcagacccctccagaaagtaccgacgtaaagttagatacact

SEQ ID NO: 173606 - DNA, 1425 bp, Saccharomyces pastorianus
atggacaattgcggtggtaaccttgtcgattactctatatatggtatgcttgtgggaaaagatgtaggatccggaggaatgtgtttggttggtgagagcaaatatagtatcagaataattccatttggctttgactccaaacccgtcagtgagaagaagtgtgtcaaagatttggaaaatttcgatgccgcagttacaaagagactagaaaaaataaaaaatattctctctaaatcaaaacgaacaattgcgattcatgaggaggatattcggggagcagatgatccggcaacgtctccgagaaggaattatttgtggaatcctgagcctgaaaatgttgagaatgacgcagttgaaaagaaatattattctgaagaaggcatcatcgacactgaaataagctactcggcgacctccatgcttaacgcgggtcttaaaagtatatttcgcaaaggcttacataacacgtcctcatctcagctggagaattctatctcagggaagaatcctgagaaaaatggactgataatgataaaagtaaagctacccggtagctctttgccatattggagccctactttaattcaaaagcagaatgtgttctccatgaaaaacaagcaaggccaacaaaactggtcagatttaagaaacctcctctcgagtgaagaaggagaaaaattggagagtctacaaatagagctcgtatgtgtccaggcggctaacaacgttccccatgaacttcctaaccttactagttcacagatagaactggtttgtttaacagaaaaaacagaagactgtaaaccagtggagtttcactctgacctgcttttgaatgagcgcaggtataacgaagttaaaaaagggttccaagaaatgttggaaaccgttaagacgtactgtgacgatttctctcataatcaaacaaggattaactcgctccttactgaagatgcagaagcaagtctgggtaataaggaactcgtgttttctagtttgatgccgttgagtgtaataaatgacgtacaagccttagctcatatggaagttgatgttgctgtaataaagaatgcattggaatcaaaattgattgcggcaaggaatttgcactctaattcttcatcatccagtatgattcctcaagcatctcgtagcataataaagaacgtttcaccaagcagtcatggctcgatattctcgcatgcgagatcaaatgaatggaatcgcgtcaatacaacagaatataggaaaacactctcattgcatgtaaaatttaacgatgaatataagggtactttagtgcctagtttccgaaactgtctatgctctagatcgtattttcttcgagtaaaactttacttcgataaaggcgcagggacgtctcagattgacgttcctatccaaatcagaaactcacacatcaat

SEQ ID NO: 173607 - DNA, 600 bp, Saccharomyces pastorianus
atggccatagaaatctcatttaaaaagaagctcacgaagaatactcttttggaaagagacattgataccgaagacgaaacaaacccatcagaggctttatttttcgtctttgattcatttgcgcccgtcaataatttcctacaagattataacgacctgattgggaaaatagactttggcttggcatttcaatattttccattatcggaatataggcctcatggtttatttcctattattgggcagtataatgagaggtctaccttaacagtagatacgccaaggtctagaggacaagtttcaatgacgatcaatggcaaacattacaaaagcttccttgatatcctgagtctttggaatataaagggtgtcagttgcggacatgaacataataatgactgttgcttacaatcaaaaaatgagatgtggttatgttacggtgggtccgctggtataggcttgccgagaatccaaggtatatatccaaccgttagattatttaacttggatgatattttggacgaaataacttcgtggaagaggaatagcaatcttgttgacgaggtttacgattatcagtacatctataaggggaagcaa

SEQ ID NO: 173608 - DNA, 90 bp, Saccharomyces pastorianus
atggtctctagcgggatcgaaccgctgatccccgcgttattagcacggtgccttaaccaactgggccaagagaccttgtttttgtgttat

SEQ ID NO: 173609 - DNA, 546 bp, Saccharomyces pastorianus
atgtgtttccttctcgagacctcggcgtctcccagatcgaagctcagcacagattttaaaccgccatttacgctccttttatcggtaactaagaaggaaaaaaaaaaagtaccaccacacaatttccagtgtattcattccttaaacttcgtttattttttattcattcattcatttttatttgaatataaccaactactagtccttcctttaaacgagaatttaccctcccttaatttttcaagaaattccagtatgaaattatccgctctattagctttgtcagcctccaccgccgtcttggccgctccagctgtccaccatagtgacaaccaccaccacaacgacaagcgtgccgttgtcaccgttactcagtacgtcaacgcagacggcgctgttgttattccagctgccaccaccgctacctcggcggctgctgatggaaaggtcgagtctgttgctgctgccaccactactttgtcctcgactgccgccgccgctactacctctgccaccgcctcttcctcctcctcttcctcttcctct

SEQ ID NO: 173610 - DNA, 549 bp, Saccharomyces pastorianus
attttgtccctggtaataggggttttggttttattaaatatattttttaatgacaacgaagcttgtgttttcaattctgcaatacttgcttttacttctcttgtaggtttgttaataatattaggtgatggtaatccaaagctagtcagtcgtcgaaattttaggaccgagcttttagtggatgtcatcacacgtaaaccggcagtagaagggaaagaatggaggatcatcacatacaacatgaaccaatatttgtttaatcatgggcaatggcatactccgtattacttttacagcgatgaggattgctaccgttattttctacgccttgttgagggagtaacccccaagaagcaaacagccacgtcaattggcaattctccggtcaccgctaaacctgaagatgccatcgagtcagcttctcctagttccagactgaattatcgaaacttcctgctcaaggcagcggagatcgaacgacaagctcaggaaaattactggcgaaggcggcatcccaatatcgatgcgcttcttaaaaagacggaatag

SEQ ID NO: 173611 - DNA, 240 bp, Saccharomyces pastorianus
aaaaggggtaaaactggtaatgactacgttgaactatttgaagctggttatggtggatctgacttggtaaccaaaattgcaaagcaagccatcaaatattctcgtgatcaaaacttcgatatagtgttaatggatactgccgggagaaggcataatgatcctactttaatgtcgccattgaagtctttcgctgaccaagccaagcctagatataatcacttatggttggagaggctttag

SEQ ID NO: 173612 - DNA, 690 bp, Saccharomyces pastorianus
gataatgatgtcaaggatgacaccagattggacacattgagtgaacctagtgcgcctttgatcacggagaatgttgctcttcccgatgttattttcaagtcccattttctctacctattatacgaaattgctcactttgccccgatgatgatttgtttcggcatactggtggtttccattttattggctctgacctttcacgaccctgccgtttacactatagcttttttgctgtgtggctttgatgtcttatttttagctggtgcactatcttccttcaataacccactcccctctaatagagctttccaaacaaagcttttactggaggcaataacatgcaaaccagcagtgcttagcgaagaatggaggactattgcatataacatgaaccaataccttttcgatcaaggattatggaacaccccgtactatttctactgtggtcggacatgccaccgttttttgttgaagcttcttgtggggaagagtttcgacgtactctcgctttcatctactagccctatcatggaggcacagctcgaggtgccaaccactggctcgtctaatgaagagaacggaactttcacttttagtcctggcccagattttcgaatgtgcctgtataaagctgctgtgatcgaacagcaggcccaacgagactattggagaaagcaatatccaaacact

SEQ ID NO: 173613 - DNA, 537 bp, Saccharomyces pastorianus
ccattgcatggtattccatttttggtcaaggacaattatgctacaaaagataaaatggatactacatgtggttcatggatgctcttgggttctgtagtgccacgcgattctcatgtcgtatccaaattgagagatgcgggtgctgtattattcggccactctacgttaagtgaatgggcagacatgagatcatcagattactctgagggctactccgccagaggtggacaagcacgttgtccttttaatcttactgtcaatccaggtggtagctcctctggtagcgctagctccgtagctgctaatatgataatgttttctttgggtactgaaactgacggtagtattatcgatcctgcaatgagaaatggtatcgttggttttaaaccaaccgttggtttgacttcaagatctggtgtaattccagagtcagaacatcaggattcaacggggccgatggctagaactgtccgtgatgcagtatatgcctttcaatatatgtggggggttgatgaaagagacgtgtatactctgaat

SEQ ID NO: 173614 - DNA, 171 bp, Saccharomyces pastorianus
atgaacaatgccaatagagccgcacatgtaattactggttcacactcgtggggcccacacgattcctgtgcaaagtttgacaagaggatggagtttcacgtaaatactgccaaaggtgatgcggttttgtttttgggcagcctctaccatgttgcaagtgcgaaccatact

SEQ ID NO: 173615 - DNA, 1179 bp, Saccharomyces pastorianus
ggatatgtcttcccctattgggaaagttacaacgtgagaatatcggattttgagagtggcctattaggtaaaggtttgaattccgttccatcttctacagtaaggaaaagaactacgagaccagatattggttcaccctttattgcgcaagttaacggtgtacagatgaccttgcaaatcgaaccgatgggtaggttcgctttcaacggtaacgatggcaacataaatggcgacgaagatgacgaggatgccagtgaaagacgaatcattcggatatattatgcagctttgaatgattataaaggaacatattcacaaagcagaaattgtgagcgcgccaaaaacttgttggaattaacgtacaaggaatttcaacctcatgtggacaatttggatcctttgcaagtattttactacgtccgttgcttacaattattggggcacatgtatttcactggcgaaggctcctcgaagcctaatattcatatggccgaagagatcttgaccacgtcgctagaaataagcagaagggcacagggacctataggtagagcgtgcatagatctgggcttaataaatcaatacatcacaaacaatatttctcaagcaatttcgtattatatgaaagctatgaaaacacaagctaacaatggaatcgtagaattccaattatccaaattggccacttcattccctgaagaaaaaatcggcgacccatttaacttaatggaaactgcctacttgaatggattcattccagccatatatgagtttgcagtaatgatcgaatctggaatgaacagtaagagtagtgtggaaaacactgcttacctgttcaaaacattcgttgacaaaaacgaagctattatggcacctaaactgaggacagcatttgccgcattaatcaacgatcgttcagaagtggctttatgggcttattcccaactagccgagcaaggctacgagactgctcaagtctctgccgcctacttaatgtaccagttgccatatgagtttgaggatcctccaagaaccacagatcagagaaaaactttggcaatttcctactatacaagagcgtttaaacagggaaatatagatgctggtgttgtcgcgggagatatctattttcagatgcagaattacagtaaagctatggctctttatcagggtgcagct

SEQ ID NO: 173616 - DNA, 582 bp, Saccharomyces pastorianus
atgactactggtaggattcaatttgccgtttctactccttgtaatgctaagggaaaaccatcgggatatagaatatttgaattcaataatggccggcttgcgctgacaccatcagagaggggctgtaccaaagtggacgtgaatgcaaatatacaggcattctgttacttaaggcccaatgggagagacacatcgacatcatcagatacagcccacattatggattcgagtgattacatgatactggcaaagtccaatgggtttattgaaatcataagcaactaccaatacaagataagaagtggcctacgattaacgccttcctttatccttagatgtaccccagaagactttgagtcaaatttcttcagtgactatatgattgccggtcttgaatatagcccaggtttgttatattgctgtatgtgctccggcagaatatacatttttgtaatgaaccttccatcggattatatccagttcaaaaacatgtacaatcctaaatttccagattgcttctttaacaagcatgaacacaccagtacaagtcattcttcagaggaagaaacatatttgaagggc

SEQ ID NO: 173617 - DNA, 72 bp, Saccharomyces pastorianus
ccctctgtggcagtacaggccccaccgggctatggtaagacggagttatttcatctcccggggatcctctag

SEQ ID NO: 173618 - DNA, 417 bp, Saccharomyces pastorianus
gcgacacgcgcattcatggtagtgcctaatgccagtaccaatgcgactgccaactccagcactaatgctactaccagctgccagacatctactgtcaggactagtaacagactaccactgaaagtaccaactccaacactagtgctactaccaccgaaagtaccgactccaacactagtgccactaccaccgaaagtaccaactccaacactagtgccactaccactgctagcaccaactccagcactaatgccactaccaccgaaagcaccaactccagcactaatgccactaccactgctagcaccaactccagcactaatgccactaccactgctagcaccaactccagcactaatgccactaccactgaaagtaccaacgctagtgccaaggaggacgccaataaagatggca

SEQ ID NO: 173619 - DNA, 114 bp, Saccharomyces pastorianus; identical to SEQ ID NO: 173138

SEQ ID NO: 173620 - DNA, 138 bp, Saccharomyces pastorianus
gcgaggatctcagaaaggagagccagaattatatatatatggatgcatctctctgcatataaaattaatttccctttcgtacagttccctactttttttccctctttcgtttgcaaagaaggcggccatactcattaa

SEQ ID NO: 173621 - DNA, 81 bp, Saccharomyces pastorianus
cttaaccaactgggccaagagaccatgatatgtatacgaatacatcttaagcttaacgggtttcataaatacgtaagatga

SEQ ID NO: 173622 - DNA, 96 bp, Saccharomyces pastorianus; identical to SEQ ID NO: 173426

SEQ ID NO: 173623 - DNA, 249 bp, Saccharomyces pastorianus
atgacctactatccactagtgaccatccaggattctttgcaatatatgaaagcaaccctgaacatatccatcagtacatccgatgagttcgatattctgaatgataaagaactgtgggagtttggccaaacccaggaaattctaaaacgtaggcagacgagctcagtcaagaggagatgtgtcaatttaccagaaaactctacgatcgataacagaatgcttatgggtaccacaaagcgaggtcgcttt

SEQ ID NO: 173624 - DNA, 273 bp, Saccharomyces pastorianus
atgtcgtcctccttctcgtctcatagtctaatatcaagaaagaaggcaggtagcacgcaaaagacccgtggaagaaaaccctctttaatcccagatgctacaaaacaattcggttgtgaattttgtgatcggagattcaaaagacaagagcatcttaagagacatgttagatctttacatatgtgcgagaaacctttcacttgccacatttgtaataagaatttcagtagaagtgacaatttaaaccaacacgttaaaactcacacctcttta

SEQ ID NO: 173625 - DNA, 165 bp, Saccharomyces pastorianus
atatttatagaattgtgtagaattgcagattcccttttatggattcctaaatcctcgaggagaacttctagtacattctacatacctaatattattgccttattaaaaatggaatcccaacaattatctcaaaattcacccatttttcaaaaacgaacagaatga

SEQ ID NO: 173626 - DNA, 63 bp, Saccharomyces pastorianus
atgcactcacatcattatgcacggcacttgcctcagcggtctataccctgtgccatttaccca

SEQ ID NO: 173627 - DNA, 138 bp, Saccharomyces pastorianus
atgttatatattttatttcttcctatggggggggtccccagtatgattttcgatgataattatgttagggacccggatatcttcttgttcttatcttattatagtattcattttttatctttatttattctttatatt

SEQ ID NO: 173628 - DNA, 111 bp, Saccharomyces pastorianus
atggttgacgattcaaactatcttacgccacatgaaaccgcattggcggtggtggccaccgcaatgaaaaaagcaaggctgcaactagatacattgttaataaattccgta

SEQ ID NO: 173629 - DNA, 1758 bp, Saccharomyces pastorianus
gaagacgaagtcgattataccacgctacctctggaggatcggttgacgtacaaattatggaaggcacgtttggaagcttataaagaattgaatcagctcttcacaaactctattgatgaaggcaggacggacgatagcattcgtacgtactggagggatcctacgttatttgcgcagtatataaccgactctaatgtggtcgctcaagaacaggcaattgtctccctggattctttgatagatgcctttgcaccactctctttaaaaaacgcacataatgctattttgatatccacatggacgccattgcttgtagagaaaggtttgacatcctcgagggccacgacgaagacgaaatccatgaagtgtatcctctcactttgtggtcttgatacgtctattacacaatctgtagatttggtgatgcccttcttcgagaaaaaactacccaaattgattgccgccgcagttaactgcatttatgaactgatggctgcatttggctttaccaatgtgaacgttcaaacatttttgccagagctattaaaatacatacctcaattagccagtcatggtgataggaatgttagatcacaaacgatgaacttgattgtagagatctataaaagtacaggcaagaacagagatttattagatgatatgcttcttaaaaaacttaagccgattcaagttaaagacctcgataaacttttcgccaaaattggggacgaaccatcttcttcaaagaaattatttgaatgggagaaaagagatttggagaaacaaaggattcaagaggaagaggccagaaagaggaagtctacgacaccgaatgatactggagagtatcaagtagataacgatggcgacactatgatgggtatagaagctgactcgttacctccaaaacagcaagatgtcgttcaaatagatacgtttagtatgttaccggaagagacgattctcgataagttgcctaaagaatttcaagagaggataacgtcagccaaatggaaagatagagttgaagtgttggaagaattctgggacaacgttctatcacagactagaaagttgaaaagctcttcacagaactattccaacctattgggaatatatggacacattatccaaaaagatgccaacattcaagctgttgcactagcagcgcaatcagttgaattgatttgtgacaagttgaaaacccccgggttttcaaaggattatgtttcattagtcttcacacctttgttagacaggacgaaggagaaaaaaccttccgtaatagaggctatacggaaaactttgttgactatctgtaagtactatgacccattggcccccaacggacgcaacgaggacatgttcaaagagattttagagcatatgaaacacaagacaccccaaattagagtggagtgtacacaattgttcaatttaagcatgaagagtgaaagagatggatactcaactttgcaaagatacttaaaggatgaagtgttacccatcgtggttcacatagttaatgatacacaaccagcgataagaactgttggatttgagtgttttgccataataatcaaaatatttggtacaaatacgtttatgaagacgttagagagcttggataacttgaagaggaaaaagatcgaggataccgtcaagaatttacctagtttcaatactggaagtggcggtagtagtaacacttctgaagcgaagaaacaggcaagacccgtggagaacaaatgttattga

SEQ ID NO: 173630 - DNA, 258 bp, Saccharomyces pastorianus
caaggcgaagcagtcctcgttggtcccgtacgttggccagaccttctcgtagttggcaatatcgtaacccatatcgtcctgtggcgagtcgtagaatggcgaaatccagatagcatcggcaccaagatctttgatgtactccaacttggaggcaatacctttcatatcaccccagccatcgttgttagagtctttgaaacttgcggggtagatttgatagacggtggcttctttccaccatttgcgtctcgtttctga

SEQ ID NO: 173631 - DNA, 204 bp, Saccharomyces pastorianus
atgagtgattggtttaaagacagtttggttaatggcttgcaattgacatccgtcagtaggtatccttctaacatgtctgcgcacgggttgacagccgtatacgtagcagatcctcctgatgtcattgcttttttaaagtcacacggtgtagtcattgccggaggtattcacaaggacatcggacccaagtatatccgtattgga

SEQ ID NO: 173632 - DNA, 507 bp, Saccharomyces pastorianus
gaattaatccatgacgctgttctagactattatgggaagcgccttgcaacctgctcttctgacaagacaatcaagatctttgaagtcgagggagaaacacacaagttaatagacacgttgactggccacgaaggcccagtttggcgtgttgattgggcacatcctaaattcggaaccattttggcatcgtgttcttatgatggtaaagtgttgatttggaaggaagaaaacggtagatggtctcaaattgccgttcacgctgtccactctgcttctgtcaactctgttcaatgggctcctcatgaatatggccccctactactggttgcttcctctgatggtaaggtctccgtagtagagttcaaagaaaacggtactacttccccaataatcatcgatgctcatgccattggcgttaactctgcttcttgggctccagctaccattgaagaagatggtgaacacaacggtactaaagatctcgcagtttgttactgggggtgctga

SEQ ID NO: 173633 - DNA, 135 bp, Saccharomyces pastorianus
acatcggggatgggatccaccttcagcaaatgctcattattcatctttaaagcagttatgatcttacacacctgcttaattgttaaatcaataagaatagacctgcaggcatgcaagcttgcactgccgtcgttt

SEQ ID NO: 173634 - DNA, 189 bp, Saccharomyces pastorianus
caacttaccctactctcatattgcactccactccatggcccatctctcactaaatcagtactaaatgcactcacatcactattaacggcacttgcctcagcggtctataccctgtgccatttacccataaagtccatcattatccacattttaatatctatatctcattcgacggccccaaatattgta

SEQ ID NO: 173635 - DNA, 1335 bp, Saccharomyces pastorianus
atgttggcctcaccaggtatgctgcaaagtgggttatcaagagatttacttgaaagtggtgcccgtgaggataagattctagtactaatcaccggttactccatcgaaggaacaatggcgaaatttattatgcttgagccagatacgataccttccataaataatccggaaataaccattccaagacgttgtcaagttgaagaaatctcctttgccgcacacgttgacttccaggaaaatttagaatttattgaaaagattagtgcgccaaatatcatccttgttcatggagaagccaatcccatgggccgtttgaaatctgcattgttatccaatttcgcgtctttaaagggtacagataatgaagtccatgtttttaatcctagaaactgtgttgaagtagatcttgaatttcaaggtgtcaaggttgcaaaagctgtgggaaatattgtgaacgaaatatataaagaagaaaacgtagagataaaggaagaaattgcggctaaaattgaacctataaaggaagaaaacgaagacaacttggattctcaagcagaaaaaggtttggttgatgaagaggaacacaaagacatagtcgtttctgggattctagtttcagatgacaaaaatttcgaattagacttcctttctttgtctgatttaagagagcaccatcccgatctttcttcaacgatattaagagagcgccagtcagttcgtgtaaattgtaaaaaagagctaatttactggcacattttacaaatgtttggagaggctgaagttcttcaagatgatgatagagtaacaaatcaagaaccaaaggttaaagaagagtcaaaagacaatctgaccaatacaggtaaattgattctacagataatgggtgatattaagttaactattgttaatactctagccgttgtggaatggactcaagatttaatgaatgacactgtagcagactccattattgctatacttatgaatgtggattcagctcccgccagtgtcaagctttcgagtcattcttgtgatgatcatgatcataacaatgtgcagtctaatgcacaaggtaagattgatgaagttgagagggtgaagcaaatctcaaggttgtttaaagaacagtttggtgactgttttactttatttctcaataaagatgaatatgcaagtaataaagaggaaactataactggagtggttaccataggtaaaagcactgctaagatcgacttcaacaatatgaaaattttagaatgtaattcaaatcctttgaaaggtagggtggaaagtctcttaaatattggtggtaatttggtcacaccgctatgt

SEQ ID NO: 173636 - DNA, 201 bp, Saccharomyces pastorianus
atgaatgtaacttctccaaaagacgagagtcatagattctctaagaaaaaaagattaagtacgagtggatcacgattccacaaactgaatgggcattcacaagatataagcacatccgaagaccgcgattcaattgtttcaagtaacacaacttcaataatgactgatgatgtgtccgactacgatggtggcggaaaatcg

SEQ ID NO: 173637 - DNA, 222 bp, Saccharomyces pastorianus
atattaggtatacagaatatactaaaagtctcctcgagggtagaggaatcctcaaaggggaagcgatatttctacataatattattacgattattcctcattccgttttatatgtttcattatcctattacattatcaatccttgcacttcagcttcctctaacttcgatgacagtttctcataccttatgtcatcgtctaacaccgtatatgataatatac

SEQ ID NO: 173638 - DNA, 1755 bp, Saccharomyces pastorianus
atgactatttcttctgaacacccggaaacggaacccaaatggtggaaagaagccacgatctatcagatctaccccgcaagttttaaagactcgaataacgatggctggggtgacataaaaggtatcacctccaaactggactacatcaaaggcctcggggtcgatacaatttgggtttgtccattctacgactcgccacaggacgatatgggttatgatattgccaactacgagaaggtctggccaacgtacgggaccaacgaggactgcttcgacctgattgacaagacgcacaaacttggtatgaagtttattactgacttagtcatcaatcattgttctacagagcacacatggttcaaagagagtagatcttccaagaccaaccctaaacgtgactggttcttctggagagcaccaaagggttacgatgagcatggcaagccaattccaccaaacaactggaaatccttcttcggcggttcagcgtggttctttgatgaaaccacgaatgagttttatctgactttgtttgcatctggccaggctgacttgaactgggaaaatgaagaatgcagaaagactatctatgaaagtgctgttggatattggttagatcatggtgtagatggtttcagaattgacactgcaggtctgtattcaaaacgtcctggtctaccagattctccgatttttgacgaaagctcagagttgcagcatccaaactgggggtcccataatggtcctaggatccacgaatttcatcaggagctgcacaagtttatgaagaatagagtgaaggatggaagagaaataatgacggtgggtgaagttgctcacggaagcgacaacgcattatataccagtgcagccagatacgaaatcagcgaactgttctcttttgggcacgttgatattggtaccagtccattctttcgttacaacaaagttcccttttccttgaagcagtggaaggaagctatcgcatcgaacttcttgtttatcaatggtacggatagctgggctaccacctatattgagaaccacgatcaacctcgttcaatctcaagatttggcgacgattcgccaaagtatcgtaatgtatctggtaagctgttggcactattagagtgttcgttgaccggtacgctgtacatttaccaaggccaagagctaggccagatcaatttcaaagattggcccatcgagaagtatgaggatgttgatgtgaaaacaaactatggcatcattaaggagaagtttggcaagaactcaatggaaatgaagaagtttcttgagggcattgccctgttttccagagaccatgcaagaaccccaatgccctggtcccaagaggaacccaatgctggcttcactggcccagatgctagaccctggtatttcttgaatgaatcctttcagcagggaattaacgttgaagaagaatccggagatggcgcttcagttctcaacttctggaaaagggccctccaagccagaagggaaaacaaggagctcatggtgtatggttacgatttccagttcatcgacttggacagtgacaagctattcagcttcactaaggagtacgagggcaagatgctgtttgctgctttgaatttcagtggtgaagaaaccgaattcagcgctccaaaagaggattcttctttatcttttgttcttggaaactacgatgatgttgatgcgtcttctaggattttgaagccttgggaaggtagattgtactatgccaag

SEQ ID NO: 173639 - DNA, 123 bp, Saccharomyces pastorianus
aggtattcgacctcgcgcttcgaagtaaaggagcctaccactctataccaccactaccaccaccgccacttgccacactcaccttcacttctactgatatggcatacgcacacggatgctaca

SEQ ID NO: 173640 - DNA, 3552 bp, Saccharomyces pastorianus
gtcgccaatgagattgatttcacgcttgcacatccagagacgtggcaaccgccaaaatattcagtggtttattattcaatttcttttagggagttggcatatattagaagtttattgaaactcgttctcaaattattaagcacagactcaggggatagaattagaaatttaatagattcgccgatacttgtttcattaaagaaaatcctagaaaataaacttgtattcggtttaacattaataacttacactctggatgtagttcagaaagtaataaatagtgagcctactatttatcctgttctggttgaagcaggacttattccatatgttatcgataattttccaaagttaattgggccttccgccgaattattaagtttacttccagatgtcgtttctgccatatgcttgaatccagaagggctgaagcaagttaaagaaaagggtctcataaacaatttgtttgatttcttactcgatgctgaccacgcgcgtatattaacaggtggagatcgttctacggaatatggtactgacattgatgaattagcaagacattatccagacttaaaggcaaatatcgtggaggctttgtgtaacgtcatcagaaaaatgccaagtacctttagaaatgaaagggagtttctttttacttcaccaaaagatcaaaagtacttttttcacagaaaaaatgaggaaatattgacagataaagaggaacatgaacctgcatactgggagctattagataagggaactatgctggacacatttaccagtgttttgtttggtatgtctttaggaaatggttctttttcacaggtgccacaacatctggaagcgagagattttctggcaataatatttatggaaaatcctccttatgaatactttacctccgtggcaatctcaaatgttactgaggtcctccagtatctggatgaaaaatacgaagactacgcattcatggatgttatgaaagtattgaacgatcaattggagaacctgaatgattttttgaatagtccaaatgatagaagtttctttttagaaagagatggggaaaactcggtgcgttcatgccattcaaaactttgtcgacttgccgctattttgaacattgttacgaatgtatacattgatctcactaccttatcttgtaagagaatcatgcagatctattcttattttgacaaaaaaggattttctttaattaaaaacttaaagttgctattccagaaatgtgcgttggaggaaatgtacatacgccaacatatgccagattctgttattacagaaacaatgccgttgcctatagtggatgtttccggagatggaccaccacttcaaatttatatcgatgacccaaaaaagggtgatcaaaaggggaaaattaccagcgtaaaaacgagaaatactcttcaaatgcgaacaatactgtatacattacaatcaaatactgcaattctatttcgctgctttttaaggttaagccactctaggaatatggatctagagcataaagatttgacgacagaagttcatatatttgagaacgttgttgaaaatgttattgaaatgttgaaggtcaccgaactcgaaggtcatctaccgtatattctcgttttattaaacttcaacacctttgtgtttactattccaaaggcttcccctaattccactgaaatattacaaacaataccggcttatattttctatcaaaaggggggctatttactctatttgcacattataagggatctctttacgagaatgacaaaaataaaagatttatcctcacttgataacataaactacatagatgagtccaacggtatcctaaccttaagctgtttaattaatgctctcaccttttacaacaaatcaatgcaaactgaaaccatggagaatgtccaaagtattggtaagtattacgtttcaatagatgacgattataatattatgaaagctttaacagttcctattaaggtaatggctctcgcaatgattttagatttggataaatcggatagcctcttcaagacacagtctcgtaatgtgccttactcagttttcaagcaacttcttagtatgcttaaaaatatattcactaatgtgaacatctataccaaggaattatatgaattgcattgggacctaatattcccaccaattaaaaaaattagcttgtttgagcaagtcggcattcccggtgatgttgcggcaaactatttaacagatactggtgatgatcttcctgcagataacagtattggcctgttttcgcctgaacaatgggaaaaatataaaaaattaatcggtgaagataaatccatctactatccacaaccaatgcaagctcagtattacaaaggatgttcctcaaaagaattagatgagctgagagatacctttttcaatgacggtttaccatctaggatcttcactgtactccctttctatcctaaacttgtaaacgcgtttgcaaaaactttgctacaaatttttacgaaatacgatgaacccactgaagtgtttgctggtaaaatcttagatcgaattttagagacagatctagatgaccctgctactttatcttccttaatccatttatttggtatattcctgaacgagaaatatatttatcaaaaggcttcgcatttaatgcaaaggttcattgaatatcttgagaagtctctgaagccagaacatgttaatacgccttggttttcgaaagctctttacgtttacgaaattatactggcgaaatctgagcttccacacctcgaagagctttccaaggatgttcttctgagatatccattgctttccatggcgaaagtctttcgcataccagaccctatgaagcagaaattatttgacatactgatcagagtttctgatatttccaatttttattctgcactggcaacatcacgcatacttattttctactctagggatgagttgtatgctaacaacatagctagatctggaatattatctagattgttgaaagtaattggaagtttccaaaaactagacaaaataaactttttagagtcatctttccttttattaaccaggagatgttttgaaacgactgaaaatgttgatgctttaatacgcgcagaaattaatagaagctttacagcaagaccgttaggtggtggggatgatgctgtacgtgagttaaccactattctagaagaaaaggcgcatgtggtcatgcgtagtccctctcaatttattgacgttctttgcgaaacagctcggttccaggaatttgatgatcaaggtgcgttggttgattactcattgaaaagatttcttggtgaaaaagataagaatacgcaagcctcaagtgcagaaaaatcagatatctacgagagaacggggatcatgcatttattactgtcacaacttatggctgcttctgagaaagactggttgtctgaaccggccaactcctcggatttgcctgagaacaaaaaagcccaattggacccatcaagaaatcctgtatgtgcttacaacctgcagcatgca

SEQ ID NO: 173641 - DNA, 96 bp, Saccharomyces pastorianus
gttggaataaaaatcaactatcatctactaactagtatttatgttactagtatattatcatatacggtgttagaagatgacgcaaatgatgagaaa

SEQ ID NO: 173642 - DNA, 294 bp, Saccharomyces pastorianus
ttgattgttagagatgcgttaaagaagaatgaattgttatctgaagcgcaatcttcggacattttagtatggaacttgactcctagacaactatgtgatattgaattgattctaaatggtgggttttctcctctgactgggtttttgaacgaaaacgattactcctctgttgttacagattcgagattagcagacggcacattgtggaccatccctattacattagatgttgatgaagcatttgctaaccaaattagacctgcaggcatgcaagcttgcactgccgtcgtttac

SEQ ID NO: 173643 - DNA, 2262 bp, Saccharomyces pastorianus
gcacacagacgttcccaaagtgagttgacaaatttgatgattgaacaattcactttgcagaagcagttggagcaagttcaagcacagcagcaacagttgatggctcagcaacagcaattggcacaacagacaggacaatacctgtcaggaaattctggctctaacaatcatttcacgcctcaaccgcctcaccctcattacaactcaaacggtaattcacctggtatgagtgcaggtggcagcagaagtagaactcactccaggaacaactccggatattatcataattcatatgataacaataacaatagcaataatcctgggtctaactcacacagaaagacgagttcacaatccagcatatatggccattccagaagacattctttaggtctaaatgaagcgaaaaaggctgctgcggaagaacaagctaaaagaatatctgggggtgaagcaggcgtaactgtgaagatagattctgttcaagctgatagtggctcaaattctactacagaacaatctgattttaaatttccaccaccaccaaatgctcatcagggccatcgtcgcgcaacttcaaacctatcacctccctctttcaaatttcctccaaactctcacggggataatgacgatgaattcatagcaacctcttcaacgcaccgccgttcaaagacaagaaacaatgaatattctccaggcattaattccaactggagaaaccaatcacagcaacctcaacagcagctttctccattccgccacagaggatctaattcaagggattacaattccttcaataccttagaacctcctgcgatatttcagcagggacacaaacatcgtgcctctaattcatcagttcatagtttcagttcacaaggtaataataacggaggtggacgtaagtccctatttgcaccctaccttccccaagccaacattccagagctaatccaagaagggagactagtagctggtatattaagagttaataaaaagaatagatcggatgcctgggtctctacagatggcgctcttgatgcggatatttacatttgcggctccaaagatcgtaatagagcacttgaaggtgatttagtcgcggtagaactattagttgtggacgatgtttgggagtccaagaaagaaaaggaagaaaagaagaggagaaaggatgcctctatgcaacacgatctaattcctttgaacagtagtgacgattaccacaacgatgcatctgttactgctgcaacaagcaacaattttctatcttctccctcctcgtctgattcgctaagcaaggatgatttatccgtcagaagaaagaggtcatctactatcaataatgatagtgattccttatcatctcctaccaaatcaggagtaaggagaagaagttcattgaaacaacgtccaactcaaaagaaaaatgacgatgttgaagttgaaggtcagtcattgttattagttgaagaagaagaaatcaacgataaatataagccactttacgcaggccatgtcgttgctgttttggaccgtatccctggtcagttatttagcggtacattaggtttgttgagaccatcccaacaagctaatagcgacaataacaaaccaccacaaagcccaaaaattgcttggttcaagcctactgataagaaggtgccattaattgcaattcctacagaattagctccaaaggactttgttgaaaacgctgataaatactccgaaaagttattcgttgcctctattaaacgttggccaatcacatctttgcatccatttggtattttagtttccgaacttggagatattcacgatcctgatactgaaattgattccattttaagggataacaattttctttcgaatgaatatttggatcaaaaaaatccgcaaaaagaaaaaccaagttttcagccgctaccattaacggctgaaagtctagaatataggaggaattttacggacactaatgagtacaatatctttgcaatttccgagcttggatgggtgtctgaatttgccttacatgtcaggaataacggaaatggtaccctagagctgggttgtcatgttgttgatgtgaccagccatattgaagaaagctcctctgttgataggcgtgcgagaaagaggtcctctgcggtatcatgccacaaaaacttgtcaatttattaccacaatcgttcaacgacgaactgtcgttggcccctggcaaggaatcagccacgttgtcggttgtttacactctag

SEQ ID NO: 173644 - DNA, 192 bp, Saccharomyces pastorianus
atgcaaagggtaagttcgttggcaacaggcaaaagtactatgccgaaactcagcgacgaagaagaaggtattcttgaagagtctattaggaatgccgaaacatttgataaaatttgcgttttactgagcaagcctaaattagaagtcgaaagctacctaaacgaattaggagaatttaaggtaattaatagc

SEQ ID NO: 173645 - DNA, 126 bp, Saccharomyces pastorianus
atgtatgcgtactcgtcgtcgctgatggtcttgtatcggacccaagggaacgactggtactgcagctgtggctcttcgaccttcaggtattcgactttcagcccgctgcatgtgcaatacgggatc

SEQ ID NO: 173646 - DNA, 87 bp, Saccharomyces pastorianus
caaatcagctatcatctattaactagtatttacgttactagtatattatcatatacggtgttagaagatgacgcaaatgatgagaaa

SEQ ID NO: 173647 - DNA, 1002 bp, Saccharomyces pastorianus
gcattgccatctttattggcgtcctccttggcactagcgttggtactttcagtggcagtagcattagtgctggagttggtgctagcagtggtagtagcactagtgttggagttggtactttcggtggtagtagcactagtgttggagttggtactttcagtggtagtagcatttgtgctggagttggtactttcagtggtagtcgcactagtcctgacgttgatgctggcagtggtagtagcattagtgctggagttgatgctggcagtggtagtcccactagtcctgacgttgatgctggcagtggtagtagcattagtgctggagttggtactttcagtggtagtcgcactagtcctgacgttgatgctggcagtggtagtagcattagtgctggagttggtactttcagtggtagtagcattagtgttggagttggtactttcagtggtagtagcattagtgttggagttggtactttcagtggtagtcgcactagtcctgacgttgatgctggcagtggtagtcgcactagtcctgacgttgatgctggcagtggtagtcccactagtcctgacgttgatgctggcagtggtagtagcattagtgctggagttgatgctggcagtggtagtagcattagtcctgacgttgatgctggcagtggtagtcccactagtcctgacgttgatgctggcagtggtagtagcattagtgctggagttggtactttcagtggtagtcgcactagtcctgacgttgatgctggcagtggtagtagcattagtgctggagttggtactttcagtggtagtagcattagtgttggagttggtactttcagtggtagtagcattagtgttggagttggtactttcagtggtagtcgcactagtcctgacgttgatgctggcagtggtagtcgcactagtcctgacgttgatgctggcagtggtagtcccactagtcctgacgttgatgctggcagtggtagtagcatta

SEQ ID NO: 173648 - DNA, 1767 bp, Saccharomyces pastorianus
atgactatttcatccgcacatccagaaacagaacccaaatggtggaaagaagccaccgtctaccaaatctaccccgcaagtttcaaggactcgaacaacgatggctggggtgatatgaaaggtatcgcctccaagttggagtacatcaaagatctcggtgccgatgctatctggatttcgccattctacgactcgccacaggacgatatgggttacgatattgccaactacgagaaggtctggccaacgtacgggaccaacgaggactgcttcgccttgattgataagacccataagttaggtatgaagttcatcaccgatttggtcatcaaccattgttccagtgaacacgagtggttcaaggagagcaggtcttctaagactaatccaaagcgtgactggttcttctggagagcacctaagggctacgatgccgatggcgcaccaatcccaccaaacaactggagatcgtacttcgggggttccgcatggactttcgacgaaacaacgaacgagttttacttgcgtttgttttgctccacccagcctgatctcaactgggagaacgaggactgcagaaaggcaatctacgaaagcgctgttggatactggttagaccacggtgttgacggtttcagaatcgatgtggggagtttgtactccaaagttgttggtctaccagatgctcctgtgattgacaagaacacaaaatggcaggccagtgatgctttcacaatgaatggaccacgtattcatgaattccaccaagaaatgaacaagttcatgagagacagggtcaaagatggaagagaaatcatgacggttggtgaaatgcaacatgcttccgacgagaccaagaagttgtacacgagtgcctcaagacacgagcttagtgagctgttcaacttttctcacactgatgttggaacttctcccaagttccgccaaaacttggtcccatttgaattgaaggattggaaagttgctcttgccgagctgttcagttatgttaatggaactgattgttggtcgactatttacctagaaaatcatgaccaacctcgttcgattacgagatttggtgacgactcgcccaagaatcgtgtcgtttctggtaagttgctgtctgtattgttagtgtcactgaccggtactttgtatgtgtaccagggacaggagctgggccaaatcaatttcaaaaactggcctattgaaaagtacgaggacgttgaaatcagaaacaactacaaggcgatcaaggaagagcatggggaaaactcgagcgagatgaaaaagtttttagaagccattgctctcatctccagagaccatgccagaacacctatgcaatggtcgcgcgaagagccaaatgctggcttctctgggcccaccggcaagccatggttctacttgaacgaatctttcagagagggaatcaatgtcgaagacgagcaaaaggatccaaactctgtgctggctttctggaaggaagctttgagatttagaaaggcacacaaggatattactgtttatggctatgattttgagttcatcgacctggacaataaaaagctgtttagctttaccaagaagtacgagaacaagactttgtttgcagccttgaactttagctctgataacgtggactttacgattccagataacagtacctcgttcaagttggagtttggaaacttcccaaagaaggaggtagatgcctcttccagaactttgaagccatgggagggtagaatttacgtatctgaa

SEQ ID NO: 173649 - DNA, 132 bp, Saccharomyces pastorianus
gaaaacgatactctgaagcaaagaattcaacagctagtagaaatcaaagaaaatgaacagaaggatcatacaaccaaactggaggctttccaaaagaacaatgagcagctacaaaagctaacgtcgaagtag

SEQ ID NO: 173650 - DNA, 120 bp, Saccharomyces pastorianus
tcaccagcgccaccacggggacccgccccgaaattgagtgcacatgctcgcaagataatatgcaaaacatcacccaatcggtcgggatcctctagagtcgacctgcagcatgcaagctgc

SEQ ID NO: 173651 - DNA, 90 bp, Saccharomyces pastorianus
gagtctgcaagtgaagaaagcaaagttcttgctgcagctttaaatgatgctagacgagacttggatgaaaacgtctggagaagtcctatc

SEQ ID NO: 173652 - DNA, 897 bp, Saccharomyces pastorianus
cgacggaaaactcgcaaaggagatgggccgtggggcagttggtcaagtagtgacgatgaaacttcacaagccagcgaaactcagaaagaagatcaggatatcttcgtgcacgcgctggctgaggacaacctagattcggaacagatagaggtagaggaagtctcccatttttatggtaaatcagaaaaggactatcaaggcagaggatatttatatccaccaaatgacgtcgatgttgatcttcgtgaggaaaggatatcctttcggtgttacttaccaaaaaaagttatacgtaattatccggggcatccagaaggaactactgccttgaaattcttacctaaaactggacacttaattctctctggtggtaatgatcatactataaaaatttgggatttctaccatgactatgaatgcctacgagattttcgaggtcatagcaagcctattaaagcattacgattcaccgaagactgtcaatcttttttgagctcttcctttgatagaagcgttaaaatttgggatactgaaactggtaaagtgaaaaccaggttgcaccttaattcaacgcctgcagatgttgaatctcggcccactaacccacatgagttcattgtaggtttatcgaattcgaaaatattacattatgatgatcgtgtttcagaaaatcaaggtcttgtgcagacatatgatcatcacctaagtagcattctggctctcaagtattttcccgatggttcgaagtttatttcttcttcagaggataagacggtaagaatttgggaaaatcagatcaatgtaccaataaaacaaataagtgacacggctcaacattctatgccatttttaaatgtacatccgtctcagaactatttctgtgcacaaagcatggat

SEQ ID NO: 173653 - DNA, 258 bp, Saccharomyces pastorianus
aacaccatcaagctggtaggagacgagaaaagttattcattgggtgagatcaatggtatggccaagcgtatacttcagaaactttctgtgaagaagtacaaaaatattggtatatctgcgtcagtcgccacggtggaaggattttctcttactttggcctctatgatggcgtctataaaaactggttctgtacctcattttttgccagcggttcctagacaacgagtggcggagatctttcaagatgctaaacggtag

SEQ ID NO: 173654 - DNA, 225 bp, Saccharomyces pastorianus
atgaagagtcaattagattttctagagggtgaaaccaaaaagaacaacggctatttggtcgatgacaaattgagcggtactgatattctaatttcttcccccttgcaaatggcatttgagagaaagtttgccaaagctgaggaatatttcgtcattgccaagtggctggaaaccataacatcagaggacttgtatgccgtttcgaaggaaaaagcacgcgcttta

SEQ ID NO: 173655 - DNA, 282 bp, Saccharomyces pastorianus
atgctatttggtattaaactggctaacgacgtatatcctccctggaaggattcatatatcgactatgaaaggttgaagaaattactaaaggaaagcgtcatacatgatggccgtagttccgtggatagttggtccgaaaggaatgaatctgattttgtggaggccttggataaagaactagaaaaggtttacacatttcaaatttccaaatataatgctgtcttgcgaaaattagatggtttagaggaaaacactaaatcagctgaaaaaatccaaaaaata

SEQ ID NO: 173656 - DNA, 1437 bp, Saccharomyces pastorianus
aacacctctccaaaaagagttgcaacgcggcccaatcactttcctttttcacaggaatctaagcaattacctcaaatatctcaatctcaaactttatcaacaaatcctttattaacgccacaggttcatggagacctatcggaacagaaacaacaacaaattaaaaccgtcacagacggaggctccccatttgtttttgatcaatcagcacagaattctacggtgcaagcttccaaggctcatatgatatccacgaccagcaatggtgcatatgatgagaagttgagttcagagcaagaagaaatgaggaaaaaagaagaacaacgaatagaagaagagaaaactcaattgaaaaagaagcaagaaaatgcggacaaacaagtaatcactgaacaaattgcaaatgacttaataaaagaagtggtaaacagtagcgtggttagtattgttaagcgtgaattttcagaggctaattataggaaggacttcattgacacaatgacccgtgaactttatgacgcatttcttcatgaaaggttgtatctgatatatatggattctcgtgctgaattgaaaaggaattccactctaaaaaaaaagttctttgagaaatggcaagcctcttattctcaagcaaagaagaaccgtatattagaagaaaaaaaaagggaagaaattaaactcgtaagccaccaattaggagtaccaggttttaaaaaatctacatgtttgtttagaaccccgtataagggtaacgtaaattcatcatttatgctatcatcttcagataagaatctaatattttcacctgtaaatgacgagtttaataagtttgcgactcatttaaccaagatttcaaaactttggcagccgttagagatgcaatcaatctattatgataaccttacgaaaaagttcccctccaattctcttactccggcaaatttattcatttatgcgaaagattggacatcactctcaaaccgttggatcttaagtaagttcaatctgcaaacagcacaggattcaaaaaagttcagcaataatattatctctagcagagtaatttgtattgatgatgaatatgaaccatctgattttagtgatttgcaattattgatatttaatacaggtgttacgaatccagatatattcgatttggagatgaaactgaaagatgacggtgaagaactgataaagctaatcactggtatttctctaaatacaaatatatgcttttcccttttgattatttattgggaatccgcagaaaatactttatcggaaagtaccattaaacacttactaaaattaaaccgaatatctaaaaactatagtagtgttattgaacgcattgacttaatgaatctcaccgaagaatcacctcataagtgtttagaggacaaattatctgaaatatcacattcttatgtgggg

SEQ ID NO: 173657 - DNA, 531 bp, Saccharomyces pastorianus
aactcctggtcaaacaacatcatcaaaccatacttaccctttaaaatatccaaatggttgtttagcggttgtattttagcatcgattgtgctattgatatgggaggctatagcgggaatgaggatttacaaaacgggaaatatctctttgacttatgtcaacaatttttccagaaacctaaattcagtgctcaattattccaagttttgtgtttataatatgatcgaacgaaagggttttcgacagaaaatgacattttttactttttttcaactgaaagattgtattagattaatcttcacggataccccaaggcaagttattaatggtcttacgctgtggtcagttctcgtaacagtaaataaaaacgaggatctaggcgatctggaatcatttaccggtttgatcaacaaaataaagaacattggccagaccaatcatgaagaagcagtgatattgtcgctgatgctattttcctttataatctgggcattatttgtcttcagtttctgcttgctgtcattgctcgat

SEQ ID NO: 173658 - DNA, 123 bp, Saccharomyces pastorianus
tcttcatcaaacaatatcttaatcgctattgtccaaggttgcgcaatctacggaaacttccaaagcagtcagactggcagctctgaatgctcttgcagactctttaattttcatcaaaaataa

SEQ ID NO: 173659 - DNA, 528 bp, Saccharomyces pastorianus
gtaaagcccgtcctttttacggatctaattcaccacttgaagatcggcccatccatggccaagaaattaatgtttgactattacaaacagaccaccaatgccaaatacaactgcgtagtgatatgctgctacaaagatcaaactattaaaattattcatgatctttccaacattccacagcaagattcaataattgattgtttcatctatgccttcaatcccatggacagcttcataccatattacgacattatcgatcaaaaggattgtttaaccattaaaaattcatacgaacttaaagtttctgaatcatcgaaaattatagagaggactaagacgttagaagagaaatctaaacctttggtaaggcctacagcaagatcaaagaccacgccagaagaaacaaccggaaggaaatccaaatctaaagacatgggtctcaggtctactgcactgctggctaagatgaaaaaggatagaatgacaaggaaacctctagacagggatcctctagagtcgacctgcagc

SEQ ID NO: 173660 - DNA, 180 bp, Saccharomyces pastorianus
atgaattatgaaatactttttgggatttcgttgttgtcaaaggctataaaatttagtatacaaagtataccagaaagtttcctcgaggatatagaaattcacaaaaggaaatcgatatttctatgtaataatataattaaatttccttccatctcatatcctgtcattaattattccatt

SEQ ID NO: 173661 - DNA, 297 bp, Saccharomyces pastorianus
aacgtcgttacagacttctacgaatacggttggggttcttctttccatttcagtagattctacaagggcgagagttttgctgcctcgatagcaagacatgagcattatttggcctacaaagctggtatcaaaaaggacgatttggttcttgatgtcggttgcggtgtcggtggtccagcaagagaaatcgcaagattcactggctgtaacgtcatcggtctaaataacaacgattatcaaattgccaaagccaaatactacgctgaaaaatacaatttgcagcgatcaaatggattt

SEQ ID NO: 173662 - DNA, 660 bp, Saccharomyces pastorianus
aatctacggctaagttatttgagagaccacacatacccgcatcttcaagtttctgtgcaatcaagagacagagtacataacgatgggattgaagttttggtggtcaattataaattctgcagaaacacgatgaatccttttgaaattcagttcaaaatgttctataaatttgaagattccacactgctgaagtgggaaatcttgcgaatttccacaaacgttagactgaaggccaagcaattactggcaacacgtaacttccagaagtgtctattaagcctttatgagtttgataagatcaagtccaaaaaaactggaattttccaaaatttgattaatttattgaaaaggaaaaccaggtgttatctaatgaataatagtgactcattaattgtggaaagagttattagagaaggaagactcacgacgataaaattgcagataaatttcatcattacaatgcccggtgagagaggcaaacctcgtaactgttttctgcccatgagtaaaatttcaatagcgctatggaaggggggagaaagatttaaccagatagatttggacgagatatgctacggacttatcaaggaatatggtgtgaaaaccgggttaaaggagatctgcaacgtttgcctattcccggacatgtacgccaggtga

SEQ ID NO: 173663 - DNA, 267 bp, Saccharomyces pastorianus
atggtgaatactaggggctacactactcttccgaatgttgaagaaccagcaaataactcacaagatgagctaaactcgcaggactttgagcaagctataggaatgccatcagaacccccggtatatgtggaagagatggggatggaagaaccgcaggctccggaagcctttagtgggaaagtccagcgatttcgtatgtgttttgaaaataacgtggtgattccagtaaagaaaaatgtagtggatccactagcacaaatgatttcc

SEQ ID NO: 173664 - DNA, 1350 bp, Saccharomyces pastorianus
atgcaaatttcggaaatggggaaaaaaataagtgatctaaaggtggagaagacagcttatcgcgaaactttgactaatttgaatcaagaattggcaaggttaactaatgaagaacaatcgcatagaactgaaatttttaccctcaatgcctctttcaaaaagcaattgaatgatataattagccaagacaatgaaaagatagaaaagctaacaggtgactatgatgatgttagcaaatcgagggaacgattgcaaatggatctggatgaatctaataagaagcatgaacaagaggtcaatttgttgaaggctgatattgaaaggctcggtaaacaaattgtgacttcagagaaaagttacgctgagactaactcaagctcgatggaaaaaggtgagaaattcgaaaccattcctcttgctgaggacccaggtagggaaaaccagatatctgcatacacacagactctgcaagatagaatatttgatataatatcgacaaatattttcattttggagaacattgggttgctgttaaccttcgacaataataataacatccaaattagacgagtcaagggattgaaaaagggaaccgcccaaagtaatatactggatgaaagcacacaaatgctggacgcacatgataattctctaataaaaagtccggttttccagaaattgaaagatgagtatgaattaataaagtcagttgccaatggatctgaaaaggatacacagcaaagcatttttctggggaatatcactcaattatatgacaataagctttatgaagttgccgttatcaggagattcaaggatattgagaccttggccaaaaaattaactaaagaaaataagatcaagagaacgctattggagagattccaaagggaaaaggtgactttgaggaactttcaaattggcgatttagcattatttttgccaacacgagaaaacgttaattctgtcgggtctatgtcgtcttccacctcatcattgagctcatcattttcatctgttgatttatcaactccaccgcctttggatgctatgtctatacaatcgtctccctcggtgatacatagtaatgtaatcaatcaagccagtatatctggcagggacaagaataaactgatgaggccttgggctgcatttacagcttttgaagaaagcacaagatattttttaaaggacgaaaaaggattgacgaaggggaaagaatggtttgtaggcagaattgtcactttggaacatttcgtagcagatagcccctctaataatccatttagactaccaaagggctcagtttggtttcaggtcactgcggttgtggtttcataccagggagtt

SEQ ID NO: 173665 - DNA, 78 bp, Saccharomyces pastorianus
gaaccgctgatccccgcgttattagcacggtgccttaaccaactgggccaagagaccaaacttattatgaaaacttga

SEQ ID NO: 173666 - DNA, 120 bp, Saccharomyces pastorianus
atggctctgcttgatccaaaattttcgtacgactttttcagccaacctgatttcaacagaaatttcctagacaatgggcaaagcttaacttggtctttagcttattcaggtgctttttct

SEQ ID NO: 173667 - DNA, 588 bp, Saccharomyces pastorianus
atgtgtgaacaaattttagccgttaggccaacactagtcatcactgaaaaaggtgtttcagatctagcacagcattatttactaaagggtggatgtagtgttttaagaagagtgaagaaatcagacaataatagaattgctcgtgtaactggtgcaaccattgtcaatcgtgtagaggacttgaaggaaagtgatgtcggtacaaactgtggattattcaaagtagaaatgattggggacgaatatttctcatttttggataactgcaaggaaccaaaagcttgtaccataatgttacgtggtggttccaaagatatattaaacgaaatagatcgtaacctacaagatgctatggctgttgctcgtaatgtgatgttgagtccttccttgtccccaggtggtggtgccaccgagatggcagtttctgtcaaattagcagaaaaggcaaagcaattagaagggatccagcaatggccataccaagctgtagctgatgctatggagtgtattccacgtactttgatacaaaatgcaggtggtgatcctattagactcctatcccagctaagagccaaacacgcacaggga

SEQ ID NO: 173668 - DNA, 783 bp, Saccharomyces pastorianus
tccaagttaactaggctgttgaaattttcactgggtggcaattgcaaaacagtcatgattgtttgcatatcgcccagcagttcacattatgatgagacattgaatactttgaaatatgcaaatcgtgctaaagaaataaagaccaaaataatcagaaatcagcagtctttgagtagacacgttggatcttatttgaaaatgattacggaacaaaagcgacaaatcgaagagttacgcgaacgtgaagagaagatgatttctttgaagctaacgaaatacaaactaaacaaagaaaagatccagttagccattaacgagtgcgtcaatcgtgttcagcaaacgtatgcaggagtggaaacgtatcaagtagccaagaccttgaaatcattaatactttgtaaaaggcggtttttgcaaatggtcaagctagaagtggataatttgatactattatttgaacgggaggaaagtacagccgccgagatgcagccggtgattagtaattgccgaatgatcagtggtcagctttataacaaaatacacgagttagaaatgaaatttgatgaaaccgacactctgagttccgtcattcatcaggtacattccattgacttgaacaagttaagagagatggaggactgggatgaaacttacgacctggtgtacttggagtcgtgtttaaatcaaatatcagaattacaaagaaacgaaatcttggttaattcctccataatgacagaaaaattaatgtcagatccgggtttgaactcccgattaaatttc

SEQ ID NO: 173669 - DNA, 372 bp, Saccharomyces pastorianus
atgggtaaatatctgaacgacaaccaacgggaaattttgttgaattacggtggtgaaaagctacgttctttattgtcagatcgatttggagatattgaagtcacaatttacagtccttcggacccaaatgcatcaacagtaacggctgaaaacagtcagtttctctggagagcagctattactctgaatcaatttaaagagtttgtgaaaagctggagcatatacacttcttgggctagagataatccctcgaaaccggatattgccgatatattcattaacgagctcaaagaaatctgtcattgtgaagatttgaatgtacctttaaaaatagagtggtcaacgttttattacttatgtaggaaaagagaa

SEQ ID NO: 173670 - DNA, 372 bp, Saccharomyces pastorianus
gtaagttcctcctgttcctcctcctgttcctgctcttcttctggttcgtcttctgaatcatcttcctcttcattcttggcgggagctcccataccaaacccgtccattgctaattcctcatcgtcgctatcgttttctttttctacttgttctttctcggtttcttcttcttgtttactctcaatatgggccattttcaccagcccaccttttcttctaataatcttatccaagtcaacgtccttcttcacaaaagcttcggcatcgtccttattggactcgccctctgctagaaagttccagccttggaagttcgaagtggtatcatcggcgtccaaatcaaacttaaaccccgcgtccaagtcctcatga

SEQ ID NO: 173671 - DNA, 114 bp, Saccharomyces pastorianus
tgcaggtctctgaagactccttacaataggtgtgccagaaacaaagtcagtgaaagtacgcatcgtagagctgtcgttcggcctggcactcgctatttcgtaacaacgttccag

SEQ ID NO: 173672 - DNA, 129 bp, Saccharomyces pastorianus
cttttgggcttaatatttggtattaggaaacttgaatggtcctcctctttgcaggcagctggtgcatggagcttattaaacattgttctgtggttgttctttgatggcactttaacccgtttttttccc

SEQ ID NO: 173673 - DNA, 228 bp, Saccharomyces pastorianus
tcggtcaaaaagaatatccgaattttagatttggacccttgttcagaagcttattgtctaagcctaaattcagtctgctttaaacggcttccgcggaagaaatatttccatctcttgaaatccgtacaagatattagacgtgtgtttggagtcgtatactgttggcgtctgcaaatttgtgaattctccgcgaatgccttggtgcaattacgtaattgtagccgctga

SEQ ID NO: 173674 - DNA, 933 bp, Saccharomyces pastorianus
atgatagcttccaaaagctccttattagttactaaatcgcgcataccctctctatgctttcctttgataaagaggtcctatgtgtcaaagattccgacacactctaacacggctgctaatctgatggttgaaactccggccgccaatgccaacggcaatagtgtgatggcacctcctaactcaatcaattttctacagacacttcccaagaaggaactattccaactgggattcatcggtattgcgaccttgaacagcttcttcctgaacatgatcattaagttgttcccttacatccccatcccagtaataaaattcttcgtctcttctttatactgtggcggtgagaactttaaagaggtcatcgaatgcggcaaacgtctgcagaagagaggtatatcgaacatgatgctttcattaactattgaaaattccgaaggtacaaagagtttgtccagtactccagtagaccaaattgtcaaggaaacaatcagctctgtccacaacatcctactgcccaatattattggccagctggaatctaagccaatcaatgacattgctccaggttatatcgctctaaaaccctctgctttggtcgataaccctcacgaggttctgtacaatttcagtaatcccgcctacaaggctcaaagggatcagctgatcgagaactgctctaagattacaaaagagatttttgaactaaatcaatctttgttaaagaagtaccctgaaagaaaggccccatttttggtttccactattgacgctgagaagtatgatttgcaggagaatggtgtttacgaattacagagaatcttatttcaaaaattcaatcccacttcatctaaactgatatcatgtgtcggtacttggcagttgtacctaagggactctggtgaccatattatgcacgaattgaagctggcc

SEQ ID NO: 173675 - DNA, 1533 bp, Saccharomyces pastorianus
atgaatccaggttaccgggacgctcccgctagtgcgacgcttattttgcaacgatttcaatgtctcgtgggtgcatccagtcagattactgaatcaataattaccatcaattgcaatagaaagactttgaaaagtcatcgaaacttaaaattggatgcgcatttcctatccattttgaaaagaatattatccagagcacatcccgctaattttcccgctgacactgtccaaaacacaattgacatgtacttgagtgaaattcatcaattaggtgctgattctatatacccacttcgacttcaatcacttccagaatatgtttcctcggacagtacggtctctctttgggatgtcacttcattggaacaattagctcaaaactggccacaattgcatattcccaatgatgtagattacatgatgaagccatctttaaacagcaatgttttactgccgcgaaaagtcatgtctagggattctctcaaacacttgtactctagtatcattctcattaaaaatagccgcgatgagtcgtcatcaccatacgaatggtgcatttggcaattgaagcgatgctttgcacatcagatagagactccgcaagaagttattcccattattatttcggtgtcctcaatggataataaactgtcttctcgcattattcaaacgttttgtaatttgaagtatttaaaactcgatgagcttacgttgaaaaaggtttgtggcggaatcttgccattatggaagcctgaactaatcagtggtacaagggaatttttcgttaagtttatggccagtatttttatgtggagtacacgagatggtcacaacaataattgcacattttctgaaacttgtttttacgttttacaaatgattacaaactgggttttagatgataaattgatagcactcgggttgacactactgcatgacatgcaaagcctgctaactttggacaaaatctttaacaatgctacttcagacagattttctacgatggctttcatcagctcgttagatattttaactcaactgtcgaaacaaacgaagtcggattatgcgatccaatatttgattgtgggccctgacatcatgaataaagtgttcagttcggacgatcctttgctattatcagctgcgtgcaggtacttggttgctacgaaaaataaattgatgcaatacccgtcaacaaacaaattcgttcggatgcagaaccaatatatcatggatttgacaaattatctttacaggaataaagttctgtcatccaaaagtttgtttggagtctcaccagatttctttaagcagattttggagaatctttatatcccaactgcagacttcaagaacgctaaatttttcacgataactggtataccagcgctatcctacatatgtattattattctaagacgactggaaacggccgaaaataccaaaataaaattcaccagtgggatcataaatgaagagacgtttaacaattactttcgagttcatcatgatgagattggacagcatggttgg

SEQ ID NO: 173676 - DNA, 612 bp, Saccharomyces pastorianus
gaagcaagagggatagagtccgatgttgccatagataaagataagattctcaaatccaaattctttttaattgttgagaaattatcgagtgccattaatattgtcttttccggcgtactttttttgaccccatcgttgtgctatttggaagatgaatatccagaatttgtgaacgttagtagcactgcatttactaccttgactttaattgatatttttattcagatgacgtatgggtttttattagtcaagaatgacttacttgaggattcgttcaaaagaaaaccaaaaagatgtttgaaatcagtatgctctcgctgtgctgctaggaggcaagatcccaaatggttcaaattgaagtactcgtttatactactagcgactttctttttcggagcttattcgctatggaaaatcaataccttctttaaagctgatcaaacagttgatttctatcgactatttcatttattcggctttcaactaaacgcacttctcagtctgatggtttttgtcttttatggcaatcagctagaatcacatagtgggcctcttgaaacggacgatgacctccttgaaagccaggcaccgcttggcaataaaatggtttag

SEQ ID NO: 173677 - DNA, 225 bp, Saccharomyces pastorianus
atggatcatccacataagtggcaccgtaagctcgtcaattgcaacagcgactttatttttaagagccgcggtcattttgttagtatctcttctcaacttgggcagcacaatttcacgatatttaacaggtatcatttgaagaaaagaatcgttttccagatactcgtcaattcctcgcttcggttctctgaacaaaacttctcgattacgcaaaatgaggttggc

SEQ ID NO: 173678 - DNA, 168 bp, Saccharomyces pastorianus
atagaattgtgtagaattgcagattcccttttatggattcctaaatcctcgaggagaacttctagtacattctacatacctaatattatagccttaatcacaatggaatcccaacaattacatcaaaattcacccaattttcaaatatattatcatatacggtgttaa

SEQ ID NO: 173679 - DNA, 150 bp, Saccharomyces pastorianus
ttcaatttcagcaacaacaacaacagcaacaacaacaacaacagcaacagcaacagcaacaacaacaacaacaacaacagcaacagcaacaacaacaacagcagcaacagcaacagcaacagcaacaatcacctgttcagggaggcttct

SEQ ID NO: 173680 - DNA, 1533 bp, Saccharomyces pastorianus
gaagagacggtaaagcaaggtgttcttcacaatgatagaacaaagctaaagcaagggcttaaagaacgtcatatcaaaatgttgacacttgttggtgtatttggtacaggactgtttctgtcttctggtggtacattaaaaaaaactgggcctgttggcttgctgattgcatatctctttgttggtattgtcgtaggctgtaaccaaattgcaatagccgaggttgcctctttcatgccagccactggggcaaccattaggcatgctgagcaattcatagacgagtcagttggttttacatttggttggatctctacatactcatcactaatgcctggtgagttatcggcaacagcagttatcatgacttactggacggatgtaagccccgcaattttcataactgtatttggtgttctctttgtggcgacgaacatttatacaattcgattctacggcgaaattgaatatatattcggatggttaaaggttttattaatcgttatattgatcgtctcaggattggttatcgatcttggcggaactaaaggacaagaaaggttaggatttcattactggagggatcctggtccctttgcaaattatttggtgggaggacacatagggaagtttgttggattttgggctgccatttcctccgttgtatactcctactctggtattcaaaatattgccattctcgctggcgagaccaaaaacagcaggcatgcaatttttcacggcgccaaaaatgtctttctacgcattatagttctatatttggtcacagtattcatattaacgttgattgttccctacaatgacaagttaattgctacaggaacaggtactgccaggtcaagtccctttgtcattgcgatgaacagagccgggatcaaagtcttacctcatattgtcaatgccttgatcttaacatctgcatggtctgcaggtaatttggcaatcattgaaggttctaggaatttgttctgcttagcaacaaaaaatcaagcacctaagatatttttgaggacaagcaaaaggggtattccatatgttggtgtgatattcatttcgagctttctaccgttggcgtacatgtcgtgctccaaatcgtctgccactgtctttgggtggttccaagaattggtatcttcaaacactctgctacgttggattttgatttcggcaaaccatattcatatggacagggctttgaaagctcagggatacagtaggtctgacctgccatattccacacgcattggcccttttgccgcttggttctccggtataatgtcgtttattttcttgcttactgggggcttttacaatttcatacatggtcattttgatatcgaatcatttttcaccaggtacttcatcattccattagcaattggattatttactttctggaagctgttcaaaaagactagatatctacgtccgcatgaagtcgatcttgaatccatattcgaggatatcaaggaaaacccagaacatattgaagagtccaaaccaatttgggca

SEQ ID NO: 173681 - DNA, 987 bp, Saccharomyces pastorianus
atgcttgtgcgtaattgggaactttcgggggcactccgttccatgagatcactagaagaccgtttcaataaaaactaccagtatgactggacatttcttaatgatgtcccatttgatcaagagttcatcgaagccacgacagccatggctagtggtagaacgcaatacgctttaatccctgcggaggactggaacaggccatcttggatcaacgaaactctatttgaagaggctttacaattaatggaggaaaaaaatatcttgtacggtgggtcaaagtcatatagaaatatgtgccgatttaattctggatttttctttagacaaaagatattagatccgtacgatttttatttcagagttgagccagatgtagagtatttttgcgattttccctacgatccattcaaggtgatgaggcagaacaataagaaatatggctttgtgataactatgtatgaatacgaagatacaattccgagcctatgggaagctgtagaagaatatctcgaagaaacagagtcagcagatgttgacatggaaagcaacgctttcgggttcgtatcaaatttcgacttcatcggtaaatcttttggtgtcatcgatagtaacagcggctataatttatgtcatttttggacaaattttgaaattggcgatttgaactttttcagaagtgagaaatacattagatttttcgagtacctggattcaaagggcggtttctactatgaaaggtggggagatgcaccagttcattcgattgctgcctcacttcttttaaaaaaagacgaaatcatccattttgatgaattaggctataagcatatgccgtttggcacgtgtccatctgcatactacctgagacttcaacaaagatgtctttgtgatagcaatcacccagacaatattgatctcaatgtcatcagctgcctgagaagatggtggaaggacggcagcggtaaatacttcctcaaacacgattca

SEQ ID NO: 173682 - DNA, 108 bp, Saccharomyces pastorianus
atggaaaacaaactactttgttggtggttgtactggccatgcgtgtattcatctattatagctaccataatatctttttacaccataactagacacttattatattac

SEQ ID NO: 173683 - DNA, 450 bp, Saccharomyces pastorianus
atgaaatgggccatagaacaattcatgatcagtggagagactatcgttgaagggcctgcactggaaacctcgataattgtgaaggaagtcaaccgtattctagtagcagctacaggagactcaaacctcgcgaaatggcgtaagttcagtacgtttactgtagggtccaccaatcttttccaatttcaagaattaacagcaacggacatcgaagacttactactccgattatgcgaactgaaatggttttacaggactcaggaagggaaattcggtattgatcttcgctgtatagcagaactagaagagtatctaacatccatgtacaatttgaacacttgccaaaattgccacaagctggcaattcaaggtgtcaggtgcggcaacgaatcatgccgagaagagaatgaggaaactggagagaatagtctgtctcaaatttggcatgtg

SEQ ID NO: 173684 - DNA, 270 bp, Saccharomyces pastorianus
atggttgacgattcaaactatcttacaccacatgaaactgcattggcggtggtggccactgcaatgaaaaaagcaagactgcaactagatacattgttaataaattccatacttggtggcattctgttcagtagtggttcgttccttttggtagcggtgcattcagatgaccctgacatggtcgcacgaaaaccaggtattgtgaatcttataactggtgttacgttcgccataggcctcttctatgtggtaataatgggtgctgacctt

SEQ ID NO: 173685 - DNA, 2196 bp, Saccharomyces pastorianus
aggaatagccaacatgacattgaagatgtctcgacatctcttggtatagagactacttctcatatcaatcttctagctcgcgtactatcttctcgtactagtaaagagggtccttttgatgggaaatcgcttaaccttgggtttgatgctcaagaaatcttatcacaatacgtaagcaatgctaatgaccaaggcattcatttacgcaaaacaggtgttgtacttgacgatgtgggagtccaaggtattgataccagcttggtagaatcggcaacatttggtgatattttgcgcttgccagtcaccatatataaaggtatcaaatctcaaaggcacaagaagatgagaaacattctgcaaaacatcaatttattagtgaaaccgggagatatgctcttggtacttggtaggcctggtgctggctgttcttctctgttgaagacggctggaggtgtcattgaccaattttctggagtcagtggtacaatctcatatgacggcattacacagtcggagatgatcaaaaatttcaaatcagatgtgatttacaatggtgaattggatgtacatttcccttacctgaccgttaaacaaactttggatttcgctattgcttgtaaaacacctcaaaagagggttaataacatgtcgagagaagaatatatcactacaacgagagacttttatgccacggtcttcggtttaacacatacatacgatactaaagttggaaatgactttgtcaggggagtttctggcggtgaaaggaagagagtttccattgcagaagctgtggtagccaggggttctgtttattgttgggacaacgctactagaggcttggacgcttccacagcgctggaatttgcacaggctattcgtataatgacgaacctgctccaatccaccgctcttgtaacaatttatcaagccagtgaaaatatttaccaaactttcgataatgtgacactcctttatgcgggccgacagatttattatggtcctgttgaagaagcggaagcttactttgagagaattgggtacgaacgcccaccaagacaatcaactcctgaatttttaacagctttaaccgactctaatggacttcacatagttaaacatggtttcgaaaataaagttccaaaaagcgctgaagagtttgaaaaactttggaaagattctcctgagctagccaaattagagagggatatcaaagttcacaatgaaacagtaaactctgacagttcgaagactactttaaagagcaccattcatcaagaacaatcaaaatatgcaaggaagagttcctactacaccatatcgtactggaaacagcttcaactatgtacccagagaagttttcaaagaatttacggtaatagatcttctactattatcaatattattgccgcggttgctattgcttttatcattggttctttaagttacaatacgccatcctcgatggatggtgcttttactagaggcagtgttttgtattttgctctgttatactattccttgatgggtcttgctaatatgacttttgattacaggccgatattacagaagcataaaaattactctttatatcacccgtctgcagaatccttaggaagtaccattgctgcatttccattccggatgattggactaactctgttcatcatcattttgtactttctttctggtctgcatagatctgcaggaagtttttttacggtttttttgtttttagggatgtgttcggaggcgataaatgggttgtttgaactagtagcagccgcgtgcgataatatttcgcaagcaaattcaatagccggtgttctgacgctgtcaatttcaatgtactccacattcatgatccagttgccctcgatgcacccttggtttgtgtggattgcgtatatccttccaatacgatatgcattcgaatccatgcttaatgcagagttccatggaagacgcatgagctgcggcggcagtggtgtgatcccatatgggccaggctacgaaaacgttcaagtaaatgagcgtgtgtgtgcctccgttggctctcgtccgggtcaatcctatgtttcgggtgacgattacttgaaagcacaatacgattacgaatataagcatacatggagaaactttggcatcttatggtattttattatcgggtttattgtcttgaaggcaatcgtaaca

SEQ ID NO: 173686 - DNA, 456 bp, Saccharomyces pastorianus
atgagcggatacacgggaaataattatagcagatactcatccactcctccgagacaaagggggggttatcaccatgcgagacgaagtagaggtggagcaggcggatcgtattacagaggcggtaatgcgtcttatggcgcgagatacaacagtgactatgagcagccgccccaagagggagacttgagacaaaccggagcatactatcgaaacggatacacagatacaaggccgtactattcagctaatagcaggcattaccaagcacaaccatcccccaggtacaacaatggtacaaattcgtaccagctaccgaaacgtggcaatagtcaagatacgaacggcaggaccaagagcgcctcgcaagaagataatgacgaaaaaagagtcaagtccagataccagaacatgccggcagatcatccacgccaacaaccgatgagcgtaggcagcacc

SEQ ID NO: 173687 - DNA, 1035 bp, Saccharomyces pastorianus
atgtctataccccattccttattttcggcagtcttggtcttcgtggcgctagctactacaaccttagccagtacagaagcttgcttaccaacaaacaaaagggaagatggtatgaatattaatttttatgagtacacaataggcgacaaaaccacatatttggagcctgaatatatgggctataaatactccgatacaaagaagttaggttccgttagcggacagaccgatctctccatatactatagtccgccttgtgagagcactcctacctgtgtgacttatgcagttttgaagcgtgatgaggatggatatgatccttgcggacctctttatgaaactaaaaaacgtgatactgaatactgtgacccaaatactgcctattggagttctgatctttttggtttctatactactccaactaatgtaactgtggaaatgacagggtactttttaccaccacagacgggttcttacacattcaagtttgctacagttgacgactctgcaattctatcagtaggtggtgctaccgcgttcgactgttgtgctcaacagcaaccgccgatcacatcaacgaactttaccattaacggtatgaaaccatggggtggaagtttgccacctaatgtcgaaggaactgtctacatgtatgctggattctactacccaatgaaggttgtttactcaaatgctgtttcttggggtacacttccaattagtgtgacactgcctgatggtacagctatcagtgatgacttcgagggatacgtgtattcctttgatgatgatttgactcaatctgattgtaccattccagatccttcaaactatactataacaggcctaatcagcaccaccactgaaccatggaccggaactttcacttctacatctactgaggttaccaccatcaccggtaccaacggtcaaccaactgacgaaactgttattgttgccaaagctccaaccactgtcacctcatccagtttgtcatcatcttcttcagaacaaatcaccagctctatcacgtct

SEQ ID NO: 173688 - DNA, 102 bp, Saccharomyces pastorianus
gcgcgtatgactcttaatcataaggttaggggttcgagccccctacagggctattctttttttgttctatatgaacagagctatttctcttccaagagtcca

SEQ ID NO: 173689 - DNA, 93 bp, Saccharomyces pastorianus
aagttggtgccaacagctggtgagagattagcctggggccaaggtgacagttacataatggcatcgctaatttcttgtttgcttgccacctga

SEQ ID NO: 173690 - DNA, 78 bp, Saccharomyces pastorianus
tctagcgggatcgaaccgctgatccccgcgttattagcacggtgccttaaccaactgggccaagagaccaaattttaa

SEQ ID NO: 173691 - DNA, 546 bp, Saccharomyces pastorianus
  modified_base (498)..(498): a, c, g, t, unknown, or other
atggttaataatatcatgcacgagtacgtaccacccagtcagcggctattccatagcaggcatagaataacaagaaacgatttgaaagaagaggccctacattccgggaccacagattggacaacaattctggacacaacaatagataaagatactaatctcattagttatgctgtccccataatagacaactttgccattcctcgagcaaactctcaggggagtcctgtggccccttcgccgaatcacagatcaacgatgtactcttcttcatcttcttctgcgtcttctgtgttttctgatggtttgtttaatccaaacaacaacaggaactcatcaggatcatcttcattagtcattagaccacaaaaaaatttgagtgtagattctttgattcaggaaaataaaaggaaaatcaatagtgaaaaagaatcgttatcattaattgccaataataacgatgaaaccttgtgcactcatactgatccatccatacanaacctcattaatcgaaacaaagaggaacatcttaatttaaagttcaaa

SEQ ID NO: 173692 - DNA, 213 bp, Saccharomyces pastorianus
atgctctctacccctaacaaacaacaacagcaacagcaacagcagaagcaaaaggaacaacacagctcgttcaactacgcccacgcgtgcaagtgcatcgcagggttcttcgtggtcgcgggcgtcgtgttgatgttcttcgagaccggaattgaccctcagcagaagctgcaggtcaagcagatgcaccagctgagcggcgtgtctgccgca

SEQ ID NO: 173693 - DNA, 288 bp, Saccharomyces pastorianus
ttcgagtacttgctagaagcaaacaggccagagttgtttcataaaatgatatatgatttgtttatccactttattcagaaaaaagactttgttcaagcagctttgagtctagaactcttggcaggtacgtacgcttgggattctaatgatactcttgaagcaatatctttcccgccattgccagagcaatcttcatttgagaggaaggaatatcttcttaaggaatccgcaagaaacttttcgagaggccaaaaaccagaaaaagctttagcggtatacaaggactag

SEQ ID NO: 173694 - DNA, 639 bp, Saccharomyces pastorianus
agccaaatagtgaatgcggtcctgaatcagaacgagactgttacgttcgcagcaagaggccatgtccttgaagatggtatagataataactcattgattccggcagacatgctggaggatattttccaagaagcatcgtttattcccattactaccaatgctacgtttaactccagcgaattgattcaagagtttcagatcaacgatcttcagctacggtgggcagcgcgcaaaaagctcagtcttgtggggacatttttaggattctttgatctatccttctacgagacgcaccagcaagaccgagttcgcatcgataccattcggggacagatcgatctgtaccataacgacatcaatttcttaaacttacccatgaagcaatggatcaactcctcatcgcacattctgcacgatgaggacacaggaaatacgcagatgaagcttcaatttgatctagaatatgacgacatggaagtggtcaatagcttggaactaacacgaaccctgaacgaaatactattccaggttttacatgttattcactttaatgcgacgatagatgcgtcacttacgacggcattgggcccgtgggttctcactgggttagccggagagggtgacactctggtcacgtga

SEQ ID NO: 173695 - DNA, 162 bp, Saccharomyces pastorianus
atggaatctatatttctacatgctaatgttacgattattcctcatttcgttttatatgtttcattatcctattacattatcaatccttgcatttcagcttcctctaacttcgaagctttccataacttctgtcatcatctaataccgtatatgataatatat

SEQ ID NO: 173696 - DNA, 252 bp, Saccharomyces pastorianus
gccccaccgggctatggtaagacggagttatttcatctccccttgatagcactggcgtctaagggcgacgtgaaatatgtgtcgtttctgtttgtaccgtacacagtgttgcttgctaattgcatgatcaggttgggccgacgcggttgcttgaatgtggcccctgtaagaaactttattgaagaaggttacgatggcgttactgatttatacgtggggatccctatagtgagtcgtattatgcggaccgcg

SEQ ID NO: 173697 - DNA, 528 bp, Saccharomyces pastorianus
tcaactataagagagtataaaatagtagttgtcggtggaggtggcgttggtaaatctgctttaacgattcaattcattcaatcatactttgtggacgaatatgaccctactatcgaagactcttacagaaaacaagttgtcatcgatgacaaagtatccattttggacattctagatactgccggacaagaagagtattctgcgatgagagagcagtacatgaggactggggaaggtttcctactggcctattccgtcacctctagaaattcctttgatgagttactgtcttattatcagcaaattcaaagagtaaaagattctgactacattcctgtagtcgtggtaggtaacaaattggaccttgaaaatgaaagacaagtctcttatgaagacgggttacgcctggccaaacagttgaatgcaccctttctagaaacgtctgccaaacaagccatcaatgtagatggggctttttatagccttattcgtttggtaagggacgacgtgggaaatacaacagcatga

SEQ ID NO: 173698 - DNA, 81 bp, Saccharomyces pastorianus
ttttttgatataatgctctctactcactttattgagtggcgatttgctatttttttttcttcgcaccatgcgtcacgttaa

SEQ ID NO: 173699 - DNA, 312 bp, Saccharomyces pastorianus
tggcaaacagagtctggttctcatttaattgctcctttggcaggtgctgtcccaacaaaacctggttctgctaccgtgccattctttggtattaacgcttgtatcattgaccctgttacaggtgttgaattagaaggtaatgatgtcgaaggtgtccttgccgttaaatcaccatggccatcaatggctagatctgtttggaaccaccacgaccgttacatggatacttacttgaaaccttatcctggtcactatttcacaggtgatggtgctggtagagatcatgatggttactactggactcaggggtag

SEQ ID NO: 173700 - DNA, 198 bp, Saccharomyces pastorianus
tatcgatacacacctagtaagggagctgcaatagcactaactgttcttttcatagttacaacactaatatactctttccaggtagtatgggatgcaagaaaggcttctaagccagaagtcgacaatccctttgatactcctgttgataagtgcgagtctatcacagccattagtttgggggagaatataagaaactga

SEQ ID NO: 173701 - DNA, 558 bp, Saccharomyces pastorianus
aatgacggttcgcataaatccggtagaagtactaggcggtctggatctaggagtgcgcacgatgacggtctggattcattctcaaaaggcgattcaggcgctggagccagtgctggtagcagtaatagtcgatttagacatcgaaaaatatctgtgaagcaacatcttaagatatatctgcctaacgatctgaaacacctggataaagatgaattgcaacagagagaggtggttgagatcgaaactggtgtagaaaaaaatgaagaaaaggaggtccatttgcatcgaatattacaaatgggttctggtcatacaaagcacaaagactatattccgaccccggatgcttctatgacttggaatgaatatgataagttttatacgggcagtttccaggagaccaccagctacatcaaattttctgccactgtggaggattgctgtggtaccaactacaatatggatgaaagagatgagacctttttaaatgaacaagtcaacaaaggttcatcagacattttaacgaagacgaatttgaaatactttgttccagtttga

SEQ ID NO: 173702 - DNA, 453 bp, Saccharomyces pastorianus
  modified_base (12)..(12): a, c, g, t, unknown, or other
  modified_base (20)..(21): a, c, g, t, unknown, or other
accttttttttngggttagnntggagctcctcaatcttgtcacttaatgactctgtaatttgcttgagagacttgatttgctcatttttagcttcattagaggattgcaatttcctacactcaaccaacaaattctcgcttagttccaaagtaaagttcatatcctttgatgaattcgccgtgagtactccattgtgggaactactgcctgcaaattccggaagcacgtcttttgtctctcttttactcaaaatactcgaaatcgaaaaccgctttgttttatctccttcaccaccactgccgcattcatcagcctttaagttagccatccttgttacgccgttcgttgagacgctttcctggcttaatgaattgtcaatgctatttgcatactgccctgctgagctgtctttatcgttatttttatgcctgttgttgtgggacatattcgac

SEQ ID NO: 173703 - DNA, 84 bp, Saccharomyces pastorianus
tgtttaactgttcttggcctttgtttcattgcctacaagggcatgcacgaaaagcctcatacggtttcattaagacacaagtaa

SEQ ID NO: 173704 - DNA, 543 bp, Saccharomyces pastorianus
tcccgtccacaagttactgttcactccttgaccggtgaagctgctgccaatgccttgccattgccagctgtcttctccgctcctatccgtccagacattgtccacactgttttcacctctgtgaacaagaacaagagacaagcttacgctgtctctgaaaaggccggtcaccaaacctctgctgaatcctggggtactggtcgtgctgtcgcccgtattccaagagttggtggtggtggtaccggtagatccggtcaaggtgctttcggtaacatgtgtcgtggtggtcgtatgttcgctccaactaaaacctggagaaagtggaacgttaaggttaaccacaacgaaaagcgttacgccactgcttctgctattgctgctactgctgttgcctctttggtcttggccagaggtcacagagtcgaaaagattccagaaattccattggttgtttcctccgatttggaatccgtccaaaagactaaggatgccattgctgctttgaaggctgttggtgctcactccgacttgttgaaggtctga

SEQ ID NO: 173705 - DNA, 165 bp, Saccharomyces pastorianus
acacctacaaaccaatctagtggaacgactaatgcatctgtggaggtactttcagaggatggacctatgccaataaacgttatgatgcaagaaggtgtgaaagcgctgactaaaattctttccaatcagcttcaggacagacaagcttttcaaaacgctccgact

SEQ ID NO: 173706 - DNA, 759 bp, Saccharomyces pastorianus
atgcagcttaaacgcattgccttgacagcagcttcattaactgcggtttctgctcatggttacacaccaggcgaaccatggtccactttaactccttctgctactgtctcatgcgcagctacagaatttacttctaccttcggtatcgctgttcaaacaattgcaactgcttccgccaatgttaagagaggtgttatatctcaaatcaacgacggtcaaattcaggccacagctggacctaccttggccagtgacagtaccgaaatcacaaccactttaactagaacttccgtcattacagtggtaaagggtactattgcaactaatgttgtcgactccgctaattcttccagcaaaagccctacttctactttagccccatcatccgcgattacttcgacagcgacctctacgtctgcctctacatgcaaggctaccactgctgtgtctttagagaatagttcttgtaacaacgacggtaccttagaagtaactttgaaaggaggagttttgactgataataaaggtagaattggttctatcgttgcaaacaggcaattccaattcgatggtccaactccacaagcaggtgccatctatgcggctggttggtctatcacatcagaaggcaatttggcccttggtgatgacgatgttttttaccaatgtttgtcaggaaatttttacaatttgtacgacgaaaagatcggtgaacaatgtagtcaaattcacttacaagctgtttctttagtgaactgc

SEQ ID NO: 173707 - DNA, 102 bp, Saccharomyces pastorianus
tctgtttctgaaatcgaaattgaaagtgttcaagatcaaccctctgttgccgtgggaagtttcttcaagggcttccgtgctcccagtgacactacgttcgag

SEQ ID NO: 173708 - DNA, 1011 bp, Saccharomyces pastorianus
aaaccaacttcttcggcagcggcctctcatatatctgccggaaatgaaaacaacaataaccatgacgtcgcttctttagaaactttatcgtcttctgaaatctctgaattcgatatcaacaacgttaagatgaaacatttacaggatttgattgacgaacctgatgatttttcacaaccaatccatcttagactagaaaggtatttacggttgctaaacattgcgttatgtttaagacctcatgccaatagactgtttgaattttatgaactgtctcctttgggaaacttgttaagtcgtgaaagtggattccagggaaaacaagggtacttggtcatcagatctaccgcaaaagctcaaggttggagagtatctcattttggcaaacacgcgtttaaagatatgatagacagacatactaccaaatggtttatggtaagaaattcttatgttacttatgtttcagatctttcttcaacaacaccactagatgtgttcctgatagactggaaattcaaagttaggttttccgggaataagaacaatattttggataataagaaggaaattaattggatcattcacgatccaaatttggaaattaatgatgaattggaggaacttgctatcgaaaaccacactaacgacatcataaatagaaatggtgattccaaaacgcagcaaaaaaaatcaaacatctcttcgaaattgctgttgctaactctagaaaatagtgaaagaaaactgaaaatcatctgcaaatcagaaaactcgctcaaacaatggatcagttcaatcataaaaatgtctacgtccacaatttggtcgaaaccaaacagatttggtagttttgcgcccgtcagaacaaattcattttgtaaatttttggtggatggtcgtgattatttttggtcattgagtgaagctcttttaatggcgaaagatgtcatttatatccatgactggtggtatcccctgaactctacttgcggcgtccagttaaggtatcag

SEQ ID NO: 173709 - DNA, 306 bp, Saccharomyces pastorianus
caaattattcaatttttgattgacttggtatttgtttactttgctacctatacattctatgctcacaaatacttggacggtattttaccaaacaagggtacttgttatggtactcaggctgctgctgcttatgggtatttgattctaacatcttatttgcttttgtttatttccttctacatccaatcttacaagaaaggtggtaaaaagacagtcaagaaggaatctgaagtttccggctccgttgcatccggttcttctactggtgtcaagacctctaacaccaaggtctcttccaggaaagct

SEQ ID NO: 173710 - DNA, 360 bp, Saccharomyces pastorianus
atggtcaaactaacttcaatcgctgctggtgttgccgccatcgctgctactgcttccgcaaccaccactctagctcaatctgacgaaagagtcaacttggttgaattgggtgtctacgtctctgatatcagagctcacttggcccaatactactctttccaagccgctcatccaactgaaacctacccagttgaaatcgctgaagccgttttcaactacggtgacttcaccaccatgttgaccggtattgccccagaccaagtgaccagaatgatcaccggtgtcccatggtactccagcagattaaagccagccatctctaatgctctatccaaggacggtatctacactatcgcaaac

SEQ ID NO: 173711 - DNA, 1371 bp, Saccharomyces pastorianus
atggtaagcgaacccgaattccagcaggcgtactatgaaatagtttcttctgtgaaggattctacattatttgaaaagttccctcagtatgagaaagtgcttcccgttgtttctgttccggaaagaattattcaattcagagttacctgggagaacgacaaaggcgaacaagaagtggcacagggatacagagtgcaattcaactcggctaagggcccgtacaagggtgggctgcgtttccatccatcggtgaatctgtcgatactgaaatttctagggtttgaacaaatcttcaagaacgccctcactgggttggacatgggcggcggtaaaggtggcctgtgtgtagacctgaagggcaagtccgacaacgagatcagaagaatatgctatgcattcatgagggaactgagcaagcacatcggcaaggatacggatgtccccgctggcgacatcggagtgggcgggcgtgaaataggctacctgtttggcgcttacagatcgtacaagaactcctgggagggtgttttgaccggaaaaggtctaaactggggtggttctttgatcaggcccgaagccactggttacggcttggtctattacactcaagccatgatcgactatgccaccaacggcaaggagtcgttcgagggcaagcgtgtgactatctctggcagcggcaacgtagcacaatatgcggccttgaaagtcatcgagccgggaggcgtcgtggtttcgttgtccgactcgcagggctgcatcgtctcggagacaggtatcactttggagcagatcaacgacatcgccgccaccaagatccacttcaagtcgctgaaggagatcgtaggcgagtacgctaccttcggcgagaacaaggtcaagtacattgctggggcacgtccttggacgcatgtgagcgacgtggacatcgcgttgccttgtgccacgcaaaacgaggttagcggcgacgaggccaagtcgctggtggcctctggcgtgaagttcgtggccgaaggcgccaacatgggctccacgcccgaggccatctctgtcttcgaaaccgcacgctccaccgcagccactgccggcgacgcagtctggtttggaccaccaaaggctgccaaccttggtggtgtcgcagtgtccggcctcgagatggcgcagaactcccagaaagtgacctggaccagcgagcgcgtcgatcaggagttgaagaagatcatgatcaactgcttcaacgactgcatccaagccgcacaagagtacgcaacggaaaagaacactaagatcttgccgtcactggtcaagggtgccaacattgccagcttcgtcatggtggcggacgccatgctcgaccagggagacgtgttt

SEQ ID NO: 173712 - DNA, 180 bp, Saccharomyces pastorianus
ctcttagccaacgcagtggaatcgctatcggagctattgcaaataaaaacccccgaagtgatcatgaaacgaagaccagagttttataataaggccggatatgtggaaaatagaaccactgcattaatggaatgcggtagagaactgctatgtaagggaatttgcaaagctgcagaatga

SEQ ID NO: 173713 - DNA, 102 bp, Saccharomyces pastorianus
tctcgaggaacgatgataccaagagccaacagatccatcacagcaatatgtaacactctgcgacaagcttatatatacaaagatcaaaagcattgcctttga

SEQ ID NO: 173714 - DNA, 381 bp, Saccharomyces pastorianus
atgagaaaagacctcaaagggccgcgtttaatagtcacatcggggatgggatccaccttcagcaaatgctctttattcatctttaaagcagttatgatcttacacacctgcttaattgttaaatcaataagaatattttcgaaaaagaagaaaagaaacgggtctatgcataatatgtactacgcttctgttccttttctattgttctcgaatgcctattcgatagacttttcgcggcacgtaaacgagttcttggaaaaaaaacggtgcgaaatgataataccactgaaattacttgcagatcatacttatttgagcgaaatagaatacgtgtctctaaacgcagatggacaatatagtcagcttcaagacatttttttt

SEQ ID NO: 173715 - DNA, 249 bp, Saccharomyces pastorianus
tacaccattgagaaatgggtgaattttgagataattgttgggattccattgttggtaaaggctataatattaggtatacacaatatactagaagttctcctcgaggatttaggaatcctcaaaatggaatctatatttctacaacctaatattacgattattcctcattccgttttatatgtttcattatcctattacattatcaatccttgcacttcagcttcctctaacttcgatgacagcttctca

SEQ ID NO: 173716 - DNA, 513 bp, Saccharomyces pastorianus
acatttccataccatttagtagcactactttattactacgtttttgtatcttcaaatttcaatacggtgaagttgctaagttttttgattcctacacaagttgcttatttagttttacaattcaataaatgcacagtttacggtaacaaaatcattaagatcaattactcattgaccattatttgtctaggtgttacatttttgttgagctttcccacaatgttattaactatattatttggtgcgccattaatggacttattgtgggaaacctggctgttgtctctgcattttgcatttttagcataccctgcggtttattctgtatttaattgtgatttcaaagtgggattatggaagaagtattttatctttatcgttgtagggggttggattagttgtgttgtcattcctttggattgggatagagattggcagaattggccaattcctattgttgttggaggttatttgggcgctttggtgggctatactatcggtgcctatatataa

SEQ ID NO: 173717 - DNA, 456 bp, Saccharomyces pastorianus
atgacaggatctttaaacagacactcacttttgaacggggtaaaaaaaatgagaataatattatgcgatacaaacgaagtagttaccaatctctggcaggaatctataccccatgcatatattcaaaatgataagtatctttgtattcatcatgggcaccttcaatctcttatggattcaatgcgtaaaggtgatgcaatccatcatggccactcttacgcaattgtttcacctggtaactcgtatggctatcttggaggagggttcgataaagctttgtataattattttgggggaaagccctttgagacatggttcaggaatcagcttggaggaagatatcacacggttggatctgcaacagtggttgacctacagcgatgtcttgaggagaaaacaattgaatgtagagatggtattaggtatattattcatgttccgaccgctgcccccccc

SEQ ID NO: 173718 - DNA, 528 bp, Saccharomyces pastorianus
atgtgggaagatgagaatactatctgctaccaagtagaggcgaacggtatatcagtcgtgcgcagggctgacaacaacatgattaacggcaccaagttgttgaatgtcacgaagatgacaagggggagaagggatggaatattaagatccgagaaggttagggaagtcgtgaagattggctccatgcacctcaagggtgtttggattcctttcgaaagggcttatatcctggctcaacgtgagcagattctagatcatctgtacccgctcttcgtcaaagatatagaatccattgttgatgccagaaagcccagcaacaaggcatctttgacccccaaatctagccctgcccccatcaagcaagaaccatctgataataaacacgaaattgctactgaaattaagccgaagagtattgatgctttatcgaatggagcatctactcagggtgctggcgaactgccccacttaaaaatcaaccatatcgatactgaggcccaaacaagtagagcaaaaaatgaattatca

SEQ ID NO: 173719 - DNA, 753 bp, Saccharomyces pastorianus
gctagttattctttagttgaatcgaattctttcgggtcagaaaattggtgtcttaagttacagcctagttataagcatggtcttttaactggattaagtaatggcgaaatacgtttgctagactggagtactggtaaatcagtacaaaagattaaggcgagcgaaactgcaatcaatgatatgaaggtcatcggtagcgacttctctgctggtcatctagttagtagcgcctctatcgacgcggtgaaagttttcgatataaggacgaatgaccgcattgctcaaattcaaaacgaggccaactccccctttatttctttagattctcgtcatggtctattggcctgtggtaccgaattgcagggaattgacgctgctgtatacatatatgatattcgcaaatgggacactccattgagatcattaattgactctcaccatgatgacgttacctgtattaaatttcatccttctgacgtcaatattttgctcagtggttcaactgatggttacacgaacatttatgacttgaaacaagatgaggaggaggacgctttacaccaagttattaattatgcgtcaatacattcctgtggatggttgtccccaaagaggatatttacactatcacatatggaaacatttgcaattcacgaattgaacgacaaatctgacgaattgaaagagccacaacccttggaatttggtgatgtaagagaaacatggaactgtgactacgtggtagatatttaa

SEQ ID NO: 173720 - DNA, 165 bp, Saccharomyces pastorianus
aaacatttagctatcactgaaaagtacgagggcgagatgcagtttgccgctctgtacttcggtggtaaacaaattgaattcagggctccaaaagacgattcttctttatgttttgttcttggaaactacgatgatgttgatgcgtcttccaaaacattgaaacca

SEQ ID NO: 173721 - DNA, 480 bp, Saccharomyces pastorianus
atgatgcctgccaaactgcagcttgacatactgcggaccctgcagtccagcgcttgtcatggaacgcaaacgctgaaaaacttccagtttctcgagcgcctctacaacgaccgtatcgtcttttgcctcccattcttcctggcactttttttcgtcccagttcaaaaagtactgcagcacctccgtcttcgattcacgcaagttgctccatactttaaaatacaactctttgatttgccttccagacatgcggaaaactcggctcccttgcttgcctcttgtcgaatccaatacactaattgtttctcttcttctagtaatagccaagtaccaagcataatttctttgtatccgagagtagatctctcccctttttacgctaaaatatttcaaatatcctacagggtccccatgatatggctcgatgtcttccaagtattctttgtattcctcgtcatttcgcagcattctctccacagc

SEQ ID NO: 173722 - DNA, 126 bp, Saccharomyces pastorianus
atgatctttgggattccattatttcttaatgttataatattacgtatatatattatactagagattctcctcatggatttaggaatccacagaaaggaatcaataattctgcattatactgtaaat

SEQ ID NO: 173723 - DNA, 828 bp, Saccharomyces pastorianus
gcgttgcgggacgttggccagttgaccactaccacggaaattgagaacttcccagggtttccagaggcgttgaccggcagcgagttgatggaaagaatgaggctacaatctgccaggttcggtacatacataatcacagagaccgtctctaaagtcgatctgtcctctaagccatttaagttgtgggttgaattcagtgaagacgctgaccccgtgaccacggacgctataattttggccaccggtgcttctgccaaaaggatgaatctaccgggggaagagacctactggcaaaagggtatatctgcatgtgctgtgtgtgatggcgcggttccaatcttcagaaacaagccactggctgttattggtggtggcgattctgcgtgcgaagaggctgaatttctaaccaagtatggttcgaaggtatacattttggttagaaaggaccatttccgtgcatccgtaatcatgcaaagaagaatcgaaaaaaactcaaagataattgttttgtttaacacggtcgcattggaagccaaaggtgatggcaagctactggacgtgttgaggatcaagaacatcaagactgatgtggaaaatgatttggaggtgaacgggctgttctatgcaatcggccacaaccctgccacagaaatcgtcaatgggcaagtggacaaacaggaaacagggtacattaaaactgtgcccggatcatctctaacttctgtgccagggttttttgccgccggggacgttcaagactctagatatagacaagctgttacctctgctggatctggatgtattgctgctctggatgcagagcggtac

SEQ ID NO: 173724 - DNA, 150 bp, Saccharomyces pastorianus
atgaataggcacactaacattgaatccataattcacgacctggttcatatcgacgaggagtacgaatcttttgccagaacttttatcgccaatcccgatagcaattctacaaacacaaatatcactataataaacacgacggcagctgac

SEQ ID NO: 173725 - DNA, 495 bp, Saccharomyces pastorianus
gtacgagacttagtgacattgccttcatcactgcccttgattactgctggttttgctactgatcaggttcatttgcttattggtacagggtccacggactcagtaagcgtttgtaagaatagaatccactccattttaaatgctggtggtaatcccatagtagtgaatccctcgtcaccaagccatactaaacaattacaattggaatttggtaagtttgcaaagttcgaaatagtagaaagggagtttaggttatccgatttaactactttggggagagttctggtatgcaaggtagtggatagagtattcgtagatctacccataacacaaagtcgcctatgcgaggagatcttttggcaatgccaaaaactgagaattcccataaatacattccacaaaccagagttttctaccttcaatatgattcctacgtgggtcgacccaaaaggaagtggtttacaaatctcagttactacgaatgggaatggatga

SEQ ID NO: 173726 - DNA, 405 bp, Saccharomyces pastorianus
aaaatagagtttccggtacttgctaacggcaaaaggcgcggctttatttacaacgtaggaggattggtaacagatattgcatggcttaatatagaggaaaatactgatataggcaaggatatacaatatttagccgtcgcggtatcacagtacatggatgagcctttgaacgagcatttagaaatgtttgacaaggagaagcactcctcctgtatacaaattttcaaaatgaatacttctactctacattgcgtaaagttcaaaccattgtacactcatttggtgaagtgtggggatcttaaatggcacggaaggatgtcacgccacctcatctggttgagctggtttaatcatttccgtaaagcccagggaaggggacaaataaaatttttatgggaacgatta

SEQ ID NO: 173727 - DNA, 330 bp, Saccharomyces pastorianus
gataggaaaaggtcttttgaaaaaattgtcatgtccgtcatggtcgggaaaaatgtaaaaaagttcctgacgtttgttgaagacgaaccagatttccagggcggaccaatcccttcaaagtatcttattcccaagaaaatcaacttgatggtctacacgttgtttcaagtgcatactttgaaattcaatagaaaggattacgataccctttctcttttttacctcaacagaggatactataatgagttgagttttccgtgtcctggaacgttgtcacgaaatagcgagtgccaggccgaacgacagctctacgatgcgtactttcactga

SEQ ID NO: 173728 - DNA, 963 bp, Saccharomyces pastorianus
atggacagattggcagaaaatcaggccacagcctccatgtcggttgctgcgttaccgtctagttcccaggagagaaatagcagtgacaggtgcagagagtattgcagcagtgatgaggacagcaacgcgggcgttcatgttagtaccaatactaggactagtgctactaccactaccagcaccaacgccagcactagtgctactaccactgctagtaccaatgctaggactagtgctagcaccacagccagcaccaacgccagcactagtgctactaccactgctagtaccaattctaggactagtgctagcaccacagccagcaccaacgccagcactagtgctactaccactgctagtaccaatgctaggactagtgctagcaccactgatagttccaacgtcaggactagtgctactaccactgatagttccaacgtcaggactagtgctactaccactgatagttccaacgtcaggactagtgctactaccactgctagtaccaacgccaggactagtgctactaccactgatagttccaacgtcaggactagtgctactaccactgctagtaccaacgccaggactagtgctactaccactgctagtaccaacgccaatactaatgctactaccactgctagtaccaacgccaatactaatgctactaccactgctagtaccaacgctagtgccaacgaggacgccaatacaggtggcaatgctgagagtaatagattccgtccagtcactgacattaataaagagccatataagcggaaaggaagtcaaatggttttgctagagagaaagaaactgaaagcacaatatcccaatacttctgagaatatgaatgtattagagtttcttggatttcggtctgacgaaattaaacatcttttccttgtatggatcgatatattcttctgtccagagggagtattcacacaatacggactt

SEQ ID NO: 173729 - DNA, 96 bp, Saccharomyces pastorianus
caggaagacaaagcatgcgagaggccctgggttcaattcccagctcgccccattataatttttccacttttttgttctttgcaagaacgcgcggta

SEQ ID NO: 173730 - DNA, 816 bp, Saccharomyces pastorianus
atggtgaaatcaaatgtggaattttcgcttcaacaagaactagaacaattgcataaatcccttatcacgttatcagaaatatacgatgacgttcgttccagcggcggaacatgcccaaatgaggctgaatttcgagcttatgctctcctgagtaaaataagagaccctcaatacgatgagaatatccaaagattaccaaaacatattttccaagataaattagttcaaatggctttatgtttcagaagggttatatctaactcagcttatactgaacgcgggtttgttaaaactgagaattgtttaaacttctacgcaaggtttttccagttaatgcaatcacccagcttgccgttattaatgggattttttttgcaaatgcatctgacggatattagattttatgcgctaagagctttatcacatactttaaacaaaaagcataaaccaataccatttatttatttggaaaatatgttactctttaataatcggcaagaaataattgaattttgtaattattactcaattgaaatcataaatggggatgcagccgatttgaaaacattgcaacattattctcacaaattgtcagaaacacaacctttaaaaaaaacataccttacctgcttagaaaggagattacagaaaactacttacaagggtttaattaatggcggtggagataatttggcttcttcggtttatgtgaaggacccaaaaaaggatagaataccttctatcgcagaccaatcttttttaatggaaaattttcaaaacaactataatgaaaagttgaaccaaaactcatctgtt

SEQ ID NO: 173731 - DNA, 1515 bp, Saccharomyces pastorianus
atgtttaaagtgtttggttttggtgcgaaggaagagattcctgagctttcacaggaagaaaaaactaaagccattctaaaacaagctcatgatttcgaacaggcactgcgtgcgatggactatgtcttagatgataatgctgacgagggtttggctttgctggatgagagtgatgctaaagaagcttccgaccaaactataaatgcgttagctcgtggtgtcattgaatttttggaggccactttaggttttgaagctgaagagatgaaaaaagcttctgcgactttggccaaggcagaagctttatctttgaaaagtagagagagggctcaaaaaattggattgaagagcagttctttatatcctccaggaacagtttatgccgtgacttatacagaatcatgccttctacatgccctattgatgattttcagtgaaagtatgatggaggcggccaaggccattttaaagctcagaaagtcgtactatatgttacaagaaatcttggaaactattaaagctgctaacaaagccaagaaattgaaaattacgtcaggcagtgaagataaggagtccaccccagcgactttcataactggtggcgatgcgttcaattccgttgatataccttatgaactgactcctgaagaacaaaaggataaggatcttttacaatttgctgaacaaattcatagcatgaggactgaaagattatctggcgcccacattggcaactctcctgcaattaacaggttgagaggtgagctaggactacaagcaatggaagacttgccagaagaggaaataacagatcataaagttctttcggatgatatagatttaagtcaagcaacaattgatgagtttgtccattctggtgtcaatttatgctttggtattttacaggttgtgatatcactattaccacccgctattggcgcggtcctatctgtggttggattcaggggctccagagaagaaggtttgagacttgtttggaaagccacaaagcaaagaaacgtgcatggttgtattggtttgttagccctgatgttttactatgatggacctttccaattcactgacgatgattttgacattcctgcagcagttaaggattccagtaacagtgaagattccgaagatgaagagatggatggccctacgttgttgcatcctgggaaaatactggaagatgcgttgctgcaatcaagagcgctatttcccaatagtgcgctatggttattgaatgaggcaaggatgctatctggtaaagggcgtttagaggaagcagtcgcattgatggattcgattgatgttagcaagatacggatgagacaggtcaaatccttgatgatttttgaccgtgctataacattgatccatttgcatcaatacgatagagctgcagaagatattttatcgctattagacatcagtgattggtcacacgctttttacacatattttgctggctgctgttatttagaaaattggagaatgtgcgaaatggga

SEQ ID NO: 173732 - DNA, 213 bp, Saccharomyces pastorianus
aacatcccccatattgagaaacaataccaactatcattaattattgaaccaaaaccaagaaagaaagtcgttccgaattccaattcgaataataaatcacaagaaaaatccagggatgaccaaaccgatgaaggaaaaacatccactaagaaagacagattttcaaaattccaattacataaaacaaagaaaaaagctcccaaggtttctaag

SEQ ID NO: 173733 - DNA, 657 bp, Saccharomyces pastorianus
atgaacactaccacatctactgttatagcagcagttgccgaccagttccagtctttgaactcttcttcttcatgtttcttgaaggttcatgttccttccattgagaacccattcggtattgaattatggccaattttctccaaagtgtttgaatactttagtggctatccagctgagcaattcgagtttattcacaataagactttcttggctaacgggtatcatgctgttagtattattatcgtttattacattattatctttggtggccaagctatcttacgcgccttgaacgcctctccattaaagtttaaattacttttcgagatacacaacttgtttttgacttctatttctctagttttatggttgctgatgttagaacagttggttcctatggtttatcacaacggtctattctggtctatctgctctaaggaagccttcgcaccaaaattagttactctttactatttgaactatttgaccaaattcgtagaattgattgacactgtgtttttagttttgagaagaaagaagttattgtttttgcacacttaccatcacggtgccaccgctttgttgtgctacactcaattaattggtcgtacttctgttgaatgggtagttatcctactaaacttgggtgttcacgta

SEQ ID NO: 173734 - DNA, 114 bp, Saccharomyces pastorianus
aatatatataagtataaccttaaccagaatggcatcttaacgagaagacatggccttggtgacaactctcttcaaaccaacttcagcctttctcaattcatcagtagaagcgtc

SEQ ID NO: 173735 - DNA, 963 bp, Saccharomyces pastorianus
atgattaatgagatgaacgctactgatgaagcaaatgaagctaacagcgaggaaaaaagcatgactttaaagcaggcgttgctaaaatatccaaaagcagccctgtggtccatattagtgtctactaccctggttatggaaggttatgataccgcactactgaacgcactgtatgccctgccagtgtttcagagaaaattcggtactttgaacggggagggttcttacgaaattacttcccaatggcagattggtttaaacatgtgtgtccaatgtggtgagatgattggtttgcaaatcacgacttatatggttgaatttatggggaatcgttatacgatgattacagcacttggtttgttaactgcttatatctttatcctctactactgtaaaagtttagctatgattgctgtgggacaagttctctcagctatgccatggggttgtttccagggtttgactgttacttatgcttcggaagtttgccctttagcattaagatattacatgaccagttactccaacatttgttggttatttggtcaaatcttcgcctctggtattatgaaaaactcacaagagaatttagggaactctgacttggactataaattgccatttgctttacaatggatttggcctgctcctttaatgatcggtatctttttcgctcctgagtcgccctggtggttggtgagaaaggatagggtcgctgaggcaagaaaatctttaagcagaattttgagtggtaaaggcgccgagaaggacattcaagttgatcttactttaaagcagattgaattgactattgaaaaagaaagacttttagcatctaaatcaggatcattctttgattgtttcaagggagttaatggaagaagaacgagacttgcatgtttagcttgggtagctcaaaatactagcggtgcctgtttacttggttactcgacatattttttt

SEQ ID NO: 173736 - DNA, 99 bp, Saccharomyces pastorianus
aattcaaacctgactgcgcttcggacagtacaagcaagccgtccatttcttagtaataagaaaagaatggctctatttgttcaggaaaaactagcataa

SEQ ID NO: 173737 - DNA, 96 bp, Saccharomyces pastorianus
gattcattagatctattacattatgggtggtatgttggaataaaaatcaactatcatctactaactagtatttacgttactagtatattatcatat

SEQ ID NO: 173738 - DNA, 114 bp, Saccharomyces pastorianus
ggatttagcataggaagccaagaaactagaaaaaaaaaaaaaaaaaaaaaaaaagaaataaagattgcagcacctgagtttcgcgtatggtcacccactacactactcggtcag

SEQ ID NO: 173739 - DNA, 111 bp, Saccharomyces pastorianus
ctaaccattcacaacgatctttgcagcaacaacagcaccaacagcaccaacagcaccaacaacaacaacaacaacaacaacaacaatatcagcagcagcaacaatatcctt

SEQ ID NO: 173740 - DNA, 642 bp, Saccharomyces pastorianus
atgagcttgcacattagtaaactgattgagcaatatcgttccactaaggacaatgaccttaaatatatgcttttaaggcaaaactttaaaattaacgacatagaggatgagctggctcctcttgttaacgaattgctgctcccggtattggtcgaagaacaagacatggaaattctcaacctagtatcgtttcaagtgctccccgatttagttctttctatgatcagcgaccctgcagctgctcagttgggatgggtaataagcttgatatgcgaccctttattaaaccaaagcatgatacatgcaaatcgttcttttgttctgattgagacactaagaaatgtgttacaaaaaattgaaaactcccctcatttagattaccaccaaccagtaaacagttcattagagtttatctccaaatttattgttgaaatgaaaaggcatatgtgtgatgtggatgctgcgcagctttcacattcactttctgaaagcaatatgctaatttacatagaatcccttaatctattgctaaaatttagcttcttttcagacgcggcaagtccttcagtaatggtcacactgccctttgatattttgaatgacgtttttacaattgtgcaggactattctgctacgaataca

SEQ ID NO: 173741 - DNA, 174 bp, Saccharomyces pastorianus
atgatgataataatatttatagaattgtgtagaattgcagattcccttttatggattcctaaatcctcgaggagaacttctagtactttctacatacctaatattattgccttattaaaaatggaatcccaacaattatctcaaaattcacccaattttcaatttgggaaatgc

SEQ ID NO: 173742 - DNA, 1140 bp, Saccharomyces pastorianus
aaaataggaaccttaaacgatagcgatcaatctgcagtgcataatggtacagaaaatggctctgattttcgaaagataactcccacagaggaagagatctgtgatgacgtagttttattatggaaggaagagcccggaactgaagacgctacgattcagcatctttatgacaggattacggaaagaaatcaatcgtggaaattgagtgcttctcgttttcgaaaaattctaaatgagcaccatctttatgacacagatctagagaccgtttctctatataaagataaaatacattttccgaaagccctagattctgatgctaaggtcgaagtgaaatttattgatgacgaacatggaaggggccttttcgctaaaagagatttttccaagggccaaatcatcctgaaagaaaataaacctatcgtatatattccaccactggacaagctttttttcatatctaatggaaaggcatgtgctcgatgtggtaaggcgctatatgatttgacccagcacaaaattatggtccattatttggattgtgaagtttgcaaagctatttggtgcagtgaaaaatgtaaaaaagcacatgcgtcgttacatgagcttttataccactcatggagatcgaatagaatagacattcttcatgctggtaattggaaaagatttgttaactactgtgagaaatattgttttaccgctgccttttcagttggtcttatatatggatccatgcttttggatactacaggagaggtcaaagagcaatggcaaaaattggcaagcatctcacaaagggaaagaattaaattaagagacgccagcggtatcggcagtacgtttagtttactgaatggtacaactgtacatactgaagaggaatctgataatggtaccaaaaagggcgttgagaagaatattgatgacgagactgtttgggagaagtgctacgaattattttgcggtgcatttccaaaagcttctgaagaaatagatttcgagaaatttttgaccatgatcgggacgttcaatatcaatcaatataacggccaggtatatcattggatctccttcataaaccatgattgtgaaccaacgccgtatattgagcaagtagaagacatgagaacgggatcc

SEQ ID NO: 173743 - DNA, 105 bp, Saccharomyces pastorianus
catattattgagctcattcaaggcgtagggagactaagagatgggggcctctgttatctattatctagaaaaaacagttgggcggcaaggaatcgtaagggtgaa

SEQ ID NO: 173744 - DNA, 891 bp, Saccharomyces pastorianus
ggctatcctacacttgtgaaggagtttaatcctgatgaaagatatgctaaagtgcaaagagtagatgttgactgggtaaccaaccaaagagactttacagatgtagatccacaggaaattgaacttatacgctctttaaggaatagtgatgttcctgtttactttggtaagatcaagactacaattattgtatttggcttttttaaagtagacaagtacaagaggatcatcgatgccatcgaaacccataaccctcctgtaataatcaattctaaaggattatggatagatatgccaaaatatgccttagaaatttgccaaaagaagcaattaaatgtagcaggagctattcacggggcgcaacatgcaattatgggtatgttaccgcgatttatagtggcgggtgtggatgaaatacaaactgaatgcaaagctccggaaaaggaatttgcagaacgtcaaactaaacgaaagcgaccagctagattaatattctatgattccaagggcggtaagtacgggtctggcttgtgtgttaaagcgtttgagcatattgatgatattatagagtctagtttaagaagaatagaagaatgcccatgcagcgatggatgtcctgactgtgtagcggcttctttttgtaaggaaaacagcctggtcctgtcgaaacctggcgcccaagtcgttttgcattgtattctaggtcactcggaagatagttttatagatcttatcaaagatggtccagagccaaatatgccagagataaaagtagagactgttattcctgtgtcagagcatgtcaacttttcagatgattttaagattattgacgttagaagagctacgaaagacgatactcatacaaatgaaatcattaaaaaagagata

SEQ ID NO: 173745 - DNA, 333 bp, Saccharomyces pastorianus
atggaaaagatctttactttgtctgttcttccattagccacgacggcaatgctaacgactggtccattgtctaccgcagcagactccttcttttctgttatgctattaggatattgttatatggaattcaattcttgtatcacagattatatatctgagagagtttacggtgtttggcacaaatatgcgatgtacatgctagggttaggttctgctttctctcttttcgggatttataaattggagacagaaaacgatggttttgttggcttggttaagagtctatgggactcttctaaaagagaagattcagcaaagattgaggccaagaaa

SEQ ID NO: 173746 - DNA, 81 bp, Saccharomyces pastorianus
ccaaaggttatcaaactgagccttgcatgcaaagtaaaagccgcggacatactcgcgattaaaaagttttccacatactga

SEQ ID NO: 173747 - DNA, 87 bp, Saccharomyces pastorianus
acaatttcatccttatacgacttggtgtggctggctaactcttccctgttccctttgctcgttattggcgggatctctagagtcgac

SEQ ID NO: 173748 - DNA, 222 bp, Saccharomyces pastorianus
aggtatacgacctcacgcttcgaagtaaaggagctacgcactctataccaccagtaccaccaccgccacttgccacactcaccttcacttctactgatatgtcatacgcacacggatgctacagtatataccatctcaaacttaccctactttcatattccacaccatggccccattctcactaaatcagtactagatgcactcacatcattatgcacggcg

SEQ ID NO: 173749 - DNA, 921 bp, Saccharomyces pastorianus
gactctagtggctctgaatgggagctttatcgatacacacctagtaagggagctgcaatagcactaactgttcttttcatagttacaacactaatatactctttacaggtagtatgggatgcaagaaaggcttctaagccagaagtcgacaatccctttgatactcctgttgataagtgcgaatctatcacagccattagtttgggggagaattataagaaactgacagtaaggtcgacattttctgccttcatcccattattctttggttgcataatggaaattgtgggctacattgcaagagcagtatcatcgtctaacacaaaggagatagcgccgtacgtcatacaagcagtgctgctgttaattgcgcctgccttgtatgcagcgactatttatatgctgtttggtaggctactgcatgttatgaggtgtgaatcccttatgatcgtttcctctcgttttgggactagtttttttgtgtttggagatgtggttagtttttgtcttcaggctgctggtgggggcttaatggcaacagtcaacggtagaacgaccggttcgaatcttattactgcgggcctggttattcaaattgtctttttcggggttttcatcatcaatgagttcagattctcatacagtgttgcgagggtttgccccttctaccgtcatatatcgaaaaaatggtggtttttgaatcttacactaatgctttcgagtatattgatcatggtacgttcgattgtgagactagtcgagtttgtagaagggtatgatggattcataatatcgcacgaatatttcatctacgtctttgacgctgtgcctatgcttttagctgccattgtatttattgttggatccttttttggaaacatttttaccacaattaccgagtgtcagtccttgaaaccataa

SEQ ID NO: 173750 - DNA, 684 bp, Saccharomyces pastorianus
tcctcaatgataaacagaaagaagtacaacggtaactcgagttcaatagaggccgagggtggctctagcgccgctgaatgcaactcgatagaactggaagagcaaggtaaaaaaactgagtttgatcttgcccatcttgggtatggccaaggtccagcaacactgagcgacaataatgaagtaacggatatactcgacactgtgcaggatgctaaggaggccgatgatagtgaaaggatgatgccgctcatgactgctttgaaaacataccccaaagcagcggcttggtcactattagtttccacaacgctgatccaagaaggctatgacaccgccattctcgggtctttttatgccctacccgtctttcagaaggagtacggctctctgaatagcaagacaggagaatatgaaatttcagtttcgtggcagattggactggctttatgctacatggcaggtgagattgtgggtttgcagttgacaggtccctccgtggatttaatgggtaatcgctataccctgattatgtcgttaatgctcctgactgccttcatttttatcctatatttctctaaaagtttaggggtgattgctgtgggacaggcattatgtggtatgccatggggttgtttccaatgtttgacggtctcctatgcctctgaaatctgtctatggcgctga

SEQ ID NO: 173751 - DNA, 69 bp, Saccharomyces pastorianus
aagaaattgagggtcaggaaagaagttgactacaaagacgatgaagatgatgacatcgagatgacttag

SEQ ID NO: 173752 - DNA, 309 bp, Saccharomyces pastorianus
cctatgatatatggattcccatttttggaaggtggagtaatactagagaggatagaagatgatgttgaagtggatgaaagtgaggcagaagaattagaagaggcaacagatgttatagaactgactgaagtagcagtcgttgaagtaccggctgctactgaagtagcggtggttgttgaagcagcggatgtggttaactttggcaaacctctcttaacagcggtgatgatggccatttttgcttatatttttgatttgattcttactcactttctgcagtactatatttttattataactgatgactta

SEQ ID NO: 173753 - DNA, 114 bp, Saccharomyces pastorianus; identical to SEQ ID NO: 173138

SEQ ID NO: 173754 - DNA, 483 bp, Saccharomyces pastorianus
ctcaatatgtccaagagtgaaaaatgtccacgcataatcgcatgtacacactttcatgaactatttaacgagaatgtactcacagagcatataaaaggtatcaaacattactgcactgatatacttatcagccaaaaatataatcttttagaaacagcacatgtcggagaagatcatgaaagtgagggaatcacattcctattcaaagtaaaggaggggatctcaaagcagtcatttggcatatattgcgcaaaagtatgtggtttgagcagagatattgtggaaagggctgaagaactatctcgcatgattaatagaggtgatgacgtagttcagcaatgtggaaatctgaccgaaaaggagatgagagaattccaaaagaatcaggaaatagtgaaaaagtttttatcttgggatttggatctcgaaactacaacaacttccgagaatctcaggcttaaattgaaaaatttccttcgctaa

SEQ ID NO: 173755 - DNA, 1242 bp, Saccharomyces pastorianus
gtgctagactatttccaaaggaatggcggtagagagtgtgatgggtccgaaaatccagcggaatacgttttggagtgcataggcgcaggtgcaactgctagtgtgtctgaaaattggcacgaaatctggaagaggtcatcagaacatgaagctgtcgacagtaccattcaaagattgattcagagttcagggagtagtgatgacttgaaaggtgattctaaaattgaaaaatatgctactgattacttctaccaatttaagtatgtttatttgcgtactgctgttaccttttggagggatttggactatattatgtcaaaaatgatgttactgcttgtaagcggactttatgttggattctcattttacgatgttggtaacagttacagagggctccaaaatgccttgtttgcaacttttatttccattattgtttgtgcaccagcgattaatcaaatccaggcccgtgctttggcatctagagagttgtttgaagtgagagaatcgaagtctaatatgtatcattggtccttacctttattaacccaatatttgtgtgagattccttatcattttgtgttctctacattttattttgtctcgttttacttccctttaaaaatattttttcaagcttccagatcagcagtgttctttttgaactatagtatcatgtttcagttatactatgtggggcttggtttaatggtgttgtatatttcacccaatttggcttcggctactattcttctcagtatgatcttaattttcatgctagcgttttgtggagtcatgcaagtaccatctctaatgcctggattttggacctttatgtggaagttatctccttacacatactttgttcagaacttgttaggtctagtcctacacgataaggaggtagtgtgcagcaaaaaagagttgtctttttttgaccccccaaccggccaaagttgtggtgagtatatgaaaccattccttgaaatggcgccaggctatgttcaaaatccagatgccacgaaccaatgcgcctattgtgttttttcggtaggggatgacttcttgcattatatttcatccagctactcaaacttatggaggaattttggcttctactgggtatacattatttccaatttgtttgccatggttagcgtctactacttatttcacgtgaggaaagtaagtgtatttgacacagccgcagtaagaggaaaattgtcacacttcagatttagaaag

SEQ ID NO: 173756 - DNA, 111 bp, Saccharomyces pastorianus
ggcgtgtggtctagtggtatgattctcgctttgggcaattatctgcttaacaacagaaatgcaaagcatgcgagaggccctgggttcaattcccagctcgccccgttatat

SEQ ID NO: 173757 - DNA, 1125 bp, Saccharomyces pastorianus
atgaattttaatccggctgtaggaaatcacaagctaagtcattatgtgcatgttttctgcacgttcaccactttttgtatactgggaactgaaacaagacaagctataacggcactttcgacctactcgggggcctatataacagcccctacagttctttggtctaatctgacatcatgcatgctgatgggaatcatgcaatccttgaatgcatacagttggatgaaagatcaccaaatcttatttttgggcgtgaccacaggctactgcggttctctgtcttcgttttctaccatgctgttagaaatgtttgaacactctaccagtttaaccaactataacattgcccatcatgcaaaattgcccaacagggcttatggaataatggagtttttgtccgtcttactggttcaccttatggtgtccatgtgcagtcttatttttggcaggcaattagggaagaatattatcgttacttatggctctatagcttttgcgaaggcgtatactcctcctacaggtactgtaagtgaaaatgctggagatgtgaatatagaagaaatggaaaagaatactcttgaatataattttaaaactcctgcaccttatattctgaggttattcgattttatagataacttggcctacgcattagctttcccattaatcgtcttattcgttgttttatgtgcatactacgacaattattcaaggggtaaatggacattgccatgcctattttgtatctttgccggctttctacgatattggttagcaaagcgttttaataaaacaaacaaaaaatttccactggggactttttttgcaaacattctagccacattattagttggtatatttacaatggtacaacgtggaaaaagacattcttttatggatattcccgtcgtgaacagtttgaattcatgccacattgtttccgccttaatatccggcttttgtggcactttaagtaccatcagtacttttattaatgaaggttataaactccaattcattaatatgcttatttattataccgtttcgatcggattctcttactgtttattggtgattactttgggctcttatgcctggacgagaggtttgaccccccctgtttgt

SEQ ID NO: 173758 - DNA, 684 bp, Saccharomyces pastorianus
atgaaattagacaatttggtcatggatatgccatgctatttatcaagaacatttttaagtgttaagccaatggtctgttttctttacaaagataaattagaaaaacatgaggataaatacaaagttcccttagatatccgtaagttttttggtaagctgaaccctggagaaacatcttctttgttttctgtaccactcaatgacttagttatacatcttcttcctgaagccgatgaggatgttaagagttatcaagcagaatattttgagcggaaggagtataagcttcattggggtggaataaaatggttgattatgcattatcattttcacgtagcaaataataacgaaatgccatggttgcaaatcatagaggatttatcaagttcagacgaagacggtgttgatggaggtattttcagattcagggatttgtggggactcacatgtaaaatattattcgacgtttcatgtatagctaatggactaatggacgaaaagttaaaaggagaactagggcacgaagatttgatagttggactacatgactatggtaatcagatgcaaccgaacggaagaagtgaatgggagataggaatgatcaacggcgacagaaacttaaaatatagcgatgtgatacctgaatactacatgaagcacctgctggagtgccgctcgctttgg

SEQ ID NO: 173759 - DNA, 90 bp, Saccharomyces pastorianus
atgtctccattggccaggtactcaaaagaacaaccgggtttatgtgagcgtttcgaggtttttgtatctaaaaaggagatatgtaatgcg

SEQ ID NO: 173760 - DNA, 267 bp, Saccharomyces pastorianus
atggtggtgaacacgatatatatcgcaaggcatggatacagatccaactggcttccggagggtccatatcctgacccacttacaggaattgatagcgatgttcctttaacagaacacggagtccagcaagccaaagagttggcccattaccttttgtccttggataatcaaccagaggccgccttcgcttctccattttatagatgtcttgagactgtacaaccgatagctaagctgttagaaatacctgtttattctagaaagggg

SEQ ID NO: 173761 - DNA, 159 bp, Saccharomyces pastorianus
acttgtaccgaaaattcgcgcccacaggcaattgtaacaggtagtcaggaagacccttggcaattcagagctgcgaatgatctagcgtgcttagtattcggtatctcacagaatgccattcgcgctttaaaccttgatggatgtaattcacaccgatag

SEQ ID NO: 173762 - DNA, 711 bp, Saccharomyces pastorianus
atgtcattgaaatcgtgtcatgatttgaaatttttagacttgggtttagtatcggaaacagttaagctgaaggagttattttctgccattaaaaatttcactaaattaacgcatttatcttttcccagatcgtcgattgactgccaagggttccaagatattcaatggccacagaatctcaggtacttgaaattgagtggaggtataacaaatgaatttgtgattgatacgaaatggccaacaactattacaactttagaattctcttattgtcctcaaataacggaattgtctatttattcgttgttatcacagatcggtgataatttaaagcatttattttttcattatccgatgccatctctggcagaaaattccctagaccatgtcttcacgtactgtgctaatttaatttctttgcagctcatggttgattactgttctaagtggtgcttttctgaattcatgctaagtaaattggtggaatatgataggcctcttaaaacattgtatttagaatgcagcggatccttgggattagcttctaagattcatcccgatgacttgactatagccatactggaatccaggctgccctgcctaaagaatatttgtgtttctcccaagctggggtggaacatgaaaagcgatgaagtcgctgatttggtagtctctttggaagatcaagatggcagtttatatcttaattat

SEQ ID NO: 173763 - DNA, 972 bp, Saccharomyces pastorianus
acgcccccagcgataaacacttttaacggaaacaaaaatggcaacaatactattaataatatctcatcacccagcatcgagctccatacagatgcaaacagtatcgagtcgctaaaaaaaactccaaactctcctagaaataaatcattaacccccaaagttattttgcccactcaaaacatggacggctctcttttgaagataccccgtttaaacgataatccccctggtattcttatagcgaaaaccggctctcccgtaaatttggacgttgaaactacagtacaacctctaccaaaaatcaataagcttactactcattccgtgaaaccaactttgacaaaacaatcagcagagaaagtttcgttgaagcgaagtaacagctcgattacacagagcgattctaatggcaactctaataaaaaacctgcacccgaaagagcgaggaaatcgaattcagtgtcagcaatattaccgaagccagctaacaagacatcaaaaaaggctgctagtggcaacgctgattccaataagaaaaagcctgtttcgaacaaggctgcatccgctattaagaaagaaccgaacacaagctccaaattgagtacagtcaagaaggaaaacagcactttatcttttaacaaagccactgagaaagaaaaagacaaaggcactgacacaaagacctctgcaaacaacgtcaaaaaggaaacaagctcaaaatctcccaggaaactagtacctgcaccaacaatcaattcacctaagattgtacaaacaacagaaacaaaaataaaggaaccctcaatcttgattgacattccgttgtaccaaactgacacaaatgactacttggatgaaaacggtcaagtaatttttaatttgtcaactttaataaaagaaaaatatcacctaaaccagaaagagctgacacagttaaaagattccaaaagaattaataacacagttgaatga

SEQ ID NO: 173764 - DNA, 324 bp, Saccharomyces pastorianus
atgggacctgtggcacataccaatttttatgactatagggtttttggaaaatctgtggacgataacgttgtatgttatggaacactaagtacaacattagaaggaaaaatggtggaaacggaaacaaaccctcatttgaacatagagaagaagcagggtatgttatgtattcgtggttttagcataggtaaaccagtagagtccgatcgtttagagaaagctttgcatttagctgaaaggtttggaggaggtgaaggatggatgcctctagttggcgtttttggactatttggccaagacggttgcttatacatctataatcaa

SEQ ID NO: 173765 - DNA, 105 bp, Saccharomyces pastorianus
atgtcctttgatagacagttgaccgaagaccaggaggtcgtccttaagcaaatttggacacaccttttccatctgtggcaagttcccgtggatggaactcatatt

SEQ ID NO: 173766 - DNA, 537 bp, Saccharomyces pastorianus
atgggggatggtttattgtatttgataatggaatgtggtgatcatgatttgtcacaaatccttaaccaaagaagcggcatgccactggattttaattttgttagattctatacaaaggaaatgttgctgtgcattaaggtagttcatgatgcgggcatagttcattcggatttaaaacctgcaaattttgttttagtgaaaggtatcttaaaaatcattgattttggtatagcaaacgcggtaccggaacatacggtgaatatatatcgtgaaactcaaattgggactccaaattatatggcaccagaagcactagttgctatgaattacacacaaaatagtgagaaccaacatgagggaaacaagtggaaagtggggagaccatctgatatgtggtcatgcggttgtattatatatcagatgatttacgggaaacccccatatggcagtttccaaggccaaaataggctgttggctattatgaatcctgatgtgaaaatcccatttcctgaacatactagcaataatgaaaagatc

SEQ ID NO: 173767 - DNA, 252 bp, Saccharomyces pastorianus
ccacatcagattattccgaacaatccaatcactggtgagcctttgccgatcaaaacatccccttctcctacaggacccaatccaaacaattctccatcaccatcctctcccatatcaaggatttctggcgtaaacttgactagcaaaaaggcaaacggtttggatgatttattgagtttggcaggaggacccaaaccagcaagtacgagaaggaagaagaaaacagcgagaggctatgttaatgtaatggat

SEQ ID NO: 173768 - DNA, 792 bp, Saccharomyces pastorianus
cctatggttattacaagagccgagggctcctatgtctatgctggtgataagaaaattttggactttacttctggccaaatgtctaccctacttgggcatgggcatcctgaaatttgtgaaactatctctgaacatgcatatcacttagatcatttgttcagcgggatgttatctcctccggttctggaattggcagaaaagctcactggtttacttccaaatggcttagacagagctatgtttttgagcactggttccgaggcaaatgaagcagccatcaaattggccaaggtatacactggaaaattcgaagtcgttggattatcattatcgtggcacggtatgacaggtgtatctggtggaactacctaccaagatggccgtaaaaaccatggcccatcaatgcctggtaacttggtcttgcctgctccaaatgcgtacagatccatctttcggaagcaagatggctcctatgattgggagacggagatggactacggtttcggtttgattgatgctgcctctgttggttccttagccgctgttattgtagaaccagttatgagttcaggtggtatgattgtacttccagaaggttacttaaaaaggttacacatgcactgtaaaaaaagaggaatgctcttgattgttgatgaagctcagacagcaataggtagatgtggtgccatgtttgggttcgaagcctacgacatcgttccagacattttgactttaagtaaaaccctagggaatggcctaccattgtctgctgtggttacgtctgatgagata

SEQ ID NO: 173769 - DNA, 552 bp, Saccharomyces pastorianus
gatcaggtggagagggagaacaattctactacaaatgtaatatccttccatagttctgagatttggctagcaatgagatactcccagttgcaaatcttactatacagaccatctgcattgatgccaaaaccgcccattgactcactatccactctaggagagttttgcttgcaagcctggaaacatacttatacactgtacaagaagcggttattacccttgaactggataacccttttcagaacattaaccatttgtaacactatcttatactgtctttgccagtggagcatcgacctcattgaaagtaaaatcgaaattcaacagtgtgtggaaatactaagacatttcggtgaaagatggatttttgctatgagatgcgcggatgtttcccaaaacattagcaacacaattctcgatattagtttaagccatggtaaagttcctaatatggaccaattaacaagagagttatttggcgccagcgattcatatcaagacatattagacgaaaacaatgttgacgtctcttgggttgataaacttgtatga

SEQ ID NO: 173770 - DNA, 378 bp, Saccharomyces pastorianus
ttcaaaagaatctcagttcaatccttactgaatggggaagaaccgatgccaaccccaacaataactccaaagaacgtaatggatcgttctagattagctggtaggaatgcaagacctatcctgcctacgatgggcctatttaaaaggggagaaaaggcctcaattacgaaaacctgcggccaatgcaaagaaacaaaaagctcatctcaatggagagagggtccaaccggtggatcgtgcctctgtaacgcatgtggacttttctatagaaaactgtttttggcctttgggaaacagtctgctaaacgatacttggaagaaatcaaaaaaaccggagcaaaaagacggattccgaggatgctttatgggatgcaaaga

SEQ ID NO: 173771 - DNA, 951 bp, Saccharomyces pastorianus
actttgagaccatccccattgcctcacacgttatatttagcattattacctctgcataaatggatttccagaattgtcgtactcgaatctgttttacacacatggttttacctttattacatgtacattaatggcgcgttatacgtcaagatgaaaaagttacctaatatttatggggttgctgccctgggtcttttcttactcattgctattacctccgtaagatatgccagaagattaagttacagagtcttttactatgtccactacataagtacatggctcattgtcgttttgctgcattaccatgcccgccccggtatctcgtattacaccactttgaatgtggccatcttggtgggacaaattatttataggctctacgtttcaaatactacagtagtaacaatcgtgcccatatcttcatcattatctgttctggagttcccattagttgatttgcccaagcgtcccatcctaccaggtggccatctaagaatcaacgtatatcataaaagttttttgaagagatggctttctcatttaatacccttccaacatccctttaccatagccagtataccaagcgatagcttggtaagattaattattagaaatgggcatttcccattgcgcacaaacgagaagtactacgtaacaggtgcttttgaaccagaactaagttttatttcaaaacccagtttccctattgacggtagtacaaggtcatcgaagaacccattccgtaacaactcctcagcactaattagttcgccgctgaacttcgtcatcaaggcacaaagagtgtttatgtgtgtgggaggctcgggcatttccttcggtttaccattgcttcgtattttgaattttaacggtgtaaatgtaagactactttgggtttccagagattataaggatctagaagtactaaccattccaaaacaattcgaa

SEQ ID NO: 173772 - DNA, 420 bp, Saccharomyces pastorianus
atgcttgttggctatttggtagctaagtttgatattgtttccatggaaaatgcaaaaggtatatcaaatatggttgttaacgctattttgccttgtttgaccttcaacaaaattgtgtccaatatttcatggagggatataaaggagattggagtgataatactttcagcttttatcttgtttgttttaggtgccacgggcgccttatttactacatttgctacgactgtgcccaaaaaattcttctgggggctcatatttgcgggtttctttccaaatatatcagatttacctattgcctatattcagagcatgggtaacggctccatttttactgctgaagaagctgataaaggtgttgcttattcctgcattttttttatttattcaaagtttcctaatgatgaattttggaatgtg

SEQ ID NO: 173773 - DNA, 222 bp, Saccharomyces pastorianus
tttttattattggctgtcagctcaagaaggaaattagtttcagactatagattaatgaggttgcttatgaataaagaacaccgagcggctttgctgcaaggattcatatgggacgttgatttaaggtggttccggatgttttgtctgatcttaggggctgccgaaacagtgattgtgatggccggtattgctattggatttggtgtgggtataacacttgaa

SEQ ID NO: 173774 - DNA, 81 bp, Saccharomyces pastorianus
atgcaactaaatgaggaagtagcagaaaatgacctaaataatcacagtaacaatgatcatgaagatcagaataatatgata

SEQ ID NO: 173775 - DNA, 297 bp, Saccharomyces pastorianus
atcattgccacctatggtaatcgtgcagaacaatttttagaaacagattcagacttcgctaagtaccatgcgaaattgaataaaaagttgcaacacttgaggagccgttgccatttggtcaccaaggatacaaagaaatactcaagtaaaaataagtatggcgaaattaactccgaggattatgataataaaactaaattgattggtgttttgattttactacacgctgaaagggacttggcattggctgaaactttgaaattgagagctcgtcaaaggactctagagatccccggc

SEQ ID NO: 173776 - DNA, 279 bp, Saccharomyces pastorianus
acgccattaagggttgatgtggctcgttccggcggcagacacgtatgggcatatcgcggtaatcatccagcggagcattttgagagccagatgtcgtggctaaggtttcaaacaaggcagtatctaactagattcacagacaaccaatcagatttcgtacattctttacaaaaaaagcacagaacgccttttagagacgtttatttcaaatacacttcgcttatgggttcccacatgttttatgttatcgtgcttcccatgcctgtgtggcttggatac

SEQ ID NO: 173777 - DNA, 2112 bp, Saccharomyces pastorianus
aggccagaaactttatcaaaaaagaacactataagtaaacagggtagaaaaaagcctgctaagtcatgttacttctgtagaacgagaaaacttaagtgtggcagagaaaggccgttttgtggaagttgctcttccagaaaccgaaaacaatgtaattacgaagaaagtgcctctttagaagaaaatcgccttagggcaaaatacaggagatgctcaaagtttcagatggcctgtcgtattgaagagctcgaatctcacataacaaaacaatccgacgctgacactcaagaggaaaaaaaccctctttacaacatgaggtatttatcttcaaagcataatagacacattatatatgggccaacatcatatcgagcaatactagcaacccaaactaatacttttgctaaatacagggaagagatatggaatgtcttaaaacttcgtcgtaacagttggaaaagagaacatcactactcaaccttgtcagagattagttctatcgaaactacctcacagaattcgaattcacggagtgttgtcgaatccttatgcgaatcgcttccgacctatgaggccttccggcaacatctgatagatttcttcgccagtgacttttatcatagctaccaaatcgtaaatgaacagaaagtactaaaaaacctgcaggattgtttcgtgaaaggtccaaaaaatagcaaaacaggctgtcatgcaataattgcgcttaatctagacaccaaaaaaaactattacaaagtgggtgtaatgacggcgattatgtgcctaatatctcacccgagtaaagtcttagaagctgttgagaccttccataaagtcttaatatccttcgtttcggctaaagttttttacattgagcgggtggaatttttatttcttcgttatttgtatataaacgttgcaggtctcgatggaggcgatcagtcacattgcatattccttcatgggctgacaattgacacagctatttatatgggtcttaatgaagatcttcgtcgtttattcatggagaaagtttactcaatagaagaaattccttatttggagaggttatggctatggatattattcacagacgttaaaatttcactttccacaggaattccacctcgtatcagtgatgcttttgtagacaaggtgcgtctggaaaattattctttaaaaaatgatatacttctttataaaacaacactgaaactaagaagtatcatggaacaaattcacgctcataaaatatcgcccaacaacattcctcttattatccaagacttaaaatcgtttaccatggatgtgtttaagccgttgaacttttatctagacatatcaaatgtagatggcagtgagctcaccgaactccaactatggcacgtaacccttcatatgctagcaagtttatccaatcttcatactttgacatgtcaagattacaatccgataatattgaatgcgagcatactggctccattgaacacattacaattgtgtttcaaaattcttgaaggttattttgagttagacgatggtagtttgcccccagcttccgcgtatttctctcaaaaatggccccatctaaacaatgctttatttgtcttttacatgggctctttcaggtcattgattcagatttacaccatatttctccaacgtatggaaaataagagcgtccaattatttatgcagacgaatatgtccagcaatcaaaatatatgttttggggacatcgaaggtccgcacgatggttgtatttcgctgagaactgcatttaaagagatgaaaaagatatttgatacttttcatcaagaaaggtcgagacgccttacccaaatttggcagaactcctattacttttccatcattatatcaatggaaaaaataggaaggagagtatttggtaaggcaatacagaatattgatgacaaacgtgtaatagaagagagcacttctaaagacaatttaacgacaatactaaatgattcagaagagcttttgatggaattttcaaggagttttactgaggatatattagggccatcagacgacttctttgatactgctatttgtggatggaacgatttcgaagatttttttttttaa

SEQ ID NO: 173778 - DNA, 126 bp, Saccharomyces pastorianus
gaatctatatttctacatactaatattacgatcgttcctcattccgttttatacgtttcattatcctattacattatcaatccttgcacttcagcttcctctaacttcgatgacagcttctcataa

SEQ ID NO: 173779 - DNA, 291 bp, Saccharomyces pastorianus
atgataataatatttatagaattgtgtagaattgcagattcccttttatggattcctaaatccttgaggagaacttctagtactttctacatacctaatattattgccttattaaaaatggaatcccaacaattatctcaaaattcacccaatcttcaattatgtatacagaatatactagaagttcttctcaaggatataggaattctcaaaatggaatcggtatttctacataataatattttattattctttttcattttatacgtttcattatcctattacattatc

SEQ ID NO: 173780 - DNA, 96 bp, Saccharomyces pastorianus
gattcattagatctattacattatgggtggtatgttggaataaaaatcaactatcatctactaactagtatttatgttactagtatattatcatat

SEQ ID NO: 173781 - DNA, 135 bp, Saccharomyces pastorianus
acttcaattttacctcccgtgttattgatcaaattcgaagcagctttaagagcaggcccaagtgcaaatttgcttatgtgtgtgtcttggaaaacttcaggtatcgtttttagtagtttttccaaattcttttta

SEQ ID NO: 173782 - DNA, 393 bp, Saccharomyces pastorianus
atgtcggacttcgtaccaattgatgctgacttaaatgaggctccttttcctgaagagaatatcatcgacgcaaagactggaaatgagcaaactaccatccaaactgaaaaagttcgtcctactcccggtgaggtggcttctaaagctattgttcaaatggcgaagattttaaggaaggaattaagcgaagaaaaagaagtaatattcacggatgtactaaaaagtcaagcaaatacagaaccagaaaatattactaaaagagaagccagtagaggatttttcgatattttatcacttgctacagaaggatgtattggtttgagtcaaacagaagcattcggaaatattaaaatagacgccaaacctgcactatttgaaaggtttatcaatgct

SEQ ID NO: 173783 - DNA, 174 bp, Saccharomyces pastorianus
atgtcccagtcgaaccctatcttacgtggcctcgctattacaacagccatagctgctctatcagccaccggttatgctatctactttgactatcaaagaagaaatagcccgcaattcaggaaagtgttgagacaaagggccaaagagcaggccaagatggaagaacaagctaaa

SEQ ID NO: 173784 - DNA, 549 bp, Saccharomyces pastorianus
atgagtgaagttgcaccagaggagatcatagagaatgcagatggatctagatctatcattacatacaagattgaagacggtgtcaagtataagattactcagaaagtaaaagaggttaaagtattggaaaaagtccataaatctgttgcagaaagaaaaaactggcataaatatggctctgaaaaagggtctccagcaggtccaagtgctgttacagcaagattgggtgaagaagtagaattaagattgagtaggaactggaaacaagctgaagaagaaagaatacaaaaagaaaaggcaagtctcacaaagaccggtctacaatgtagattatgtggtaacgaccatatgaccatgaactgtccattcaagacaattttaagtgaactttcagcattagaagacccagccactaatgaaggcggtgtcgaggccgccagtgaagagaaggcaggccaagttggcggagctggttccatcccagggcagtatgttccaccttctcgtcgtgctggtgcaagagatccttcatccgatgcttacagagac

SEQ ID NO: 173785 - DNA, 162 bp, Saccharomyces pastorianus
ttgatatctgctgtcgttacctcagtaaagcgaaatactatggtacgctggcatgtcttaacaatttcaagcttattcaaaaaaagcactcacgatgggggtcgaacccataatcttctgattagaagtcagacgcgttgccattacgccacgcgagctact

SEQ ID NO: 173786 - DNA, 192 bp, Saccharomyces pastorianus
atgacagttttcagtgcccccaattactgtgatagccaagggaaccttggtggtattattcatagtggtcctggtcacggtattttacaagctggtaaaaatgacgatgaagacttaataagtgaaacattcgaagctgttgagcatccagatatgaaaccaatggcctactctaatggtgggtttggttta

SEQ ID NO: 173787 - DNA, 399 bp, Saccharomyces pastorianus
aggtgtttgctaggcgtcggactaccagttgatgtgactgctacggaaactttgactcatgatgaacaagtaccaggtgtagagccaggaccgtgttcgcgaggaagttctatagatggtctgctgccctcgttgctcggtccacatgatgatgtggatgacgattcggcggcttttcacaagtacatgacactatcgcgagacctatccaaggctctagatatgtcatcatcatcatcgtccagcctgcgcgttcaaagtcggcggcaccgtagttctgtgagcgcaatatctgcaatcttacaccaaggaaaatctggccgcgaagacataactggaagccttagcgttccggcagaacaagaaaaactcagttttctgccaaagcctcgagtatga

SEQ ID NO: 173788 - DNA, 120 bp, Saccharomyces pastorianus
atgtcttcctcggtcatttcttcttctgcaacgacctccacttctatattctctgaatcatctaaatcatccgtcattcaaaccagtagttccacctctggttcttctgagagcgaaaca

SEQ ID NO: 173789 - DNA, 252 bp, Saccharomyces pastorianus
atgcacggcacttgcctcagcggtttataccctgtgccatttacccataacgcccatgattatctacattttaatatctatatctcattcggtgcccccaaatattgtataactgctcttaatatatgcgttataccacttttacaccgtatactaaccactcaatttatatacacttatgtcaatatcacagaaaaatcacctccaaaatcacctaaacataaaaatattctattcttcaaccataataca

SEQ ID NO: 173790 - DNA, 174 bp, Saccharomyces pastorianus
cctaaggtggatcatataagtaagtcaagaattaattcatccaaagaaacatccaaatttaacgatgagttcgatctttcttcatcatcaaatgacgacctagagttaaccaacccttccccaatccaaattaaaccagtgagaggacaaatcaagaagggtcaaattgcatga

SEQ ID NO: 173791 - DNA, 747 bp, Saccharomyces pastorianus
ccaaaaagtggtacgccaaatcctcatgcagagctatgggtttacagtatgaaagatggaacatcgttccatccaagaataagtggaaataaaaaagatggaagtctattaattactgaagttacatgggtaggaaatggaaacgttttagttaaaactacagatcgatcctcggacatattgaccgtgtttttgatagatacaattgcaaagacttcaaacgtggtaaggaacgaaagttctaacggaggatggtgggagattactcataatactctgtttattccggcaaatgaaacatttgataggcctcataatggttatgttgatattcttccgattgatggttacaatcatttggcttatttcgaaaatagtaatagttcacactataaaacattgacagaggggaaatgggaagtggtgaatggcccacttgcctttgattcaatggaaaatcgtctttacttcatttctacacgaaagagttcaaccgaacgccacgtgtactacatagatttacggtcaccaaatgaaattattgaagttactgatacctctgaggacggtgtctatgatgtgtccttttcttctggtagaaggtttggtttactcacctataaaggaccaaaagttccatatcaaaaaattgtggacttccattctcgtaaagcagaaaaatgcgccaaaggtaatgttttaggcaaatcactatactatttggaaaagaacgaagtacttaccaaa

SEQ ID NO: 173792 - DNA, 129 bp, Saccharomyces pastorianus
atgaaacttttcaaaaatggtgcacgggctttctgtatattgaactttccgtcgcttttcggagctacaattcccctacccggcttgtcggcattaagtctcttcatcccgtgtactattacccgacag

SEQ ID NO: 173793 - DNA, 381 bp, Saccharomyces pastorianus
atggttgctgaggcagaaaagttcaaggccgaagatgaacaagaagctcaacgtgttcaagctaagaatcagctagaatcgtacgcgtttactttgaaaaattctgtgagcgaaaataacttcaaggagaaggtgggtgaagaggatgccaagaaattggaagccgccgcccaagatgctataaattggttagatgcttcgcaagcggcctccaccgaggaatacaaggaaaggcaaaaggaactagaaggtgttgcaaaccccattatgagtaaattttacggagctgcaggtggtgccccaggagcaggcccagttctgggtgctggagcaggccccactggagcaccagacaacggcccaacggttgaagaggttgat

SEQ ID NO: 173794 - DNA, 87 bp, Saccharomyces pastorianus
atgcacttgaaacaacgtgtacaccatcacgtggtttgtttgaaggcatcggtccgccctggaaatctggttcgtcttcaacaaacc

SEQ ID NO: 173795 - DNA, 438 bp, Saccharomyces pastorianus
ctcagctctttttgtcttagcgcgttctcagctagtgtcctttgcctttcctcctcttctttttcattctgtaatttttcttgttccagtctcttttcttctctaacacgtttgttctcctcttctctcttgcgcttttgttcttctttctgtttccgctgtttttcttgcatttcttctctacgctgttgctcttctaacctccgttttctttcttcgtcctttctccgtttagcttcctcgacctttttcctttgggcctcccgtcttttcatttcacgctcttctaattccttttgcagtctctctttttcttcctctcttttccgtttctcttcctcttttgccaattgttgtaatctcttcttttctttctctttctctctttttttctgcttcttttcctctttttctcttttctttcttttttcttcctct

SEQ ID NO: 173796 - DNA, 165 bp, Saccharomyces pastorianus
gctaagaaaaatgatgacatcacaacgaacaaccagccaaaatttcgtaaaagggctgttgggttagctcgtgtagtcatcaactcggtaaggaagtacatctactctctagcccgtgtattcggttatgagatagaacctgactttgatagattggctgtttag

SEQ ID NO: 173797 - DNA, 171 bp, Saccharomyces pastorianus
atgagctatgagaaaaagtctgtggaaggcgcttacattgacgattctacaacgttcgaagcatttcatctcgactctcgtttattacaagctattaagaatataggatttcagtacccaacattaatcaatcacatgctatcctttggctttcaacagaagagagattta

SEQ ID NO: 173798 - DNA, 198 bp, Saccharomyces pastorianus
atggagatgcgcttgttcttgaacgatgcacgtatctctcacaggtttcgtatgcgatggtattgtttttttggcgcctatgtgtgttcgtatgcgcagaatgtgggaatgccaattatagacttaccgaggtgccttgaaaaacccttttgcgtgcctgtgatgtttccgtttctgggcaaagagaatatccgaatt

SEQ ID NO: 173799 - DNA, 636 bp, Saccharomyces pastorianus
atgaacttctttttgttatttgcacattcttcaggtgtcatcccagcgagaagcctattctttatcattcttctatggtttttagtttctgttccgttgtcgtttgtgggttcaattgttgctcataagcagtgtaattgggatgagcatccaactaaaacaaaccaaatcgccagacagattccatatcaaccctggtacttgagaacagcacaagcaaccttaatcgctggaattttcagtttcggatcaatagcggttgagctgtacttcatttactccagtttatggttcaacaaaattttttatatgtttggatttttactcttttcattcttattgttgaccttgacaacctcattagttaccatcttgatcacatattactcgttatgtctagaaaactggctatggcaatggagaagttttattattggtggtttaggatgttcaatctatacgttcatccactccatactatttactaagttcaagcttggtggagttattactgtcgtgctctatctcggatattcacttattatatctgcattatgttgtgtcgtcactggagcgattggtttttttagcagtatgttttttattaggaagatatactctgccattaaagttgag

SEQ ID NO: 173800 - DNA, 570 bp, Saccharomyces pastorianus
tatgtcgacaacagaaaagtgaacaaaaataaaggttatgtaaaaggcttacaaaattatgcagcccaactagaaaattccatcatcaggatgagagaaacgaataacgaggaggaccgaaaaaaaatattaaattcagtgcccatcaattgtgtacgtatagccgtgccacaggaaaacctgacgttagttccgtcggctgaaagttcaatgaaaaatcaggcatcatcatcttataacaacctagccgttccaggtaccggtgccttttctagtgattttttggcggttaaaaagccccgtcttgccccggaaaatgataagaaatgttcaactattctagaagattacagcactttaactaaaagtccctatattattttgtctctttccttattttttaaatggttatacccgagtcattacttttttatttatagagaggcacttctttctgccttctttcaggatagaaatttgaaaagctattactgttcaaaggagttgatttatgccgtcgctgctcttggttccaaaataagcaataaatctggcgagctatatcacagt

SEQ ID NO: 173801 - DNA, 126 bp, Saccharomyces pastorianus
aagattattaagtcattgaacgcacataaggacggggtcaataatcttttgtgggagaccgagtctgatttggtcagcgcaggtgcagacgcttgtatcaagaagtggaaggtagaatttgaataa

SEQ ID NO: 173802 - DNA, 696 bp, Saccharomyces pastorianus
gaattgagtgaagccaagccactaattagatccgagttattgcccaagttgagacaaattttccaacaatttggcaaggatttgctggccacccatggtaatgacattcaggtgcccgaatctcaggtgaaatctaactacacaagaggtaaccaaaaaagtagctttaccgaaatcaaggactccgcttcaaagccaaaaaagaatgcacttccctcttctacttcaacttcagcaccagtctccagcaccaacaaagtcccccaaaacggaagcggcaatagtacatctatttatttagaaccaacttttaatgtgccttcctccgagctctacgaaacgttccttgataagcaacgcatattggcctggaccagatcagcacaatttttcaacagcggaccgaagctggagaccaaagaaaaattcgagctctttggcggcaacgtgatcagcgagttggtttcatgcgaaaaggacaagaaacttgttttccactggaaactcaaggattggtctgccgctttcaactctactatcgaaatgactttccatgagtcgcaagaattccatgaaaccaaattacaggtgaagtggactggcatacccgttggcgaggaagatcgcgtgcgcgctaattttgaagaatactacgtgcgttctattaaattgacattcggctttggtgccgtatta

SEQ ID NO: 173803 - DNA, 126 bp, Saccharomyces pastorianus
ggcgtgtggtctagtggtatgattctcgctttgggcaattatctgcttaacaacagaaatgcaaagcatgcgagaggccctgggttcaattcccagctcgccccggttaattttttcataattaaa

SEQ ID NO: 173804 - DNA, 159 bp, Saccharomyces pastorianus
gcagattcccttttatggattcctaaatcctcgaggagaacttctagtatatctacataccatattatagccttaatcacaatggaatcccaacaactacatcaaaatccacattcttatcagatatcaagagttaatatacttgaaccacttaaataa

SEQ ID NO: 173805 - DNA, 657 bp, Saccharomyces pastorianus
atggaaaatgatgtagaaaggcctattcaagaccaatatatcgtcaagaaaccaaccaaccaaacagagtttgattggcaagtatttcaacagcaggcctttctacaacagcaactagctcagcacaatttacaagcgtatctatcgtccctgaacaccgatactatgaccaatagaagtccttcaaaatcttctagcatatctactgcctcttcgcattcggatccgattccaatagcgatgacgcaaagcccaactccatatcctcaaacttccaatatgctaccgcaacagcatgtatcacgaccactgccgcaacaacagcgggagcagccacaacaacatattacttctccacaaagattctcagaaagcaattttacgaatcaattaaacaatggtatgatcaacagtaatcctctacaatctgcaatattctctaaccatacaagtgaaaataagcaattaagagatgtcgaagaatcaaatttcagtacatcacccctaagagcagattatggcaataatattatctcctcgataccagcgtcatttactagcaattcaattcctgtcagtgtcaaacaagctcgaaatggctcttcttcgggcgatatacttttcagcaacggtgctcatgacatgatcaacaatatt

SEQ ID NO: 173806 - DNA, 168 bp, Saccharomyces pastorianus
aaactaaaaatgaactatacctacgtttatttgcaagttgtaaagtcgaattgggtagatgcatattgcagaaaggcaatctgtgaaagtgctattgggttttggttaaaccacggagtagatggttttagaattgacaacgcgggtttatatttgaaacttcctggc

SEQ ID NO: 173807 - DNA, 117 bp, Saccharomyces pastorianus
ttatcaactagtagtcacactaccaatatattatcatatacggtgttagaagatgacataaggtatgagaagctttcatcgaaggtagaggaagcagaaatacgaggatttataatg

SEQ ID NO: 173808 - DNA, 426 bp, Saccharomyces pastorianus
atgactgacttaactacacaagaagctattgttctagagcgacctggtaaaatcaccctaactaatgtcagcatcccaaagatttcagatcctaacgaagtaatcatccagatcaaggcgacaggaatatgcgggtcagatatccattactatacccatggaagaatagccaattacgtggtagaatcaccaatggtgctgggacatgaatcatcaggaatagtggccctcataggtgagaacgtcaagacacttaaagtaggagatagggtggcacttgagcccggaatacctgacaggttttcaccggagatgaaagagggcagatacaacctggaccccaatttaaaatttgctgcgacacctccctttgatgggaccttgacaaagtattataagaccatgaaagatttcgtctataaactg

SEQ ID NO: 173809 - DNA, 216 bp, Saccharomyces pastorianus
gcatatgcacacggatgctacagtatataccactctcaaacttaccctactctcacattccactccatcacccatctctcaccatcagtaccaaatgcactcgcatcattatgcacggcacttgcctcagcggtctataccctgtgccatttacgcataacgcccatcattatccacattttaatatctatatctcattcggcgacaccaaatatt

SEQ ID NO: 173810 - DNA, 336 bp, Saccharomyces pastorianus
aaattcaggaaaaactcgagagttactagtttacataccgtattacccgttagcacaccaagccatagtaacaacataccagctgcaagttttagcgggaataacactaccgatatacagtcccaacaattaatcgaaaaccagaagagtacatctgtatatttgaataacgtttctgaaaggattctgggaaatcaagaaatatgtcaaacaccaattaatcccgttactcctgtgctagatggggccgatcaaggtaaggaggacattcctgatagtatattagagctgaagatcctgatcgattctgtcaagaagaaagtaaataatgattaa

SEQ ID NO: 173811 - DNA, 285 bp, Saccharomyces pastorianus
ggtggaattggtgcacgtgaagctgccttaatcttttcagatcgatctcctgtcgttgaagtaccagtaactgtcccttgctcagatcgccttgcatttatttccgccaaaaagggtagcccacttgaaggtggtgacgatacagatgcgttgcccataggtggtttaggtttttcgatatctgagctaggtaccggagctgacatcattggtggagggggtggaggaggtggagcctgtactgggattttggcagatgacgataaagcgaccgatgacagcgga

SEQ ID NO: 173812 - DNA, 372 bp, Saccharomyces pastorianus
tattcagaatccgttattaactggtttgaagagcaccttcctacatttgatgttgatgtagacaaacgttttcgagctttgagggtacgcaagtactcccagatatgtcttttactttctttcattataatatgcattataatacccttattgaattgtttgttattgacgaacaaattcttcaagatatgtcatcatttaaagcatcacgttttcaataggcagtcgtgggtgcacaagacgcatatgtatcacaatcaatcattacagttgtgtttggcatgtttattttacttcaatttttattgttcaaggcgtaacagggatctcttggaaatcactaagcgtatggggaggatctccgttgcttaa

SEQ ID NO: 173813 - DNA, 450 bp, Saccharomyces pastorianus
atggaggagagtaagacaaaaagaaaagaggatcgcatagatttgaagaatacaccgcctcagaagaagtcaaaaagagattcaacaaatgacaaaactgcaagcacatcactacgttcaatcatgcccaggggttacaaaatgatggaaaacatgggttacaaagaaggagaaacattaggtagtaatgaaagtgccctaaaagagcctattaaggtagaaatcaatacaaaaaggaggggaattcgtgcagaaaagcccgacccatcaacaatgaatgacatgcagatgagtgaacaacgatttataaaaagagaaagtgaaatgaaaaataataagcggttaaaaaaaatttggtataggatccaaaaagttgcttttgaaatgatgggtgattccgatttatacaatccaggcgaagatccgagagactttaacgtactttggaga

SEQ ID NO: 173814 - DNA, 81 bp, Saccharomyces pastorianus
gcaacgtatacgtcgacgataaaacaagacgcatccaactgtacactgatcagaacaaaaacggttcatcggagcctcgac

SEQ ID NO: 173815 - DNA, 114 bp, Saccharomyces pastorianus; identical to SEQ ID NO: 173138

SEQ ID NO: 173816 - DNA, 162 bp, Saccharomyces pastorianus
atgattgttgggattccgttgttgataaaggcaataatattatgtatacagaatatactagaagttctcctcgaggatattagaatccttacaatggacttgatatttctacataaaaatattacgattattcctcattctgttttttatgtttcaccatcc

SEQ ID NO: 173817 - DNA, 114 bp, Saccharomyces pastorianus
ttcgctggaacagtgattgatgaccaagtcggtgatgaatttcataccaagcttatgtgtcttttcgatcaaggcaaagcagtcttcattcgtaccatatgttggccagacctt

SEQ ID NO: 173818 - DNA, 615 bp, Saccharomyces pastorianus
tcagccttttcctcaacgccatcaagaccttctgtattctgctcacctcctttctctttgttttcttccatagcagcatcttgctttaactcttcttcatcagacatggcttgctcttctgggccattttcttcgtcttcctttccctcatcattagtcatatccacatcatcttcagcaccttcttcttcgtcaagagctgtttctgtctcgccggcatcttcctcaggaccaggttcgtcgttttcattatcactttcgataccggattcttgtttgacttcttcgtcttcgtttccaacctcttccttgtttaaatcatcaggcattccatctgacatatcaacatcttcgtctgattcttcatgctctgaatctaaattcatatcttcaggaaggtctagggtttcgatttcaggaacattggcctccaaatcctcgccttcttcatctttaacttcgtcctcctgttcaccaacgtcgttttcctcttctgcattttcatcgttttcaatttcctcatcgccatcttcaggtgcatttgggtcctcatcccctctttccttgttatcccgctgttgttcgtcattttcagcagcttgtacatcttcctct

SEQ ID NO: 173819 - DNA, 192 bp, Saccharomyces pastorianus
ggtatgattgaagatgatcattcgacttcgcaacagcagcaaccattggacttcacatccgaacacacattgaagactgccgaaatggaacagcaagtggaaattttgaagttagaacaatccttgagcaatgccaggaagagattgggcgagataagaaggcatgcctactataaccaggatgatgattga

SEQ ID NO: 173820 - DNA, 339 bp, Saccharomyces pastorianus
agacataaggaggatagtgacaaagctgcggaagattctcacaaacacagaactgtagtgcagaatggagctaaccataggggtgacgaccaagaggaggcttccgagattttgggcttccaaatggaggatcttgttacgatgggatgtatcttggggatattcctattaagtatattaatgagtacactggcggcccctagaggctggaatgtccgtttcaatggagcacaattaaatgcaaatggtaaccggcagcaagagcaacaacaacaacaacaacaacaagcacaaggtcccccgggctgggacttcaatgttcagatattcgccatatga

SEQ ID NO: 173821 - DNA, 651 bp, Saccharomyces pastorianus
ctcaacaaaaagtacgactatgttgctactaaagttcctcaattttcctttacaaggttggctggtgcagatcctttcttaggggttgaaatggcatcaactggtgaagttgcttcatttggtagagatttaattgaaagctattggactgctattcaaagtaccatgaacttccatgtaccactacctccaagtggtatattatttggaggtgatacatctcgagaatacttgggccacgtggcttccatagtggccactattggttacagaatatacacaactaatgagaccactaaaacgtatctacaggaacacatcaaagaaaagaacgcaaaggtttctttgattaaattcccaaagaatgataagagaaaattgcgtgaactatttcaagaatatgacataaaagctgttttcaatttagcctccaagagagctgagagcactgacgatgttgactatattatgagaaggaatgctattgattttgctatcccattgttcaatgaacctcaaacggctttgttatttgcaaagtgtttgaaggcaaaaattgcagaaaagatcaaaattttggaatctcatgacgttatagttccaccagaagtccgttcctgggatgaatttattggtttcaaagcatattga

SEQ ID NO: 173822 - DNA, 126 bp, Saccharomyces pastorianus
atggaatctatatttctacaacctaatattacgattattcctcattccgttttatatgtttcattatcttattacattatcaatccttgcacttcagcttcctctaacttcgatgacagcatctca

SEQ ID NO: 173823 - DNA, 429 bp, Saccharomyces pastorianus
aagtcatattatgataaaaacgccatgggtggtgtcatatatgctatcctggtccctaactctctgaacggatttggtcaattctgctgcgttttgttagctttgtccactattgcaaataatattccaaatatgtatactgttgctttatccgctcaagctttgtgggcacctttggctaaaataccaagagtagtctggacaatggcaggtaatgctgccactttaggtatttccatccctgctacctattactttgatggctttatggagaattttatggattccattggttattatttggctatttatattgccattgcatgttcagagcattttatttataggcgttccttcagtgcttacaatgttgatgatgggatagttgggaacgtctacctatcggcattgcaggtactgctgccttaa

SEQ ID NO: 173824 - DNA, 225 bp, Saccharomyces pastorianus
gacctaattagtaagaaaaccaagacatcactgcttcctacgataaagagaacaatttgtaaaaaatgccatcggttgttatggaccccaaaaaaactggaaatcacatccgacggagagctttcggtaatgtgtgggtgcggtaccgttaaacgttttaatattggcgccgatcctaattacaggacctactcggagcgggagggtaatctactaaattcttag

SEQ ID NO: 173825 - DNA, 234 bp, Saccharomyces pastorianus
atgcttaatatctttttgaacagatctgtcattgtatttcaaaccaatcaatctcttaatgtcgaaaatggtgttttgtgggttagcggcgacttggttctttgcagcatcaccaatcaacctttcgtcgtcggtaaaagccacgtaagatggagttattctattaccttgttcattggcaagaatttcagtcttaccgttcttcataacagcaacacaggaataagtggtacc

SEQ ID NO: 173826 - DNA, 312 bp, Saccharomyces pastorianus
atggctttcagagtcccaaccgtcgatgtctccgttgttgacttgactgtcaagttgaacaaggaaaccacctacgatgaaatcaagaaggttgtcaaggctgccgctgaaggtaagttgaagggtgtcttgggttacactgaagacgctgttgtctcctctgacttcttgggtgactctaactcttccatcttcgatgctgccgctggtatccaattgtctccaaagttcgtcaagttggtttcctggtacgacaacgaatacggttactctaccagagttgtcgacttggttgaacacgttgccaaggct

SEQ ID NO: 173827 - DNA, 246 bp, Saccharomyces pastorianus
tggttgaagacattttccttcaagacatcttcatcctcatcttcatcctcatccttctcatccacgtccttcttatcctcatcctcgtccttgttgtcatcatttgaattagcatccttttcttcattttgttcatcttcgtcagaggaggagtacgaagctgcactcaactctccttcttcaaagtcatccaagttcttgaattccaggagctcggattctgaatctgaacttaaaacaggactt

SEQ ID NO: 173828 - DNA, 588 bp, Saccharomyces pastorianus
atgggccagttgctcaaacctaagaagactgaaataaccgagaaattaagacaagaggtgaataaagttgttgctaaatatattgatcaaggtgtcgcagaacttattccaggtgttttgttcattgatgaagttaatatgctagacattgaaatattcacgtatttgaacaaagcgcttgaatctaatatcgcccccgttgttgtattggcttctaataggggcatgactacagtccgtggcactgaggatgtgatatcaccacatggtgtgccacctgatttgatcgatagattgttaattgttcgtacattaccatatgacaaggacgagatccgtaccattatagagagaagagctaccgttgaaagattgcaagtagaaagtagcgcattggaccttttagccacgatgggtacagaaacttcgttacgttacgctttacaattattggcaccatgtggtatcctagcacaaacaagcaatcgtaaggaaattgttgttaatgacgttaatgaagccaaattgctgtttttggatgccaaaaggtcaacaaagattttagaaacttccgcaaattatttgtaa

SEQ ID NO: 173829 - DNA, 96 bp, Saccharomyces pastorianus
atgcatttgagtaacactgctaatccatatagagacattgcagcattcttgtttacatatttgaagagtctctcaaagtatagcgttcaaaattct

SEQ ID NO: 173830 - DNA, 1317 bp, Saccharomyces pastorianus
ggaacgccacagaagaacaagaggtctgcgagtatatctgtttcacctgcgaagaagacagaggaaaaagaaataatacaaaatgattcaaaggcgatattatctaagcaaactaagaggaaaaaaaagtatgcttttgctcctataaataacttaaatgggaagaacaccaaggtatccaatgcaagtgtcctaaagtcaatagccgtttcacaagtacgaaatacatcaagaacaaaagatataaacaaagcagttagcaagagcgtaaagcaattaccaaattcacaagttaaaccgaaacgggaaatgtctaatttgagtaggcatcacgatttcactcaagacgaggacggccccatggaagaagtaatatggaaatattcacctttacaacgagatatgtccgacaaaacaacaagcgctgccgaatattctgatgactacgaagatgtccaaaatccctcttctacacctatagtccctaatcgactgaaaactgttcttagtttcacaaatatccaagtacccaacgctgacgtaaatcaattcattcaagaaaatggaaatgagcaagtgcgtcctaaaccagcagaaatatctaccagggagtctctccgtaatatagatgatattctcgatgatatagagggcgatttaactataaaaccgacgataacgaaattcagcgatttgccatcttcacccatcaaggcacccaacgttgaaaaaaaagcagagatagatgcagaagaagtagacaaaatggattcaacaggagatagtaacgatggcgatgactctttgatagatattttaactcaaaagtatgttgagaaacgcaagagtgagagtcagataacaattcaaggcaacaccaatcaaaaaagtggagcccaggaaagttgtgggaagaatgataacacaaaatcgagaggagaaattgaagatcatgaaaatgtagacaatcaagccaaagcaggcaatgcattttatgagaatgaagaagacagtaattgccaaagaattaaaaaaaatgaaaaaatagaatacaattcttcagacgaattttcagacgattcactaattgaactattgaacgaaactcaaacacaagtggaacctaacactattgaacaagatttggacaaagtggagaaaatggtctctgacgatttgagaattgctactgattccactttatccgcatatgctctcagagctaagtctggtgctccaagagacggcgtagtacgattagtaatagtaagttacgtagtgttgaattgccaaaaattggaacgcaaaaaatactag

SEQ ID NO: 173831 - DNA, 93 bp, Saccharomyces pastorianus
tcgactctagaggatccctgggttttattcgaatattcgttgggtgagcactgttttataccattcgagactattatacaaatagaaaagaag

SEQ ID NO: 173832 - DNA, 660 bp, Saccharomyces pastorianus
gaagtagatgaaccggaggcggatgagcctgattcagtggcagaagttgaaccggagactgatgagcctgattcagtggcagaagttgaaccggagactgatgagcctgattctgtgacggaagttgaaccagaggcggatgagcctgtggcggaagttgaaccagaggcggatgagcctgtggcggaagttgaaccagaggcggatgagcctgattcagtggcggaggatgagcctgatgtaatggaagtagatgaaccagaggcggatgagcctgattcagtggcagaagttgaaccggagactgatgagcctgattcagtggcggaagttgaaccagaggcggatgagcctgtggcggaagttgaaccagaggcggatgagcctgattctgtggcggaggatgagcctgatgtaatggaagtagatgaaccggaggcggatgagcctgattctgtggcagaagataagctggagactgatgagcctgatgaagtaatagaagataagctggagactgatgagcctgatgaagtaatagagctcgagacttcagaggacgaggttgatggagcaatggtgctcgagacttcggtggaggatgatgttaactcagtgagagagctcgagacatcagaagcagatgaggtcgactcaaca

SEQ ID NO: 173833 - DNA, 858 bp, Saccharomyces pastorianus
atgcatgacccaagaatgataatgaatttgaatttgatggcacaagaagatccaaaactaaacactttaatggagactgtcgcaaagggtcttgccaataatagtcaactggaggaatttaaaaagtttattgaaattgccaaaaaaaggtcactagaggagaacccagttaataagcgtccatctgtcacaacaacgcgacctgcacctccctctaaagctaaagacgtagccgaagatcaccggttaaactcgataaccttggtgaaaagttccaaaaccgctgccacggaacctgaaccaaaaaaagctgatgacgagaatgcagagaagcaacagtccaaagaggcaaagacaactgccgaatcgactcaagtagatgtcaagaaagaagaagaagatgtgaaggaaaagggtgtgaaatcagaggatacacaaaagaaagaagataatcaagtggtaccgaaaaggaaaagaagaaagaacgcaataaaggaagataaagatatgcaattgaccgcgttccaacagaaatacgttcaaggtgcggagatcatcctggagtatttagaattcacccattcgaggtattacctgcctaagaaatcagtagtagaatttttggaggatacgggtgagattataatatcttggattgttatacacaattctaaagaaattgagaagttcaaaaccaagaaaataaaagctaaactgaaagccgaccaaaaactaaacaaggaagatgccaagccaggctctgatgtggagaaggaagtcagctttaatcctctttttgaagccgattgccctacccctctctacaccccaatgacaatgaagttatcgggaattcac

SEQ ID NO: 173834 - DNA, 582 bp, Saccharomyces pastorianus
ttccccaaggttgaaagtgaaaacttggcggtattaagaccgaatgacagactaaggaccccgagtgagctacaagaagaacaggaaatagcccaagctgccaaattagaagaattattaagaagcggtaagccggacgatttgaaagaagctaataaactgatgaaagttatggcaggttttaaagacgacactaaattagctgtcaaacaggcgatcaataatgaattaaacaaacttaaaagaaaggcagatttgttcaatgaaatgcttacttctaccgatgaacccgacctagaaaacgaaactgttcaagaactgtatggcgatttaaaatctgcgcagccaaagttcaaaaaacttattgaggaggaacatgatgacgatatgctagttgaaaacttattgaaatttaatgaactggtgctccaactgttagagaagtacaggtcaataaaaggtgtaaaaggtgaagaaaaaagtttcaacagcgcgacagaaccttcaaaagaggttagcttaattgattatggtgatgattcaagttcgagcgctcctcctgacccatacttgagcaaatca

SEQ ID NO: 173835 - DNA, 693 bp, Saccharomyces pastorianus
atggaaaaatggttgaatagaaattctctttggagggccatttggaagtcatttggtaggactatttctgtggctatgctgtatgaaacgacatctgatttactttctgtagtacagccccagtttctacggatattcatagatggtttcaacccggaaacatcttctaaatatcctcctttaaatggtgtatttattgctctaacccttttcgtaattagcgtggtttctgtgttccttacaaatcaattttatattggaatttttgaggctggtttggggataagaggttctttagcttctttagtgtatcagaagtccttaagattgacgctagcagagcgtaacgaaaaatctactggtgacatcttaaatttgatgtctgtggatgtgttaaggatccagcggtttttcgaaaatgcccaaaccattattggcgctcctattcagattattgttgtattaacttccctgtactggttgctaggaaaggctgttattggagggttggttactatggctattatgatgcctatcaatgccttcctatctagaaaggtaaaaaagctatcaaaaactcaaatgaagtataaggacatgagaatcaagactatcacagagcttttgaatgctataaaatctattaaattatacgcctgggaggaacctatgatggcaagattgaatcatgtg

SEQ ID NO: 173836 - DNA, 645 bp, Saccharomyces pastorianus
atggaatctattatcctcagtattgccatctttattggcgtcctccttggcactagcgttggtactttcagtggtagtggcattagtgctggagttggtgctagcagtggtagtagcactagtgttggagtcggtactttcggtggtagtagcactagtgttggagttggtgctagcagtggtagtggcattagtgctggagttggtgctagcagtggtagtggcattagtgttggagtcggtactttcggtggtagtagcactagtgttggagttggtgctagcagtggtagtggcattagtgctggagttggtgctagcagtggtagtggcattagtgctggagttggtgctagcagtggtagtagcactagtgttggagttggtactttcagtggtagtagcactagtgttggagttggtactttcagtggtagtcgcactagtcctgacgttgatgctggcagtggtagtcgcactagtcctgacgttgatgctggcagtggtagtagcattagtgctggagttggtagtcgcattggtactggcattagcactaccatgaatgcatgtgtcgctgtcctcatcactgctgcaatactttctgtacctgtcactgctattgctctcctggaagctagacgg

SEQ ID NO: 173837 - DNA, 1167 bp, Saccharomyces pastorianus
cggtaccggggatcctctagagtcaccattaaaaaaacatggtacaagttgagcaactatactcgccaatttaacggctcattgacatttttgaacgatgattatgaatttttcatcactgatgacaataacttggaaatggaatccacctttgccaactcagttgatgttttgaatccatacactggtgagatggacgctaagagacatgctcgtgagttcttgcaacaatacggctacatggtcgaaaacaagaccgatttccccatttttgcctccaactctaaaagagttcacgataccgctcaatactttattgatggtttgggtgacggcttcaacatttccttgcagaccgttagtgaagctatgtctgccggtgccaacactttgagtgcttgtaattcgtgtcctgcctgggactatgatgtcaacgatgacattttggacgaatatgacaccacctatttggacgacattgccaagagattgaacaaagaaaacaagggcttgaacttgacctcggacgatgctgacactttgttcgcatggtgtgcatacgaaattaacgtcagaggttacagtgatgtctgtgatattttcagcaaagatgagttggtccgttactcttacggccaagatttggagacgttctatcaagaaggacctggttatgatataattaaatccgttggttctaacttgttcaatgctagtgtgaaattgttaaagcaaagtgaaacccaagacctaaaggtctggttgagtttcacccacgatactgatattttgaactatttgacaaccatcggtataattgacgacaaaaacaacttgactgctgaatacgttccatttatgggcaacactttccacaaatcctggtatgttcctcaaggtgcccgtgtgtacactgaaaagttccaatgttctaatgacacttacgtcagatacgccattaacgacgccgttatcccaattgaaacctgttctaccggtccagggttctcttgtgaagtaaatgacttctacgactacgctgaaaaaagagttgccggtaccgacttcctaaaggtctgtaacgtcagcagcgtcagcaacgtcactgaattgaccttcttctgggactggaacaccacccactacaacgccactttactaaaacaa

SEQ ID NO: 173838 - DNA, 2157 bp, Saccharomyces pastorianus
caatttcaagatccccgcggagaaccaagcctggtcatgactttaggcaatatcgtacacgagttattgcaagactcaatcaaatacaagctctcgcataataaaatttctatggaaatcataatacaaaagctggattctttgttagaaacttattctttttcaattatcatttgtaatgaagaaatccagtacgttaaagaattagttatgaaagaacatgctgaaaacattttgtacttcgtcaataaatttgtttcgaaaagtaactatggttgctacacatcaatttccggaacaagaagaacacagccaatttccatatccaatgtgattgatattgaagaaaacattcggtctccaatatatggtcttaaagggttcctagatgcaactgttgaagctaatgttgaaaacaataaaaaacacatcgttcctttagaagtgaaaactggaaaatccagaagcgtttcatacgaggttcaaggccttatttatacacttctgttaaatgatcgctatgagataccgatagagttttttcttctttattttacgagggataaaaatatgacaaagttcccttctgttctgcactccattaaacatattctcatgtcccgaaatagaatgagtatgaattttaagcatcaactccaagaggttttcggacaggctcaatcaaggtttgaattaccacccttactgcgcgattcatcttgtgattcatgtttcatcaaagaatcatgcatggtgttgaataagctactagaggacgggacaccagaagaaagtggcctggtagaaggtgagtttgaaattttgacaaaccatttgtcgcaaaatctcgccaactacaaagagttttttacaaaatataacgatctaataactaaggaggagtcaagtataacatgtgtaaataaagaactcttcttattggatggttccacaagagaatccagaagtggaaggtgcctttctggcttggttgtgtcagaggtggttgaacatgaaaaaacagagggagcgtatacatattgcttctcaagacgtagaaatgataataactcgcagtcgatgttatcatctcaaattgctgctaatgactttgttattattagtgatgaggagggtcatttttgcttgtgccaaggtcgtgtacaatttataaatcccgctaaaattggtatctccgtaaaacgaaagttattaaacaataggcttctagataaggaaaaaggagttactaccatccaaagtgtggtcgaatcagagctagaacaatccaatctcatagctacccaaaatttggtcacatatagaatcgacaaaaatgatatccaacagagtttgtatttagcgcgatttaatcttttaagcttgtttttaccagctgtttcacctggcgtggatattgttgacgaaaggagtaaattatgtcggaagacaaagagatctgatggaggtaatgaaatactgcgatcacttttagttgataatagagcacctaagtttagagatgcaattgatgatcccgtcattccgtataagctttcaaaggatacaacattgaacttgaatcaaaaagaagcaatagacaaagtaatgagggccgaagattatgcattgatattgggaatgccagggactggtaagactactgttatcgcagaaattattaaaattctcgtttccgaggggaaacgcgtgcttttgacatcatacacacattcagcagtggataatattttaataaaattgaggaacaccagcattagcataatgagattgggaatgaaacataaggtccatcctgacacgcaaaaatatgtcccgaattacgcgtcagtgaaaagttataacgattatttgtccaaaattaacagcacctctgttgttgctaccacctgcttaggaattaacgatatactatttacactaaatgaaaaggattttgattatgtgattttggacgaggcaagtcaaatttcaatgcctgtcgctttgggacctctgcggtatggaaataggtttattatggtaggagatcattaccagctaccgccattagttaaaaatgacgcagcccgattaggtgggttagaagagtcactgttcaagactttctgtgaaaagcatccggaaagcgttcag

SEQ ID NO: 173839 - DNA, 3366 bp, Saccharomyces pastorianus
catcatcgtgtattttcagcgctcttggctttcttggcgctagctaatgctgcttcggcgagtacagaagcatgtctgcctacaaacgagagggaaaatgggatgaatatcaacttttacgagtatgcgttaggtgacaaatccacatatactgattctgcatatatggcctatggatatgccaatacaaaaaaagtgggctctgttagtggacagacggctctttccatttattatgacattccttgtgatagcactcccacatgctctgacgatgattccacccctactaatgaagttgcgcttatgaagcgttacgatgaaaactgttccagtgaaaatgttcctatgaaacgagatacagctgattgcaacctagatgctgcttattggagttcagatctatttggcttctatactactccaacaaacgtaactgtggaaatgacaggctactttttaccaccagaaaatggttcttacacatttacctttccaagggtagatgactcagcaattttatcagttggaggtgacgctgcattcggatgctgcgaacaacagcgatcacctgtcacttcaaccgatttcacagtcgatggtgtcggaaaacaggacgagtatgtcgaagggtcagtatacatgtatgttggttactactacccaatgaaaatagttttttcgaatgctaattcttcggctacacttccaattttaatgacattaccaaacggtactactatttacgatgactacgaagggtttgtctattcttttgacaataacctggctcaagccaactgtactattacagatcctgcaagacacacacttgctgccatagcaaggaccagaacagcaccatggacaggagcatatacaacaacactgacacaaacgtctttttatactggcgtgaacggtttgactacgtacgagaccatttacgagattgaaacaccaactagtgttctctcatccaatagtccatctactcacagatcaactgaacctaccacatcatccgaatatctaaccaccagtgctactacatctactgaaacgagagttgtcagttccctggcatcatctactaatttaagcatagtttctgtatcatatcatcaaactgagaccaccagcgctgctacatcatctgaagttgagaccaccagcactgctacatcatctgaagtcgagaccaccagcgctgctacatcatctgaagttgagaccaccagcactgctacatcatctgaagtcgagaccaccagcgctgctacatcatctgaagtcgagaccaccagcactgtgatgtcatcttcggaacccattagtagtgttactaaatcattggctccagccgagatcaccggttcttctacaatctcttccaatttaactacgagcgctgctacatcatctgaagttgagaccaccagcactgctacatcatctgaagtcgagaccaccagcgctgctacatcatctgaagttgagaccaccagcgctgctacatcatctgaagttgagaccaccagcgctgctacatcatctgaagtcgagaccaccagcactgctacatcatctgaagtcgagaccaccagcgctgctacatcatctgaagtcgagaccaccagcgctgctacatcatctgaagttgagaccaccagcgctgctacatcatctgaagttgagaccaccagcgctgctacatcatctgaagtcgagaccaccagcactgctacatcatctgaagtcgagaccaccagcactgtgatgtcatcttcggaacccattagtagtgtcactaaatcattggctccagtcgagatcatcggttcttctctgtcttctgcaaattttaatactaatgtggcgacttctactcaatccagggtcaccagttcctcaacgtcatctaatcatattattgtcccaacgtaccctagcaatcaaactgtagtctctagcttttctacctcaactgcctctgggctcactaaatcatatacgtcttttggatctcttactgtctcactcacttccattgcgaccgatactagattatctgctgttaatgcaagggataccagcgcttccacatccagtagcgaagctaccggctcgtctgtaccaactgctagttcaataattgactcttcaacatccctcagtcaaattggtgctcgtagttcttccaccattaactctatggataaaaaaactacagtttcttccacattcaattcgactagctcaggtagccaaagaaaatccattatttctttcaccacctactccaaaaattatgaaaccattgtttctgacgtacccagtagtaaaaccgattttacaagtctttccactgggtccagcgaatctggaagtaaaattggtgtttttacttcttcctctgcttcatcttccaaatcacaagaaacaaccagtagtgatgtcacttccggaccttaccaggatcgtactactatccaaagagccactcctactgctacaaaaacaaatgaacaaactacattagttactgtaacttcctgtgaatcccatgtgtgtaccgagtctgtatcatcggctatcgtttctacagccacaactacggttagtggcgtggctacagaatacactacatggtgtcctatgtctaccacagagccaacaaaaccaactacgttgattacagttacttcttgcgaatctggtgtctgttctgagaccacctctcctgccatcgtttctactgctacgaccactgttagcggcgtcgctactgaatacactacatggtgtcctatgtctaccacagagccaacaaagcaaactactttagttacagttacttcctgtgaatctggtgtctgttccgagaccacctctcctgccatcgtttctacggccacaactgtcgtcaatgacgctgttacagtgtacaccacatggtgtccattaacaaccagtactactacagttagcgccagtgttaccaccggcgttactagcacccctgccattcctgaagcaaccgaaacggaaaccacaacccacggcaacggcaatggtgtatcttcgatttcgggatctggttatgttgaaggacatactaccgctaccaatgaaatttcacatgtaaatggtgcttcttccgtgttggcaactgccaacaccgaggtacttgctagttccaacttgagcactgtctcacaacaacctcgtagcacttccacaagcggcatgccagcatctagcaccgcctctctagaaatgtccacctacgctggtattgccaacggactactagccaatagtggtctgagtgttttcattgcctccgtattattggcaatcatt

SEQ ID NO: 173840 - DNA, 6438 bp, Saccharomyces pastorianus
atgattaagttaatgtctactttagaggatcaagtctgtaaaagaaaactttggggtaattctggttcgccatgggagttcaatttgagagatacattgcgttggctaaagttactcaaccaatattcgatttgcgaagatgtggacgtgttggactttgttgatataatcgttaagcagaggttccgtactatcagcgataagaataaagcacagcttctcattgaagatatttttggtaaattctcaactaaagagaactttttcaaacttacagaagactatattcaaattaacaacgaggtagctctaagaaatccccattaccgctatccaattacccagaatcttttcccattagagtgcaacatcgccgtttatgaatctgttttgaaggcaatcaacaataattggccgttggtacttgttggaccctcaaactccggtaaaacggaaacaataagatttttagcctcaattttgggtcccagagtagacgtgttttccatgaatagtgatatagatagtatggatatccttggtggttatgaacaagttgatttgactagaaaaatatcatatatcactgaggagttaacaaatatcgtaagagaaataatctcgatgaatatgaagctctcaccaaatgctaccgcaatcatggaaggtttgaacttattgaaatatttgctcaataatattgtcacacctgagaaattccaagatttcagaaatcgttttaataggttcttttcgcacttagaagggcatcccctattaaaaactatgagtatgaatattgaaaaaatgactgaaatcatcactaaggaagcttcggttaaatttgaatggtttgatggcatgttggtcaaagcagttgaaaagggccattggctaatcttagataatgctaatctttgttctccttctgttcttgatagactgaactctctattggagatagacgggtcgctgctcatcaatgaatgtagccaagaagatggccaaccaagggttctcaaaccccaccctaacttcagattatttttgaccatggatccaaaatatggtgaattatcccgagctatgagaaacagaggtgtggagatttatatcgacgaattgcacagtcgttctacagccttcgatcgcctcaccctaggctttgaacttggagagaatatagactttgtttctattgatgatggcatcaaaaaaataaaactaaatgaacctgatatgtcgataccattaaaacactatgttccatcctatttaagcagaccatgcatatttgcacaagtacatgatattttattattatctgacgaagaaccaattgaagaatctcttgctgctgttattccgatttcccatttaggggaagttggtaaatgggccaataatgtattgaattgcacggagtactcagaaaaaaagatcgcagaaaggctttatgtttttataacatttttgactgatatgggtgtcttagaaaagattaataacctatacaaacctgcaaacctaaaattccagaaggctttggggctgcatgataagcaattgacaggggaaactgtctcgcttaccttgaacgaatatgttcttccaacagtcagcaagtattcagataagatcaaatctccagagtcgttatacttattatcaagtttacgtctgctactcaactctttgaacgctctcaaattaatcaatgaaaaatcaactcatggtaaaattgatgaactgacgtatattgaattatctgcggctgcctttaacggtcgccatttgaagaatattcctcgcattccaatattctgtattctctacaatattttaacagtaatgtctgaaaaccttaagacggaaagtttattttgcggctccaaccaatatcaatattattgggatttactggtaattgtaattgcagcattagaaaccgccgttacaaaggatgaagcacgtctaagagtatataaggagttgatagatagctggattgcgtccgtaaaatccaaatcagacattgagataactcccttccttaacatcaatttggaatttaccgatgttttacagttgtcgaggggccactccataactttactatgggatacattcagaaaaaattatccgacaacctccaacagctggctagctttcgaaaagctcattagtttatctgaaaaatttgacaaagtacgtctgctccaattttctgaatcatataattctattaaggatttgatggacgttttccggttgctaaatgatgatgtgttgaataataaattaagtgagtttaatctcttgctatcaaagttagaagatggtataaatgaattggaactaatttcaaataagtttttaaacaaaagaaaacattattttgctgacgaatttgacaatttgatcagatataccttctcagttgacacagccgagctaataaaagaacttgctcccgcttcttctttagccacgcaaaaacttacaaaacttattaccaacaaatacaattatccgcctatctttgatgttctttggacagaaaaaaatgctaaattgacttcctttacttctaccatattttcatcccagtttctcgaagatgtcgttcgtaaatctaataatttgaaatcattttcgggaaatcagatcaaacaatctattagtgatgcagaattgctactttcctccactatcaagtgttcacctaacctacttaagagccaaatggagtactataaaaatatgttactgtcatggctcagaaaaattattgatattcacgtcggcggggactgcttgaaattgactttgaaagaactttgctctctcatagaagaaaaaactgcttcagagacacgcgtgacttttgcagaatacatctttcccgctctagatttggctgaaagttcgaaatcattagaagaactgggagaagcttggatcacatttggtacaggtttacttctgctattcgtcccagattctccctatgatccggcaatacacgactacgttttatatgatttatttttgaagacaaagacattttctcaaaacctaatgaaaagttggagaaatgttcgtaaagtaatcagtggcgatgaggagattttcacagaaaaacttatcaataccataagcgatgacgacgcacctcaatcccctagggtatatcgtacaggcatgtctattgactctttatttgatgaatggatggcatttttgtcgtcaactatgagttctcgtcaaataaaagagctagtgagttcctacaagtgcaattcagatcaatcggatcgtagattagaaatgctccaacaaaatagtgcacattttttgaatcgtctcgaaagcggttattcaaaatttgctgatttaaatgatatcctcgcgggatatatttacagtatcaactttggctttgatttattgaagcttcaaaaatctaaggatagagcatcattccaaatttctcctttatggagtatggaccctatcaatatttcatgcacagagaatgttttaagcgcttatcatgagctgtcaaggttcttcaaaaagggtgatatggaagatacttcgattgaaaaggttttgatgtacttcttgacgctgtttaagttccataagagggatacaaatttactggaaatttttgaggctgctttgtatactctgtattcaagatggtctgtgagacgtttcagacaggagcaggaggaaaacgaaaagtcaaatatgttcaaattcaatgataattcagatgattacgaggcagactttagaaagctgtttccagattatgaggacacagctttggtaactaatgaaaaagatatttcgagtcctgaaaatcttgatgacatctatttcaagcttgccgacacatatatctcggtatttgacaaagatcatgacgccaacttttcttctgagttgaagagcggtgcgataataacaacaattttgagtgaagatttaaaaaacaccaggatagaagagttgaaaagcggatcgttgtctgctgtgattaatacacttgatgcagaaacacaatctttcaaaaacacggaagtttttggtaatatcgatttttaccacgatttctctattccggagtttcaaaaagcaggtgatatcattgaaactgtgcttaagtcagtcttgaaattgttgaagcagtggccagaacatgccaccctcaaagaattatatcgagtttcccaagaatttttaaactaccccattaaaacacccttagcaagacagcttcaaaagatcgaacaaatatatacatacctagctgaatgggaaaaatacgcttcctcggaagtatccctgaataacaccgttaaactgattacagatttgatagtttcatggagaaaactagaattacgcacctggaaaggtcttttcaactcggaagacgaaaaaaccagaaaatctattggaaaatggtggttttatttgtacgagtcaattgtcatttcaaattttgttggtgaaaagaaggaaacggcccctaacgctacacttttggtaagctcacttaacttattttttagtaagagtacattgggcgaattcaacgctaggctagatcttgtaaaagcattctacaagcacattcaactaattggattgaggagctcgaagatagcgggcttgctccataatactataaaattctattatcagttcaaaccattaattgatgagcggattacgaatggaaaaaagagtctggaaaaagaaattgacgatataattcttttagccagttggaaagatgttaacgttgatgccctgaaacaaagttctcgtaagtctcataacaacctttacaaaattgtcagaaaataccgtgatttgctaaatggggatgcgaaaaccattattgaggccggtcttttgtattccaacgaaaataaactaaaactccctactttaaaacaacatttttacgaagaccccaacttagaggcttcgaaaaatttggtgaaagaaatttctacttggagtatgagatctgcgccattaagaaatattgacacggtagcaagtaacatggactcctacttggaaaagatatcatcacaggaattccctaacttcgcagatttagcatcggacttttatgctgaagctgaaaggttacgtaaggaaacctctaatgtatatacaaaggagaacaaaaagaggttggcatacttgaagactcaaaaaagtaaacttttaggtgatgcattgaaagaattgagaagaatcggtttaaaagtcaattttagggaagacattcaaaaagttcaatcttctacaacaactattttggcaaacattgcccctttcaataatgaatatttaaattcgtcagacgcattctttttcaaaatccttgaccttttacccaagctgagaagcgctgcatcgaatccaagtgatgatatccctgttgctgctatagaaagaggtatggcactcgcacagagtttgatgttttccctgattacagttcgtcaccctctatcagagttcacgaatgattactgtaagattaatggtatgatgttagacctagaacactttacttgcttaaagggcgatattgttcattcttcattaaaagcgaatgtagataatgtcagattgtttgaaaagtggctgccttctttgttagactatgccgcacagaccttgtctgttatttcgaaatactcagcaacttcagaacaacaaaagatcttgttagatgcaaaatcgaccttatcttcgtttttcgtacacttcaattccagtcgaatttttgattcttcatttatcgagtcatattctagatttgagttattcattaatgaattattgaagaagcttgaaaatgcaaaggagacagggaacgctttcgtttttgatatcattatagagtggatcaaagcaaataaagggggtcctattaaaaaggaacagaagagaggcccttcggtggaagatgttgaacaggctttccgccgtactttcacatctattatattatctttccagaaggtaattggagatggaattgaatctatatccgaaactgatgataactggttatcagctagcttcaagaaagttatggtaaacgttaaactattacgatccagtgttgtttctaaaaatatagagacagcattatccttgttgaaggactttgattttaccactactgaatcaatttacgttaaatcagttatatcctttacactaccggtaatcacacgttattacaacgcaatgaccgtggttcttgaaagatctagaatctactacacgaacacaagtcgtggtatgtacattctatcgacgatattgcatagcttagccaaaaatgggttctgttctccggagccaccatctgaagaagttgacgaaaaa

SEQ ID NO: 173841 - DNA, 213 bp, Saccharomyces pastorianus
ctcacagtctacttgggcttaaaccccccacttgggcatggcctactgtttagttgcctcaagcctactgttcagtcacttactgttcagtcgcctcgtttcattgccggttacacggcaaatttgttatttggtgtcatttatggtttaccgacattttttttttgtttttttacaagaggaacgaaaagaagcacgctcaagaaaatggtg

SEQ ID NO: 173842 - DNA, 114 bp, Saccharomyces pastorianus
aaaaaaaaaaaagaaataaagattgcagcacctgagtttcgcgtatggtcacccactacactactcggtcaggctcttaccagcttaactacagttgatcggacgggaaacggt

SEQ ID NO: 173843 - DNA, 114 bp, Saccharomyces pastorianus
catgtattactcgatgatcgtaaaggtgaaactaagataattgcggatggcgatctgtcgggaggaagggaattcttagtgtgtgctttcacacttactgaaaagggcagtcat

SEQ ID NO: 173844 - DNA, 168 bp, Saccharomyces pastorianus
ccaccgattaaggaaggctgtataaccgaacaggtacgcgagttctatggacttgaatcaaagaaaggaaaaaagggccagcatgttggatgctgtggctccaggacagacctgtctgctgacacagtggaactgatagaaagaatggacagattggctgaaaatcag

SEQ ID NO: 173845 - DNA, 351 bp, Saccharomyces pastorianus
atggacaacgagttcgaagagtgcgttcttctaactttatctccaaaaggtcaatatcaacaagctttggatattaccattgctccagaggaagatgttcaattcgtcgttaccggttcgtacactatctctttgactggtaactacgttaaacatccattcgatacacctttagaagacaactcttctgattccgatgacgacgaagaggactactacagtgaagaaaaatcctcaaatggagaggaagaaaaagacgacgaagagttgagttctggtgacgatgaacttgatgatatggtagatgctagtgacatcgaaagccgtcttgaggagttagttgaaaaggac

SEQ ID NO: 173846 - DNA, 3105 bp, Saccharomyces pastorianus
atgagaaatccgattgaattgctaactttccagctgactaagtttatgattcaagcttgtgaacagtatcccgttctttatgaaaatataggcggcatcatttcaacttattttgagcgtgtattaaagatttttactattaaacaatctggtctactatcattagtgggctttattaatgcatttatccagtttcccaactctacagagcttactaaattcacctggaaaaagttagcgaaacttgtgcttcgtggatcatttctaaacgaagttgataagattttgaattcctcagcaacgtttaccaatgattcaatcgtccagtattacgatgctggaaatgagctatccagtgcctacttattggaattaatatctcgcttgcaagtttcgctaatatctcatctgttaaacacttcacatgtcggcgccaacttgagtgagttcttactaaatcaacaataccaattttacaaatttgatcaagaagtagccgatgaaaacgatgatacgaagtgtattgatgacttttttttcaacgtaagaagcaataaacagttttttacagacatgtgtaaaatttccctgcaattttgttctgagtcacatattctcgacctatctacagacaaccgtgcaagattttcttttgatactcgagcccactacctacaaacgctatgtttaattccgtttatagaagatacagaaagcgagctttttgaaagttttacaaacgttgtttctgaatctattgataaatttttcttatctgatgtcgttacaccatctttgataaaagcaattgtagcttctgcctcattactgaattttttcacggaaaaattgtcattaactctgattcgtatgtttcctttattggtagcgtctccacatatcacgactgaaacagttaatgatgttgcaaaaatattcaccacagggttataccctctaaatgaagatgcaattgtgagtacaatttattccatgaacaacttattagctgtttccgaggacggatcgcccgtcccggtgctccgtgagcgccaattaacaataacatctggaaaaaatattgagaaagactactttcccttgcgaaattcatctgccagtttggatggcactggtgctctgctcggaaatacaactgtgggccaactttcctcccatgatgtcaatagtggagctactatgacataccatgcctctttgatatctaattgtgtggctgcaacgactacaatcgcctcatactataacacccaaagcataacagctttgactatctctattcttacgcaaaaagttaattctatgtcaaaggaattagacagtgttattttgaattctttggcaagactggctccgaatacttcactgacagaattttcgcttttactaaagttcttcaaatcgagaactgttattgcaacaaaaattgatgatagcgcactattgaaaaatattattaaagcgaaatgtgtgatatcaaaagaattgttggccaggcatttttcaagtgacttatatttcatgtatcttcatgatctattggactcaatcattgccagtggggaagtagaacgattggaacatcacagacctcaaacggagatttcccgtgttgctgatcaaatcgctacctacttagagcccctcgccgctctactacctgttccaggcgatacgccattggacatcaataaggatgaagtcactacaaacaagtttaggaacgcctggtttaattttgtcatccatgggtaccacttgggcgggcctattgtcaaacgaaatttttctttcttattaactattgcctataattcaccaccgctggcttctgaatttcctgctaataacaaggagctttcattggaaatgaatacaattttgcgccgcggttcatctaacgaaaatatcaaacaacaaaaacagcagataaccgaatatttcaataccaatattgttcagtacagaacaacttcatcgtctaaaatcatgtttttagcggctgccgttcttctagaaacgataagatgcgaggcaggtgattgttcgaagactctactgtacttctcagacccctccattctttccggttcaattgagaagtgtattgcagttttgtcggtttccatgattagaaaatatgctaggttgattcaaaagggtaacgatgccatattcaactccaaaatgattgctcaacaacttaataacttgctactttgcctttctcatagggaaccaactttgcaggatgccgcttttcatgcctgtgaaatatttatcagatctattccatcatcgttatgtcatcattcgtctctctacaccttattagatatgtttacagccctatttgatagtatcttggactcagaggcgcataaatttgaaccacggtatgaatttaaattaaaacattctaagacaacaatattggttccaagctcatcgtcctggcgcgctacgacactatcaagattgcacaagtcagctaaagaatgggtaagaattctattgaatagaagcaaccaggatactaagattttgttgcaatcatacatatcagatctcggtgagtacagcaggctaaattctgttgaatttggtgtctcatttgccatggatatggctggtttgattttacctgcagataaggaattatcaaggcttacttattatggtccagagaaacctaacacgatttctggatttatatctttacattcttggaggtcaaaatatcttttcgataccgctattacatcatcaccagaggatatcaaaaggcaaataggtatttccactcaaaacataagaaaaaatttgaccttaggaaataagattataactaaagacgtaactgattttcttgatatggctaccgcgttgttaattcttggcaatggtgcaccagcgtcattgatatatgatattgtgcacatcccgttcgaagtcttcacctctgcatctttaaagattgctacaaacgtatggttaacaatcataactgagaagcccgaagttgcacatttgcttttagttgaagtatgctattgctggatgcgctccattgatgacaatata

SEQ ID NO: 173847 - DNA, 153 bp, Saccharomyces pastorianus
atggaattcttgtatttaggttttcgtaaatcatcgttttgtataatggatttcacaacgtccaatgggtatactgtcaaccacaacattgtcccggaaaatgcaccaaataagcataatttccaaggaggaatttcgtttcttgttagtccc

SEQ ID NO: 173848 - DNA, 924 bp, Saccharomyces pastorianus
atgttagacaacgagaatgcctgggggtccacaaaaggagaatattatggggctgatgatttagatgatgacgaaggtgctaaggaaatagaaaaggaagctttacgacaacaaaagaagcatctggaagaacttaatatgaacgattacttagatgaagaagaagaagaagagtgggccaaaagtgccaaagaatttgacatgggtgaatttaagaactcgaccaagcaggctgatactaaaacttccataacggatattctaaatatggatgacgaagcaagggataactatttaaggacaatgtttcctgaatttgctccactttcaaaagaattcacagaattagctccaaagtttgacgaattaaagaaatctgaggaaaatgagttcaataaattaaagctaattgcacttggaagttacctaggcacaatatcatgttactatagtatcttgttgcacgaactccataataatgaagatttcacatctatgaagggacatccggtcatggaaaagattttaacgacaaaagagatttggaggcaagccagcgaattgccatctagttttgatgtgaatgaaggagatggttctgaaagtgaagaaaccgcaaacattgaggcctttaacgaaaagaagctgaatgagttggaaaacagtgaagattctgatgcagaggatgaaggaaaacacaagcaagaaattgatgaagaagaaagagaaagcgatgaagaagaagaagatgttgatattgacgattttgaagagtacgtagcacaatcacgtctgcattctaaaccgaaaacatcatcaatgcctgaagctgatgatttcattgaatctgagattgctgatgtggacgcacaagacaaaaaagctcgtagaagaactttgcgtttctatacttcgaaaattgat

SEQ ID NO: 173849 - DNA, 384 bp, Saccharomyces pastorianus
atgttcttcgttaacttagcgttgtccacattgggctttttctctgcttctttgatatgcattgtcgtctttctattattttatcctcacgttacctggtgttcatggattttagtaccgggcgctgctttatctttgctagtggttcctctgatattcttggcttattcaagaagctcatgttcaagagaggatgacgaactggacgaactagaggagaagggaatgctgctgaacgacccatatccaggctcagcggccgaaagattcaacatcgatgctgaaggagaattcagcgctcacggagattcaagaacaaatttattgaatagcagcttcaacaaccgtaccaacgcaacggtactgccaaatatcattccacgt

SEQ ID NO: 173850 - DNA, 504 bp, Saccharomyces pastorianus
gaatctattatcctcagcattgccatctttattggcgtcctccttggcactagcgttggtactttcagtggcagtagcattagtgctggagttggtgctagcagtggtagtagcactagtgttggagttggtactttcggtggtagtagcactagtgttggagttggtactttcagtggtagtagcatttgtgctggagttggtactttcagtggtagtcgcactagtcctgacgttgatgctggcagtggtagtagcattagtgctggagttgatgctggcagtggtagtcccactagtcctgacgttgatgctggcagtggtagtagcattagtgctggagttggtactttcagtggtagtcgcactagtcctgacgttgatgctggcagtggtagtagcattagtgctggagttggtactttcagtggtagtagcattagtgttggagttggtactttcagtggtagtagcattagtgttggagttggtactttcagtggt

SEQ ID NO: 173851 - DNA, 1170 bp, Saccharomyces pastorianus
atggtgactaaagatcgtaacgtggtagttctaagtaaactgttcgaacccatatcggaataccatttagaggtagatgatcttaagatttcaaagcacgtcaccgttggttggggtaaaaaggaaacacaattcagaggtaaaggtgcacgtgccatggaaagagaagcattagccagcttaaaggcatcaggtttggtaggtaaccaattaagagatccgaccatgccctatatggtagatactggtgatgtaaccgcattggacagtcatgaaatcacaatttcttggagaggggattgtgattattttgctgtttcttctgtagaggaggtaccagacgaagatgatgaaacaaaatcaataaaaagaagagctttcagagttttttcccgtgaaggccaattggatagtgcttctgagccagtaactgggatggaacaccagttaagctggaaaccacaaggttctttgattgcgtccattcaaagaaaaaccgaccttggtgaggaggattcagtggatgtgattttcttcgaacgtaacggtttaaggcatggtgaatttgatacaagattacctctagatgagaaggtaggaagtgtatgctggaatagtaactcagaggcactagccgtagtattggcaaaccgcattcagttgtggacgtccaagaattaccattggtatttaaaacaagaattgtacgctagcgacatttcctacgttaaatggcacccagaaaaggacttcacgttgatgttttctgatgcgggatttatcaatatcgttgatttcgcttataagatggcgcagggtccgacattagagccgttcgataatggtacctctcttgttgttgatggaaggacagtgaatatcactcctctagctcttgctaatgtccctcctccaatgtactatcgtgattttgaaactccaggaaatgtattggatgtagcgtgcagtttttcaaatgaaatatatgcagcaatcaacaaagatgttctaattttcgcagccgtcccaagtatcgaagaaatgaaaaaaggcaaacatccaagtatagtctgcgaattccccaaatctgagttcacaagtgaggttgactctttaaggcaagttgcatttattaacgattccattgtcggtgtgttgcttgacacagaa

SEQ ID NO: 173852 - DNA, 1644 bp, Saccharomyces pastorianus
actgggatcaaagctcaagtacatgttgcacctgatagtacactcttccgtgaaaatgaggaaaagaaagtaggaggcaatttgcctaagaaggttatcaaccaaaaagaaacaggttctgaacacgcttcatctggtcatcaccaatatcatcagcttattaataacgatggcaatgatgcaaagacttcaggtcctacctccgcctcgtccaaggaccaaggagatgtcagttccaatctggagagtaagaaacagtcgccaaaggacatatttgttgcttccagcgctcaaaacacaagtcaattgcctggccctaaccctcagggcagtataggtaccgtgccattggaggagttacgccctaaggaatttagatcggccccttctagaaagccaaacaagtttgacacttccatcaccaagcctggtgttttggatgatttagggaaaattgatgaaaaagaaattaaagagaaattcgaccctgattctaccgataggttgtacccgtggcaaaacgtcggtgagtttcatgcttcaggaaagggatcgccaaatacaaagatgtccaaaatcactaaagcttacattttggaaaatttttataacgattggtactgtaatatagctacggttgttggtacctgtttcttttcatggttatttgcttacattgggttttcgtggtggtctttaatattcatctttttaggcactgctactgtttacaacgcagaatatacaagattcaatagaaacattagggatgatttgaaaagagtcaatgtcgaagaaaccttgtcggaccgtgtggaatctactacgtggttaaattcatttttgtcgaagttctgggtcatttacatgccagttttatctcaacaagtaaaagataacgtcaatcctcaactggcaggtgttgcgcctggttatggtatcgatgcattggccatcgatgaattcaccctgggttccaaggcaccttcaattaaaggtatcaaatcgtacacaaagaccggtaaaaacactgttgaaatggattggtcgtttgcgttcaccccaagcgatgtctcggatatgacagctactgaagctagggagaagactaatccaaaaattgctcttggtgttactttagggaaaagtttcgtttccaaaacaatgcctattctggtagaagacatcaatgttgctggtaaaatgcgtatcaaagttgaatttggcaaagttttccctaacattaaaatagtatccctgcagctcttggaacctccactaatcgatttcgctttgaagccaattggtggtgacactttaggccttgacgtcatgtcatttttgcccggtttgaagagttttgttaaaaatatcatcaactccaatattgggcctatgttattcccaccgaaccatttggatgttaacgttgaagatattatggctgctcaatccaaggatgctattggtgtccttgccgtaaccattgcctctgccgactctttgaagggttccgactttattactaataccgttgacccttatgttgtcatgactaccgaagatgccgtacctggtaccgatgaagaagtacgtacttccatcaaatcagatgttaaaaatccacgttggaatgaaacctaa

SEQ ID NO: 173853 - DNA, 96 bp, Saccharomyces pastorianus; identical to SEQ ID NO: 173641

SEQ ID NO: 173854 - DNA, 258 bp, Saccharomyces pastorianus
atggacatcagcattcaatgtatatcttatcacaccagtttatccaaagatagatgcagttttgaaattggttacttagaatatttctactacatttcgataacaaatataactattttgaatttaaaagttgagtatccaaaaattttagaaatacatacaattacttcccaattacttcccaaatattctcccccctggtttgatatcataaaagcaccttatggcaacaagattcccgggatagtaatgctattt

SEQ ID NO: 173855 - DNA, 147 bp, Saccharomyces pastorianus
atgctatggccggaaaagaaggaagacgatagaaactgccaagaaacttttagaggggcctgttcgtgtaccataaggttttgcaagggttatttctctgtaaatatttttgggataaacctgaatatatcttatagctctggaaag

SEQ ID NO: 173856 - DNA, 504 bp, Saccharomyces pastorianus
atggatgtaagaccaagactgtcacttctgaagctcctgaagctaccaccacaactactgtttcttctcaatcgtacaccactgccaccgtcacccactgtgatgacaatggctgtaagaccaagaccgtcacttctgaagctcctgaagctaccaccacaactactgtttcttctcaatcgtacaccactgccaccgtcacccactgtgatgacaatggatgtaagaccaagactgtcacttctgaatgtcctgaagaaacttcagcaactactacttctccaaaatcatacactactgttaccgttactcactgtgacgacaacggctgtaacactaagactgtcacctctgaggcccctgaagccacaaccactactgtttctccaaagacatacactaccgctactgttactcagtgcgatgacaatggatgtagcaccaagattgtcacttctgaagctcctaaagaaacttcagaaacttcagaaaccagtgctgccc

SEQ ID NO: 173857 - DNA, 210 bp, Saccharomyces pastorianus
atggaattcttgtatttgggttttcgtaaatcatcgttttgtatgatagatttcacgacatccaatggatacaccgtcaaccacaacattgtgccggaaaatgcaccaaatagacacagtttccaaggaggaatttcgtttcttgttaatccggtgctgatttctttagccatcaatgcctcgtacacaaggaaatacgtccctagcccg

SEQ ID NO: 173858 - DNA, 585 bp, Saccharomyces pastorianus
ggtttcggtttctctgtgatgttttctatctggtgttttgctggtgtttctggtggggctttgaacccagccgtttctctctctttgtgtttggccagagccatctcaccagccagatgtgtagtgatgtggtttcctcagatcattgctgggatggctgctggtggtgccgctagtgctatgactccaggcaaggttctctttactaatgctttgggtttaggctgttccagatctagggggttgtttttggaaatgtttggtactgctgtgttgtgtttaacagttttgatgactgctgttgaaaaacgtgaaactaactttatggctgcgcttccaattggtatttctttattcatggctcacatggctttgaccggttacactggtaccggtgtcaaccctgcaaggtctctaggtgccgccgttgctgccagatatttccctcattaccactggatttactggattggcccacttttgggtgccttcttagcctggtcagtgtggcaattattacaaatccttgattacactacatacgttaatgccgaaaaggcggcaggtcaaaagaaggaagactga

SEQ ID NO: 173859 - DNA, 147 bp, Saccharomyces pastorianus
atgagagaactgccgaacgaatgtggattcactagtgataacgcctctatcattataatctctgctctttgtgctttgaggggtcttcaaccgaaaactggtgtagaagccgatatgaagcttctggatgccgctgacgagtatata

SEQ ID NO: 173860 - DNA, 123 bp, Saccharomyces pastorianus
atggctgggttgactaaaggtgaagatttggaaacctctattgacatgggtcaatggctagctgctttgtctattcaagaagttggtccctcttacccttccgaaaaaatatcgtactctaaa

SEQ ID NO: 173861 - DNA, 507 bp, Saccharomyces pastorianus
atgattagcgaccatcggccagtttacgcagcatatagagcaaaaataacttttgttgatgataaagagagactatctctcaagaaacgtttattcacagaatacaaacaagagcatcccgaagaaccgggttctctgatatcggatcttctcagccttgatctggataataagagtactgatggattcaaaagctcttctgaaagttctctacttgatattgatccgataatggcacaaccgacagcgtccagcgttgcttcttcgtcacctgtttcttcagcatcggcttcactacaacctgtcagaactcaaaacagtagccagtcgcgtacccccataaagaaaccggtattgcgccccccacccccacctgctcataaatctgtatcagcacctgctccttcaacatcgaaggaaaaatcactaacacctcagacctcaactgcatcgttgtcatctgtgactaaaaatatacaggaaaataaaccattggcgcaaaataga

SEQ ID NO: 173862 - DNA, 117 bp, Saccharomyces pastorianus
tcgctatcgcaagctattaaatgggacggctcttctggcggtgtcatcagaatggttgttttgacagaagctggtgtggaacgtttgatattctacccagacgagtacgaaagacta

SEQ ID NO: 173863 - DNA, 333 bp, Saccharomyces pastorianus
ggtaatgcattcgccaaggagtatatcttgggtttgaaagattattctcaagctacttggtcccagaacttcatctcctccatcgtcggtgcttgctcctctctgatcgtttctgctccattagatgtcatcaagacaagaattcaaaatagaaattttgataatcctgaaagcgggttgagaatcgtcaaaaacacactgaaaaatgaaggtgtaactgcgtttttcaagggcttaacacctaaattactaacaacgggtccaaaactggttttctcatttgcgttagctcaatctttgatacctagattcgataacctgttgagcaaatga

SEQ ID NO: 173864 - DNA, 654 bp, Saccharomyces pastorianus
ctggaccggtatttccaactgaattcgtatgtcaatggtatattgcaggtcaatcctgatgctatttcaattgctcaggagagggatcgtgagcgggcagcaggagtagttagaagtccattgcatggaattccatttttagttaaggataattatgctacaaaggataaaatggacactacttgcggttcatggatgcttttaggttcagtagtgccacgagatgctcatgttgtatccaaattaagagatgctggcgctgtattgtttggtcactccacattaagtgaatgggcagacatgagatcatcagattactctgagggctactccgctagaggtggccaagcacgttgtcctttcaatcttactaccaatccaggaggtagttcatctggtagtgccagttctgtagctgccaatatgatcatgttttcgctaggaaccgaaactgatggtagtattattgatccagcgatgaggaatggtgttgttggttttaaacccactgttggtttaacctcaaggtctggtgtaattccagagtccgagcatcaggattctactggacctatggctagaactgtccgcgacgcaatatatgctttccaatatatgtggggggtcgatgagaaagacgtgtataccttgaat

SEQ ID NO: 173865 - DNA, 156 bp, Saccharomyces pastorianus
atggaaaacaagaacgtggagagatcgcagggcattcgctcttccaatgtagggccttcgccaatgatgaaacccgcacatttcagaaggcgatcctctggtagatttagcgatatttctatagaccatattctttctgacaattcagaaattcct

SEQ ID NO: 173866 - DNA, 426 bp, Saccharomyces pastorianus
caattgaaaactctcactgaaaaagagcttgaattagaagaggaatacttgaaaaagaaagatctacacttgaaaaatcaattagagttcagtaagttagaagaaagcttatcgaaagacctgaaaaactcagaagggaggttccaaaaggtcaatcaagaattagttcaactaggctctaaactggacaaattgaacgcgagaaacgagaagttacaaaaggaggtcgatcagaacgcagaagagatagaaaagttcagtactcaatttttgagtaaaagagaaaaggatagatttagaagaaaggagtacaggatacgcgaagccaataaatttgaattgactataaaggggttagagcaagatatcaacagattagaaaatgagaatgaaaatatacatagtctaattggtaatagttactga

SEQ ID NO: 173867 - DNA, 168 bp, Saccharomyces pastorianus
aaagaaggcggccaactcattaaaaccctccccattgtcccgttttttttgtttccatataggaagaactctacagctcgaacaatacatcaaatcaatcaagcagtcgctctcgttctattgtgtgtttctcaccaccttacatatctcccctcagttcccagccta

SEQ ID NO: 173868 - DNA, 2958 bp, Saccharomyces pastorianus
accttgaaatgttttgatttcaatgacgtcagaaaggacactgtcattggcgaccttcaagtcaatttggcagatttgctacaaaatcctgttttagacaaccaaactgccgacttgagagctggaacaaagtcaaaaggtgttttgcattattcgttacactggtttcctgttagggaagataaatcagaagaaaaagctgccgaacgtgccaaggctaaggccaagggtgaaggagaggatgaaaacaaaaatatcattggggatgaagacgatgatgatgacgaaaattcccaaaccgatgttggtattgcgaagattactttacaaaaggttaaatatttggatacagctagctctatgaccggtagtttgagtccatgtgctgaattgtttattgatggacaaaaagtcaagaactatagaacactgagacgtatcaatgaaccatcttggggcgaaaccatcgaggttttggttccatcaaaatctagctctaaatttgttttgaagatttttgatgaaagaatgaatggtaaagtacaaatttgtgaatactcgtcttccttggatgacataatgaatacattagacaccgctcaagaatttgtcaagggttccccacaaggtgacatatatttggatgtttcttggaaatctattgaaatgacaggtgcctttgccgccgcaaactctgttagcgaacccatcggctgtattaaattggacattaaagatgctgctattaaaggtgacttatctggtgttggcgacattgatccctattacactgtctctttgaacagacgtgttttatacaaatccatatatcactccgataccgatcatcctattttcgataatagcacatatgttcctgtactttccccaaatcaaactttaagtgtcgaatttcatgactaccaaaagattggtaaagatcgttttattggctcggtacaaatcccgttatcagatattttcaagaaagatcctaaatcggagaaatatgtttcaattaacaataaagacggagtatctaggctaaagttaaaagaccacaaacacaatatcactgaaagtgttgtcaatctctctacatcatttatcccaattactccagtttatacccctgaggaattggcgaatgttgataaattagaaaaggaactagaagaaaagaagaaaaaatttgaagccacccaaaacgagaataagcagaaaatggaagaaagtccaaaggaatgggaagtagtcgaaattgaaagcccatttgaagacgatgaaaagaagatcaataagaaggctaaactgtctttgggtgagttgattaaacacaaatctggtatattatctatgcaaatattagaaggtacattgaacccaacttctgcttacctggcggttctggctgatgatatttcatatcctgtcttcacttgcatgaaaccatctcatggaaaattgaactcggaggtggcaaatatcttcatcagggacttaaagttcagtaaactatacttgagaatatcaaaaaaacatgttgctaaggattctgacgatgtcatatccgaaacttcttacagcactttaaagttattgaaacaagcttacgaagagcctacatggttgaactttaatggatcaaaagcgaaggtcagatttttgtatacgccttctaccgtaagcttgcctagctcagaaagtgttgaagataccggttacttgaatttaaagctcatttctggtcacggtttgaaatctgccgacagaaacggttattccgatccattcgttaccatttatgtcaatgataagagggtcttcaaatcaaatatcaaaaagaaaacactagatccggtttggaatgaagatgccaaagttccgattctttcaagaagtaagaaccaggtagttttgaacgttcttgactgggaccgtgcaggtgacaatgacgacttaggccaagccacattggatacttctaatctagaattgggcaaatcttataactggaaccttaacctaaacactcaaggtagtataaaactacaaggttcattcagcccagaatatatcaagccaagcttcgacgtcgtgaaaggcggtattgccgataagccaatgaagatggccagtggtgcagcccatgctactgtcggcatagctggtacaggtttgggtgccgccacaggagttgcagcaggtggtttacaaaagggtgggcgtcttctaaaatctttaggaagcaatccaatgaggaggagtaagagcggcaatggcaatgaatctaacggcgcaaaaaaatcttctgaaaaaaaatcgttcgataggagatctccaagtaacttcgatagtaacaatggcacaccaagggcatcagtagactatgacccatcagttcctaatacgagttacgcacccgtccaaagcgcctcccccgcagtgaaacaagctgacaacaattcaagcttgagcaataaaaaagaagctcctaccaacggatcaagagcaggttctcgtgcaagcagtttcgctcgtaccttggctcctcacggtacttacaacggttttattaccgtacttgcagcggaaaacatcgccaaacacgttcaaattaagatttccttaactcaaggtggtaggttaaaacacatttacaagaccaagagccaaaaaaccaacgatgatggaattgctctatttgacgaggaatgctcattcaaggcctcccctgaagccaacctggtactaggtgcgatttcccaccaaagattatcgagagataaagatctcggcattgctcaaattaacttgggcgacccacaaattcaacaagacggccaaatatctgtaaaattaggtgatggtcatctgattgtaaagattagttacggtaaagacaaaaatagtcaagtacccccactaccagaagtccctcaagaatacacacaataa

SEQ ID NO: 173869 - DNA, 249 bp, Saccharomyces pastorianus
atgcacggtacttgcctcagcggtccataccctgtgccatttacccataactcccacgattatccacattttaatatctatatctcattcggcggccccaaatattgtataacagctcttaatacatacgttataccacttttacgccatatgctaaccactcaatttatacacacttatgttaatattacaaaaaaatcaccaccaaaatcacctaaacataaaaatattctattcctcaataataat

SEQ ID NO: 173870 - DNA, 594 bp, Saccharomyces pastorianus
atgatgagtggcacaggaaacgtttcctcgatgctccacagctatagcgccaacatacagcacaacgatggctctccggacttggatttactagaatcagaattactggatattgctctgctcaactctgggtcctttctgcaagaccctggtttattgagtctgaaccaagagaaaatgataacagcagctactactacaccaggtaaggaagatgaaggggagctcagggatgacatcgcatctttgcaaggattgcttgatcgacacgttcaatttggcagaaagctacctctgaggacgccatacgccaatccactggattttatcaacattaacccgcaatcccttccattgtctctagaaattattgggttgccgaaggtttctagggtggaaactcagatgaagctgagttttcggattagaaacgcacatgcaagaaaaaacttctttattcatctgccctctgattgtatagcgaaggacaagtttttcaccagctcggacgatcccaccaacttgacaatacccaatagggacatcaacgaaagatcttttcttggacccttccttttgtgtgcgggatcctct

SEQ ID NO: 173871 - DNA, 174 bp, Saccharomyces pastorianus
atgtctactaaagcccaaaaccctatgcgtgatttgaagatcgagaaattggtcttgaacatctccgtcggtgaatctggtgacagattaaccagagcctccaaggttttagaacaattgtctggtcaaactccagttcaatccaaggccagatacactgtcagaactttcggt

SEQ ID NO: 173872 - DNA, 84 bp, Saccharomyces pastorianus
atgaatgcacgtgtcgctgtcctcatcactgctgcaatactttctgcacctgtcactgctattgctctcctggaagctagacgg

SEQ ID NO: 173873 - DNA, 1029 bp, Saccharomyces pastorianus
atgtctgaatcagtggccattataggtgcaggattagtaggctgccttgcagctttggcattctccaaagaaggctacaatgtcacactttatgattttagacaagatcctcgattggacaccaccaaaaataaaaatttgaaatccattaatttggctatttctgctcgtggcattgatgctctgaaatcaatagatccggatgcttgtgaacatattctgcaagatatgattcccatgaaaggcaggatgattcatgatttgaaaggcagacaggaatcacaattgtatggcttgcatggagaagctattaattctatcaatagatctgtattaaataatagccttttggacgaattagaaaaatctacaacagaactgaagttcggtcacaaattagtcaaaatcgaatggacagatgataaacaaatctgtcattttgccattggggaagatttgaaaaccccacatactgaaaagtatgattttgtcataggttgtgacggagcatactctgcgacgagatcgcaaatgcaacgtaaagttgagatggatttttcacaagaatatatgaatttacgttacattgaactttacatcccgcctactgaggaattcaagccaaactatggcggaaattttgcaatagctcctgaccatttgcacatttggcctcgtcataaattcatgttaattgcgctcgccaacagtgacggctcgttcacttcaacctttttcggttctaaagatcaaatatcagatctgataacttccaagtcacgtgtgagggaattcttaatcgagaactttcccgatattattaatattatggatttggacgatgctgtcaaaaggtttatcacttatccaaaggaaagtcttgtctgtgtaaactgtaagccatacgatgtaccaggcggaaaggccatcctactcggcgacgctgcccatgcaatggttccattttacggccaaggtatgaattgcggatttgaagatgtgagaattcttatggcgctacttgaaaaa

SEQ ID NO: 173874 - DNA, 243 bp, Saccharomyces pastorianus
atgggtattacagtaataggttccctaaactatgatttggacacatttacggatagattacctaacgctggagaaactttcagggctaaccacttcgaaacacatgctggtggtaagggattgaaccaagctgcggccattggtaaattaaaaaaacccagcagcagatatagtgttcgaatgattggtaatgttggacatgatacggttggtaaaccaattgaaggacatttatccgattgc

SEQ ID NO: 173875 - DNA, 756 bp, Saccharomyces pastorianus
tccgagtatctgaccaagttccaaacaacagatcgagaatcatatcctcgcttgcaggacccatccagagaactgaatgttatcatagaccaattggccgtttcacccgaacaaatagatgctagtccagattcactagaagcattaatagatctttgccatgacttcccgcacttaacaccgaaattacaaactcaactaagctatttgataagttcatctctgtcgaatctgtcaaaagatattaaggctaatctctcatcaaatgttaactttactgaaattggtggcctgataccgcagtggaaaaggcatttagaagagtatggctaccttattcaggtacttttgacgtttttacaagatgagttacataaggtctcctcgcagtctactaatttaaaccgttctgccaaaaacagtaagaatgatagtgcaaacgtcgagctgtttaaaagagactgtaatcaaatggaaaacttgcttgaatctataacaaagctactggagattaacttatctaagatatttcagacaactcctgaaaaagatttgtttattggtttgttcacaagaccattatttgtgttattagagattgaacctgtgacgaaggtatcatcactaaagatgtttattcaaaggattttggctatgtgtgttaaaaatcacggtcaaagttcaagtatacaaagttcattgatgaccaatttaacttattttcttcatttgtcggttttaatgcagaattactaa

SEQ ID NO: 173876 - DNA, 99 bp, Saccharomyces pastorianus
ggcggttgttgttgttgctgttgttgttgttgttgttgttgttggtcgggctcgtcttggaacccatttcgggtgtcagcatgcgaaatgtgttggaaa

SEQ ID NO: 173877 - DNA, 135 bp, Saccharomyces pastorianus
atgttttatggaagtttcaataaatgcgtgactggctatagttgttggatggatattcattattatgtagaccatattattaagaagaatgcaattaggcccgactataaatctcacactcagaaccttgttctg

SEQ ID NO: 173878 - DNA, 534 bp, Saccharomyces pastorianus
  modified_base (223)..(258): a, c, g, t, unknown, or other
aacaacaggtcccattgctttgcaagagctttctaccaactacaagtatccgatataccattagacactttggaacttaccaggtcattcggttgggacactgcggaatccttcactcaacacgatgtgcaagaattgaataggatattaatggacaggctggaaaataatatgaagggaacacccgtggaggggaagttaaatgaaatatttgtcggaaaannnnnnnnnnnnnnnnnnnnnnnnnnnnnnnnnnnngaatctgctagagtggaggacttttgggatctgcaactgaatgtcaaaaatttcaagaatttacaagaatcttttgacaattacattgagatggaactaatgaatggtgaaaatcagtatgctgctcaagactatggtttgcaagatgctcaaaaaggtgttatattcgaatcatttccgccagttttacatctgcagttgaaaagatttgaatacgattttaattatgatcagatggtaaaggttaacgataaatatgaatttcctgaaacattg

SEQ ID NO: 173879 - DNA, 693 bp, Saccharomyces pastorianus
aagtacctcggtggcgtggaagaaactttcggtttgaatttttcaagacctggatttcaagttgtccatcaatacttcaattttgtttctctaggccattcagggtatagaacacaattccaaaattctctatttgttgcaagagcattttctttcgaattattgaattcgtcaaaattgcccggatgctttgaaattgttagcagtatccatgaaagcattgagaacgattccgcccctaagtcagttaaagactattgggaacacccccaggcttacaaaccgggtgtaccgctggtagctttcaaattgtccaagaaattccacgaagaatatccagaagtgccacaagcaatcctttcctctttgttgagaggtagaggctggataataccaaattacccattaccaaaggcgacggatgggtccgatgagaaggaggtattgagagtggttttcagatcggagatgaagttggatttagcacagttgttgattgttgacatcgagagtatcttgacaaagttgattcatagttacgaaaaggtttgtcatcatatagaacttgcctctgagcaaactccagagcgcaagagttcgttcatctacgaaatgttattggcattggcatctccacaagatgacatcccaacgccggatgaaatcgaaaagaaaaataagacctgcaggcat

SEQ ID NO: 173880 - DNA, 810 bp, Saccharomyces pastorianus
gattcaaatgatatagtggcgcatagaaagaatgctctcgtttttaatggtaactcacgtttgatgatgattccaaaaaaaccaaatacagaggaccacttagtttataagattaatcatgataaaaatttaactacagaaagatttccctctgtcagctcagtggcaaatacaagacctaacgttatcttgaaaaatggtaaatacgcttatgatattttggacgaaatgacaaataaagctgcctttcttcttgcagaaaagaagacccgactaaatcccaaaaaaaatcacaaaattatggatggctacgaaggaggtcaggaaaacgaagataatgatgaagactcagcagatagtggctcgcataaaaataagagaaaggaaggtaatagttctttatcggcaacactgaacacttggctttcaaaattttcaagtacttctgaaggttcacagaagaagaaggaacaggcaaatgaattaggcaacgattttgaatatgatgaagatgtggctgattttgcagaaattttgccgaagcagtcatctagtaatattgaaaaaatttttaagcatggtaacaattcaggatcaatggtatcatctaattcaagtatcaagctcaataggagggagaatatattgataggtccaccagagttgagattttctaatgaaatcaaggaacacaatagtattgctacaatattcaaactggtatttattcaaaccaatagaagagtcgtcgaaaaaatagatttggcgaacatgaaatgggggacaatccacggaggcataagtacatga

SEQ ID NO: 173881 - DNA, 240 bp, Saccharomyces pastorianus
ttgttggaagaactaacggaacttgaagaagaaacggatgtagcggatgatgaagtagcggatgatgaagtagcggatgatgaagtagcggatgatgaagtagcggatgatgatgtagcggatgatgattcaacggatgatgatttggctgaagatgatgtagctgaagatgaagtggatgatgatttggctgatgatgtagccgaagatgaagcggatgatgacgtagctgaggatgat

SEQ ID NO: 173882 - DNA, 633 bp, Saccharomyces pastorianus
ttatctttgaaaaaaggaataacaaaatcatacatcttgcaaagaactttcacttcttcctctgttgttcgtcaaattggggaagtgaaatctgaatcgaaaccgccggccaaatatcatattatcgaccatgaatatgattgtgtggtggtaggcgctggcggtgcaggtttaagagcagctttcggtttggctgaagctggatacaagactgcttgtttatccaagttgtttccaacaaggtcacatactgtggctgctcagggtggaattaatgctgcgctgggaaatatgcatccagatgattggaaatcgcacatgtacgacactgtcaagggttctgactggctcggagaccaagatgcaatccattacatgacaagagaagcacctaagtctgtcattgaactagaacattacggtatgcccttttcgaggactgaagatggaaggatttaccagagagcatttgggggacaatccaaagattttggtaaaggtggacaggcctataggacttgtgcggtggcagatagaacaggtcacgcaatgcttcatacattgtatggacaagcgctgaaaaataatacacacttctttattgaatactttgcaatggatttgttgaccata

SEQ ID NO: 173883 - DNA, 213 bp, Saccharomyces pastorianus
tttacccataaagcccatgattatccacattttaatatctatatctcattcggcggccccaaatattgtataactgctcttaatacatacgttataccacttttacaccgtatactaaccactcaatttatatacacttatgccaatattacagaaaaatcaccactaaaatcacctaaacataaaaatattctatccctcaataataataca

SEQ ID NO: 173884 - DNA, 837 bp, Saccharomyces pastorianus
atgactaaatctgtagatacactgctgattccaggccccattatcctaagcggagcagtccagaaggccctggacgttccctccttgggccacacctctcctgagttcgtctctatttttcaaagggtgctaaagaacacaagagctgtcttcaaatccgctgctgcctcgaagtctcagccttttgtgcttgccggctctggtacgttggggtgggacatatttgcctcgaactttattctttcgaaggcccccaacaagaacgtgctggtcgtatccactgggacattttctgacaggtttgctgactgtctgcgtagctacggtgcgcaagtagatgttgttaggcccctcaagataggcgaatcagttcccttagaactgattactgaaaagttgtcgcaaaatagctatggggctgtcacagttacgcacgttgacacttcaacggcagtgctgtccgatctgaaagccatttcgcaagcgattaagcagacttcgccggaaacgttcttcgtagtcgatgctgtatgctcgattggatgcgaagagtttgaatttgatgaatggggggtggatttcgccttgactgcttcgcaaaaggctattggcgctccagcgggtctttctatctcgctatgcagtagcagattcatggattatgcactcaacgacagcaaaaatggtcatgtacatgggtatttttcctcgttgagaagatggacaccaataatggaaaattatgaggctggtaaaggagcttattttgcaaccccacccgtacaactaattaatagccttgatgtagccttgaaagaaattctcgaagagggggtt

SEQ ID NO: 173885 - DNA, 117 bp, Saccharomyces pastorianus
gtgacgacgagaagcagcaatgatgttgttcatttcttcgaccttagccttggctctggtgaaagaacccaatctcttcttggcgacctttctagctctcttttcaccagagtttct

SEQ ID NO: 173886 - DNA, 516 bp, Saccharomyces pastorianus
atgtccgacaagatacaggaggagatattaggactagtaagcaggtccaacttcaaacaatgctatgaaaaactggggcaattgcaaaaacaatttcccaatgcgttgtacttcaagattttggaaacctatgttaaattcaagcagtcacctggtaagttcgattacaataaactgctagaagaaccatatgggctgaaagggacaacgattacgggcgacacgcgttccttggagtttttgcacaacttcttcgtagagttagggaaatacgacgaagcattgcacgtgtatgaaagaggaaatttcaaattccctagctacgaattgtcttatcactggtttatgaaagcattggaagattccaattataaccaaatgagcaaagcatctctacagctagctaaatacagtgacagtggaaacctgcctaaaagagcatattatttttggaatgcaatctcgattttagccgtatcaaggtttcaggaaaacactctttcagatcccaagaaa

SEQ ID NO: 173887 - DNA, 153 bp, Saccharomyces pastorianus
atgcgtactttcactgactttgtttctggcgcacctattgtaaggagtcttcagaaaagcaccataaggaaatatgggtacaatttggcaccctacatgtttttgttactacacgtagatgagctatcgattttttctgcataccaagcaagt

SEQ ID NO: 173888 - DNA, 462 bp, Saccharomyces pastorianus
atgcgccaggcaggtcgttacctgccggaatatcacgaggtgaaaaacaatcgtgatttctttcaaacttgcagggatgcggaaattgcttctgagattactatccagccggtaagacgctatagaggcctcattgatgctgctattatttttagtgatatcttagttattccgcaagccatgggtatgagggtcgagatgctcgaaggtaaaggtccacatttcccagaacctttaagaaatccggaagacctccaaacggtattagactacaaggttgatgttttgaaagagttagattgggctttcaaggcaatcaccatgacaaggatcaagttggatggtgaggttcccttatttggcttttgcgggggaccttggactctaatggtttatatgacggaaggcggtggatcccgtcttttcagatttgccaaacaatggattaacatgtatccagag

SEQ ID NO: 173889 - DNA, 579 bp, Saccharomyces pastorianus
atggtagagaaggatacatggaaactgataactgccactgcactattcactgtggcagtgacgacgattacagattatgcttggaccagttggcaagcacaaaagcaagtaattgcgcaacaaaaaaataagaatgaaggtgggcaaacaaaatctgacacggataaatatcatcaatatgatgaacagtttatccgccaatctttgaaaaacaatgttgagtttcttggtgaggacacaattgaaaaactatccaatcaatatgttgttgtcgtgggagcaggtggagttggatcttgggtggttaactctttggtgcggtccggatgccgaaagatcagggtcgttgattttgaccaggtctcactaagttcactaaatagacacagctgtgccatactaaatgatgttggcacgccaaaagtggaatgtctacgaaggcatatgcgggaaattgcaccatggtgtgagattgatccgattaatgaattatggacgttacaaaatggcgaaagactgacccttggtattggaactcctgactttatcgtggactgcattgatcatattgatccaagg

SEQ ID NO: 173890 - DNA, 123 bp, Saccharomyces pastorianus
atgggttacagggtcattggtatcgatggtggtaatgccaagcgaaagttatttgaacaattaggcggagaaatattcatcgatttcacggaagaaaaagacattgttggtgctataataaag

SEQ ID NO: 173891 - DNA, 579 bp, Saccharomyces pastorianus
  modified_base (548)..(548): a, c, g, t, unknown, or other
atgtccaattcggaaagagataaattggaaagtacattgaggagaaggtttttctacacaccctcgtttgagatatatggtggtgtgtcaggtttatttgatttagggcctccgggttgtcagttgcaaaataacttgattcgactgtggcgagaacattttattatggaagaaaacatgcttcaggttgatgggccaatgctaactccttacgatgtgttgaagacttctgggcatgtagacaaatttactgattggatgtgccgaaatcctaagactggggaatactacagagcagaccatttgattgaacagacgttgaaaaaacggctgttggacaaggatgtcaatccacaggatatgaaaaatatggagaaaatattgaccacgattgacgggttttcgggtcctgagttgaatctcgtcatgcaggaatataacattaatgatccagtcactaacgatgttttagacgcactaacttcctttaatttgatgttcgaaactaaaattggagcctcaggacagttgaaggcctttctaaggcncagagactgcacaggacatttctcattcaca

SEQ ID NO: 173892 - DNA, 387 bp, Saccharomyces pastorianus
ctctcgttactttcgtcatctcctccttcctctctatacattgccgcaccttctctttttaagtttcttaagcgtgccgcattgtcttcgtcgacttcttcttcttcttcttcttcctcctcgttgtcatcatcgtcatcaaattcaccctcttcttcatcatcgtcgactaaaaagtcgtcttcttcgtactcgtttcttctggtggctccatatgcagtaggggagctctgttttctgaatgcagtttcaaaaccaacatctggagattcttgtttctctttttctttgagttgtcttttccttctgtctcttaggatttggctttgtttcttttccagttctcttttttctacttccggatccatattgataatatatgtacca

SEQ ID NO: 173893 - DNA, 84 bp, Saccharomyces pastorianus
aatgcacgtgttgctgtcctcatcactgctgcaatactttctgtacctgtcactgctattgctctcctggaagttagacggtaa

SEQ ID NO: 173894 - DNA, 255 bp, Saccharomyces pastorianus
actttaaggaacttgttgaaatatcactgtgatttcatgagcattcctagaacaagttttttcttgaagatttggacctttgcaactgatgtaactaagatggaacgtggccaagaacaactgaatgatcaaagagaaaaattgcgccaatttgctactgatcaagatatgcaggacttatatgactactgtaatagacccagaaggtcaattcttgaagtactggaagattttatctccgtaaagttgccctga

SEQ ID NO: 173895 - DNA, 417 bp, Saccharomyces pastorianus
atgagtaaaaacagggaccctctactggctaatttgaacgccttcaaaagcaaagtgaagtctgccccggtgatcgcacccgctaaagttggacagaagaagaccaatgacacagtgattactatagatggaaacactaggaaaaggacggcctccgaacgtgcgcaagaaaacactttgaactctgcgaaaaatcctgtgttagtggatatcaagaaagaagctgggagcaatagctctaatgctatttcattagatgacgacgatgacgacgaagattttggtagctctccttcaaaaaaagtaaggcctggctctattgctgcagccgctttacaagcaaatcaaacagatatttccaagagtcacgattcttcaaagtgctttgggcgactgaatacattcaaaagaaaggga

SEQ ID NO: 173896 - DNA, 1539 bp, Saccharomyces pastorianus
atggatggtgtgacaagagagttagaagtattgcaaaagctcaatcatccaaggatagtacgattgaaaggattttatgaagatactgagagttattatatggtgatggagttcgtttctggtggtgacttaatggattttgttgctgctcatggtgcggttggagaagatgctgggagggagatatccaggcagatactcacagcaataaaatacatccactctatgggcatcagccatcgtgacctaaagcccgataatattcttattgaacaagacgatcctgtattggtaaagataaccgactttggtctggcaaaagtacaaggaaatgggtcttttatgaaaaccttctgtggcactttggcatatgtggcacctgaagtcatcagaggtaaagatacatccgtatctcctgatgaatacgaagaaaggaatgagtactcttcgttagtggatatgtggtcaatgggatgtcttgtgtatgttatcctaacgggccacttaccttttagtggtagcacacaggaccaattatataaacagattggaagaggctcatatcatgaagggcccctcaaagatttccggatatctgaagaagcaagagatttcatagattcattgttacaggtggatccaaataataggtcgacagctgcaaaagccttgaatcatccctggatcaagatgagtccattgggctcacaatcatatggtgatttttcacaaatatccttatcacaatcgttgtcgcagcagaaattattagaaaatatggacgatgctcaatacgaatttgtcaaagcgcaaaggaaattacaaatggagcaacaacttcaagaacaggatcaggaagaccaagatggaaaaattcaaggatttaaaatacctgcacacgcccctattcgatatacacagcccaaaagcattgaagcagaaactagagaacaaaaacttttacattccaataatactgagaatgtcaagagctcaaagaaaaagggtaatggtaggtttttaactttacaaccattgcctgacagcattattcaagaaagcctggagattcagcaaggtgtgaatccatttttcattggtagatccgaggattgcaattgtaaaattgaagacaataggttgtctcgagttcattgcttcattttcaaaaagaggcatgctgtaggcaaaagcatgtatgaatctccggcacaaggtttagatgatatttggtattgccacaccggaactaatgtgagctatttaaataataaccgcatgatacagggtacgaaattccttttacaagacggagatgaaatcaagatcatttgggataaaaacaataaatttgtcattggctttaaagtggaaattaacgatactacaggtctgtttaacgagggattaggtatgttacaagaacaaagagtagtacttaagcaaacggccgaagaaaaagatttggtgaaaaagttaacccagatgatggcagctcaacgtcaatcaaccctcgcttcttcttcatcgggatcctct

SEQ ID NO: 173897 - DNA, 288 bp, Saccharomyces pastorianus
tggcacccgtacacatcaataagtactccattgaaagtttaccccgttactaaagcagaaggtagttatctgtacctcgataatggcaccagggtagtagatggtatggcaagctggtggtgcgtccaacaacgatacaacaatcagagactaaatgcagccgccatttcacagattaataaaatatcacatgtgatgtttggtggaattactcataaggcaggcattgatttttgtaaaaaagttgctcgccttattgccagataccctggaatgtgctttactggc

SEQ ID NO: 173898 - DNA, 96 bp, Saccharomyces pastorianus; identical to SEQ ID NO: 173780

SEQ ID NO: 173899 - DNA, 405 bp, Saccharomyces pastorianus
atggactgggcaatcaatgtcgcccatccacgattactttacaaggatcctaaactttcagtaacgtttattgtgccgagcttatttcatatcattattgctttcgtgttattaggaatatgtgcatccgattttctttgccccaacgtggcccatatatcagatcccaacagccttcgatcgaatggttctttagtttcaaaaacggcgtcccatgcatctcatactggggcattaatggcagttctactatcttggtgtaactcttcgcctgacctgttttccaacttaatgagctgggcaacctctacgagagaaacaaggtcaacctcagtatcgctatcaattggcgaagtgcttggcgcttgcggcattatcctgtgcacttgtagagggctccatttt

SEQ ID NO: 173900 - DNA, 96 bp, Saccharomyces pastorianus
aagtccatcaagttactggacgacgcttctgcactgaggtttttctcaaccgttagcttgaggtggacatattcgtcctccattttagggatcgtt

SEQ ID NO: 173901 - DNA, 183 bp, Saccharomyces pastorianus
ggcgtgaccatgcttaccggtcttggaagtggacatgtcgacaatcttacatggtctacctttaatgacaacgaaaccaccctttctcaaagcagaacattgcattgggtaggtggcagaggaaccggcatcggcagtttcaaaggtgtgttcttcgtcagacatgtttctgtatatggatga

SEQ ID NO: 173902 - DNA, 156 bp, Saccharomyces pastorianus
atcaagaacaagacctctaaatcacataaaaaaaccggcataccaaaaaaagtggaaggtaagcgtatagcaaaactgataaatccaagttgttttaatattattcgtccactaaaaaaaacattcaaattccagctccttcacctttatttttaa

SEQ ID NO: 173903 - DNA, 570 bp, Saccharomyces pastorianus
aaggtcagactattccacactgttacaagatgtagattacactctcatgaccataagccacccgtttcagaaagcagcgactggcagaaggaggtttcttgttatggttacagcggattcgacggtgatgctaatgatgactgggttgttgagattgataaaaagaattctgctcctggagttgcccaagaacgggtcatagctttggacacaaagtttagattgagacatgctatgacaggctgttatttgttttcccacgaagtcaagttgccagcttgggggttcgaacaacaagaagttacctgtgcctcctccggtagacatgatttaacattgtggtacgttgagaacaacagtaacccattgttaccagaagataccaagcgtatttcctataaacctgcaagcttcatttctaaatttattgaatcccataaaaagatgtggcatatcaataaaaatttggtcgaacctcatgtttatgaatcacaaccaacttcatggccattcttgttacgtggtataagttactggggtgaaaataacagaaacgtctatctattaggt

SEQ ID NO: 173904 - DNA, 309 bp, Saccharomyces pastorianus
gttatcactgtgtccagggataggggtgttttacaggagattagacctgccaaaccactatacagagcagcattcacatatttgattaacgatgctgaactttcaaaggtgttgaaaactcgctacttattaaaggttgtaggttttgaaaccggcaggatcaagaagtgggaagaagagttaaagcccttagggaaagttcctgaccagaaactgttcaaaagtagactggactatttatctggaaagataaacgctagtaacgctgtcattaataagtgtgaagaagaaataaaaaagttatctaag

SEQ ID NO: 173905 - DNA, 357 bp, Saccharomyces pastorianus
cagaaagagcttgaagaattgaaaacttctcttccccacgaagatgcgtcatacagcaatgtaactataaaacagttaaccgaaactaagagagacctcgaatctcaagtacaagacttgcaaactcgtatctcgcaaattactagggagtctactgaaaatatgtcacttttaaacaaggagatacaggacctgtatgacagcaagagcgacatatccattaagcttggaaaggaaaaatcatcgagaatattggcagaggaacgatttaaactactttcgaatacgttagatctaactaaagctgagaacgaccaactgcgcaaaggtttgattatttacagaatactattttaa

SEQ ID NO: 173906 - DNA, 243 bp, Saccharomyces pastorianus
tcttctttatcttcatcgtcgccgcttagttccaagtcggaatctatttctttttcgtcagctttatccttttcttcgtcactatcttccatattgacctcgtattctttgtcactgtccatggtgacccattcaccatcgacttctccgtcttggccgccggcatctacttcccagttagcctctgcatcctcatcctcatcttcgtcaccattttcttttttccatttagctagtagttca

SEQ ID NO: 173907 - DNA, 354 bp, Saccharomyces pastorianus
atagcgctagctgaacaagctagcaaactaagaaaatccattctacctgtaaagttaacttacaagaacatgctaagggatccatccgaaaaatataaggcattcgtcccaccaaagatgaccaaaaggatctggccagataaaacaattcaaaaggccccacgttggttatccaccgacttgagagacggtaaccaagctttgccagacccaatgtctgtggctcaaaaaaaggagtatttccataaactgatcaatattggtttcaaagaaatagaggtttccttcccatctgcatctcaaactgatttcgatttcaccaggtacgccgtggagacgctccagacgatgtag

SEQ ID NO: 173908 - DNA, 453 bp, Saccharomyces pastorianus
cagggagtaaacccactttgcgatgtcaaattcattttccagaaaagtgatagaacagttgccttcgggttgacctccatgaggaccatgtttcacttacactgtgattccaaatttaacaagtatttcactactgcttggagtaagcttaaagaagaacgtcaatcttggaagactaataataattacggctcgtctaatgaatggaatttgttaagggagcccagtgtatgcaagaaaggtgaatccgtaattgatgcgatttgccgggtactacccagctatgaggagattgagctgcatttagaagactatttcaaaggacccgtttttaaaacattcaagatagtggatccaacaaaaactattcgcgacttggaggcatgcttcgtgaagggccctcctagtactagagggagcaaccatcctatcttggaccttgtgtatgagagc

SEQ ID NO: 173909 - DNA, 186 bp, Saccharomyces pastorianus
cttggcgtgaccgtgcttaccggtcttggaagtggacatgtcgacaatcttacatggtctacctttgatgacaacgaaaccattctttctcaaggcagaacattgcattgggtaggtggcggaggcaccagcgtcagcattttcaaaggtgtgttcttcgtcagacatgttttagtgtgtgaatga

SEQ ID NO: 173910 - DNA, 441 bp, Saccharomyces pastorianus
ggtgacgaatttcgagtgactatactttccaatggtttcttgtttgcatttaatagagaaccaaggccaagaagaatacctccaacagatgaagatgatgaagatatggaagagggagaagacgggttctttacggagggaaatgacgaaatggatgttgatgatgaaactggacaggccgccaacttatttggggttggcgcagatggtattgctggtggcggagtacgtgattttttccaattcttcgaaaactttaggaacactctacaaccgcagggaaatggcgatgatgatgcacctcagaatcccccaccaatattgcagttcttaggacctcaatttgatggagctactatcataagaaatacaaatccaagaaacctcgatgaggatgactctgatgataatgatgactctgatgagcgagagatttggtag

SEQ ID NO: 173911 - DNA, 663 bp, Saccharomyces pastorianus
ttaccgtctagcttccaggagagcaatagcagtgacagccgcagaaagtattgcagcagtgatgaggacagcgacacgtgcattcatggtagtgctaatgccagtaccaatgcgactaccaactccagcactaatgctactaccactgccagcaccaacgtcaggactagtgctactaccactgccagcatcaacgtcaggactagtgcgactaccactgaaagtaccaactccagcactaatgctactaccactgccagcaccaacgtcaggactagtgctactaccactgccagcatcaacgtcaggactagtgcgactaccaccgaaagtaccaactccaacactagtgctactaccaccgaaagtaccgactccaacactagtgctactaccactgccagcaccaacgtcaggactagtgctactaccactgccagcatcaacgtcaggactagtgcgactaccactgaaagtaccaactccaacactagtgctactaccaccgaaagtaccgactccaacactagtgctactaccactgctagcaccaactccagcactaatgccactaccactgctagcaccaactccagcactaatgccactaccctgaaagtaccaacgctagtgccaaggaggggatcctctagagtcgacctg

SEQ ID NO: 173912 - DNA, 234 bp, Saccharomyces pastorianus
atgcaagttaatgaaagatggctgagtgaaaatagtttgagagaagaaatattgtttccattcgctcctattccaagagtttctgttgttagaaacaaagaaacagggaaatcaagaggtttggccttcgttactttctccagtgaagaagttgctgaacaagctttacgtttcttggatggtagaggttacatgaacttaattctacgtgttgaatggtctaaaccaaaggtg

SEQ ID NO: 173913 - DNA, 99 bp, Saccharomyces pastorianus
ttatacaacattatgatccgatatagtgtaacggctatcacatcacgctttcaccgtggagaccggggttcgactccccgtatcggagtattttttcaa

SEQ ID NO: 173914 - DNA, 162 bp, Saccharomyces pastorianus
atggaatctatatttctacataataatattacgattattcctcattccgttttatatgtttcattatcccattacattatcaatcgttgcatttcagcttccattaagttcgatgactgtgtcccaatcctatgtcatcttcttacaccgcatgtaataata

SEQ ID NO: 173915 - DNA, 297 bp, Saccharomyces pastorianus
atgttgattgatttttgctgtagttatatagcagggacccacggaagagagcgagcgccttctttcacagggacttttgtcagccacgtctccggggaaaacaattgccgtccgcgtcgcagtgagattaggcagccgtgcgcttcagggacagaaaagaagcatttcgcggctacggagaaacagtgcactaactctctcgagggtagccgcaaagatttcttgtctcttccattaggacatagctatctttttcttttctgtttttggcgtatgatctgttctgagccaaagtta

SEQ ID NO: 173916 - DNA, 138 bp, Saccharomyces pastorianus
attatttctccttccgttctatatttttcattaccctattacattgtcaatccttgcatttctgctttcattagaattgatgactgtttctcaatgtttatgccatcttcttacaacctatttgacaataaattagta

SEQ ID NO: 173917 - DNA, 819 bp, Saccharomyces pastorianus
atgtcaactttcttacaccacgtctttttaacttctcaaccctcttcttcgtccgattatgcatttgatactgcgttgaccacgttcgaagttgtcactgccgttgattccttcaacgaacctgtcaaatctgtcccatttacggccgttcatgattactcgacagaagatgaaattaaatgcttatttaattcgacaatcagtggcggtctatacttgcgtgttacttactacaccaaggagctgtccggttcttccatttctaacacgattgacttaagctatcctgacgtaagctcgtccagtaatattttgacaaagagagattctgcagtcaccatggattcagaactgttttcagagtcaacggctaatttcggttctgctactaatgatgaatcaacgacttcaaattctgctctaaccccaacgtattcaaatacgaccctttcttcttacacttcacaatccttaactacatctgcagtggaaactgctgcgtcctcgagtagccaggtctctatttctacaagtgacaattccagcgctttgggagacgcatcttcatccgttaccaccatatccactcctaattccatgcaaagcaataaacaaacttcatctaatacgccttcagtctcgacaagcactttttctgcttcttcatcagccgtatctggttcaatagcaagctttagttcgggtccctcttcatcatatgacgcaaattatgcctccacaactgttcttgcagcggcttcttcaaattcaactttgtccacgtcttcatcgtccgctcatcatgttaccacaattcca

SEQ ID NO: 173918 - DNA, 984 bp, Saccharomyces pastorianus
ggtcctaatccagcagaaaagaagcaagacggagccgctaaaccagcgttctcgtttggttctaagcctgatgaaaaaaagaatgatgaagctgccaaaccagctttttcatttggagccaagactggtgaaaagaaagacgatgattcagctaaacctgccttttcatttggttccaaacctacagaaaaaaaggaaggtgacgcaacaaagcctgccctttctttcggtgctaaacctcaagagaataaggagagcgatgcggccaagccagggttttcgtttggcgctcaaaaggacgacgataaaaaaccagtggattccccggcaactaagacaactggggaagctgattcaagtgataacctgaaactaaatgcaaagccagtagaactaaagccagtttctcttgacaataaaacacttgatgatttagtaacgaaatggactaaccaggtgaccgagtcagcctctcattttgaacaatatacaaaaaagattaatagttgggaccaagtattggtaaagggaggtgaacagattagtcagctatactctgatgctgtgatggcagaacatagtcaaaacaaaataaatcaatctctgcaatatattgaaaggcaacaagacgaattggagaactttttagacaactttgaaacgaaaacggaagctctcctgtctgatgttgtatcaacaagttccggggctgctgccaataacaatgaccaaaagagacaacaagcttataaaacagcccaaactttggacgaaaacttaaattcattatcatctaacctatcttctctaatcacggagattaacaatgtgagcaatacattcaataaaaccgctaatatcgatataaacaatgaagacgagaacattcaactgattaagattttgaattcacattttgatgcattaagatctcttgacgatagctcatcttccctggagaaaaagataagtttgataaaaaaa

SEQ ID NO: 173919 - DNA, 696 bp, Saccharomyces pastorianus
atggtgaaaaactctcccgtctttagtgaagtacaccatatgattagcagtgaacgtttatttgaaggcattgatgtgttattgaacctacaaaacatcggatcttttgaatatggttcctttgcaacctatgataaaatcaaggccccactagcaatggaaaccttgaatcctgctgaagtttttggtaacataatggtagaatacccatacgtggaatgtactgattcatccgttctggggttgacatattttcacaagtacttcgactataggaaagaggaaatacgtacacgcatcagaatcgccatcgaattcataaaaaaatctcaattaccagatggaagttggtatggaagctggggtatttgttttacatatgccggtatgtttgcattggaggcattacacaccgtgggggagacctatgagaattcctcaacggtaagaaaaggttgcgacttcttggtcagtaaacagatgaaggatggcggttggggggaatcaatgaagtccagtgaattacatagttatgtggatagtgaaaaatcgctagtcgttcaaaccgcatgggcgctaattgcacttcttttcgctgaatatcctaataaagaagtcatcgaccgcggtattgaccttttaaaaaatagacaagaagaatccggggaatggaaatttgaaagtgtagaaggtgtt

SEQ ID NO: 173920 - DNA, 327 bp, Saccharomyces pastorianus
agtcgtgaacgtactttttcaaaacaatatactcggttttgcaaagaaatgattgaaagtgctccaggtactgacaccgaagactgggagtttattgtagcaaacctcaactcatacatgtatgaaaacagactttggaataataagcactttttttttgatggtcagcgttgcaaacaatcatttagactatgcattctaattccgtcctctctaaaaaaagacaatgatgcaaagtacaagtcatttaaggagtcagtgccatacatcgaagaggctttggaggtttactttgcaaaattagatgaacgattgaaccagagctga

SEQ ID NO: 173921 - DNA, 276 bp, Saccharomyces pastorianus
atgagtcttatactagatgatatcatcctctcactaacgaatgctaacgaacgaacgccaccacaggcccttaaaaccactttaagcctgctatacgaaaaatcaaaacaatatggtctttcttcgccgcaactacaagcacttgtaaggttactctgtgaaacttccataatagacacagttacaaaagtgtacatcgtcgaaaattgctttttacctgatggctacttgacgaaggaacttcttttggagatcattaaccatctcggtacgcct

SEQ ID NO: 173922 - DNA, 150 bp, Saccharomyces pastorianus
cttactaccttaattttcttagtctgtttctgtacaagtaatgtcttcaaactgcaggaagagtcagtcaatgcacaatcgtcgtggagtttcccaacccaagaaatcgacaaaacgaacttggacttcgaggaagctgtgtctgaagtc

SEQ ID NO: 173923 - DNA, 129 bp, Saccharomyces pastorianus
aaaatggaatctatatttctatatactaatattacgattattcctcattccgttttatatgtttcattatcctattacattatcaatccttgcacttcagcttcccctaacttcgatgacagcttctca

SEQ ID NO: 173924 - DNA, 447 bp, Saccharomyces pastorianus
atgtggaaatggatcaaaattctgtaccacgaagtagcgcaggaaaccacgctgaaggactcttatagaataactttggtaccttcttctgatggtatatcagtatgtggaaaactttttaatcgcgagtatgtccgcggcttttactttgcatgcaaggctcagtttgataacctttggggagagttgaacaactgcttttatatgcctacagtggttgatattgccaacctcattttgcgtaatcgagaagttttgttcagagaaccgaagcgaggaattgacgagtatctggaaaacgattcttttcttcaaatgatacctgttaaatatcgtgaaattgtgctgcccaagttgagaagagatactaacaaaatgaccgcggctcttaaaaataaagtcgctgttgcaattgacgagcttacggtgccacttatgtggatgatc

SEQ ID NO: 173925 - DNA, 690 bp, Saccharomyces pastorianus
actttaaagtacagatttcaattgctggacgagttacccatgatatacgccatgtgtgttccgacatggagtctagtttgtgaggccaaagaggcgctgctcaatggggacaatcaaagaaaggttccattattcgaacagatatttatcggactcattattgctgtagccgtcacaacagcaagcatactttacgttatatacaagaacgtcgatattcaccagattctgtttggggtgcaaatcgtagtcgttgctgctgccgcggtaatcttaacatatcgatacgtccatgacccacttgccaaaagaaatcttcgcacttcaatggcacttggagcagtgttattcttatcgggttacatatcatggctattagacatccatctatgttcattctgggtgtatgttagaagaagcattctggccttaccgcttggtgtactacttgaattacacggatggtggcatattttgactggaatgggaatttatttctatattgtttctttggaacatttaagggtcattacattgaacgttagctctgattacctgtttatttggagatggaaagtgttccctgaattggtaagaaaaggacgcaatccgtcaacaagatactctcttgaactatttgggccttatgtagaaaatcagtcagtcgaggctaataagaagaagaattag

SEQ ID NO: 173926 - DNA, 162 bp, Saccharomyces pastorianus; identical to SEQ ID NO: 173243

SEQ ID NO: 173927 - DNA, 195 bp, Saccharomyces pastorianus
gtgggtcgtttgcggcttgctgaggggttaaatattcccagctttctcggcctagctcatcagttctcagtctccaaagacgtggatctgtctttggtagaccgattgtgtcagaataaaattctgtcatctgttttgtactttctttgtgggcgacgattattggtaaggttattgggcacagcagtacattaa

SEQ ID NO: 173928 - DNA, 348 bp, Saccharomyces pastorianus
actttaattgttgtggatatgcaaaacgacttcgtctcgcctttgggttcgttgaccgtccccaaaggtgaggaaatagtcgatccaatttccaagttaatgcaggatgctgatagagactggcacagaattgtggtgaccagagactggcaccccgcaagacacgtatcgttcgccaaaaatcataaagacaaagagcctttctcaacctacacctaccgttctccaagaccaggtgatgactccacccaggaaggtatcttgtggcccgtgcactgtgtgaaaaacacttggggcagccaattggtcgaccatataatggatcgacaagctgatccgcataagcat

SEQ ID NO: 173929 - DNA, 159 bp, Saccharomyces pastorianus
atggattttacgtctgatacgacgaattcgcacgacacatcgaattcgcatttaagtctggaagacgctgtgggtacacatcatgctggtgaagcggatgtcaacattgatggggacgagaagcaacaactatcgctattagatgatgatcaggtacgc

SEQ ID NO: 173930 - DNA, 156 bp, Saccharomyces pastorianus
ttcttcgagatcctctttttgataacgtcggattttaaagataatggcctcatggtaccatgcaatttttggaaaagaccgcatgcattacagagggtgtttccctcagggcttctcctccaaagtggtgtcttgaatgtcttacagttaaagcat

SEQ ID NO: 173931 - DNA, 552 bp, Saccharomyces pastorianus
atgatgtctactatctaccgtcatttatctaccgctagaccggctttaactgaatacgcaaccaatgccgcagttaaatcgacaactgcatcctcagaagctagtactctgggtgctctacaatatgcattgtctttagatgaaccaagtcattcgtggacaaaatcgcaattaaaagaaatttatcataccccactgctcgaacttactcatgcagcacaattgcagcacagaaagtggcacgatccaaccaaagtgcaattgtgcacattgatgaacatcaaatctggtggttgttctgaggactgtaagtattgtgcgcagtcttcgagaaacgataccggtctaaaggctgagaaaatggttaaagtggatgaagtgattaaagaggcagaagaggccaaaagaaacggatctactagattctgcctaggtgctgcatggagagacatgaaaggtcgtaaatcagccatgaaaagaattcaggaaatggtgaccaaagtgaatgatatggggctagaaacgtgtgttactttaggtatggttgatcaa

SEQ ID NO: 173932 - DNA, 267 bp, Saccharomyces pastorianus
actaaagtagagcaacatacattacacaaaaatatttctaacaataggttagaaatataccaccacattaaaaaagagaagagcccaaagggaaaatcatcaatatcaccccaagcacgggcatttttagaacaggtttttagaagaaagcaaagccttaattccaaggaaaaagaagaagttgcaaagaaatgtggcattactccacttcaagtaagagtttgggtatgtaatatgagaatcaaacttaaatatatcctatactaa

SEQ ID NO: 173933 - DNA, 84 bp, Saccharomyces pastorianus
agtagtatgggcatcgttttgggcaaaaaggaaaaacggcttattagtttgtgttttcgaaaaagttccttgcgattatgttga

SEQ ID NO: 173934 - DNA, 858 bp, Saccharomyces pastorianus
atgtcacaagacgctgctattgcagagaatactcctgtggagcatctctctccagttgactcggcatccaactcgatgctatccactcccaccaataaggctgaaagagatgaactaaaggcctacggtgaagatgaagaccaggagcctaccgttgaaattccaaagagacctgcctccgcctacgttactgtctctatcatgtgtatcatgattgctttcggtggtttcgttttcggttgggatactggtactatttctggtttcgttaaccagactgatttcatcagaagattcggtatgaaacataaagacggcacgccctacttatctaaggttagaaccggtttaattgtctctattttcaacattggttgtgcctttggtggtattattttgtccaagttaggtgacatgtacggtcgtaagctgggtttgattgtcgttgttgttatttatattatcggtattatcattcaaatcgcttctattgacaagtggtaccaatatttcatcggtagaattatctctggtttgggtgttggtggtattgctgtcttatctccaatgttgatttctgaagtttctccaaagcatttgagaggtactttagtcgcctgttaccaattgatgattaccgctggtatcttcttgggttactgtaccaactacggtactaagacttactccaactctgttcaatggagagtcccattgggtctaggtttcgcttgggccttgtttatgattggtggtatgactttcgttccagagtctccacgttacttagctgaagttggtaaagtcgaagaagctaagcgttctattgctgtttctaacaaggttgctatcgacgat

SEQ ID NO: 173935 - DNA, 2706 bp, Saccharomyces pastorianus
aaatctttgattgaaaactgtaaaaaaagaaatatgccgttacaatcaataccagaaatcggcaacagaaaaataaatcttttttatctttatatgttggttcaaaaattcggtggtgcagatcaagtaacaaggacccaacagtggtctatggtggcccaaaggctgcaaatttccgattaccaacaattagaatcaatctattttagaattttattaccttacgaaagacacatgatttcccaagaaggtataaaggaaactcaagcgaaaagaatattcttgcaacagttcttacaagaactattgaagaaagttcaacaacagcagcaggccgctgcattggccaatgccaacaataacattaatagtgcatcgtcagcaccaacccccgcggctcctggcgcgtccgttcctgctacagcagcaccaggaacagaagcagggatcgttccggtttcagcaaacactccaaaaagcttgaatagcaatattaatatcaacgtaaataataacaatattggccaacagcaagttaagaagccaagaaagcaaagagtgaaaaaaaagaccaaaaaggaattggaactagaacgtaaagaaagggaggattttcagaaacgacaacaaaaacttttagaggatcaacaaaggcaacagaaattgctattagagacaaaattacgtcaacaatatgaaatcgaactaaaaaaattgcctaaagtctacaagagatcaattgttaggaactacaaacccctaatcaaccgcctcaagcattacaatggttacgatatcaattacatctctaaaataggagagaaaatagattccaacaagccaatttttctcttcgcgccagagttaggtgcaattaatttacatgctttatcaatgtccctccaatcgaagaatcttggagaaataaacaccgccttgaacaccttgttggtcacaagcgctgactcgaacttaaaaatatctctggtcaaataccctgaattattagactccttggcaatactcggcatgaatttactgtcaaatttgtcacaaaatgttgttccataccatcaaaacacttctgactattattatgaggatgctggatcaaatcaatactatgttacccaacacgataaaatggttgataaaatttttgaaaaggtaaacaacaacggtacacttacaccaaatgattctaacgatgaaaaagtcactatcctggtagattctttaacaggtaatcaattgcccacccctactcctactgaaatggagcctgatctcgacactgaatgttttataagtatgcagtcgacatctcccgtagttaaacagtgggacttattgcctgaaccaataagattcctccctaaccaatttcctttgaaaattcacagaactccttatttgacttctttgaaaaaaatcaaagacgaaattgatgatccatttacaaaaataaataccagaggggcagaggatcccaaagtcctgattaacgatcaactgtctaccatctcgatgattttgaggaatatttcattctccgataacaactccagaatcatgtcgagaaatttttacctaaagagatttatatctgatctactttggttagtcttaatccatccagaaaactttacatgcaataggaaaatactaaatttcaagaaggatttggttattgttttatcaaatatttctcatttattagagatcgcttcgtccattgattgcttgttaattcttattctagtcataagttttggtcaaccaaaactcaatccaatggcgtcttcgtcatcatttggctctgaatctttgaccttccacgaattccagttgcaatggggaaaatatcaaactttcggtgtagatattttggccaaattattttcattggaaaaaccgaacctaaattatttcaaatcaatccttctgaacaaaaacacaggtaacaacctctatgatcgcaacagtaacaacaaccacaaggacaaaaagttgttacgaagacttttgaatttatacaatgataacaataaaaataataacaataggcacaacttgctaaatgatgtggtttcgtttttattttctgccataccgctgcagcaagtgttatcgcaatcagctgatccaagtttgctgatcgaccaattttctccggtaatttctcagagtctaactagcatcttagtcattgtacaaaaaatattgccgttatccaatgaagtatttgaaatcagtgagaataattcagacagtaacagtaacaataacggcaacaaagattctagcttcaatttcaacaagaatttaccatttgtgtggttgagctctgaagaaaatattggatctggactattgaagttaagtgagataatattgaatattaacaattccacaagtaagaatactttgttacagcaacaaaattattcaaaggtgctcctaccgtcaattaacatatcctgtgttcagttaatcaaatgtttggttgaaaaaagtatttgttttgaaaactgcctaaacaacgacccggaaatattaaaaaaaatagcatcgattccaaatttgttccccacggatttagaaattttccagttattcactaatccatcagttgatattcaaataataaaccagtatcaattactttacaatttaaaaaatgatatcctaaccaatttgaaatga

SEQ ID NO: 173936 - DNA, 255 bp, Saccharomyces pastorianus
cagttaggtggagtcgaattccatatatatcatttatcgcagaaactaatcgatttgggccattctgtcgtcattataactcacgcttacaaagatcgagtcggcgtacgacatcttaccaacggtttaaaggtctatcacgtaccattttttgtgattttcagagaaaccactttccccactgttttttcaacatttccaataataaggaatattcttctcagagcagatccaaattgttcattctcatggtag

SEQ ID NO: 173937 - DNA, 345 bp, Saccharomyces pastorianus
gaagtctcttcttctttcttctatagaggtaactacaccgactttgaaaacaccttccaaaagactgtggagcctgtctaccaaatgcatatcaaaacatcaaaggatattgctgttttgcgttccaaagaatggttccaattagatgatgaagattgcgatttactgaacaagactttgaccttcgaaaccgaaactgaagtcactttcaagaacgctaaaagacaagatgggacaagacgcgacggttcccatccaacccaacagcagcggaaacggaaaccgcctcaacgatatgaacaagccaaggcctctgtggggcccatatttcggcctttctcttca

SEQ ID NO: 173938 - DNA, 144 bp, Saccharomyces pastorianus
cataggataactccaaaatctttagaaaatcaaattaacatcatcatccaaaaggaactgtacccttttgctttacaattagcgaaacagcattcattatcaccgctagatgttcaggaaattcataaaaaatatggtgatatc

SEQ ID NO: 173939 - DNA, 159 bp, Saccharomyces pastorianus
caccaacatcaccatcgtactcaccaacatcaccatcgtactcacctacatcaccatcgtattcaccaacgtcaccatcatattcgccaacgtcaccatcatattcgccaacgtcgccatcgtattctccaacgtcaccatcgtattcgccaacgtcgc

SEQ ID NO: 173940 - DNA, 1131 bp, Saccharomyces pastorianus
gttcgtggtcttgcgacagtctccaacttgactagagattcaaaagtcaaccaaaacttattagaagatcattcttttattaactacaagcagaatgtggaaacgctggatatcgtaagaaaaagattaaacaggccatttacctacgcggaaaagattttgtacggtcacttggatgaccctcatggtcaagatattcagagaggtgtttcatacctaaaattaagaccagatcgtgttgcctgtcaagatgctactgctcaaatggctattttacaatttatgtccgctggtttaccacaggttgctaagccagtcactgtccactgtgaccatttgattcaagcacaagttggtggtgaaaaagatttgaagagagctatagatctaaacaaggaagtttatgatttcttggcctctgccactgcgaaatataacatgggtttctggaagccaggttccggtatcattcaccaaattgttctggaaaactacgctttcccaggtgctttgatcattggtactgactcccatacaccaaatgctggtggtttaggtcaattggctattggtgttggtggtgctgatgccgttgatgttatggcaggtcgtccatgggaattgaaggctccaaagatcttaggtgttaagttgactggtaagatgaacggttggacttctccaaaggatattattttgaaattggctggtatcacaactgtcaaaggtggtactggtaaaattgttgaatatttcggtgatggtgttgacaccttctccgctactggtatgggtaccatttgtaatatgggtgctgaaatcggtgctaccacatctgttttcccattcaacaaatctatgattgaatatttggaagcaactggtcgtggtaagatcgctgactttgctaaattataccacaaggatctattatctgctgataaggatgctgaatacgatgaggtcgtcgaaattgacttgaacactctggaaccatacatcaatgggccatttacccccgatttggctactccagtttctaagatgaaggaagttgctgttgctaataactggccattggatgtcagagtcggatttgatcggttcttgataccaacttcctctatatga

SEQ ID NO: 173941 - DNA, 264 bp, Saccharomyces pastorianus
tacaacttgcttaagtcagtgggggtggccttggtggtcacaatctcgtcgtacaataacgtagtcaagaattcactgaatttctcacctctgatttctggcaagaaatacttagcggccagcgcgaacttgttcttgtcgcctagtggacttgccttggatagtctttccacttgctcctccaggatcttttgggtcaattgtggggtgaccttttcgccggtgtcacttagtgtgacgccgtgtctcacccactggtacaat

SEQ ID NO: 173942 - DNA, 435 bp, Saccharomyces pastorianus
acgtcaggactagtgctactaccaccgaaagtaccaactccagcactagtgccactaccactgccagcaccaactccagcactaatgccactaccactgaaagtaccaactccagcactaatgctactaccactgaaagtaccaactccaacactagtgccactaccactgctagcaccaactccagcactaatgccactaccactggaagtaccaactccagcactaatgctactaccactgaaagtaccaactccaacactagtgctactaccaccgaaagtaccaactccaacactagtgccactaccactgctagcaccaactccagcactaatgccactaccactgctagcaccaactccagcactaatgccactaccactgctagcaccaactccagcactaatgccactaccactgctagcaccaact

SEQ ID NO: 173943 - DNA, 348 bp, Saccharomyces pastorianus
ccatttgttcaaatggatcaaatttcccaatttttatcattttcgagaaaatatggtgtgcctgaagatgaactgtttcagacaattgatctttttgagaaaaaggatcctgccattgttttccaaacgttgaagtcactatctcgttacgccaacaaaaaacatccagatagatttccagttctaggaccacaactgtcaacaaagaagccaagacctccggttaagtctaaaccaaaacatctacaagattgtactggatggagcacttttgaatacggttatatgaaaggtgcatctcaggctactgaaggagtggtgttaggacaacggagagatatagtttag

SEQ ID NO: 173944 - DNA, 195 bp, Saccharomyces pastorianus
gtgccaaagacaacctacgggaaccttcagtgttcctctttagcgatgacttttcatgagaggggggagagcggtgatgtgttatcttgcacctgtaggctttacctctatataatgcctcttttttttaacacttttttgaggcagaagcattttcagctatgttctaatacaccatacagggaacaatggtga

SEQ ID NO: 173945 - DNA, 321 bp, Saccharomyces pastorianus
atgtcaattgccagtgcatgtaactggatctggggtttcctgatcagttttttcactccattcatcacttcagcaattaatttttactatggatatgtctttatgggctgtatggtgttcgcatacgtatacgtattcttcgttgttcccgagactaagggcttgacactagaggaagtcaacgaaatgtacgaagaaaacgtcttaccttggaagtccaccaaatgggttcctccttctagaagaaccgaggattatgatttgaatgctaccagaaacgacactagaccaatctataagaggatgtttactaaagagaag

SEQ ID NO: 173946 - DNA, 288 bp, Saccharomyces pastorianus
atggtcggttcagacattcacgaggccctacattatccagtttacaaaatgataatgagtgcgaatgggtataaactaagacaactgctaagttggttaacgactttgggaggttacaatagtgtgtattattgcggccgttttagttatttagtctcatggccatttgcttcacttatattcaaccatcacacacgtctttccctgaaacgcttgagaggaagattagccaaggtatatagcagcattatttcgtttttttgccggtcatcttctaaatcatccaaa

SEQ ID NO: 173947 - DNA, 774 bp, Saccharomyces pastorianus
atggaacttcagagggcacaacggaatttgaagtttttacaaaacgaggattatgtgaacgttaccgatcaaactaacctgaatggagagagccagaatgcttactctttaggaatggaaactcaagtaccggaaatgcagttttccttatcatctgatgatgattcaataggtacgcaagtaaaaagcgtaactgcacaaaaatcgcctatgacgcaagagactacgaaaaacgatacagaaagaaataaggatgttgataaaagttgtaacccagtcagcacttcccatcccgatttaggtgaatcaaatatcgaggagaacatattcattaacactcaaattcaaagccgacttgatgacgcagaggaagaaacaaatcttaagttaaaacttgaaaaattcaagtattcgttcaagagtagtaacgcagatgatacccacagcaatgcaaatgtaacagctaaaagaagaccagcaataaggaaggctaattcgaaactcaaaacaaaacctaaaactaaacgagaccgtaaaattatcaaaaatataactgatttcaatattaataactacgaacgttcaaggactgccagcttattaaagcaattatcaggtaagcacaagaaggttttggacataataaagacgcaaaatgaaggaaacagtgataaacttcccagagcaaggaataacaagggtgaaaaagctacttttgatacatatagtgaacaggagtggaaagatattatgaacttcttctacaaaagtttc

SEQ ID NO: 173948 - DNA, 870 bp, Saccharomyces pastorianus
tcaaaggaaggctttgagagaacgttcaaatcagaaataattcatgccctttgctttgatacatgctcttacgcacaaattgttaactgtattccagaacatatcaccaagcacccttcatttgatatatatctcgaaaaatacgccaattacacttctcctgtaagcttgactgacaatggcgttttcgtgttgaaagaaaagtataaagatgagattgatccttattatatagggttgtcttccagtagaaggtatgatgtagagaaaaatatcaggctgaatatggcaaatttgaagaaaatgaaatatgaagatacttttgtaccagcaaaaaaggttaaagatttgttgaaaaatacattattttctgggttgtattcaatatcatcagtgaatacttttggtttatttttgaaaaatactttagatcacattataaaatatgattatgacaatttattgccgagagtggttcatttgattcatttatgcgtggttaataatctgaatgaatttatggggatactgtggcatgaatacgcaattgtggacacagaattctgtcattaccacagcattggttctatcctgtattactgtctgttgaaggataatttttcggaatctcatggtaagattagggaaattttcaggtatttaatggaaacagcgcctcacgtaaatgtaaacagttatttgagggagcaaaccacgtcatacacaccaggaatattgtggcctacaaaggaagataaaagccacaaggataaagaatttgaaaggaaaaaacatcttgctcgattgagaaagaaaaaattaatgaagaagttggctcaacagcaaatgaaattcatggaaaaacaatag

SEQ ID NO: 173949 - DNA, 774 bp, Saccharomyces pastorianus
atgagcttgctgggatacgataatcctcggatgtctttgaatgaaaatggtgataaaataagaagtggtagttgctcattagacaaatacgaaattcttaaaaaaagctacgatactatagatgaaactgatgatcaaacatcctttacctatataccatttagtgacagaaaatgggttttaacgatgaatgggaataccgaatttttgagtagtggtgaagaaatgaattggaattttgattgtgtggcagaagctggttcagatgctgatatcaaaaagagacaaatgacaaaaaaaaccagctcaccaataccagaagcagatgatcaaaccgaagtagaaaccgtttatatcagtgttgatattcccagcggcaattacaaagagaggaccgagatagcaaagagcgcaattttacaatattccggtttagaaacagatgctccgttgtttagaatcggaaatagattgtatgagggaagctgggagagacttgttggcacggagcttgctttcccaaatgctgcacatgtacataaaaagacagccggtctactatcaccgactgaagagaatgaaacaacaaatgctggtcaaagtaaaggctcatcgactgccaacgacccaaacatacaaatacaagaagaagacgttggactaccggattcaactaacacaagtagagatcacacgggagataaagaagaggttcaatcagaaaagatttatagaataaaagagaggatagtgctaagcaatgtccgccctatg

SEQ ID NO: 173950 - DNA, 1068 bp, Saccharomyces pastorianus
atgcgaaggttctccaaaaggtctctgggctggattataaaaattttcacaccacatctctcaaatttttcccagaaatccatctcagatgcgatcttttccataataactgttccgtttttcattattttcaaactatcatgtcctcaaccgccttcagatattttgagttatgatcccactttgaacagatactctttaacaacgttacccataattttattatttatccaatcaattactgcacccttcctcctttgcagtatactttctgtgcttttgacatatcatctaggctatctcgtttaccttttccctcttatattagctatggccttaattttactattgacggctttcattacaaaggtaaatctgcataacaagtttactctgtcattagacagctctaacattttacaggaaaagctacaaaaaagaaaactcctcgaaaggcttaacacaagcatccaaataatttttctagctatcggcataataaatatcataatttggatatcacttttagccacttctcttattgagatgatggaaatttaccaaaaaatattaggattatcgaaagctattttgggccttaccattttcgcatggggcaactcagtaggagacttgatctccaacatatctatgtgcaggctctacaaaacccaaactcattaccaagacagagttcgtttagccacaaaattttttataatatcatgcgcatcttgcttaggaggcgtaatgctgaattctatgggtggaataggctttagtgggctagtctcaatgctttttattggcgcttttaatgataacgaatggtggttcctaagaaaggttaaattacaagaaacaagtcaattggataatacattaaattacaaattcatagtttcttgcgtcttcattatcctacagattattctcttgctgttattcttcggagggcctaacaatattaaacggcgcctcacaaaggagatgaagttagttggaatctctatgtgcggactatgggcactagccacgttgattaatatacttctagaactgtttagc

SEQ ID NO: 173951 - DNA, 444 bp, Saccharomyces pastorianus
aaaggttctatgatatataacccgaaaactatgaagtgggaaggaaatgaaaacgtcttaagcaaatttagtgatgtagacacggcaaacaggaaagctttattgataaaaaacaagctacaacgagatgcagattctaagaagcaaaaatattctgatctacagcatgcaagagccacttcgagaaatcaaaaggtcatcgggaacatgattttagatgaacaaaatttaagatgggttagtgtttcagaggaagaagcagacccttttgcaggcattcctgagataaacttaccaccagttggcaaaagtatgaaaaaacgtagctcctcaccatttttgcgttccaaaagccaagttaatacgccatttgtctcaaatgacaatgatggcgtttatcaaagtacggctgctcaagcaagactccgtaaataccatcaatga

SEQ ID NO: 173952 - DNA, 114 bp, Saccharomyces pastorianus
aaaaaaaaaaaaaaagaaataaagattgcagcacctgagtttcgcgtatggtcacccactacactactcggtcaggctcttaccagcttaactacagttgatcggacgggaaac

SEQ ID NO: 173953 - DNA, 1290 bp, Saccharomyces pastorianus
atgaaccgcaagcaaagatctgaatactcgacaataccgaaatcttcaccgattagagtgggctttatcggattgtcctcttcgaaaggatgggctgtcaagacgcattatcaagccattttacagttatcatcgcaattccaaattacagcactgtacaacaaaaaaatagattcatctatagccaccatcagagatctgaagttaaccaatgccgtggcatacccgacgctagagtcgttcgcctcatcttccaatgtcgatatggtagtatttagcgtgcgaactgctagctattttgacttactactgccgctactggaatattctcgtgccaattgtaacttgaaatatttattcatggaatggggactcgtatattctgtgaaggaaatggaaactgttttccatgccgcatcagaacgtgggctgcagacaataatctctttacaaggacgtaaatcaccatacatcataagatctaaagagctgatagaggaaggacacataggggatattaattcaatcgaagtaactggaaatggtgggtggtatggttacgaaagacctctaaaatctccctcatacctatatgaagtcagcaaaggcgtagacttagtcactacgtcgtttgcccatacaattgatctcttgcaatatatcacagggtcttatttcggcgtaatcaatgcaatggttttcaataatattcctgaacaggagttggttgatgagttcggtagaaaattgggaaagactgtgccaaagactgtaccggatcatttattgtttcagggaactctattaaagtcgaatgtgcccgtttcttgcagtttcaaaggtggatcgcctacaaagaaattcaccaaaaacttagttatagatatacatggcaccaaaggtgatctaaaattagaaggtgatgccgggtttattgaaatatcaaacttggtgctttactataggggcgttaaggtaaatgaatttccaaataaaaagggtcaagtcatatatgaagaatctttcggggatgaagtaacggaagtgttccatctaaggaattataatgcaatggttggaaatatttatcgcctttatgaatcaattgcagacttccatttcaattctaaaaatattcctgatttgccatcgacattcgtcatgcaaggatttgagtatgaaggttttccgactttgatggacggcttaattctttgcagacttattgaaagtgtctataagagtagtagcttgggagcaactttaaacgttagcaacatatcacgctat

SEQ ID NO: 173954 - DNA, 495 bp, Saccharomyces pastorianus
atgactatttcatctgctcattcagaaacgagacgcaaatggtggaaagaagccaccgtctatcaaatctaccccgcaagtttcaaagactctaacaacgatggctggggtgatatgaaaggtattgcctccaagttggagtacatcaaagatcttggtgccgatgctatctggatttcgccattctacgactcgccacaggacgatatgggttacgatattgccaactacgagaaggtctggccaacgtacgggaccaacgaggactgcttcgccttgattgataagacccataagttaggtatgaagttcatcaccgatttggtcatcaaccattgttccagtgaacacgagtggttcaaggagagcaggtcttctaagactaatccaaagcgtgactggttcttctggagagcacctaagggctacgatgccgatggcgcaccaatcccaccgaacaactggagatcgtacttcgggggttccgcatggact

SEQ ID NO: 173955 - DNA, 171 bp, Saccharomyces pastorianus
ataacgacgacgacgacgacgacgatgacgatgacgacgacgacgacgatgacgatgacgacgacgacgacgatgacgatgacgacgacgacgacgatgacgatgacgatgaagatgaagacgaagatggcggggagaatggcggagagggtcccgatcgctcttagatag

SEQ ID NO: 173956 - DNA, 432 bp, Saccharomyces pastorianus
cacgtacagcttttgttgttgtatttttttgtgtcaacagtcaaagccttctatttaccaggtgtagcgcctaccacttacagggaaaatgacaacatcccattgctcgttaatcatttaactccatcaatgaattatcaacacaaggatgaggacggtaataacgtttctggcgataaagaaaatttcttgtactcatacgactactattacaatagattccatttttgtcagcctgaaaaagtcgaaaagcaacctgaatccttgggatccgttatatttggtgatcgaatttataattcaccattccaattgaatatgttacaagaaaaagagtgtgaatccctgtgtaagaccgtaattccgggagatgatgctaaattcatcaataaattgataaaaaatggctacttcacaaaactggcttattga

SEQ ID NO: 173957 - DNA, 891 bp, Saccharomyces pastorianus
atggcaataatggaaagcagcaatcatgtcgggacttcatcgcctaccactgaaacacagtttacaatagattcttccgcattgaaagaccaagaaaccaaagaaagcataacaaattcaccgacaagcgaggtaccgattgaaacaaaactaccaaaaagttccgatatagtaacagaggaaaaacatcctcaaaacacgactactgatattgaaaacgaggtagagaatcctgttacagacgataatggaaatttgaaacttgaattacctgataaccttgataacgctgatttttcgaagctactggaatttgatgcaaaaaatgatgaagctctgttcaactcaaatgagttgttatcccacaccatggatcctgtaaataacatcaatttaactcatgatcatagcagggaggtttcatcaaaagaagatatcaatatagagccagtaaaccctgatgaggacgaaagggagaaaactcaagataacacagcagcagtgaaaactgaagggataaagaactcagaagatacaagtatacaaaaggatgaacaaactgctgatgctatatacacagatgtgcataaattatcagtaaacaaagataccgagaccctgccaacattagtagatgaaaaaaacaacatgctgcatatgagaaacaattcaataacgccaataatgtttcagcagcatgaattagtgggacaaccgccacaaaagactgtaacggaaaataatagtacagatgctgaaactacccaacgaaaactatctgagccaatcgatgcaagtttaccgctaccgaatgaacaaccgactatcttcgcctatgcaaggctggactttcaaagtttcacattttatgtacaaacatacatgcaataa

SEQ ID NO: 173958 - DNA, 192 bp, Saccharomyces pastorianus
atgaactttgaggaccccttgcactgtttaattatcgcagactcggaagacaagatccaaaaaggtataaaagtttgtcaaaacattgttatcaaagcggtgacatctccggaaggccagaatgacttgaaacgaggacaactgagagaattggcggaacttaatggtactttaagagaagataacaggccc

SEQ ID NO: 173959 - DNA, 288 bp, Saccharomyces pastorianus
gaccacacccttgtggccatcgttgttttctttgggaatggtgaacctttccatgtgtcgttgtctgtagaaatggtgttcgtgctgcttctttcatccactagaattcatgaggtagtagttcttatatgttataaacttcaacacgccacctggtcttggggtaatatgagcaagaatttctctcttaaaccggatataagtctgagctttctgttggatataatttctataaatgatatatgcatctacggttgcattgcccttacagttgtgtttattttttaa

SEQ ID NO: 173960 - DNA, 69 bp, Saccharomyces pastorianus
atatggctcgatgtcttccaagtattctttgtattcctcgtcatttcgcagcattctctccacagctag

SEQ ID NO: 173961 - DNA, 126 bp, Saccharomyces pastorianus
gatttaggaatccacagaaaggaatcaataattttgcataatattataaatgattctgttcctctttttatatgttgtcattcattgatcctattacaatatcaatccttgcgcttcagcttccac

SEQ ID NO: 173962 - DNA, 294 bp, Saccharomyces pastorianus
atggttattattatgttcattgcccaattctacgttgctctattccccgtgggagattctccaagtgcggaaggtttcttcgaagcttatctatccttcccacttgttatggttatgtacatcggacacaagatctataagaggaattggaagcttttcatcccagcagaaaagatggacattgatacgggtagaagagaagtcgatttagatttgttgaaacaagaaattgcagaagaaaaggcaattatggccacaaagccaagatggtatagaatctggaatttctggtgt

SEQ ID NO: 173963 - DNA, 78 bp, Saccharomyces pastorianus
atgaacgtatcttcatcttctcaatcggcatcatcaagaccatttggcatttggaataatgacatgagcgtctggagt

SEQ ID NO: 173964 - DNA, 246 bp, Saccharomyces pastorianus
ctagcgtacctgttggtgctatttcaggtgcatagggtaactgggtgggagttgtcatatgagcagtaccatgcagcgcatctgaacgaagctatcaacctagacagcggttggaacaaaagtaccaagaacctgctgttgccttttaacagaacgcgcgtacccggatcggaaggctcgcgcgagatccagcgcttcatcatcgagcagacctgcaggcatgcaagctgcatgccgtcgtttaca

SEQ ID NO: 173965 - DNA, 636 bp, Saccharomyces pastorianus
atgtctgctaaagttccatctaacgccacgtttaagaacaaggaaaaacctcaagaggttcgcaaagccaacatcatcgctgcacgttctgttgcagatgccatccgtacttcattgggtcccaagggtatggacaagatgattaagacatctcgtggagaaatcatcatctctaatgatggccacaccattctaaaacagatggccattctacatccggtggccagaatgctagtagaggtttctgccgcgcaggactcggaagccggtgatggtaccacttctgtggtgatcttgaccggagctctattgggtgctgctgagaggctgttaaataagggtatccatccaaccatcattgcggactcctttcaaagtgctgcgaagagatctgtcgatattcttttagaaatgtgccataaggtttcgttgagcgatagagaacagctggttcgtgctgcatccacttctttgagttccaagattgtgtctcaatactcttcgttttcggcgcccttggcagtggactccgtattgaagatatctgatgaaaactctaagaatgttgacctgaacgatatcagactggtcaaaaaagttggtggtaccattgatgacacagaaatgatagatggt

SEQ ID NO: 173966 - DNA, 882 bp, Saccharomyces pastorianus
atgctatttcgcgaacggatttcgcaagatttgccccttttccctgggttgatgcctattaactcctatctgcttttccacagagcagcaaagttatcacatgcatctattccacctgcaatactgagtaggttccccccagaaatccaatcggatgataatgccgtgaagtccattggtgtggacattcttatcgaattgattcaggaaatatatcaaagaacatctggtagaattaaagggtttcatttctatacattaaatttggaaaaggctattgctcaaattgtctcgcaatctcccgtcttatcccatatcgtaaatgaatctagcgaagaagagggagaagatgaaaccagtggcgaaataggaagcatagaaaatgtgccaatagaagatgctgacggggatattgtgttggatgattcgaatgaagaaactgtagcaaaccggaaaaggagaaggcattcaagtcttgattcggccaagttgattttcaatagggctatcgtcactgaaaaaggcttacgctataataatgagaatggttccatgccatttaaaaaggctttaatatctatttctaaaggtcacggaactttgggtcgtgatgccacttgggatgagttccccaatggtagatttggtgactccaggtctcccgcatatggtgaaatagacggttatgggccatccatcaaggtaagcaaaagcaaagcacttgaactatggggtataccaaagacaattggcgattttacagatatttttataaaatatttggaaggttcaacggatgcgattccctggtctgacctgggtttatcagctgaaacggcgttaatacaagaagaactaatccaactaaactatcgcggatat

SEQ ID NO: 173967 - DNA, 306 bp, Saccharomyces pastorianus
atgtgttctgaaaacaatgtaaccgctaataattttcaacagacgcagaatgacccttcgtataacagaaatttgttcatgatgtccaatcaggaaggtgtacaatataatcttgacgaaacagagaagaatggacctaaaacacaggtggaagcaaacactagcgcaaatctgcatttcgacaatgttattcctatagtaactaacgcagacatcaggaaaaagcgttctaactgggataacatgatgacatctggtccggtagaagacttttggacgattaatgatgactacggctttttaacg

SEQ ID NO: 173968 - DNA, 387 bp, Saccharomyces pastorianus
tctgccaaactaggccatactgttgtatccaacgaggcatattctgaattgcaacgcaaatactcagaattggagaaggaagtagaacaaccatcactagcatacctagtcgaacacgccaaggctaccgatcaccatctgctatcggatagtgcatacgaagaactagtcaagtgcaaggaaaatcctgatgtagaattcttgaaggagaagtctgcctacctgggccatactgtggtatccaacgaggcatattctgaattggaaaagaaactagaacaaccatcactggaatacctagttgaacatgccaaggccatcaatcaccatttactatcggatagtgcatacgaagacctagtcaagttgcaaggagaaatcctgatg

SEQ ID NO: 173969 - DNA, 135 bp, Saccharomyces pastorianus; identical to SEQ ID NO: 173280

SEQ ID NO: 173970 - DNA, 183 bp, Saccharomyces pastorianus
actctgtgcaatgacataattgcacagcacacagatgaagctttcatacggaacctcgtctctggcaaaaagaaaacttctttgaagtttctagtcggacaaggtatgagacaaagccaaggacgtataaaggcaggcgaatttgagaaaaaattcaaagagattttagatattcagtggtaa

SEQ ID NO: 173971 - DNA, 405 bp, Saccharomyces pastorianus
atgacaagagggattccattaaatgacgacgaccgttgggactggttgaaaaaagttgccgtagaatctacaaaagctgcagcaagcactaaggagcatttgtcaattgttgcttgctcgagcttgaagaagaaatacagagatttgattaggcacacatgccctgaatcggagttccattttatctttttgtatgcaagtaaaatagaagttctgaaaaggctcaaaacaaggaagggtcatttcatgaaagctgatatgatggagtctcaattcagggatctggagttaccagacatcaacgacgaaactgactgtgacattgttcccttagatttcaaaacgttttatcaaattgaaaaagatgttacacaggtggtaaaaagtaaagttttgaatattgag

SEQ ID NO: 173972 - DNA, 129 bp, Saccharomyces pastorianus; identical to SEQ ID NO: 173923

SEQ ID NO: 173973 - DNA, 780 bp, Saccharomyces pastorianus
ggaacaatggttatgattattttcggtagtgctgttgtttgtcaggtcaatgttgctgggaaaatacagcaggacaatttcaacgtggctttggataaccttaacgttaccgggtcttctgcagaaacgatagacgctatgaagagtttaacatccttggtttcatccgttgcgggcggtacctttgatgatgtggcattgggctgggctgctgccgtggtgatgggctatttctgcgctggtggtagtgccatctcaggtgctcatttgaatccgtctattacattagccaatttggtgtatagaggttttcccctgaagaaagttccttattactttgctggacaattgatcggtgccttcacaggcgctttgatcttgtttatttggtacaaaagggtgttacaagaggcatatagcgattggtggatgaatgaaagtgttgcgggaatgttttgcgtttttccaaagccttatctaagttcaggacggcaatttttttccgaatttttatgtggagctatgttacaagcaggaacatttgcgctgaccgatccttatacgtgtttgtcctctgatgttttcccattgatgatgtttattttgattttcattatcaatgcttccatggcttatcagacaggtacagcaatgaatttggctcgtgatctgggcccacgtcttgcactatatgcagttggatttgatcataaaatgctttgggtgcatcatcatcatttcttttgggttcccatggtaggcccatttattggtgcgtaa

SEQ ID NO: 173974 - DNA, 267 bp, Saccharomyces pastorianus
atgcgtactttcactgactttgtttctggcacacctattgtaaggagtcttcagaaaagcaccataaggaaatatggatacaatttggcaccctacatgtttttgttactacacgtagatgagctatcgattttttctgcataccaagcaagtttacctggcgaaaagaaagtcgacacagagcggctgaagcgtgatctatgcccacgtaaacccactgagataaagtacttttcacagatatgtaacgatatgatgaacaaaaag

SEQ ID NO: 173975 - DNA, 531 bp, Saccharomyces pastorianus
aacgatggccgtggttgggatcttaacataaacaagaagccaaatctccacggatacggccatccaaatccaccaaacgaaaaatcgagaaaacatagaaacagacagctccaaatgcaacagctccaacagcaacagctccaacaacagcaacagcaacagcaatatgctcaaaaaactgaggcagatatgcgcaattctcaatataaaccaaagttagaccctacttcttatgaagcttaccagcatcaaacccagcagaaatacctgcaagaacaacaaaagagacagcagcaacaaaaacttcaggagcaacaacttcaagagcaacaattgcaacagcagcaacagcaacagcaacagctacgtgcaacaggccaacctccatctcagcctcaagcgcaaactcaatctcagcagtttggcgctcgttatcaaccacaacaacaaccttctgctgctttaagaactcctgaacagcacccaaatgacgataattcaagtctagctgcttctcataaggcgacttag

SEQ ID NO: 173976 - DNA, 390 bp, Saccharomyces pastorianus
agatattttataactaataataaacaatcggcaagtaacttttatttttcttctataaaaattaataagaataaaaaaacaattcttaaaaatcatttaaatgatataaatgaaataaaaatctcagaacataaacctttatataaaaaattaaaagatgatgaaatattaggttattatttagcaggtttaattgaaggagatggtcatatcggtgctaaatatattactattgctattaattataaagatattaaaaatgcttattatttaaaaaaattaattggttatggtaatattagaaaatactctaatacttataaagctgtaagtttaaatttggattctaaagcagctatattaagagtatttaatttaattaatggtaaa

SEQ ID NO: 173977 - DNA, 234 bp, Saccharomyces pastorianus
atgactggtcctggacctgaaataaataaggaggagcaccccagttctccgggcaagaaacagataacatataatagtatacccaagaatgcaaatctaattgatggatctacgaattcatcgaagaggccaattgaaaagtatgacaagagcatagccgacccaacaaaaagctatttccacatagcatatcaagaacaccaaggagaaaattacttcattctagtcctcact

SEQ ID NO: 173978 - DNA, 840 bp, Saccharomyces pastorianus
ctacaaacttaccgtcaacacatgccgttcctgatatttggaaattttcaatggcaaactagaaagtttaagttggataagtctattaaagatttgattacattgatttctgacgaatcatctcaattggatgctgatgtgagagctacatttgcaaattacaatagtgccaaaaccaacctggctgctgctgaaagaaagaaaactggtgacctttctgttagatccttacatgatattgtcaagccagaaaattttgttctacattctgaacacttgaccactgttcttgtagcagttccaaaaagtttgaaatctgatttcgagaattgttatgaaactttgtccaagaacgttgtaccagcatctgcaggtgtaattgccgaagatgctgagtatgtcttattcaatgttcacttgttcaagaaaaatgtccaagagttcacagcggctgcaagggagaagaagtttatccctcgtgaattcaattactctgaggaactaattgaccaattgaaaaaggaacatgactctgctgcaagtttagagcaatctttacgtgtccaactagttagattggccaagactgcttatgttgatgtcttcataaattggttccacatcaaggccttgagagtctacgtggaatccgtgttgcgttatggtttaccacctcattttaacatcaagatcatagctgttccaccaaagaacctctctagatgtaaatccgaattaactgatgctttcggatttcttggtggtaatgcttttatcaaagacaaaaaagggaaaattaacaagcaagatacttcgcttcatcaatacgcttcccttgtc

SEQ ID NO: 173979 - DNA, 1104 bp, Saccharomyces pastorianus
atgaaagccgtcgttattgatgacggcaaagccgtcgttaaagagggcgtgcccattcctgaattggaggatggtttcgttttgatcaagaccgttgctgttgccggtaatcccactgattgtggacatatcgactacaggataggccctcaagattccatcctaggttgtgatgctgcaggtcaaattgttaaactggggctgggcgtcgattgcaaacgctttgcccttggagattacatttccgggtttattcacggttcctccgtaagattcccctccaatggtgcctttgctgaatactccgctgtttcagcggacactgcctacagattgcccaacgatattggaccttgtggtgaggatagtctacctgaaggtcccgtcaagtctttagaaggtgctgtcacctttccggtatcattgaccactgccggtatgatcctgacctataacttgggcttgaacatggaatggaagccttctgtgccacaaaggggtcatcctatcttaatctggggtggcgctactgccgtaggccaactactgattcagttgacaaaaaaattaaatgcattcactaagatcattgtcgtcgcttctcagaaacacgaaaaacaattgaaagagtacggtgccgatgaactgtttgattatcatgattctgatgttgttgaacaaatcaagaggaaatacaacaatattccttatttggtcgactgtgtcgctaatttaaacacccttgaacaggtgtatagaagtgcggctgatgaattggatgccaccatcattgaattgacaaatttgaacgtcgaaaacgtcaaagaggaatacaggagacaaaatgtcaccattgccaaaacaagcctatacgcgataggtggacacgaagttccatttggaaaattcacttttccagctgatcttgagtgtaagaaggccgccattagattagtcaagttccttaatccaaagatcaaagaaggggaaatccatcatatcccagtcaaggtctataagaaggggttgtatgacgtcccgcagttgcttgatgacatcaggaacaacaaaaactctggtaaaaagctggtcgcggtattaaat

SEQ ID NO: 173980 - DNA, 78 bp, Saccharomyces pastorianus
atggtctctagcgggatcgaaccgctgatccccgcgttattagcacggtgccttaaccaactgggccaagagaccaaa

SEQ ID NO: 173981 - DNA, 192 bp, Saccharomyces pastorianus
ctgatactgaatatcttcatttgcagctatgcaatatttcagataccccattttacccaagagtttcttactggtggttggattttctttaagacgagaagattaccagtcctggatgttcgtgaatgtgcctattgcgtcatcagcgactccgcgccaagaaaagaaatactcgcatgctcggatttatag

SEQ ID NO: 173982 - DNA, 174 bp, Saccharomyces pastorianus
acgttgtttcaagtgcatactttgaaattcaatagaaaggattacgataccctttctcttttttacctcaccagaggatactataatgagtggagttttccgtgtcctggaacgttgtcacgaaatagcgagtgccaggccgaacgacagctctacgatgcgtactttcactga

SEQ ID NO: 173983 - DNA, 105 bp, Saccharomyces pastorianus
acagacatagatgatatggatagcaactctcgaaattacttgaaaacaaggacgttcagaattgttagattatttgcaataatttttgcactgcttttgatagcg

SEQ ID NO: 173984 - DNA, 132 bp, Saccharomyces pastorianus
gaccctcgttcagaagcttattgtctaagcccatattcagtctgctctaaacggcttccgcggaagaagcatttctatctcttgaaatccgtacaagatattagacgtgtgttgggagtcgtatactgttag

SEQ ID NO: 173985 - DNA, 1398 bp, Saccharomyces pastorianus
atgagattctcacactttctcaaatacaacgctgtccctgaatggcagaatcattacctagattataacgaattgaaaaatttgatctacacattacagacagatgaattgaaacaagaaacgccaaccggtgacttaaacgatgacgctgactctcagactccaggtccaatcgctgatatagaaagcaacatagctgcaggagaaccatcttcatcgaaaagaagatttacacataaactcaagcgtaagctctttggttctaaaacaccttcaggaagcaaaaggggagactccgacgaaaaggccatagatgggaacaatattaacgaggaaacaattgagttagacgagttatctcctcaagggaaaaccacctctttcaataagaattttatacgtaagaaattctttgaatcacgcagctcatctgtgagtagcgagggaaagacgctcttcagttcttatgatacattcgtaactaacctgagcgacgagaaattgaaagtagatgatttctacaaaagaatggaagctaagttctatgaaagatttgaccacttgattaatgatttggagaaggaaggcattgtaacaagattgaatgaaactttcaatcctgaaattcaagcattgcctcctttaagagaaattatttctggtacatcagagacacattcatctaataacccatttgaaatacactcttcaaacatcgacagtgaattgagaaataggtttgattacagcgaagaagaaatggatgaagatgatgacgttgacgtgtttgctgacactaccgacaataccgccctcttgaattattcgcaatttaacattaaatctcagaaaaaatcattattaaaacagacaataataaatctttacatagacctttgccagttgaaatcttttatcgaattgaacagaatgggtttcagtaaaattactaagaagtctgataaagtattgcacatgaacactaggcaagaattaatagaaagtgaagaatttttcaaagacacctacatcttccagcatgaaactttaagcagtttaaacagtaaaattgcacaacttattgaattttatgctgttctcatgggtcagcctgggaacgtagattcatgcaagcaagagttaaagtcgtacctgcacgaccacattgtttgggaaagaagcaacacatggaaagacatgttgggcctctcttcgcaaaataacgatataataactattgaagatgaagctgagaaacttatgcaagaaaagcttcaaattgaatatttcaagtatccattgcctaagccaattaatttgaagtttactaaaattgaaaatttggcagttcctaagctattttttgggaaaagagcaatgaaaataggcttcattatc

SEQ ID NO: 173986 - DNA, 1083 bp, Saccharomyces pastorianus
tttatggtgctggcttcaaccttgtgttttgtacaggtaactcaaggaaccgacattgaggctactccaaaaggggcagaaaccaccgataaggatgtggaattggaaacacgtaatgatcgtaacatggtgaaaacttacgaattgccttactttgccaaccatttcgatattatgattgaatatcacgatcgtggtgaaggtaactatcgtgtagttggtgttatcgtcgaaccagtttccataaaacgttccagtccaggtacatgtgaaacgactggcagcccattgatgctagacgaagaaaatgataatgaagtttattttacttattccgttaaattcagtgaatcagcgacttcttgggccaccagatgggacaaatatttacacgtatatgatccttctattcaatggttttctttgataaatttctccttagttgttgtcttattgtcatctgttgttatccattcgctattgcgcgcactgaaaagtgatttcgcacgttacaacgagttaaatttggacgacgattttcaagaagattcaggttggaaattgaatcatggtgatgtttttcgttcgccaagtcaatcgctaaccctttcaattttggttggttcaggagttcaattatttttgatggtaacttgcagtatcttcttcgctgcattgggtttcctatcacctagttctagaggttccttagccactgttatgtttatcttatatgcattattcgggtttgtcggctcttatacatctatgggcatctacaaatttttcaatgggccatactggaaggcaaacttgatattgactccacttctagttcctggtgctattctgctaataattattgcgttgaactttttcttaatgtttgttcattcttctggtgtcataccagcaagtactctgttttttatggtttttctctggtttttgttctcaattccattatcatttgctggttcattgattgccaggaaaagatgtcactgggatgaacatccaaccaagacaaccaatcgcaagacaaatacccttccagccttggtatttaaagactataccagc

SEQ ID NO: 173987 - DNA, 333 bp, Saccharomyces pastorianus
  modified_base (181)..(216): a, c, g, t, unknown, or other
cccaagaggcccacaaatgcatacttattgtactgtgaaatgaataaggaaaggattaggcagaatggctctctggacgtgacaagagatctggcagaaggttggaaaaatcttaacgaacaagataggaaaccgtactataagctttatagtgaggacagagaaagataccagatggaannnnnnnnnnnnnnnnnnnnnnnnnnnnnnnnnnnngcggatgatgataaagaagagaatgaacagaagataaaaaataacgaggaaggatcatctacaaaagtagctgattctaaaggaggtgaagatggaagtttagtttcctctaactaa

SEQ ID NO: 173988 - DNA, 393 bp, Saccharomyces pastorianus
tctgctaaagccgaaaagaaaccagcctccaaagccccagctgaaaagaaaccagccgctaaaaagacttccacttccactgatggtaagaagagaagcaaggctagaaaggaaacatactcttcttacatttacaaagttttgaagcaaactcaccctgacactggtatttcccaaaagtccatgtctatcttgaactctttcgttaacgatatctttgaaagaatcgctactgaagcttctaaattggctgcgtataacaagaagtctactatctctgctagagaaattcaaaccgctgttagattgatcttaccaggtgaattggctaagcatgctgtctctgaaggtactagagctgttaccaagtactcttcctctactcaagcataa

SEQ ID NO: 173989 - DNA, 120 bp, Saccharomyces pastorianus
cactcaccttcacttctactgatatgtcatacgcacacggatgctacagtatataccactctcaagttaccctactttcatattccacaccatggcccattctcactaaatcagtactaa

SEQ ID NO: 173990 - DNA, 216 bp, Saccharomyces pastorianus
agtgtggaacgtggcatcagatgggaacttatctccagactgtgtccaaactctaccggtgcagaattaagatctgtttgcacagaagccggtatgtttgccattagagcaagaagaaaggtggctactgaaaaggatttcctgaaggctgttgataaagttattagcggatacaagaagtttagttccacatcgcgttatatgcaatataattga

SEQ ID NO: 173991 - DNA, 210 bp, Saccharomyces pastorianus
atagaagacagacgactggaagccttaaaaagggcggcactgaaggcgtgtgaactctcctatagcccctattctcacttccgtgtcggttgttccatattaacaaataacgatgttatcttcactggtgctaatgtcgagaatgcagctacagtaattgtatatgtgcagacgatctgctatgatacaagttctaatggcagccatcgc

SEQ ID NO: 173992 - DNA, 429 bp, Saccharomyces pastorianus
gatgaatcgaatgctgaaggagtagagacgattcaattgaaatctctagatgattctacagagttagaagtaaacttgccagacttcaattctaaagatccagaagagatgaaaaaggttaaagttttcaaaactttaataccggaaaaaatgcaagaagccataatgaccaaaaatttggataatattaataaagtctttgaagatataccaattgaagaggctgagaaacttttggaagtgtttaatgacattgacattattggaataaaagcgatcttagaaaacgagaaagactttcaaagtttgaaagatcaatacgaacaggaccatgaaggcgccactatggagaatctgtccttaaacgaccgtgatggtggcggagataaccatgaagaggtcaaacatactgccgacactgttgactag

SEQ ID NO: 173993 - DNA, 810 bp, Saccharomyces pastorianus
atgtcagaagaagattttaaaaagctgccccattataaagagatttcgctacacctaagagtccaccatcataagaacattgtcaccatacatgaggtgctacaatctgcagtctgcacgttcattgtcatggattattacccaacagacctattcacgtctattgtagataacagacattttgtcactaatggactgctagtaaaaaaggtttttctacagatctgttctgctcttaattattgccatgagcacggcatctaccactgtgacatcaagcctgaaaacttgctactggatacagaagataacgttttcctatgcgattttggtctatccactacttccacatatataaagccaaatgtttgcattggtagctcgtattatatgccccctgaaagaatctcatttgatgggagagtttccagctctaaaagtgggggacataagttgggtaaggtttgtccctcatgtaatggcgatttgtggtcattaggtatcatccttatcaatttgacatgcatcagaaatccctggctgaaggctgacaaaaccgaggataatacctactattatttcactaaggatcccaatatactaaagcaaatcctaccgctttccgatgacttttactcattattatctaagattttacaagtgaatccgaagaatagaatgagcttgcaagagttgatgaaagaagttagttctatgacaagcttcaccaatgaaggcccgttatcaagagtgccgcctctttccaggtctgtttatgaaaagttcgttagccccgtcgataacacgaat

SEQ ID NO: 173994 - DNA, 96 bp, Saccharomyces pastorianus
ccccgagatgttaaaaaaggctctttggtaacgagaaagggagaggtcctgcatatcaacgtcattgcgcaaatagacgagttgttcgaaggcttt

SEQ ID NO: 173995 - DNA, 321 bp, Saccharomyces pastorianus
atgtcaatttcgactgcattcaactggttatggcaattcttgattggttttttcacaccattcattactgggtctatccacttctattatggttatgtgttcgtaggttgtttggttgctatgtttttgtacgttttcttctttttaccagaaacaattggtctatctttggaggaaatccagttactatatgaagaaggtataaaaccatggaaatctgcatcttgggtaccaccctcaaggagaggagcttcttccagggaaactgaggctaagaagaaaagctggaaagaagttttgaagttcccaaagagttttaat

SEQ ID NO: 173996 - DNA, 213 bp, Saccharomyces pastorianus
gtgccctgtcagccccgcgccttctcgaagataaaggtgttagtcatctcgtttctttttctaatggtcgcctttttgcctttttcctcccacggcaaactgcaagagcagatcgcttcatacgttagctggaagttggaaactcgcgcaatacatcggtttggtgggtgcactttgcgcaccaatgcacgaaacggattcacggagatcgtc

SEQ ID NO: 173997 - DNA, 171 bp, Saccharomyces pastorianus
atggaatccatatttctacataatagtattacgattattcttcactctgttttacatgtttcattatcctattacattatcaatccttgcatttcagcatcctctaacttcgatgacagcttctcataccttatgccatcatctaacaccgtatatcataatatactggta

SEQ ID NO: 173998 - DNA, 75 bp, Saccharomyces pastorianus
gagttggatgatggattattcaagtacactaccaaggattgtatcttgtacaatttagaacttggatgcacaagc

SEQ ID NO: 173999 - DNA, 96 bp, Saccharomyces pastorianus; identical to SEQ ID NO: 173426

SEQ ID NO: 174000 - DNA, 495 bp, Saccharomyces pastorianus
gtgcctttcgccatcttgcatgcagtagctttcccttggaacaaatacacagcatttagcataccttatggggccaggatgaaattcatttacgctttgaaagattttcttggttgcggtgatctaatatgggattttaaacagactttgtttgctggtcccttgtactataattataggaacttcgatcctgaagccatggatctattaagcactagacaacaatccggtgcgactatggaaagactaaagcatgggctaagatttactgataatggaagaaatagttattgggtggcatatggaagtatagataacaaccttgttccggaatcaatagaggaatcatgggaagatgatattgctggtcagagaacttttcctgaggatccaaattatccggttgttcacgactacacgatgggccatcgatatagtagatcaatgaatgatttaagaagagatgttcaaagtaggtcatcaatggcttgttaa

SEQ ID NO: 174001 - DNA, 105 bp, Saccharomyces pastorianus
gtttatgctacggggattcctatcttattcgttggcgtgggacaaacctataccgatttgaggacattaagcgtaaaatgggctgttaatacattaatgtcttaa

SEQ ID NO: 174002 - DNA, 114 bp, Saccharomyces pastorianus
tggccattggtaaccaagacattttctaccaatgtttgtccggtaacttctacaatctgtacgatgaacacattgggtctcaatgtaacgaggttcacttacaagctatcgatt

SEQ ID NO: 174003 - DNA, 171 bp, Saccharomyces pastorianus
attacgattattcctcattccgttttatatgtttcattatcctattacattatcaatccttgcatttctgcttcctctaacttcgatgacagtttcccgtatcttatgtcatcgtctaacaccgtatatgataatatattggtagtgtcactattagttaccaggcgatag

SEQ ID NO: 174004 - DNA, 255 bp, Saccharomyces pastorianus
gaagatgccttggaagatgcagaagaggcagcagaagaggcagcagaagaggcagcagaagaggcagagctcttggcagaagaggaagcggcagcagaggaagaggaagcagcagcggaggaggatgccttagaggattcggaagctgaagaagattcagaagctgaagaggaagcagcagcggaggaggatgccttagaggattcggaagctgaagcagattcggaagcagattcggaagcagcagctgaagaa

SEQ ID NO: 174005 - DNA, 1140 bp, Saccharomyces pastorianus
tcgaatgctctaccacaaacgacaatcaataaaaccaatgataagttgtacatctctaacctacaatcacgtaaaagtgagacggtcgagaagcaaagtgaagatatttttactgagctagccgacattctgcattccaaccagattccacggaatcatattttatctgcgtcattattaattagagatatgtctaatttcggaaaaatcaacaaaatatacaatgaatttttagatttgtcaaaatacggacctttgccaccatcaagagcatgcgtaggttcgaagtgcttgccagaagattgtcacgtacagttatcagttgttgttgatgtaaaaaatacaggcaaagaaaaaatcaacaagaataagggcggactacatgttcaaggccgttcatattgggctccatgtaatatcggaccatattcccaaagtacttggttaaacgatgatgcaaaccaagtcagttttatcagtgggcaaatcggactagtaccgcagtcaatggaaatattaggaacacctctcactgaccaaatagttttggcattacaacattttgatactttgtgtgaaacaataggagctcaagaaaagttactcatgacatgctatatttcagacgaatcggttctcgactctgtcatcaaaacatgggcgttttattgttcaaatatgaatcatagatcagatctatggatggacaaatctgatgatgttgaaaaatgcctagttcttgtaaagatttctgaattacctagaggcgctgttgcagaatttggtggtgttacttgtaagagattaatagtggacgataatgattccgacaagaaagaaagggaagagaatgatgatgtttcaaccgtattccagaaattgaatttgaatattgaaggttttcataacactacagttagtgcgtttggatataatagaaactttattacgggatttgtagatagtagagaggagttagaacttatcttggaaaaaaccccaaaatcagcccagattaccctctattataatcccaaagaaatcatcactttccaccatcacattggatactatccggtggagaaactttttgattaccgtggtaaagaacaccgctttgggttgcatattcgttcctaa

SEQ ID NO: 174006 - DNA, 147 bp, Saccharomyces pastorianus
atggagatgctcttgtttctgaacgaatcatacatctttcatagacttcgtatgtggagtattgttttatggcactcatgtgtattcgtatgcgcagaatgtgggaatgccaattatagggtgccgaggtgccttataaaacccttt

SEQ ID NO: 174007 - DNA, 354 bp, Saccharomyces pastorianus
atgagatttaccagaggattgaaagcctcttcatctttaagagcgaaagctattggaagactaactaaactttcgacgggtgcaccaaatgatcaaaacaataatggtacaacattagatttgataactcatacattgcctattttttattccacaaatacgtcaaagatatatactataccacttacattgagtgaatgggaagtactaacttcgctttgtgttgcaatccctaccacgctcgatctggtagagacaatgcttaaagaaataattacgccttattttctggtctccagacaaagatttcagatgttctgtcctcgaattcaagtgacagatgaaatccggtcg

SEQ ID NO: 174008 - DNA, 1221 bp, Saccharomyces pastorianus
atgaatatcttcataaaagccctgagaagatatactataatgtctacgccgaagattgtgcagcccaaatggaaggttccaacgccacaagctaaagaaactgtgttgaagttgtacaacagtttaacaagatctaaggttgaattcattccgcaatctggcaatagaggtgtcacttggtactcttgcggtcctactgtttacgatgcctcccatatgggtcatgccagaaactatgtctctattgatatcaatagaagaattattcaagattattttggttacgacgtgcaatttgtgcaaaatgttactgatatcgacgataaaattattttgagagctagacaaaactatttatttgacaattttgtcaaagaaaatgataccaaattcaacggcactgttgttgacaaggtcaaaaccgcacttttccaatatatcaacaaaaattttactattcaaggcagcgagatcaaaactatcgaagaatttgaaacttggttatcgaatgctgatactgaaactttaaaattggagaatcctaaattccctatgcatgtcaccgcagttcaaaatgctattgaatcaatcactaagggcgattccatggacgcagaagttgcctttgaaaaagtcaaggacgttacggttcctctattggataaagaattgggctctaccattagcaatccagagattttccgccaacttccagcttactgggaacagaaattcaatgatgacatgttatcattaaacgtgctacctcccaccgttacaactcgtgtttctgagtacgttccagaaattattgactttgttcaaaaaattattgataatggttacgcatatgccacttccgacggttccgtgtactttgatactttaaaatttgacaaatccccaaatcatgactatgctaaatgccagccatggaataagggccagttagacttaattaatgatggtgaagggtccttaagcaactttgctgataacggaaaaaagtcgaataatgattttgctttatggaaagcttccaaggcaggtgaacctgagtgggaatcaccatggggtaagggtagaccaggatggcatattgaatgttctgtgatggccagtgatatcctaggctctaacatcgatattcattcaggtggcatcgatttggcctttcctcaccatgataacgaattggctcaatccgaggctcgcttcgac

SEQ ID NO: 174009 - DNA, 945 bp, Saccharomyces pastorianus
ttgggtattataccttaccaggaaggtactgatattgtttacaagaatgctctccagggtcagcaagaagggaagagacctaatttaccacagatggaagcaacgcaccaaatcaagtcatcggttcagggtacaagttatgagtttgtccgcacagaagatattccattgaatcgaagacattttgtgtacagaccgtgttccgcaaatccctttttcactattttggggtatggctgtacagaatacccatttgaccactctggaatgagcgtcatggacagatctgaagggttgtcaattagtcgagatggaaatgatctggtaagtgtcccggatcaatacggttggagaactgcaagaagcgatgtgtgtattaaagaaggaatgacgtattgggaagtggaggtaattcgtggaggaaacaagaaattcgcagacggtgttaataataaggaaaatgctgatgattcagtagacgaagtacaaagtggcatatacgaaaaaatgcacaaacaagtgaatgacaccccgcatctacgatttggagtttgcagaagagaggccagtttagaggctcccgtagggtttgatgtgtacgggtatggtattagagacatttcgttagaatctatccacgaaggaaaattgaattgcgtcctagaaaatggttcgccattgaaagagggtgataaaatcggatttctactgagtcttcctagcattcatacacaaatcaaacaagctaaggagtttaccaaaagaagaatttttgcactgaactcccatatggatacgatgaatgaaccatggagagaagatgctgagaatgggccttcaaggaaaaaattaaaacaagagacaacgaacaaagaatttcaaagggcgctattagaagatattgaatataacgacgtcgtccgcgatcaaatcgccattgaccta

SEQ ID NO: 174010 - DNA, 771 bp, Saccharomyces pastorianus
atggtcagaaaagttaacaaagaactgattgataccaagttgacggacgtaactcaaaaattccaaagtaaatttggtatagataacctgatggaaacaaatgttgcagagcagtttagcagggaactaacggaccttgaaaaagatttagcagagataatgaattcattgacacagcactttgataagacattgctgttacaagataaaaaaattgataacgatgaacgtgaggagctgtttaaggtggtacaaggcgacgacaaagaactatacaacattttcaaaactctgcatgaggtaattgatgacgtgaacaaaacaattcttaacttgggtcaatttttgcaggcaaaaataaaggaaaagacagaactacacagcgaagtttctgaaataataaacgatttcaatagaaatttggaatatctattaatctttaaagatatttccaatctgattgatagcttcaaaaattcctgtacacaagatattcaaacaactaaggaactttgtgaattttatgataattttgaagaaagctacggtaacttagttctagaagcaaagaggagaaaggatgtggcaaacagaatgaaaactatattgaaagattgtgaaaagcagttgcagaatttagatgctcaggaccaggaagaacgtcagaattttatagcggaaaatggaacttatcttcctgagacaatctggcccggtaaaattgacgatttttcttccctgtacactttaaattacaacgtgaagaatcct

SEQ ID NO: 174011 - DNA, 2073 bp, Saccharomyces pastorianus
gaaaagacaattaaaaagtcgattctttcatcttccaatgatgaaaaaataatatacaaatcgcgaataaagaaatttcaaaagaatcataaattttatattattctattagttttcatcgccattttacaattcatatcaatagcttttttcactcggggattcttactgtcaaggcacgttcttgataatatttcctcacaaaacgaaacaagtaagttacctcctaggttcaacaaggcggtgattttggttattgacgctttgagatttgatttcgctattcctgtaaacgaatcccactctaattacaacttgaactatcataataatatattatcattgtatgattcttttgcaagcgataaggatgcatcttccctattgttgaagttcattgcggacccaccaaccactactttacaaagactcaagggtctcacaacagggtccttaccgactttcattgatgccgggtctaacttcgatggaacagtaatcgaagaggataactttcttaaacagctccatttggcaaataagactgtcaaatttgccggagatgatacatggatggctctgttccatccgttcctttccaacgatagtttcccactagaatcactcaatgtgtgggacttagatactgtcgataacggtgttatggattacttccatgatcatttacagcaggacaaggaatgggacgtcatgattggacacatgctaggtattgaccatgtgggccacaaatatggccccgaccattttactatgagggaaaaacaaattcaagtagatcaatttatcgattggatactaaaatcgatcgatgatgataccttattggttattttgggtgatcatggaatggaccatacgggcaatcacggtggcgactccatcgacgagctcgaaagcactttatttctttattctaagaagccggacatgtggagacttaaagaaacttcgaattacaacattgataatttgggacacgattaccgttcagtgagacaaattgatttggtgtctagtttggcgttattgatgggccaaccgataccatttaacaatcttggatggcctattgacgaaatagcaagaaacgatagagaatggtctcaatttgtcaactcagcgataagccaattacaattatataaggacacgatgcagatccaccatggcaatgacgaaatattggaaccgttagggaaaaatatatctaacacccccccaacaagcgatccagaaaaatttgttaagctgggtcataaataccaaaaggtcttcttgcagacctgcgaagaactatgggccaaattcgattattatttcattgccaccggtataacgctactggccacttcactggtcctgttgatatccattacaaaattaattccttctattgttgtgaatcaaatggttccagaattcgttccgggaattatcataatggtcttagttacaaacctatgtttccatggaattttttacgtttatcaacaaccaagttttgtagaccaattctggggtaccctgttagcgactgcaattggtatcattattggttgtcatatcacaatatttgataggtacaactttatttggattgctatgagactgggtgaaacattagctgattattggtcaagaattgctgtcatgtttatgattattcatgctttgcttttcacttccaattcatttactatttgggaggatagaattgtagcattccttttatctactttcggcatgttgacgttgtatgaatttgtcttcttaccaaaaaggcaatccaccactgcattattaactgcaacaatcagtgaaaaggaaggaaccacttcaggggtcaatccttcgacagcaaattcaaattacttaccattaacaagatttgcaagattattaggaggttaccattctgcagttttaatcattttaacccggttagcttctatgattaccatttgtagagaggaacaaggcgaatattgtattccaacatttaataatcaaaacaattcctcatggtggggtaagggtctctgttcctaa

SEQ ID NO: 174012 - DNA, 312 bp, Saccharomyces pastorianus
atgctttactccagagaatcaaggacaaccgtccttttccttgcgttggttacctccctaaccgtactttgtcactcggtcgatgtaacaactgtatttactacgtcaacaatcaccgaaatcacaactgtgactgccgcaccgcaaccacaaaacaaagcggaaaccgctttgaatactgctactaacataattcaaaccatgcagtttcttttcaactgcgcaccatttaagtggaagggtcctttgaaaataacttcttgtgcgctgaactttatggtcctactactcaccgcttggggctatctcctg

SEQ ID NO: 174013 - DNA, 1566 bp, Saccharomyces pastorianus
atgatttcgactacggttagtggtaaaagacctatagagcaggttgatgatgagctactttcactgactgcgcagcaggaaaacgaagagcagcagcagcagagaaaacgcagacgtcatcaatttgcccccatgacacagtttaacagcaatacactagatgaagacagtgggtttaggagctcctctgacgtggccacggcggatcaagataactttttggaagagtcaccttcaggatatattaagaaagtgatcttgcgaaactttatgtgccatgaacattttgaacttgagcttggttctaggctgaattttattgttggtaataatggtagtggtaaaagtgcaattttgaccgccattactattggtttgggagccaaggctagcgagactaacagaggttcctctttgaaggatttgattcgtgaaggttgttattctgctaaaatcacccttcatctggataatagcaagtatggtgcttatcagcaaggtatttttggtaacgaaattatagtagaaaggataattaagagagatgggcccgcttcttttagtttaaggtcggaaaacggcaaggaaattagcaataagaaaaaggatattcagacggtagtggactatttttctgttcctgtaagcaaccccatgtgtttcctgtcacaagacgctgctaggtctttcttaactgctagcacctcacaggataagtatagccattttatgaagggtactttacttcaagaaattaccgagaatttgctttacgccagtgctattcacgatagtgcacaagaaaatatggctctgcacctggagaatttgaagtctttgaaagctgaatacgaagatgccaaaaaactgttaagggaattaaatcagacttcagacttgaacgaaaggaaaatgcttttgcaagcgaaatcgttatggatcgatgttgcccataatacagatgcttgtaaaaatttagagaatgaaatcagtggcattcaacagaaagttgatgaagttactgagaaaattaggaataggcaagaaaagattgaaagatatacatctgatggtactactattgaagcgcaaattgatgcaaaggtcatttatgttaatgaaaaagatagtgagcatcaaaatgcaagggaactgttaagagatgtcaaaagcaggtttgaaaaggagaaaagcaaccaagcagaagcacaaagcaatatcgatcaaggtagaaaaaaagtagatgctttgaataaaacaattgcgcatttagaagaagaactcacgaaggaaatgggcggtgataaagatcagatgagacaggagcttgaacagttagaaaaagctaatgaaaaattgagagaggtaaacaattctttagttgtaagtttgcaagatgtgaagaatgaggaaagagacatccaacatgaacgtgagtctgaattgaggacaatttcacgcagcattcaaaacaaaaaagtggaattgcagaatattgctaagggtaatgatactttcttaatgaattttgatcgtaacatggatcggcttttaaggacaatagag

SEQ ID NO: 174014 - DNA, 1308 bp, Saccharomyces pastorianus
  modified_base (1300)..(1300): a, c, g, t, unknown, or other
atgagtagtatacaatacgtggagaataataacccaaataatattaacaacgatgttatcccgtattctctagatatcaaaaacactgtcttagatagtgcggatctcaatgacattcaaaatcaagaaacttcactgaatttggggcttcctccactatctttcgactctccactgcccgtaacggaaacgataccatccactaccgataacagcttgcatttgaaagctgatagcaacaaaaatcgcgatgcaagaactattgaaaatgatagtgaaattaagagtactaataatgctaatggctctggggcaaatcaatacacaactcttacttcaccttatcctatgaacgacattttgtacaacatgaacaatccgttacaatcaccgtcaccttcatcggtacctcaaaatccgactataaatcctcccataaatacagcaagtaacgaaactaatttatcgcctcaaacttcaaatggtaatgaaactcttatatctcctcgagcccaacaacatacgtccattaaagataatcgtctgtccttacctaatggtgctaattcgaatcttttcattgacactaacccaaacaatttgaacgaaaaactaagaaatcaattgaactcagatacaaattcatattctaactccatttctaattcaaactccaattctacgggtaatttaaattccagttattttaattcactgaacatagactccatgctagatgattacgtttctagtgatctcttattgaatgatgatgatgatgacactaatttatcacgccgaagatttagcgacgttataacaaaccaatttccgtcaatgacaaattcgaggaattctatttctcactctttggacctttggaaccatccgaaaattaatccaagcaatagaaatacaaatctcaatatcactactaattctacctcaagttccaatgcaagtccgaataccactactatgaacgcaaatgcagactcaaatattgctggcaacccgaaaaacaatgacgctaccatagacaatgagttgacacagattcttaacgaatataatatgaacttcaacgataatttgggcacatccacttctggcaagaacaaatctgcttgcccaagttcttttgatgccaatgctatgacaaagataaatccaagtcagcaattacagcaacagctaaaccgagttcaacacaagcagctcacctcgtcacataataacagtagcactaacatgaatccttcaacagcgatctttattcaagaaggcaaagagcttcttnacccataa

SEQ ID NO: 174015 - DNA, 147 bp, Saccharomyces pastorianus
gatctgggtgataagttattagaaacagagagggagatgataagacccataggccttgtggattttaagaacagttcagagtatattaaggcctctgtatcccagggagggttaagtggagtacgaaaagtggggttacaatttggg

SEQ ID NO: 174016 - DNA, 669 bp, Saccharomyces pastorianus
atttttgccatttgtttaggtgttctattatctaaggcactctccatcccactcggaagttttgcggatattgaactaattggctctcagaagagtctgtttccctttcttggagggtctgcgccatatttctcctttcccgctaactacggtatacccaccgatattcctgaaggttgtagattaacgcaagttcaaatgattggcagacatggcgaaaggtatcctaccagaagtgaggccaaggatatttttgaagtatggtataaaatatccaattacacaggtaagtacgagggatcattatcgtttttgaatagtggatatgaattttttattcccgatgaaagtcttctagaaatggagacaactttgcaaaattcgattgatgtgttgaacccatatacaggagaaatgaatgcaaagaggcatgcaagggagtttttagcaaaatatggaaaattgatggagaactgtaccaactttcctatcttcaccacaaattcgaaaagaatctacgatactgcgcaatattttgccgaggctttgggcgatggctttaatatatcacttcaaacacttagcgaaaattcctcgtcaggagcaaacacattagctgccaaagttcgtgcccctcaaagaaggaagaaagctatgaccgaagaatga

SEQ ID NO: 174017 - DNA, 141 bp, Saccharomyces pastorianus
atgcttatgccaagttacttgaagaaagaaagcggagggagaagaagaagaaggaggaagaggagaagaagaagaaggaagaagaggaaaagaagaagaaggaagaagaagaaaagatatagaaggaagaggtatagtaga

SEQ ID NO: 174018 - DNA, 102 bp, Saccharomyces pastorianus
ttatcgccttataaaaaatggaatcccaacaattacatcaaaatccacattctcttcaaatggaatcccaacaactatctgaaaattcacgtgattctcatg

SEQ ID NO: 174019 - DNA, 228 bp, Saccharomyces pastorianus
cacggcgcttgcctcagcggtctataccctgtgccatttacccataaagcccatcattatccacattttaatatctatatctcattcggcggccccaaatattgtataactgctcttaatacatacattacaccacttttacaccatatactaaccactcaatttatatacacttatttcaatattatagaaaaatcaccaccaaaatcacctaaacgtaaaaattaa

SEQ ID NO: 174020 - DNA, 111 bp, Saccharomyces pastorianus
atggtctctagcgggatcgaaccgctgatccccgcgttattagcacggtgccttaaccaactgggccaagagaccagatatttcatatgttccatggtatggaaaaacata

SEQ ID NO: 174021 - DNA, 126 bp, Saccharomyces pastorianus; identical to SEQ ID NO: 173722

SEQ ID NO: 174022 - DNA, 75 bp, Saccharomyces pastorianus
cacgttccctccgccttggcaagaggtgagaggcctatccccaaaccttttggatgggaacacattgcgttgtga

SEQ ID NO: 174023 - DNA, 636 bp, Saccharomyces pastorianus
  modified_base (615)..(615): a, c, g, t, unknown, or other
agaccagcggactgcacggccaagtacctacatgttagggataagattttgcaacttaacgataggtttcaggcattgtcttcccatttggagattctgcagcctttattcagcaccgtcccagaatacttgaaaaccgcagacaacaaagacagaagcttccagctcttggaaccgctgagcacatacaaccggaacagtgccgttccgggccctgctgcagctacaggagttacgaatgctggccactccacggcgggttcgacccccacaaccacgacccctcatcctatacccaacacacatgcgcattcgctttccaacccgggtgccactactacagtgcaacaaaaccccatggccagtaagagaggttcaaaagggaatgtcaatagcggaactcccaacgcatctggcacttctgcagctgcagtagctgcagctgccaaaaaaccaagaaaaccaagacaaaccaagaaggcaaaggcccaagctcaggcccaggctcaggctcaggcccaggcccaggctcaagcacaagtgtacgcgcagcaatccgctgcccaaacaccaatacggatccatgacgcgcgctgccaaccacccccaatgtgncgacaagctgatccgcataag

SEQ ID NO: 174024 - DNA, 618 bp, Saccharomyces pastorianus
  modified_base (1)..(25): a, c, g, t, unknown, or other
nnnnnnnnnnnnnnnnnnnnnnnnnaggataacacataccagattactattcatgtcaaagccgtaaaagatatccctttgaaatatttatggtctttaaagattattggtgtcaacggtccctcaagcaccgtacaactttacggcaaaaatgagaagacatacctaatcagtgatccaacagattttacatccacttttcaggtttatgcttacccttcttctgacggttgcacagtttggatgccaaatttccaaatccagttcgaatatctacaaggtgatgctgctcagtactggcaaacttggcaatgggggacaaccaccttcgatttatcgacaggttgtaacaattatgacaatcaaggccactcacaaacggatttccctggattttattggacctaccagtgcaagggaaacaatgatggcacttgtacaaaagcctcgtcttcatccattactacttcatccattactacttcatccactactacttcatccactactacttcatccactacgaaaacttccactactacgtcatctactgtgaaaagctcttccactacatccattgatgttactacttccgttgactcacatacttcatcaagt

SEQ ID NO: 174025 - DNA, 513 bp, Saccharomyces pastorianus
atgtatcccctcatgccatcaaaagacgtcatcaaccttattcagaaggaaactcacactttttttgaatacctcccggacttgcaaatgtacaagatttcagccctaagccccaagaaaatatccatggccaaagtctttttattaaatgccgtcgcttctaatccgaacacaactcaacaccaccacacaatagcctcaccagcactcaaaacagaactctatccgtttaacaatactctagagaacttggactggctaaacaagtcacaagattgggcaagattacagtcagttgtccctaaaaactgcacagatctgatgactcccactgaaaatgccacaccagaattgacagatgcgcagatcagccaattcgaatcttccttgtctaaaaatataccatctctctccccttccgactctatttcccaatctttatcaataacgctaggtcactccttacagtccgcgtctttttctagtattttccaacctctaatacataagagt

SEQ ID NO: 174026 - DNA, 639 bp, Saccharomyces pastorianus
atgttaggatacgttgttcttttatattctctatctgcttttgccatgagtttgggctatacaagcaagcaaggctcatacgtatcatgtatggtgagtgtaggctctttggtagggagaccaatcgcaggctatatcgctgacaagtatggaccattgacagttggtatgatattgcatcttgtcatggctattctttgttgggctatgtggataccatgtaaaaatctggccactgcgatagtctttggattgttagccggttctattatgggaacaatttggccaacaattgcttccattgttgcacgcatcgttggtctccaaaaactagctgttacttttggcgtcacttggatttttattgccacctttgccttagtcgctccaataattggtctggagcttcgcacgactgatacaaatggaaatgaatattaccggaccgcaatcttcgtaggattttcgtatttcggtgcgagtttatgccagtggttattgaggggatttataatagctcgagatcaaataggtgtgagcgagggttattcgactgatcaaaacgaactacatataaatgttaaaagttcacacttcagcaaatgtctcttccgttaccgaaaattaccaagaagagtt

SEQ ID NO: 174027 - DNA, 432 bp, Saccharomyces pastorianus
atggctcccggtctacctggtatcgcttgggaagtcaacaataactatttccacgactcaggtattgttaaatttttttatggtgattctttcttctcctttttgatttcttttttcgtttactgggggctatgcattttcttcccattcaaaattactgttaaacatgatgacaaagattattatggtgcctttactgacgaagaagcaagaaagaagggcatggttccatacagtgaaatttctgaagaagaaatccgcgcttacacattaggcgaaggttacactaccggccacgagtacagacctgaaggctccgacgatgaaatatctgagttggtcaaaactagctctgaaaacaccaatgagtttgaaatagttcatcataagaataatgaaaagcaatcctccaccgccagtgaaaaagctgct

SEQ ID NO: 174028 - DNA, 90 bp, Saccharomyces pastorianus
atgatggtgatcatgcttgataatagacttaatattattgagctcattcaaggcgtagggagactaagagatgggggcctctgtaatcta

SEQ ID NO: 174029 - DNA, 129 bp, Saccharomyces pastorianus
ggccgcttaattggtacatatggtggtaacattgggttcgagttgggtgcaagttgggccttcatcatctacaacatcttaagaccctttagaattcaaatacttcggtcgttaggaagtactgattag

SEQ ID NO: 174030 - DNA, 402 bp, Saccharomyces pastorianus
atgtcttcagacaaatctattgagaaaaatacagatacgatcgcctctgaagttcacgaaggtgataatcattcgaataatttggtttcaatggaggaagagataaaatcaacgccatcagaccaatatgaagagatagctataattccaactgagcccctccattcggacaaagaactaaatgacaagcaacaaagtttaggccatgaagcacccacaaatgtatcaagagaagaacctattgggatctctggtgatgaagacacccaaatcactgaacaaaacgttaatgaacaaaggcaagaaacgagagaacctagttctgaaattgatttaaatgagccattggatgttgaaaaagatgtgacaacggatgtgcaagccccaaatgggctgaatatc

SEQ ID NO: 174031 - DNA, 126 bp, Saccharomyces pastorianus
gatttaggaatccacagaaaggaatcaataattttgcataatattataaatgattctgttcctctttttatatgttgtcattcattgatcctattacaatatcaatccttgcgcttcagcttccat

SEQ ID NO: 174032 - DNA, 96 bp, Saccharomyces pastorianus; identical to SEQ ID NO: 173426

SEQ ID NO: 174033 - DNA, 933 bp, Saccharomyces pastorianus
atgttcaatagaagtaacaccgcaggcggatctcaggctatgaaagagggacttggcataaacaagctctccccgatatcatcgaattcgaacccaagctcattgacttcctccaattatgaaaaatatctgcagctggccacagagaagaatccgtgtatgatcttggagctggaactggacggcaaggtgcgatatggctctccacagtggaacacgatcacaggagtcgccgatgatagtggctcttctccgacgtacattgcagaccttattctcggatccgatcaagataaaggtgtctttcaaaaggccacagacatgctgctcatgaatgatgacaccagttgcactataacgttcaagataaaggcagccgactatgaaggtagcgcaggctgtgacgatgaaagtacgataacgaccttggaagcacgtggtatcttaatcagggatggccacacacagttgccctctcacacgatgtggatagtcaagcctcgcacaaacgactggtcagacttttatgccaacgaagacgctcaagacgacatggtcatccagttatccgataattgcgacgatatcgatatccaacttcccgaagagttcgccaagacgcttgggttcggcgctaagatcttcgtgcagtacttgaagagaatacgactggaaatgataatagacgagttcaatctacctctgccaaaaatggaactatgccgggtctgtgagaactttgtccctgtttggtggttggagacccattcgcaaagttgcgtttgcgagcatagaacggaatcgctcatacaattactacacgataatcttcttgagcaacaggcgatcttggcaaacttcacgaaagattcagagtataagggcagtcagatacaggtacgttccacaacttccttaaccagtttagactct

SEQ ID NO: 174034 - DNA, 438 bp, Saccharomyces pastorianus
cttttattaagtttacccttaaatggctatttaccatttgatagtttgttgaaaaagttaagattaaaggattttcggtggttgttcatttctgatatttggttcaccaagcacaattttgaaaacttgaatcaattggcgatttgtttcatttcctggctatttagacaactaattcccaaaattatacagacttttttttactgcaccgaaatatcttctacagtgacaattgtttactttagacatgatacttggaataaacttatcaccccttttatcgtagaatattttaagacgtacttagtcgaaaacaacgtatgtagaaaccataatagttacacgttgtccaatttcaatcatagcaaaatgaggattataccaaaaaaagtaataatgagttcaggattattgccatcccatgacctgcagcatgca

SEQ ID NO: 174035 - DNA, 1542 bp, Saccharomyces pastorianus
atggtaccaactggagataatcacactaacggtaaggcaccttcaattctagataagaaggcgtatgaattaaccagtaccaaaccaggtgatgttggctaccgccaaaagaaaatacaagaagaagaaaatctagcaaatagcgatgacacgcccctagacacaccaaaatttaatgacctttttacgaaaaatggcactagagcgaaggttaaaggacaaatgcgtacctctcgttcaatctctaattccaatctactagaagctcacaagaaactaaagaccttccccgctgaacgggttgaagatattacgtccatttccgaagtaaacacctcgttcaacgaaactgaaaagcagctaatatcaatcttgactagtaaactatctggttctccaagctatgattccgattgggaaaaaatcctgaaagttgacctatcaaggggcaaactgaagaatatgtttggcatgcaaagactactaccgaatgtattagtgctaaaccttagtgacaatgaaatgaacactctagaaggtataccctcgaacgttgtacagctattttgttcaaacaacaaaataacgagcgctcattgttcattagccggattccacgatctggaatgcctcgacttatcgtacaacctcttgaatacaagtttaaaatttttgtcactttgtcatcacttgcaagaggtgaacctttcttacaactccatccaatccttagaagggataggatcctccaggatgaaaaaaatgaacctttctaacaacgagattaatggtatcatcgatttcgaacaattgatactaacaaacaactccgtcgtgggcggctggttgaccgtggaagtcttagacctgagcaacaataacataattggcgtaagaaacatcaattgcttgccccacctgaaggttttaaacctcaatggtaacccgctagtttccatcgtggaatcttctaagattgagaacggaacgttgagagcgctttccatcaaaaatacaggagacgcgctatccaaattacaaaattacaagttggatgatcaattcacgttcccctaccaaaatctaaagattctaaaactggacggcttcgctcaacttagcaaatggcaaaaatggcctgccactttgcaaattctggagatcaacggcggcctggcctcctctttgccgcgattctcttctctaaaatccaccaacttatattctctaactatagctaatgttagagacttcacacacttaccagtggacctctccaaggaactaccgttcttgcaagagctacatctgccaggcaacaacctacaaaacgcacacaagttaacaaaaactctcccacgccaatcagtaaaatttcttgatctacgaaataacccaatcacgacaccacgccacgatcgcgccagcacgagcttgcattaccggcagttgctccagcttgctggcctctgccagcagcaatgtcccgccctggcgaccctctggttagatgacactcctgccccaactgccacgaatctg

SEQ ID NO: 174036 - DNA, 366 bp, Saccharomyces pastorianus
tctttttctgctgattttggttctgacttttggtctgaactaaggttagctattttttcttcttcttcttcttcttcttcttcttcttcttcttcttcttcttcttcctcttcttcttttacctcttgttcggctgcggcaacaggtttctgttcttttttcttttcctgtacaggcttttcaaattccttggagctagaggtatttccttctacgtcgtcatcattcgcgtcttcgagcttgtgtttgtcaaaacctatattcttcatgaagtcttggagatcatttttaaacactttatcgtttgcaccctcgtccgcagcagcatcgaattcctgctcgcttttactgtcctcgtcatcatca

SEQ ID NO: 174037 - DNA, 78 bp, Saccharomyces pastorianus
atttgccctaattgcagttgttgttgttttctctgttgctcgacatccattataacagcaattgtttttgatgtgcca

SEQ ID NO: 174038 - DNA, 2712 bp, Saccharomyces pastorianus
tcaagtgctaaatcttcaattacctcctctactaaagcgtccagtcacactatgagcatttctttgagtagtggcgtacaacaatctagcagtacgtctgtaggtcactcctcgggtacgagtagacaagaggtgagctcctctctattttcttcgagcacagccggccaacctgcaactgatcattttagtatttccacgagtgaatcttccactggctctgttggccagtcctcaagcgctgtttccactgacggttccactagcgcatacaacccatcatcaagcactgttgccactgaatcttctactagctctgttggccagtcctcaagcgctgttgcaactaaatcttccactggctttgttggccagtcctcaagcactgttgccactgaagcttctactagcgtattcactccatcatcgagcattgttgccactgaatcttccactggctttgttggccagtcctcaagcgctgtttccactgacgcttccactagcgcattcaacccctcttcaagcactgttgccattgaagcttcttctagcgtattcactccatcatcaagcattgtttccactgacgcttccactagcgcattcaatccatcatcaagcactgctgccactgaagcttcctctagctctgttggtcaatcgtcaagctcagccgccactttctcttctggaagtaacagcgtgcatgcatccagcactttagcaggacattacttaactcgttcttcatccaacccatcatccagtactgtttccactgaagcttctactagctctgttagccagtcctcaagcactgttgccactgaaacttcctctagctctgttggccagtcctcaagcgctgttgcaactgaatcttccactggctttgttggccagtcctcaagcgctgtttccactgacgcttccactagcgcattcaacccatcatcaagcactgttgccactgaagcttctactagcgcattcaacccctcttcaagcactgttgccattgaagcttctactagcgcattcactccatcttcaagcactgcctccactgaatcttccactagcgcattcactccatcatcaagcactgttgccactgaagcttctactagcgcattcacctcatcatcaagcgctgttgcttctgaaggctccactagctcatccgccccatcttcaaaaaatcttgttgtttcatctactaggactgttgccactgtcccatggagcaacatcacacattatgtgtccaatactctttcctctcaatattcaactcgcaccatctccaataccattgaaaaatctaccggcctatcttcatttcaatatctcagctcagggtcagtcaaccctgttgggaagtcatcaggtcaatccgcagattttcctttatccagttccactagacaacttttaagtaccacagctaccgacgcttcaagtagcttctctagccaatactcaagcaacgttgcggctggaactgcaactagatctggtagccatttgactcgatctaccgaaaatggcttgagtaacagtattagtttaatgtcgagccattcaacaatagcagttagttctgttgctagctcatcaagacatagtactgcaagtgctttgagcacttccggcagccaatatttcggcaaggaaacctcccatcggtcgatccacagtactactcaaacaccagttcaatccttgtcaaaggcctctttagggtctgaaacatccactgcagaattatccacttttactacttccacgactgtatacaaagaatggaccggcaccttcacaagcacttattccacccaagtatctacaatggtggagagaacaagtgaaggtccagacggcaaagtaactatagaaattatttattacgttgaaaccccattaacgcgtgaagcttcatctactgcaactaccaaccctagctctgcttctttgccaaggatcagcaacattgcaacgattgctaatgaaagaactacaatggttacagtcacttcttgtaattctcacttctgtaccgaaacagtctcgccagctattatttcaactgtcaccaccaatgttaaaaacattgttacggaatatactacctggtgtccaatctccgcaacagccgcgttggagcaaactacagaggaaacaatgacttcatcggtatttgatgcctactccaagtctgtttctgctgccgtcgcatctactgccgcccttacaaatggcaacgatgctatcaccaagggtaccatagggcacccaattgccactgagacaacagttgttccaagttctagggcaagtgacagtgaagatgctgtggtatcaggatctaccaaaactgcaattcctaatagcagcacttccataattgcagaagttagtacacgcagcgctatagcccttggtagtgatgtctcttcaacatcaacggtcattaaagttacaagtggcgctgctataattccagaacctgctacatcacagactaactttcaaactcacataacaacctacttcaccaccaactcacagcaacctcaagtctcttcttcaagaagttcttcgaacactgtttctttgcaattgtcaagctatgctggtattgccaacaatttgatatcccatagcgcttggagtgtttttattgcttccatattgctcgcaattgtt

SEQ ID NO: 174039 - DNA, 576 bp, Saccharomyces pastorianus
gcagaggaaaatccccaaccgaaagccttcatagctctctctcgagtattgcaaaccctcattttttttcaagtggtcgaaagtacattggtaccagacctaacatttctaggcaaaaaatatccaatttttatgaactacccgaagtttctttacgtctcacttatagtgtattgtgtaagcgctttcacttgttgtgttctgctatttttgttcagaccaaaaaacgacgctgcacaggctttaaaatgctctgtggtaagatgttcgaagttgagttgttctcgttgtgatgcaagaagagcgcatccaagatggttcaaattcaagtattggctgttatttttgttcatatatgttgttttagtcattttcgtcatttgcattcaacagttctttgcatgggaccaaacgattaacttaccaagacttctaaaattattcagcttacaaattggtgttatcacattcaactcgattatgtggtactatgtaaaacaatacgttttacacaacggtccccttgagactagcgatgattgcgttgacgatgaaaagaaactgctgaccgaggga

SEQ ID NO: 174040 - DNA, 126 bp, Saccharomyces pastorianus
atggaatctatatttctatttactaatatcacgattattcttcattccgttttatatgtttcattatcctattacattatcaatccttgcatttcagcttcctctaacttcgatgacagcttctca

SEQ ID NO: 174041 - DNA, 237 bp, Saccharomyces pastorianus
  modified_base (17)..(17): a, c, g, t, unknown, or other
  modified_base (75)..(75): a, c, g, t, unknown, or other
  modified_base (86)..(86): a, c, g, t, unknown, or other
ttgatcattccattttnggacaatcaggttaatttcaaggatcgatatgagccaggtacaaacggtaaagtccanaagcctttganatacttgtccgtggaagaagtcatcaaactggtgagagactcgttcacttctgctacagaaagacatatacaagtgggtgatgggctggaaatccttattgtcaccaaggatggtgtaaggaaagaattttatgagctaaaaagagattaa

SEQ ID NO: 174042 - DNA, 864 bp, Saccharomyces pastorianus
atgctaagcccgcaaagaccatactctactagtcctaaacagtttccagcaacaactaaaagtccgttactgcgatttgcctcagtctcaccctaccctaaatttcatcctgataatcaaattatggcatcagctggtcttacatacgtctcaccgcataataaaaataaatacacaaggccgttgattagaaaaggtttaaattttaccacagaatcagttaatgattgcacttataaaatcatctttgaaccggatgaattggctattaacatatataaggaactattcggaaccatgggttcccaacctgcatcgcagcctttgctgatattttcgaatgttaatttacgccaggatgtaccgcctttagatatcttaaatgttgtagactatgttcctacgaatgaagaaatttcgcagcagaaaactcaaccaacagaccatggggccgttggtgtttttcatctagacgatcatatttctccgggcgaacaaagtcttaagcaaacaattggtgataaagcagatcttaaaggtaaagatggcaatagcagccctcaggaatttaaattaataactgatgaagagcaattgagaagagcgtcacaagaactgaaggatgaggaaaaggatgccgagtctccttggcaagcaatcttgctgttaccaaaaggttataaaggaggggtagattttcgaaataaaccagtggcccacacggattcatctttcaataatgaagacacaattactcattcagagttagaagtgaacaccggatccccttcgcaagaaagcggatcacttaatgaagctggtataggcataatgcaacccatgtcggaagtacaaagaagaaaa

SEQ ID NO: 174043 - DNA, 1143 bp, Saccharomyces pastorianus
aggaattccctgtcaatctcaaatttggcttatgtgagaatattacacggactgttcactttatttggtaagttcactaaaagtttaattgattactttcaactactagaaattgacgacagtaaccaaatcttatcaacaaccctagaacaatgttttgctgatttgttttcgcattatctatatgataggtccaaatatttcggtattgagaaaagatccttggaagcgattctagtagatatgacatccaagtttactgtaaactatgataaagaaatcaacaagagggttttattagataagtataaggagaaactatcaactaatgtggatgcattcatgcattctcctagagggaatacacactctcgtcaagattcaacatcaaggagtaaattgtcacaatttaattcctttttgaaaactcatttagataaagatcatttgagtctaaaccgtacaaatactttgagcgattcgtttaacaacagctcttcttctacacagtatgatgtagcaaacaactcttcaagtttggtaaattctagttttacagcaagcgatattgataacagtccaaacagtccggcgaactattctttgaacgatgttgattctatgttaaaatgtgtggtggagtctactgcaagagtaatggaactaattccaaacaaagcacatctatacatcctagaaatattaaaaataatgtttttggggattgttgattcgtacatggaaattgcgttagaagtcgcttactggaaaatttgtaaagttgatattaataaaacagcaggagtggtaaacttaaatttcttgaaatttatttcaatgagcacggagatattagatttattgtcaatttcaatcaaatccattttcttaccattattaaataattcgccagaaattaaagctcagattattgagatgacaaattcacaaattcaaaagatggaaatacttattaatataattttgcaagagaccattacggtaatttcgactaaattttccgcaattttgtgcaagcaaaagaagaaggattttgtgccaaaatctcaagagctattggatcaagacaccttaccggctattgagattgtcaatattttaaacttaatcttcgaacagtct

SEQ ID NO: 174044 - DNA, 450 bp, Saccharomyces pastorianus
gtcgcgctatgttctgtgctagactctgataagagcaaagacaaatcagctaaaatttggacaactgatgtagctgttcctgtgtcgcagttcgacaaggttattcacgaaactaaaaaggacatgcaagctagtaagctgatcaacgccattgttggtcatgcaggtgatggtaacttccatgcattcatcgtctacagaacccctgaagaacacgaaacctgtagccaacttgttgacagaatggtcaagagagcactgaacgcagaaggcacttgcacgggtgaacacggtgttggtattggtaaaagagagtacttgctcgaagaattaggtgaagcacccgtcgatttgatgagaaagattaagctagctattgacccaaagagaatcatgaacccggacaaaatctttaaaactgatccaaacgagcccgctaatgattacagg

SEQ ID NO: 174045 - DNA, 288 bp, Saccharomyces pastorianus
gttttggtaaatttgtttgatcctgattatacacctcaaaggaccacgttaagtggccatatgacgagtgttattgcgtgcttgcaagttgaagataattatgtcattacaggaggatgtgataaaatgatcagagtttataacttagtaaataaaagatttcttttacaactatcaggtcatgatggtgaggtttgggcattgaagtatgcccatggcggtattttagtcagcggttctacagacagaacggtgcgagtttgggatattaagaaaggttgttgtacc

SEQ ID NO: 174046 - DNA, 81 bp, Saccharomyces pastorianus
atgtccaaggaaggtcagtatgaaatcaattctagctctataataaaagaggaggagtttgtagatgaacaatattctggg

SEQ ID NO: 174047 - DNA, 63 bp, Saccharomyces pastorianus
cattcgcatcattatgcacggcacttgcctcagcggtctataccctgtgccatttacccataa

SEQ ID NO: 174048 - DNA, 273 bp, Saccharomyces pastorianus
  modified_base (225)..(225): a, c, g, t, unknown, or other
  modified_base (253)..(253): a, c, g, t, unknown, or other
aaggaggggcttgatgaatttgacaatacaatactgaatgaaggccctctagaagcaccaaagagaggatttttgggatacctgactatctatttactttgtattcctatctctttcggagggtttttacctggctgggatagtggtatcactgccggtttcattaacatggacaattttaaaatgacttcggatcttacaagcacagtaccggagagtactatntggactctagagatccccggtaccgagntgaattgtatcatgttatac

SEQ ID NO: 174049 - DNA, 135 bp, Saccharomyces pastorianus
atgtacttgataaccttcgttgcattgacggctagattctttaacctagctgccgcctcggccaataatagttccttccctgatattgaccttactagttttttgagtcacttcaccaatattccagcaggactt

SEQ ID NO: 174050 - DNA, 993 bp, Saccharomyces pastorianus
gttcgttgtttgaacacctcaaccaacgctaacggtgcagtagctaaaaaaatgactgcactaaactttgcgatgattcactcacccatcgatgttttgaaatctatcaagaatgacatcgaaataaaaaacgcacacaaggcgcaggtcaaagacgcagtatgtttagtgcagtattttgcatggctggagcagcaattagtggggcgcgaggcactgatagatgaatatcgtgccgcagaaaaattgaccgagattaggaaaacccaaaggaacttcatgggcaattcgttcgaaacaatatcctccacaggtagtaacgccgccatcatacattattcgccgcccgtagagaactcttcgatgattgatcctaccaagatatatctttgcgactccggttcgcaattcttggagggtacaactgatataacaagaacaattcacttaacaaagccaaccaaagaagaaatggataattacacactggtacttaaaggtggcttagccctagagaggttgatttttcccgaaaacactcccgggtttaatatcgacgccatcgctaggcagtttttatggtcccgcgggttagattacaaacatggcacaggccatggtatcggatcatttttaaacgttcacgaaggacccatgggtgtcggctttaggccacatctgatgaatttccccttaagagcgggtaacataataagtaacgaaccaggttattataaggatggtgagtatggtatcaggattgaaagcgacatgttaatcaagaaggccactgagaagggtaacttcttgaaattcgaaaacatgactgtggttccctattgcaggaagttgatcaatactaagttactaaacgaagaagaaaaaacacagattaacgagtaccacgcaagggtatggaggacaatagtgcattttctgcagcctcagagtatttcatacaagtggctgaaaagagaaacaagcccactatga

SEQ ID NO: 174051 - DNA, 72 bp, Saccharomyces pastorianus
ctagcgacctttgcattacaagtgcaacgctctaccactaagctaaggaggcaactttttaaaagtcaataa

SEQ ID NO: 174052 - DNA, 108 bp, Saccharomyces pastorianus
atgccattttttgttaatgttaaaatttccaaatctgttttcagaagtttcaggctttctttttcatcattccaagatttttccagtcttttttcttgcaattctttt

SEQ ID NO: 174053 - DNA, 957 bp, Saccharomyces pastorianus
cccacattaataaaatcagatatggctgatttcaatctaagaaaccagctgaatcatgaaataaattctcataaaactcattttatcacacaattcgaccccgtatctcaaatgaatacgagacctttaattcagctgatagagaagttcggctctaaaatttatgattattggagagaaagaaaaattgaagttaacgggtacgaaatttttccgcagctgaaatttgaaaggccgggtgaaaaagaagagattgatccctacgtctgtttcagaagaagagaagtgagacatccgcggaaaacaagacgtatagatatcttaaacagtcagcgtttaagggcgttgcatcaagaattgaaaaacgcgaaggacttggccctgcttgttgctaaacgtgagaacgtttccctaaattggattaatgatgaattaaaaatattcgatcaaagggtaaaaattaagaatttgaaaagatctttgaacattagtggagaagacgatgacttaattaaccacaagagaaaacgccccacgattgttacggtcgaacaaagggaagctgaactaagaaaagctgaacttcagagagctgcagctgcagcagcggcagcgaaggcaaagaacaataaaaggaataaccaacttgaagacaaatcttctaggctcaccaagcagcaacagcagcaactgttacagcaacaacaacaacaacagcaaaatgcccttaagactgaaaacggaaagcaactcgcgaatgcatcctcttcttcaacatcacagccaattacgtctcatgtctatgtcaaactaccatcttccaaaattcctgacattgtttcggaagacgtggatgctctattgaaacagcaaagacaaattgcacgaagtccgtcacgaaagatggaaaacgcgaaatggagacgcgatttcttttcactttcggagatcctttaa

SEQ ID NO: 174054 - DNA, 228 bp, Saccharomyces pastorianus
acttttatcgtagagatcatggacgatgaaagtgtacgcgattacttcaaaacgctctctaaagttgcatatagggacttcagaggatctgagaagatgaaagtttgcaggctcttaagccccatcaagggcaagataattcattgttgctgtatgtggacattaaaaagagatatctctggtttgcccctcatgatcttgggtaacttcatgcccatactcaattga

SEQ ID NO: 174055 - DNA, 435 bp, Saccharomyces pastorianus
tcgaattcttcatcactcccccgttggttttcagattcatcatcatccatcgatgttatctcattttccgatactactgggaatcgcctaacatcttctggttctacgacgtcatattcatctagcgccgttatcatcgaagataaactcatacatgtctcctcttcgatgtcatgcacgctagtatctgccatgctaggattatccacatcttcgaaatcgttcaaaatttctagtccttcatcatttagcgaggcaacttcggacattgaatcgtatacagtatcgttatctatatcatatgtcctttctatagatatattgtcgctactgttttcatcttctataaaatcctcgtcatcaatatcatcttcagcatcggcctcttcttcttcatcttcttcttcatggactagttcgtcatcactgtatgct

SEQ ID NO: 174056 - DNA, 792 bp, Saccharomyces pastorianus
atggacatggatagaaatgtgccgttggcaccgaatctgaatgtgaatatgaacatgaaaatgaatgcgagcaggaacggggatgaattcggtctgacttctagtaggtttggtggagtggtgattggcagtaatggggatgtaaattttaagcccattttggagaaaattttccgcgaattaaccagtgattacaaggaggaacgaaaattggccagtatttcattatttgatctactagtatccttggaacatgaattgtcgatagaagagttccaagcagtttcaaatgacataaacaataagattttggagctggtccatacaaaaaaaacgaacactagggtaggggctgttctatccatagacactttgatttcattctacgcatatactgaaaggttgcccaacgaaacttcacgactggctggttaccttcgagggctgataccttctaatgatgtagaggtcatgagactcgctgcaaagactctgggcaagttagccgttccaggaggtacatatacctctgatttcgtggaatttgagataaagtcttgcctagaatggcttactgcctccacggaaaagaattcattctcgagttcgaagccagaccatgctaaacatgctgcgcttctgattataacagcgttggcagagaattgtccttatttactttaccaatacttgaattccatactagataacatttggagagcactcagaagaccgcatttggtgatcagaattgatgcgtccattacattggccaaatgtctttccactcta

SEQ ID NO: 174057 - DNA, 591 bp, Saccharomyces pastorianus
aaaaccttatcgattcgagttatgcaaactcaccaaccaattaagaccgcactgagtggtaccattgctaccattgctgcggatgcattgatgaacccctttgacaccgttaaacaaagactacaattggatactaatctaagagtttggaatgttactaagcaaatatatcaaaatgaaggctttgcagcattttactactcctatcccacaacattggccatgaatatcccatttgcagcgttcaatttcatgatatatgaatctgccagcaaattcttcaacccacaaaattcctacaatccattgattcattgtctttgcggtgggataagtggtgcaacatgtgctgcgttaactacaccgttggattgcataaagactgtattacaggttagaggcagcgaaactgtctccatcgaaataatgaaggatgcgaacacttttggtagagcctcaagagccatactggaggttcatggttggaaggggttttggcgaggtttgaaaccaagaatagtggctaatataccagccactgccatttcttggactgcatatgaatgtgctaagcattttttaatgaaaaat

SEQ ID NO: 174058 - DNA, 96 bp, Saccharomyces pastorianus
ttagagtggctataccccagggatgaaatcgatctagctccaaaatggcccaagtattcagtgtctaacgagacgaagaaagcaggagaaacttaa

SEQ ID NO: 174059 - DNA, 906 bp, Saccharomyces pastorianus
  modified_base (888)..(888): a, c, g, t, unknown, or other
atgtctgttaaagagcataacgaagaagatattattggtgatgaattacagaattcgaggcaactctccattgattgcgactcagttaaaatttcactaaggaacacatattggaccaaagactatacaacaggtatcaaattattcataaaacatatgaagagagaaaatgatttgctgattaaagacatcaaattttacaatgattttgtcaacaaattttggaaaccaacattgaacaatttacaaaaaatggaagcaaccaattcaatgaatagcaggctgctggaagtgatgagcaaacagtttaatataatatcaacagagcaagttgaaagagattgtaaaattccattgcaagaactaagagatcttaatgagagcttccttcgtgaggcagaaaacgatttgtcatctcgttattcagcttacattaaggatttagtcgcagctaaagaggcactaattggatgtgagaaaagagttcagtctatatataaattgaaaaaagccaatacgccagtggaaaattcttcctctgtttttgataatggaaaggatagtgcaccgttaaccaggttgaacttcgtatgcgagtttccttacactttagacgagaggttaaaatttgaggattgcgaccaatttatgtcatttttgcaaaccttgaagggaaaagtcatcctggagaaaagtgtcttttccgttccaggattgccaaatcaaagtttccaaggcaggtcattgatcaaagaattgaaaaaacttgaacccagactaaacctgtccttatttaatatcgataggataggtaacgaattcatccaactgggtataatacaagaatattccctgagtttttactctagcaaagttttcagtttgacncaggaaaaatactattac

SEQ ID NO: 174060 - DNA, 189 bp, Saccharomyces pastorianus
ttattgttacaggctacgatattgcgtatagaaaaaatgttgaaagttcttctgcaagatacaggaatccaaagggaatcaatatatctacctaatagtattattatttcttttccattttatatgtttcactatcctactatttcatcgatcctcttatttaagcttttattaaacctaatgactgtt

SEQ ID NO: 174061 - DNA, 90 bp, Saccharomyces pastorianus
atggattttacaacaatgactatggcaagcaatatggctactagtactactacgacggctacatcggcacatgcatctataaattcgtca

SEQ ID NO: 174062 - DNA, 468 bp, Saccharomyces pastorianus
atgattgggtctccaccatacactccgccagaggtaatgtacttcgatgccaagaagcactaccccgaaaagttccaaaaaccctataatccgttggccatggattcctatgccctcggaatcatgttgattaccatgattaacaatatcatccccttcatcgattcttgtaacactgatgcgagattcagggaatttgaagtgtcatatgacaacttcatcaatcatcaaaacccacatttcagggacaagggctgccacaagccgggtcctggttccgaatactctttagcaagaaatttcaagaatactgatgccacgcgtatcgcatggagattggctgacccgaaccctgcaactagatatacaatggatgatttatttaatgatccgtttttccaacaaattgaaacatgtgtcgagccaaatgatgatgacttagtacgggttcctgaattaaggaaaagt

SEQ ID NO: 174063 - DNA, 84 bp, Saccharomyces pastorianus
atgattctcgctttgggcgacttcctgactaaacaggaggacaaagcatgcgagaggccctgggttcaattcccagctcgcccc

SEQ ID NO: 174064 - DNA, 225 bp, Saccharomyces pastorianus
atggatcatccacgtaagtggcaccgtaagctcgtcaattgcaacagccactttatttttaagagccgcggtcattttgttagcatctcttctcaactttggcagcacaatttcacgatatttaacaggtatcatttgaaggaaagaatcgttctccagatactcgtcaattcctcgctttggctctctgaacaaaacgtctcgattacgcagaatgagactggc

SEQ ID NO: 174065 - DNA, 366 bp, Saccharomyces pastorianus
aatatactattatttatcttcgtatttactgtttccttttattattttcgtttcagagatgcaaaagctttagtcgatgccgcagtgattgcttcacctatggtgggcaatcatctaaagaaaaggcaaaactactattgggcgttggctggaggtgccagtgggttcttaatcacgctagcaggaatatccggagcgtatgctgccaataaatgtacaagtaatctaggtagcacctcatgttgggttggagctgcagttgcattgatcgcaggttgtttaggcggtgttgctaccacagcagcagccatggccggggcagcgggttcagtagcatcagcttcaaaaagatccaccagatatatt

SEQ ID NO: 174066 - DNA, 1128 bp, Saccharomyces pastorianus
aaaaagatcgaagatgaaaagagcgtaggcttattatcgtctaagagtgttgaatcacaaaacatcgtactaccaaaggatatcttcagaaattcatttacttggttctgttacgagacttacaagtccctagcgtttcgtatctggttaatattatggttgccgctcactgcttggtggaaggtgtccagtgaatggatttatcccttcttagctaccctttttttggttgaagtgctattcttcctccccctcatcctaattataggtcgcaaacgtgctatctccaaacaatatacccagttttgcaaagaaatcattaatcatgctccaggtactgatgacgaggactgggagcctgttctaataaatttcaactcatacatgtatgaaaacaaactttggaaaaccgagcatatgttttttgattgctcgagcttccgagaatcatttagaatattcattctagagccattttgcttgaaaaaggacaacgatgcaaaggtcaaatcatttaaagagtcagtaccctacatcgaggaggctttgcaggtctactttgcgagagtagatgaactatggaatcaggtctgttctgaaaagtcgttgagcgccattgactccaaagacactccacttcctaagcaattataccgtttcaaggctgtctggactttcaagacagcccttaataatggagcattaggggcaatcatcccttacttatattgtatcttcgtttcatggcgttacaacatttttgttcgcgtcttctacctcgggtttatgttattcgtgttgatagcatatttcaaaaatgtaagagttgcaccaatgaaattggaacacaagatgcactacatttcaactgttattagcgagcaagaagttggcgctaatggatgggaccaaatcgcaaagaaaatgaatgtgtatctgttcgaacagaaagtttgcaagagtcaagagtttttttttgacggaactgattgcaaatggttctttgatcacaacttctctagttctctatcttcaaagaagtctatgtggcttttgccattgaatgctgaactatggccatacattaaggaagcgcaatcagcctggagtgaagaatctctagcgtag

SEQ ID NO: 174067 - DNA, 1038 bp, Saccharomyces pastorianus
tcactaaaagacatctttggccattccttagagttttgcaaagatcaacatggttcacggttcattcagcgcgagttggccacctcaccagcctcagaaaaggaggtcatattcaatgaaattcgcgatgacgccattgagctttcgaacgatgtatttggtaattacgtcattcagaagttctttgaatttggtagcaaaattcaaaaaaatactttggttgatcaatttaaaggtaacatgaaacagttatctctacaaatgtacgcatgtcgtgtaattcaaaaggcgttagaatatattgattccaatcaaagaattgagttagtcctggaattatctgactccgttttgcaaatgatcaaagatcagaacggtaatcacgtaattcaaaaggccatcgaaacaattcctatcgaaaaattaccttttatcttaagttctttaactggccacatttaccatctatctacccactcctacggctgtagggtcattcaaagattgttagaatttggttcgagcgaagatcaggaaagcattttaaacgaattgaaagatttcataccatatctaattcaagaccaatatggtaactatgtcattcaatatgttttgcaacaagatcagttcaccaataaggaaatggtcgatatcaaacaggaaatcatagaaactgtggccaataatgttgtcgaatactctaaacataaatttgcctccaacgtggtcgaaaaatctattctttatggctctaaagatcagaaggattcaataatttctaagattttaccaagagacaaaaatcatgctttgaatctggaagacgattctccaatgattttaatgatcaaggatcaatttgccaactatgtgattcaaaaattagttaatgtctctgagggtgagggtaagaaattgatcgtcattgccattagagcatatttggataaactaaacaaatctaactccttgggaaatagacatttagccagtgttgagaaacttgcagcactggttgaaaatgcggaggtgtga

SEQ ID NO: 174068 - DNA, 114 bp, Saccharomyces pastorianus
gaagaaaaaaaggcacaaaaggacaaagaaaagaagaaagaatattttgccaagaatggtaaaagaacaaccatggatggtgacgacgagtctcgtccacgcaagatgagaaga

SEQ ID NO: 174069 - DNA, 264 bp, Saccharomyces pastorianus
tatcaaagaaagataggatgtttcatacaaatcccaaatttggggcgcggacaactgaaatacgtgggtccagtggacacgaaagctggaatgtttgctggtgtagacttacttgccaacattggtaagaacgatggatcattcatggggaagaagtattttcaaacggagtatcctcaaagtggactatttatccagttgcaaaaagtcgcatcattgatcgagaaggcatcgatatcgcaaacctcgagaagacgacgatga

SEQ ID NO: 174070 - DNA, 348 bp, Saccharomyces pastorianus
atggcacggtcttcgatgacaataccgccttccaagaccttggtctttggcttttgcttgttgtcttgctcctttttgctttttggttttgttggaccttcttctaaatcctttttgaactcaaccttttttactttcttggctttcttttcttcttccttttcgtcgtgctttctcttcttttcctttttagttttctttggctctggtttaggttcttcctcttcttcttcttcttcttcttcttcgacttcttcaatacgaacttcttcttcctcctcgtcgtccaaatcatccaagttgtcactgataatttcgtcttcgtctggtgtcaagtcatattcatca

SEQ ID NO: 174071 - DNA, 195 bp, Saccharomyces pastorianus
cttaaactaccagatatcgtttctataagaagcagtaaaagtcatctcagtaataaaagtaacagaaacaagcatggtatagatttgacgttcatgcctcgaagatctctacaaaattccaaagctggtttgaaaaaactgaatacctcctcgcaaggttattttaatatcccggtaaccatagaccgagcaagt

SEQ ID NO: 174072 - DNA, 201 bp, Saccharomyces pastorianus
ccgccgccgccgccaaacgcagcaccgaacaaatcttcgaaattgatgccgccaaagggagagccaccgcttgcattggtgaatcccgagaagtcatggaactgcgagccgaagggagatccgccgccgggacctccggcggctccaccgccgccgccaccaaaggcagcgggtccaaattggtcgtattgctgtctcttc

SEQ ID NO: 174073 - DNA, 159 bp, Saccharomyces pastorianus
atgagaattttgatgtcaaacatgacaaaccaggcagattgtctatggccaatcgtggtaaaaacaccaacggatcccaatttttcatcaccaccgtcccatgcccatggttggacggtaagcacgttgtctttggagaagtcttggatggtatggacg

SEQ ID NO: 174074 - DNA, 462 bp, Saccharomyces pastorianus
atgcacacggggcaaagatacattggctgtagcgcattaaatggccaattaacggagacagtggagctgctggacgtatccactagcgaattccattggaacgacatggatgagtccattgaggacacctatgattacgcaaaggaagctgagctattcttggagcaggaatttggcgaggtccttgacagggaacccgatgagttcaccaaatggaaaatgatcaaagctcaaccaaacatcaagactgggtcacagccagctgaacagcaaacttcaaacaatcctcactctcggttgttcaaggtcgtgctgaccatatggcattatagcgagattttgctattgatcatgggcatttatcttttttctgcttgcataagagttttccaaagaaggttcaaaaaaattagatccagaagaaaaagggcaggctcgcattctgtggggctattgcccatg

SEQ ID NO: 174075 - DNA, 96 bp, Saccharomyces pastorianus
atgcctattataggggtgccggggtgccttatgaaacccttttccgtgcctgttaagtttccgtttttggtcaaaaagaatatccgaattttagat

SEQ ID NO: 174076 - DNA, 309 bp, Saccharomyces pastorianus
aaagtaagtgcaagaaatagtcaaaattttggaccagacgtagcgaacaatggcattctggacgagagttatgacatagaatctgatccaagggcctttctgcaccaacctaaagaaactaaaaaggaaaagctacttaacagacagaatactttcttatctaacttgaaggggaaatccacacttaacgatggcatagctgccaattttgatggtatttctaaatcttccattagacgtaggaaaagaaagctaagagaagaactaaaaccaagatacctgcaggcatgcaagcttgcactgccgtct

SEQ ID NO: 174077 - DNA, 1641 bp, Saccharomyces pastorianus
atgttttacaataggtggctcggaacgtggctagccatgtctgctttaataaggatctcagtatcccttccgtcatctgaggagtacaaagtggcatatgagctgttgccagggttatctgaagtgccagacccttcaaatattccacagatgcatgctggccatattcctttacgttccgaagatgcggatgaacaggatagctctgacttggagtactttttttggaagtttaccaataacgactctaatggcaatgtcgaccgtcccttaattatatggttaaatggtggacccggttgctcttccatggatggtgccttggtcgaatctggcccttttagggtgaattcagacggtaaactttatctaaatgaagggtcctggatatccaaaggcgatcttttatttatcgaccaacctactggtactgggttttctgtcgaacaaaataaagacgaaggtaaaatcgacaaaaacaaatttgacgaagacctagaagatgtgaccaagcattttatggattttctggagaactatttcaagatttttccagaagacctcactaggaaaatcatactatcgggtgaaagttacgctggccaatacataccattctttgccaatgcaattttgaaccataacaaattttcaaagatcgacggggatacatacgacttgaaggcgctattgattggtaacggttggattgaccccaatacacagtccctatcgtaccttccgtttgctatggagaagaaactgattgatgaaagcaaccccaatttcaaacacttaacgaacgcacacgagaattgccagaatctgataaactcggccagtacagatgaggcagcccatttttcgtatcaggaatgtgagaatattttaaaccttctattgtcttataccagggaatcttcgcaaaagggaacagcggattgcttgaacatgtataacttcaatttaaaagatagttatccatcttgtggtatgaattggccgaaagatatttcctttgtcagtaaattcttcagcacacctggtgttattgattcgttgcatcttgattctgataaaattgatcattggaaggaatgcactaatagcgttggaactaaattgtctaatcctatttcaaagccatctatccatttattacctggtctacttgaaagtggaatagagattgtcttgttcaatggtgacaaagacttgatttgtaataacaagggcgtattagatactatagacaatctaaaatggggtggaataaagggatttagcgacgatgctgtttcgttcgattggatccataaatcgaagagtacagacgacagcgaagaatttagcggatacgtgaagtatgatagaaatttgacgtttgttagcgtttataatgcttctcacatggtacccttcgataaaagtttagtgagtagaggcattgtcgatatttactcgaacgatgttatgatcattgacaacaatgggaaaaatgttatgattactactgacgacgatagtgatcaagatgctactactgaaagcggtgataagccaaaagaaaacctcgaagaggaagaacaggaagcgcagaatgaggaaggaaaggaaaaagaaggccataaagatcacgac

SEQ ID NO: 174078 - DNA, 708 bp, Saccharomyces pastorianus
atgctcgatttaaatgagattaggcggcagagaggaacaaagtttccgcctgttctaaacactttcgtctctggattttatggatatatatatctggtactctcagaaacacattttgttttgcaagcacacccagatagtaagaagtatgatttacggttacagaacccttggcctgaactaataaattacgtagatacatttgacctaagtaaaatggatatagccacgttttctggtattccatatactgttttgctcatgaagtgtattgcaaaacttgaaagggatggtaataatgggaggataacgattgatcagatgaagaaagttttagaccaaatttgccttcctttagggaatgatgttatctacgaacccaattatgtggaagctaaacgctatgcttacttggcctgctctcaaaatgattgttgtaaagaactggaagatctgctccgaaatttggaaatatcagattatgggaacgattggcatgatacttataactacgagattctcacactattattgactttgaaaaatattgctaaagagaatggggagctcagctttcaacctttaacgggcactctcccagatatggagtcaacaacggaaaattatatcagactcaagaaactgtatgaagtaaaagcaaagcttgacaagtctcgtgtggaggaaagtttggctcgcagtaaaaaa

SEQ ID NO: 174079 - DNA, 1326 bp, Saccharomyces pastorianus
atggcaagcgaacagtcctcaccagaaattaatgcagataatctaaacagtagtgcagctgacgttcatgtacagccacccggagagaaagaatggtcagacgggttttatgacaaagaagtcattaatggaaatacgccagacgcaccgaagagaggctttttaggttaccttattatctacttactatgctatcctgtatcctttggcggttttttacctggttgggatagtggtattactgcaggcttcatcaatatggataactttaaaatgaattttggttcttacaagcacagtactggtgaatattatttgagcaacgtgcgtatgggtcttctcgtggccatgttcagtgtaggatgttccattggcggtgttggttttgcgagacttgctgatactttaggtagaaggctagcaattgtaatcgtggttttggtatatatggttggtgcaattattcagatcagttcgaatcacaaatggtaccaatactttgtcggtaagatcatctacggtcttggtgctggtggctgttcggtgttgtgtccaatgcttttatctgaaatagcccccacagatttgagaggtggacttgtctcattgtaccaacttaacatgaccttcggtattttcttgggttattgtagcgtttatggaacaaggaagtatagtaatactgcgcaatggaggattcctgtgggactatgctttctgtgggctctaattatcatcgttggcatgttattagttccagagtccccaagatatctgattgaatgtgagagacatgaagaggcctgtgtctccatcgccaagatcaacaaggtttcaccagaggatccatgggtactcaaacaggctgatgaaatcaacgccggtgtccttgcccaaagagaactaggggaagcctcatggaaagaacttttctccgtcaaaacaaaagtccttcaacgtttgatcacaggtattcttgtgcaaacctttttgcaacttactggtgaaaactacttcttcttctacggaactaccattttcaaatcagttgggcttactgatgggtttgagacgtcgatcgtcctaggtacagtgaatttcttctccactattattgctgttatggtcgtagacaaaataggccgtcgtaaatgtctgttattcggagcggcttcaatgatggcttgtatggtcatatttgcaagtatcggggtaaaatgtctttaccctcatggccaggatggtccatcctcgaaaggtgcaggtaatgccatgattgtgttcacatgcttctatatattctgctttgcaacgacatgggccccc

SEQ ID NO: 174080 - DNA, 324 bp, Saccharomyces pastorianus
  modified_base (178)..(211): a, c, g, t, unknown, or other
attaatccggataattcacaagcaacgaaaggtcaaaatagcgctcaaactaaattcaacagccaatcctatcaaccgacgtatgcacagcaggatatattaacgcagtcacaaccaccatttgtggacacaaacgataacaacaacaacaataatattaacaatactactactactnnnnnnnnnnnnnnnnnnnnnnnnnnnnnnnnnnccaactttctggccacgcgctataatataggaactctagatgaatttgttaataacggtgatcttgaagatctctacagtatcctatggagcgatgtttatccagatacttag

SEQ ID NO: 174081 - DNA, 123 bp, Saccharomyces pastorianus
ccagactcaataaacaccttttgtgctcctccagaattaaagaaaattcattcacttgggagatcaccgttgttggaggttgaagacagggaaactagtaagaaagttggaatctctcttata

SEQ ID NO: 174082 - DNA, 168 bp, Saccharomyces pastorianus
ttgctgtttcgctacttcttaatagtttggcactatttttttgaaaaaatggaatcgatatttctgcatattaatatcaccatcatttctcctcccttatatgttccattaccctattacattataaatcctcgtatttctgcttcctctaccttcgatgaaagcttc

SEQ ID NO: 174083 - DNA, 543 bp, Saccharomyces pastorianus
tacaactttggcgctaattgggtcaatgatgccttcaactccttatattccaataaggaacaaatatcgttaccagatttcattacttctaacacctctgaaaacttcaatgaacaagctattgttaccgtcacaccattgttatattatagacctatcaaatcttaccaacgtgttgaggatatgattcttctattacttcgtaatgttagcgttgccattcgtgacagatttgtcagtaaattagtcctttttgccttagtattcagtgccttcatcaatgtttatttgctaaatgccgctaggattcataccagttacaccgcagaccaattagtaaagaccgaattcactaaaaaatctcgtacagctccagtagcaagagcttctactccaattttaactaaaaaaactgtgactgctgaatctaaaacaaaagtttcaacaattgttcaggcaagttcttcagtatcctcattttcttctagtgaagaagatgatcccgtgatattgaaagcttggataagaaaatacgtcctctag

SEQ ID NO: 174084 - DNA, 126 bp, Saccharomyces pastorianus
gaatcaatatttctatatactaatattacgattatccctcattccgttttatatgtttcattatcctattacattatcaatcctttcacttcagcttcttctaacctcgatgacagcttctcataa

SEQ ID NO: 174085 - DNA, 210 bp, Saccharomyces pastorianus
gaagcggctgaagtactaggagtactgaaacaatcatgcaggcagaaaccacagcgaccagaggacgtctcgcgaggtgacgaggggagatcggcgagtgaatcgtcgacgacgcctctgaatatactggatcgcgtcagcaacgaacttattaacaacgtcgtgacgattgtacagacgacttacagctaccaccaagagaccggttag

SEQ ID NO: 174086 - DNA, 201 bp, Saccharomyces pastorianus
ccaaccctcgtaacttcagcagtaaatgtttctgatactgtttctgcctacgagaggattgctaggagaaatgatgacgattcatcatcttcctctgtatccagcacgacacatagtacgtcagccaagtgtacaggctcccaacaagaatgtcaactgcctacaaataccagtcccagacctagatgtgactgtaggtgt

SEQ ID NO: 174087 - DNA, 345 bp, Saccharomyces pastorianus
caaagcgacaacaatgatggtagcaccgctaaggaccaagttcctccgccgttactcataagatttagtacgaaggcgatgcgactgttttttattgtagatatgcttggacgcacaatgataccaagtagtacacttacttcctttttaaacaaggccgatttatattggtttatagcatattcagccattgtttccgcttgggggtttttagtatggatggaaagagcatatagaaagaagaggaacctgcaaccttcaaggtgcacgaaaataatctgctctcgttgtgatacaataaaaaaacatcctcgatggttcaaatacaaatatctccttttgtaa

SEQ ID NO: 174088 - DNA, 1464 bp, Saccharomyces pastorianus
ttccataaaaaagttaacccaaactttaatttgaaaaggaatttctttcttccgctggagcatgattgcagttcaagaggtagccgaattccaagggaagatcctagtccagaggcaagttcgagctttttcccactacacgacacattgtttacatcagaggatagttcaataaccccaaaaagtaacttggttcattacgttgttatagaaacagttgaaaatcgcaactttgcacacacagctcaaacagatttccccaaaaaagaaggaacttggatcagcatccaacgagatggtagttctaactcaaaccgaaccaccgacagcagggatgaaaacgatgaaagcaaaaaatcgtattgtaaagagtacttgcaccactcaaaaaagttcagctcttctaaaaaaaaaaacaacctggaatctatccgtttaagtaaaacaagttttacacttaatcttgaagacgaagatgtagtagaatgcgactttaatgataaagtgccttgttgtattgatttactttctggcgctactctggaaaaaagttctttaacgctgaatgaactaaatataaaaatgtttgatacactgcatcggttccgagtaagtaaagataatcctgaagaaaaattagtagaaatgattcttccaaattgtgtgacgctattagacatattcgatgagtcggaactttcgtctagttgttgtgacgatatttttgaaagctccacgttcctcaacacaatcgaacacatagtgcatgatatttgggtggagactctaacagaaaacctaactctatttccaatattcaatagctatttagaattgtacaaggacaggtatatgatttgcaaagtaaaagatcggcgcacctccacaaatatagtagagatactagaaagttttaagcattttcccacttctgtcctggaaactttcaggcttggaatcaagtcaacaggaaaagacctgtggcacacagagagcgccattatgaactacattattttcaacaggacattctgtactataattttagaaatccgaaaatgcttcatcttgatcatcagatttatgcactctgccgatcttttgaggattttttcgaatcaagtgtttttatcattcattgacgttctagtaaaaatcgtattcgaatgccagatcccgcagttgtttctgggaatcaacgaagttgttgaactgtggctacaaggcgacgagacaggacgcgaacaactcttgcgtgcatggtgcgacgcaattgtcggtagtacaaatgcagttgagtcaagagacaccccgaatttagaatcggagtcgttcacgtcaagcacagatgaaggcgaagacagcctcaaatttaacaagtgggatgtaatagaaccgttcatcgacaatatcagggccgcctgttcccggcagcagctacaatccgccaagttacagcaataa

SEQ ID NO: 174089 - DNA, 1005 bp, Saccharomyces pastorianus
tcaaccgtttattcaattttagccgcttctttggttaatgcaggtaccattcctctccaaaaattatcagacattgataaaatcggaactcaaacagagattttcccattcctgggtggttctgggccatactactctttccctggtgattatggtatttctcttgacttaccagaaagttgtgaaatgaagcaagtgcaaatggttggtagacacggtgaaagataccccactgtgagcaaagctaagagtatcatgacgacatggtacaagttgagtaactatactggtcaattcgacggaccattgtctttcttgaacgatgactacgagtttttcattcgtgacaccaagaacttagaaatggagaccacacttgccaactcggtcaatgttttaaacccgtataccggcgaaatgaatgctaagagacatgctcgtgattttttggcgcaatatggttacatggtcgaaaatcaaaccagttttgccgtttttacctctaattcaaacagatgtcatgacactgcccaatatttcattgacggtttaggtgaccaattcaacatctccttgcaaaccatcagtgaagccgagtccgctggcgccaatactttgagtgctcatcattcgtgtcctgcttgggacgatgatgtcaacaatgacattttggaagaatataatacaaaatatttgactggcatcgccaagagattaaataaggaaaacaagggtttgaatctaacttcaagcgacgcaaagaccttttttgcatggtgtgcatatgaattgaatgctaggggttacagtgatatctgcaacatctttaccaaagacgaattggtccgtttctcctacagccaagacttggaaacttattatcaaacaggacctggccatgaagtagtcagatctgtcggcgccaacttgttcaatgcttcagtgaaactactaaaagaaagtgaggtccaggaccaaaaaggtttggttaattttcacccatga

SEQ ID NO: 174090 - DNA, 243 bp, Saccharomyces pastorianus
  modified_base (34)..(34): a, c, g, t, unknown, or other
atgaatatttatgtgcctccttgccataaaaaanatttggatgaacagcctgaagatttcaaatggataatcgtaagaaacaagacagaaacgcccttctgtgacttgcttccatcgcatcgcgctataacttgggaccctagtatacaaataccgtttgcaacatttgaaagaaggaagaaattagaacatgtctggaaggttcgtaaaaatgtgatgagacgtgggcaattcatgaaaagg

SEQ ID NO: 174091 - DNA, 1341 bp, Saccharomyces pastorianus
acagaaaatgatactgtagctccagtgtttcccatggagcaagatataaatgcagcacctgatgccgtcccactggtgcagacaacaacactacaagtctttgtaaagcttgccgaacccatagtgtttttaaaaggatttgaaactaacggactgtctgaaatagcccccagtatcttacgaggatctcttatcgtcagggtgttgaaaccgaataaattaaaaagtatatcgataaccttcaaaggaatatccagaacagagtggccggagggtataccaccgaagagagaagaattttcagatgttgaaactgttgtcaatcacacatggccattttatcaggcggatgacggcatgaattctttcaccttagaacatcacagctcaaataattcgtccaatcgcccatctatgagcgatgaagattatctacttgaaaaaagcggtgcttcagtatatatcccaccaaccgctgaaccccctaaagataatagcaatctaagtctggatgcctatgagtgcaactcattgtcatccgataatttgagtaacaagccagtatcaagtgatgtttcccatgacgacagtaaactgttggctattcaaaagacaccattaccatcatctagtcgaagaggatcggtaccggcaaattttcacggtaactctttgtcacctcataccttcatatctgatttgtttacaaaaacattcagtaatagtggcgctactccaagtcctgagcaagaggataactatcttacaccatccaaagattctaaagaagtttttatttttcgaccaggcgattatatttacacttttgaacagccaatatcgcaatcttatccagaaagtataaaagccaattttggttccgtggagtataaactgtcaatagacatagagaggtttggcgcattcaaatcaactatacatactcaattacccatcaaagtcgtaaggcttccttctgatggatccgtagaagagactgaagctattgcaatttccaaggactggaaagatcttcttcattatgacgtggtaattttctcgaaagagatcgttttgaatgcatttttacccatcgatttccatttcgctcctctagataaagttactctgcatcgtattagaatttatctaacagagtctatggaatacacttgtaatagtaatggaaatcacgagaaggctcgtcgattagagccaactaaaatgtttctgttggctgaacataacggtcctaaactgcctcatataccagctggttcgaatcctttgaaggctaataatagagggaacatccttttggatgaaaatccggcgatctag

SEQ ID NO: 174092 - DNA, 573 bp, Saccharomyces pastorianus
gtctccgtctttgtcgttttcatgttcctgtctatttgctgtttgagtgcagaatactttcttatgggcagacattacgcctcaatccatcctctagccaattccaacctcaacacgcaatcctctgaaaaaagcttcaaccagagctttaatattgtagacgacctaccctggtacaagtggcaaggtcacatttggaacaaatttacaatcagtgccaccctaaaaactatatggctggccttggctgttgtttgggctatttgcttcggtgccattaatgataggtctaagagtgcctgtttcgagtggctgttggccttttggtttggtgttatatttataatcctttccgtcgatttttatatgggtggtagatacagaaaatctcgctattttaagcacgtggaatcattttccggttattacaagtacgataaggcgctaggcctttaccacagcgaagaagttttgccttccgaggacaatgctgatgccattactacagacacggcttcttcaaataatcacgataacaccgcttcaaatgaatcccttcaggtcgttgtatga

SEQ ID NO: 174093 - DNA, 549 bp, Saccharomyces pastorianus
atgatctacgttcttggttattcaatttatttgagtggctacttaaaggattattggtgcctaccaaggccaaaatcaccgccagttgacagaatcacactaagtgaatacactacgaaagaatatggtgcacccagttcacattctgctaacgctactgcggtaagtctattattcttttggagaatatgtttatctgacacactggtatggccaacaaagcttcttttactgagtctggtgatattttactacttaaccctggtttttggtagagtttactgcggtatgcatggtatgctggatttatttagcggcgccgcagttggagctatctgtttttttataagaatctgggtggtgcatgctttacgaaatttccagattggtgaacatctctggtttccccttttgagtgtagcatggggcttgtttattctgtttaaccacgtcaggcccattgatgaatgtccttgtttcgaagatagcgtagcgttcattggcgtagtcagtgggctggattgcagcgactggttaaccgaaagatac

SEQ ID NO: 174094 - DNA, 126 bp, Saccharomyces pastorianus
atggaatctatatttctacatactaatattacgaatattcctcattccgttttatatgtttcattatcctattacattatcaatccttgcacttcagcttcctctaacttcgatgacagcttctca

SEQ ID NO: 174095 - DNA, 837 bp, Saccharomyces pastorianus
atgtccaagttagaaaccgtttacttatacgctggtgaagaacaaccacgtgttaaattgacctgtattaaggaaggtctcactttaactcaggttatcaagttcgtgcattctattcaagaattgtacgggattgagttgcaaacttctgagaccataacagaaaatttgaagatagattgtgcacccgcatatttgaagccgaattgtattccccatttctacattctcgaatatgaagaaataagtgacacctttttcatttggaaatctgatggtcgttggcaattaaataagttgtctgccttgttgtacgtggataacgacgctaacgtggttaagaacacttcctggaaggaggttttccagaatgatcaacgatttaaaaattatgataaacgggcctggttacaaaattgtctagaaaaaatgaatagagatctctcaaaactaaacgttgaacaattttggtctcaatatgataaaatatgtcaaagcattgccaaacaaaagaaaaaacaggaacagttcaacatggaggttttcgataacttcaaaaatattgtttctattgctatcataaagaccaaagttttatcgaataagcgacttttgacaacaactttaaaaaattatcataactcgatgaagaaaaagtataacatccaggaacaaaatcttaaggaaaatagtttggcatcgtgctcgaacaatgagccttccgcatctctgggaagcgaatcaagacatttttctccggtaaattcgctgtctccttcatctttgagtaccgatgatgaggctgtctcgacagactacatctataaaggtcctgag

SEQ ID NO: 174096 - DNA, 1362 bp, Saccharomyces pastorianus
atggtttatgattgtccagaatatgacttaaagacctgctacagaaaccttaccttcaaggtgcgcaaaaaaaattcagaggcaacaaatagacagaacttgcagaaacagtcgaagaaaaacgataacttccagccttccgttgcctttgacactgtccctttcactctaggttattcttctatacacgacagtagagaaggatttctaggtgtacctgttcccaatgattacactatggaagagtgttacgataaagaaacagactctctctcagcgaatttacaatattacctaaaggacacattccaatcgccttctttgaaggccaggaaagaggatgactctgtttccaacattcctccaataaaatctccaaagcttttgaagaaaagaactgacattaagaagattttcttagtatctcaaaatgggaaaatcgtaaggagagactatccaagtacttcagtgattactaatgaagcactaatggtaaacaagttagaaaagaattggaacaaattatggcgtcaaaggaaagcacaaataaatgaaaggctaaacgaaaaaaaaaagtggtttgttcagccagatattattttccccaaagaacacattaaaccgttatatagaggtgatgacgctacgccttgtactaaggagcaaagaagaaaacacaaaatcttccaacaaaaaattggatatcctaataatccgaaaacaatactttgttatattagtggtagaaggcatacttgggttgctctagattggaccctttgcaagattgcacaagacatggatcatattgtggttttaactacactaccaagattgatatgtaacaagaaaaaaggacgaaaaggggacacagaatgggcatcgggatatcaaaaggaatcaatcgaccgaaaactcagtgatatctttgagtacattttacagcttctgaaggcagttaaagcttctgtaaaagttactttggaaatagttataggcaaaaccaaaaaatcactggtggatgcaattaacgtttatacaccggacttcctagttatcgctactttgaagcatgaaagaaatgaaaagctcatcatatataaatctaaaaaactggctgatgtttttgctgtaagctttcctattccagtacttatcgttccctcaaaaagaatgtattccttcgaactaaatttacaaagaaaaatgaatggatgcataaataatagtagcaatacccatataaacaatgaaaatactgacagaaataatacgaatgattcaccatttgaaaacaacgaaatagtagctatatcttccgagatttccttagattcatttgcagaagacttcaaaaaaaaa

SEQ ID NO: 174097 - DNA, 174 bp, Saccharomyces pastorianus
agctctgacgaggtaaccacatcaacagatccaactagctcaagtgacgttgctacttcagcagatccaactagttcaagcgctgtgactactttagttgacccaactacttctgtagtcatttcaacctcagttgatcaaactagctcaagtgacgtttgctacttcagttga

SEQ ID NO: 174098 - DNA, 105 bp, Saccharomyces pastorianus
aactatctaatcaaggtactaccaagcctccgccaagcgatgctatcgggaatctactttaatgtgaacccggaattgcatgcgtacgaatctatctatgactga

SEQ ID NO: 174099 - DNA, 186 bp, Saccharomyces pastorianus
atactgctttcgtataacaagacttttattacagattcagaagaatgtagacaagtagtcgaagaagcgatccaagatttattccagctactggagaattggacaaccaaataccacacgtatgaaaaatgtagtatccagatggctacaacagccattttagccctacagtgtatgaacagtaga

SEQ ID NO: 174100 - DNA, 1809 bp, Saccharomyces pastorianus
atacagaatcacaagaaagcggtgacaaaacccagaagaagagaaaaagtcatcgagctaattgaagtggacggcaaaaaggtgagtacgacttcaaccggtaaacgtaaattccataacaaatcaaagaatgggtgcgataactgtaaaagaagaagagttaagtgtgatgaagggaagccagcctgtaggaagtgcacaaatatgaagttggaatgtcagtatacaccaatccatttaaggaaaggtagaggagcaacagtagtgaagtatgtcacgagaaaggcagacggtagcgtggagtctgattcatcggtagatttacctcctacgatcaagaaggagcagacaccgttcaatgatatccaatcagcggtaaaagcttcaggctcatccaatgattcctttccatcaagcgcctctacaactaagagtgagagcgaggaaaagtcatcggcccctatagaggacaaaaacaatatgactcctctaagtatgggcctccagggtaccatcaataagaaagatatgatgaataactttttctctcaaaatggcactattggttttggttctcctgaaagattgaattcaggtatcgatggcttactattaccgccattgccttctggaaatatgggtgcgttccaacttcagcaacagcagcaagtgcagcagcaatctcaaccacagacccaagcgcagcaagcaagtggaactccaaacgagagatatggttcattcgatcttgcgggtagtcctgcattgcaatccacgggaatgagcttatcaaatagtctaagcgggatgttactatgtaacaggattccttccggccaaaactacactcaacaacaattacaatatcaattacaccagcagctgcaattgcaacagcatcagcaagttcagctgcagcagtatcaacaattacgtcaggaacaacaccaacaagttcagcaacaacaacaggaacaactccagcaataccaacaacattttttgcaacagcagcaacaagtactgcttcagcaagagcaacaacctaacgatgaggaaggtggcgttcaggaagaaaacagcaaaaaggtaaaggaagggcctttacaatcacaaacaagcgaaactactttaaacagcgatgctgctacattacaagctgatgcattatctcagttaagtaagatggggctaagcctaaagtcgttaagtacctttccaacagctggtattggtggtgtttcctatgactttcaggaactgttaggtattaagtttccaataaataacggcaattcaagagctactaaggccagcaacgcagaggaagctttggccaatatgcaagagcatcatgaacgtgcagctgcttctgtaaaggagaatgatggtcagctctctgatacgaagagtccagcgccatcaaataacgcccaagggggaagtgctagtattatggaacctcaggcggctgatgcggtttcgacaatggcgcctatatcaatgattgaaagaaacatgaacagaaacagcaacatttctccatcaacgccctctgcagtgttgaatgataggcaagagatgcaagattctataagttctctaggaaatctgacaaaagcagccttggagaacaacgaaccaacgataagtttacaaacatcacagacagagaatgaagacgatgcatcgcggcaagacatgacctcaaaaattaataacgaagctgaccgaagttctgtttctgctggtaccagtaacatcgctaagcttttagatctttctaccaaaggagaggggatcctctag

SEQ ID NO: 174101 - DNA, 111 bp, Saccharomyces pastorianus
atggtctctagcgggatcgaaccgctgatccccgcgttattagcacggtgccttaaccaactgggccaagagaccattatttgttgtttttcggagtatgtaaagagcatc

SEQ ID NO: 174102 - DNA, 135 bp, Saccharomyces pastorianus
atgttcatggtaggtaccccacccagccataaggaaattttcaaaggcgttggatcaaaaaataggcctttatttcatcgcgtgattgaggagcataacatgtttagtgaaggtttcttttggaaaacttcagtc

SEQ ID NO: 174103 - DNA, 258 bp, Saccharomyces pastorianus
cggatcgcgctgaaggactcttatagaataagtttggtaccttcttctgatggaatatctgtatgtggaaaactttggggagagttgaacaactgcttccatgtgccagcctcattttgcgtaatcgagaagttttgttcagagagccaaagcgaggaattgacgagtacgattctttcttttaaatatcgtgaaattgtgctgcccaagttgagaagagatactggcaaaatgaccgcggctcttaaaaataattga

SEQ ID NO: 174104 - DNA, 114 bp, Saccharomyces pastorianus; identical to SEQ ID NO: 174068

SEQ ID NO: 174105 - DNA, 144 bp, Saccharomyces pastorianus
ctgcatagaagaggtacggccacacaaggtactttacatttgactactcaccatttgatctttgagtcaccacaattgtcgacggaattctggtttccatatcctgacctgcaggcaagcaagcttgcactgccgtcgtttaca

SEQ ID NO: 174106 - DNA, 1485 bp, Saccharomyces pastorianus
ccacaaaaacttgtcaatttattaccacaatcgttcaacgacgaactgtcgttggcccctggcaaggaatcagccacgttgtcggttgtttacactctagactcatctactttaaggattaaatctacttgggtaggcgaatctacaatttccccctcaaacatcttgtctttagaacaattagacgaaaaattatctactggaagtcccagtagctacctctctactgtacaggaaattgctagatcattttatgctagaagaataaatgatccagaagctacattacttcccaccctgtccttattggaaagcttggatgacgaaaaagttaaggttgacttgaacatcctggatagaactttaggctttgttgtaattaatgagattaaaagaaaggtcaactccactgttgcagagaaaatttacaccaaacttggtgatctagctcttttgagaaggcagatgcaacccattgcaaccaagatggcgtcatttagaaagaaaattcaaaattttggttacaattttgataccaatacggcggatgaattaatcaaaggggtgctaaaaattaaagatgacgatgttagagtcggaattgaaattttactgtttaaaaccatgccaagagctagatactttattgctggcaaattagacccggaccaatatgggcattatgccttgaacctacctatctacacacatttcacagcgccaatgagaagatacgctgatcatgtcgttcataggcaattaaaggccgttatccacgatactccatacaccgaagatatggaagctttgaagattacctccgaatattgtaattttaaaaaggactgtgcttatcaagcacaggaacaagcaattcatctattgttgtgtaaaacaatcaacgacatgggaaatactacaggacaattattaacaatggctactgtcttacaagtttacgagtcctcctttgatgtatttattccagaatttggtattgaaaagagagttcatggagatcaactacctttgatcaaagctgagtttgatggtaccaatcgtgtcttggaattgcattggcagcccggcgtagatagtgcaacttttataccagcagatgaaaaaaatccaaaatcctatagaaattccattaagaacaaattcagatccacagccgctgagattgcgaatattgaactagataaagaagcggaatctgaaccattgatcagcgatccattgagtaaggaactcagcgatttgcatctaacagtaccaaatttaaggctaccatctgcaagcgacaacaagcaaaatgctttagaaaaattcatttctactactgaaaccagaattgaaaatgataactatatacaagaaatacatgaattgcaaaagattcctattctattgagagctgaggtggggatggctttgccatgtttatccgtccgtgcattaaatccattcatgaagagggtataa

SEQ ID NO: 174107 - DNA, 1575 bp, Saccharomyces pastorianus
atgtacagaattaatagtaggtttttgataattgacggttgggtgattgatctagtaaagaaagctttgataaaccccaaggaatcggctacatttcaaaattttataagtagctatcaccttttagactgggatgatatctatgatgaggaatttaatatatattgtgaagatgatcgtaacctgtttgaagtaatagatgcagatgagtactggttccaaatagaccccataactggctcggtattgaaagtttccaaaaaccagttgagtgatttagtaggcttgaggtgccataggctatcaatggggcataagaaaacgctatatattcattaccatccatacgaaaaaaatatgccaaggacgtgtcagatgcagtacatgcacaaagacttaaagcaacggttttatccgctgtgcacctttaagggtaaaaaattcatcgaaattgaaggatttgtcattaagttgagcaagttcatcaaaaaaccacccaaattagtggaacaaactttatttgacccttcatcatcaaatggcaaggaaggtacgttgtccgtgaatgattgctaccttctaaggaaggttttcaagggtagatcgctcttgtatttaaagttgatcaattcgaattttttgaccattaaagacataaccctttttcatttgtctttgaagcaaattctggtaaaattgaagaaaatcaatgactattacgtttgtgaaaaatatcacggtcaaaggaccactgaccaggtctcgatacatttagcaataccaataatttgtattgataatcatactaaatatattgtttgggagaatcccattttttctacacgaaattttgatgcagaaagtgtcggaaagcaattgaagtcggaaatgagaattgttgatcgattgtttaaaaacgatattataacgttagaaaactacatcctcagaaatgaacaattttccaatactcaacaaatagatcatcaaagcactattgattcaatttcatcgacttgcatttgtgtcaacggaaaaatcgttgcacagaaattcggatcacttctaaaccagatcatttttcaaggaaagattcaggatacttccgtgtatctgatcgaagaagatttcattttcggtcggctatcaaaaataatatctaatttttgtttaactgagtcaatggctaggttacaatggtggcaaaactgtatacgaagtgagtttggtataacagatttcgatgtttgtcaccaaagctgtaatgaaataaagcagattgttgataaggcgattgaattttttttacctgcattaatcacgcaacaccaaaaggttttctcaggacacagaatgtatggattaacaaatccggagctttcaaagaggtatatgataatcgacaaatttatagttgatgtgtttgaacgaagggtggtgaatccattgagcgacgatattttccgaataatgagcttcagaaatgcaaaactaaatatgagcaatggtcttttggattggagctcattggtattcgattctataccgtatcctgtattttcaccggtgttgttt

SEQ ID NO: 174108 - DNA, 108 bp, Saccharomyces pastorianus
atgagtgggataaagaaggaaccgattgaatctgatgaggttcctcaacaagagacaaaaaataacttacctagtgcaccttctgagatgtcaccccttttcctaaac

SEQ ID NO: 174109 - DNA, 267 bp, Saccharomyces pastorianus
atggctggagaagcagtcttagagcatatgtcagattcacaagaagaaattgtaactactgtggtttgttttgttgtttctgtggtttgctctgttgtccccttggtttgctttgttgtccccttggtttgctttgttgtctccgtagtttgctttgttatctctgtggtagaaatagggcaccatgtggtatactctgttgtaacgccgctaacagtaacggtggccgtggaaacaatcgcagaggagatggattcagtgcacaca

SEQ ID NO: 174110 - DNA, 120 bp, Saccharomyces pastorianus
tcatcgggttgttttctgatcgcgtctttatcttgtgtggggcttactgtatttgaaaccttattttcgctagtctttgatacggcgtatttcatatgtgggatggtcatccagctttaa

SEQ ID NO: 174111 - DNA, 1023 bp, Saccharomyces pastorianus
atgtttggctgggataccggtactatttccgggtttgttgcccaaacagacttcctaagaagatttggtatgaaacataaggacggtacctactacatgtctaatgtcagggttggtttattcgttgccattttcaacattgtttgtgctttcggcggaattattctgtccaagggtggcgacatgtacggtcgtaagaagggtctttttattgtcattattgtttacatcattggtatcatcattcaaatcgcctcaattgacaagtggtaccaatatttcattggtagaattatttctgggctgggtgtcggtggtattgctgttttatgtcctatgcttatttccgagatttctccaaaacatttgagaggtccgctagtttcctgttaccaactgatgatcacagccggtatctttctgggttactgtactaattttggtaccaagaactactccaactctgtgcaatggagagtccccttggggttgtgttttgcatggtctatcttcatgatttttgggatgagttttgttcctgaatccccacgttatctggtcgaagtgggtaaaatggatgaagccaagcgtgctttagcaaaggttaacaagaccactgaagattcaccgttagttactctggaaatggagaattaccaatcttccattgaggctgaaagactagccggctctgcctcgtggagcgaattagtcacaggtaaacctcaaatgctaagacgtacaatcatgggtatgatgattcaatctctacaacaattgactggtgacaactacttcttctactacggtactacaattttccaagctgtcggtttacaggattcatttgaaactgccatcgttttaggggtagtcaactttgtttctactttcttctcattgtatactgttgaccgtttcggccgtcgtaactgtctactgtggggatgtgttggtatgatttgttgctacatggtctatgcctctgtaggtgtaaccagattgtggaaaaacggacaaagt

SEQ ID NO: 174112 - DNA, 282 bp, Saccharomyces pastorianus
atagcaacaaaggagggtggcagattccttttaggtaattgtagagtttggcagaagtctgtgttaaacaaaccaacacaatttataaacatatataatgttttagccattgaaacttcctgtgacgatacgtgcgtttccatactggtaaggttctcagcgaatgtagctccaaatgtgttgatcaatttgaaagatactctggatagtgttgatgaaggagctattattcctacaaaggctcatgtccatcaccaagctcggatacggaccttaacataa

SEQ ID NO: 174113 - DNA, 816 bp, Saccharomyces pastorianus
tattcaattgttaaagagattattgtagatccttacaaaagactaaaatgggggtttattccagtaaagcggcatgtggaagacctgccagatgacttaaattcaacagaagttttcactatctccaacagtatccagagtcatgaaacagctgaaaatttcatcacgaatacaagtgaaaaagagcaactacattttgagagtagtagctatagtgaacataaagacaatgtgaaccttactagaagttatgaatatagagatgaagccgataggccatggtggagatttttcgatgaacaagagtatcggatcaatgaaaaggaaagatctcacaataaatggtatagttggttcaaacagggtatctcttttaaagaaaaaaaattattaattaaattggatgtccttttagccttttattcttgtattgcttattgggtcaaatatttggatacggttaatataaacaacgcttacgtttcgggaatgaaggaagatttaggctttcaaggtaatgatttggtgcatactcaagtaatgtacacagttggtaatattatatttcaattgccatttttgatttacttgaacaagttcccattaaactatgttttaccaagcctagacttatgttggtcgcttttaaccgttggtgctgcatatgtcaattctgtaccacacttgaaaaccattaggtttttcattggggcttttgaagcgccaagttatttggcataccaatatttgtttggttccttttacaaacatgatgaaatggtgcgtcgttctgctttttactatttgggccagtaa

SEQ ID NO: 174114 - DNA, 1020 bp, Saccharomyces pastorianus
atgacttcaaaatgggaaaaatgcttcaatgacaccttgagtaagttgactgctttagagggtgattctttacaaaagttcattaatattgaatctctcctggagaacgaaaaatctgtaaagattctaaatcattcaatcaatggtaagctgaataaaattaagagggaaattgacgaaaatgcaagttttagagatattataacagtaaacatcgatcgactgcggcaaatgtttaccccgaatgaatctaaattcgagcttgaagaccaaatggcagagagctttgaggtactggtatcagaaatgcgaacaagaagcagaaatgtacttgataaagaagaagaagaattcaatagtcaagaatttttgaaaagcatgaatgtgatgttggaaaaggataaaaaagaatcagtgaaaactctcttcactatatcacaagcgctgtattcacaaataggagaactaatagatttaaaaaaaagtctacaaaagcatgcagtagccattttgggtaacatagcattcacccagatggaaatcctaggtattaaaagactattattgaatgaatgtaataaagatttagagctatacaagaaatatgaggtagaatttgcacaggtagaagatttgcctctgatatatgggctttatttaatcgaaaaatatcgtaggctatcatggttccaacaaattttgtcatttatctcaaattttaatcaagatttagagttgttcaaacaaaatgaattacgaacaagaaataaatgggttaaaaatttcggttccatcgcgactgttttttgcgaagatctattgtcttcctctgatttcaaacgtctaaacgaatatcactctcatacttctccaccaaatgaagatgaggaagatgaaaatgagaactctatagcaaattaccgccaagacctggtaaaagtatcgcaagccattgataattatatgacgcaaattaaagaaacagatgtttctgaaccgatcattgatctactttcgaaa

SEQ ID NO: 174115 - DNA, 1251 bp, Saccharomyces pastorianus
atggatgacaaaagtgaaattatgaaagacgaagaaagcataattatttcacggggagattctacaagctctcaagaatatggaaacgggttagagccacaacaaccggtaggaaatgttgttggtgaagatattgaactggctgtgggaacacgtataaatgcattttcactgacagattataaagcttgcaaacctatgtctgttgaggtaagtagaagatgcgaaaacagtacggataatgattatgacaatatttctattgtctcagatactacagatgagacatccacattgtttccactagaccagtatcgatatgttttcattgaaaatgatgaaagaccaccattagccaccgacacgataggcagcacacagtttttcactccaaacacatcgcctttggatgggataatcgatttaacacaggaatcattcaaagctgttcgatcgttaatatcacctttgaaagtcgaaaacaacaaaacaggggtaacatcacaagcatcaaatcaggttcaggtaccagctacaagaacccctacaattattcctcaaaagaaccttactacaactttaaaaactgaagaagaaaagaataacataggaagttccatcagagttaaattattgcaagaaagcgtagttaagctaaaccccaaactggtgaaacataacttttatagagttgaggcaaatgattctgaagaagaggacacagaatttgatgaccaattctgcattgctgatatccaattggtagattcctccaaaatttcgactaaagattctacacaaaatcctactactagcaacgacattattgatacctctgcagctagttccatagcttctcccgagaaattttgtgagatcatgatgtcccaatcaatgaaagagcttcgacaaagcttgaaaacagtggggttgaaacctatgaggacgaaggttgaaatcattcaatccttacaaactgcatctcaaattctgtccacagctaatccagataataaaggtgagcatggtggggtggcaaaattcagtaagatagaaatatttgatcatttaaccgaactaattgaagccttccctgattttttggagcgaatatatacctttgaacccattccgctaaatgagctaattgaaaagctgttcagcgccgagccatttgtttcgcaaatcgacgaaatgaccatcagagaatgggccgatgttcaaggaatatgtctgagaaacgataaaaag

SEQ ID NO: 174116 - DNA, 582 bp, Saccharomyces pastorianus
atgttcaatcgttttaacaaattccaagctgctgtagctttggccctactctctcgcggcgctctcggtgactcttacaccaatagcacctcctccgcagacttgagttctatcacttccgtctcgtcagctagtgcaagtgccaccgcctccgactcactttcttccagtgacggtaccgtttatttgccatccacaacaattagcggtgatctcacagttactggtaaagtaattgcaaccgaggccgtggaagtcgctgccggtggtaagttgactttacttgacggtgaaaaatacgtcttctcatctgatctaaaagttcacggtgatttggttgtcgaaaagtctgaagcaagctacgaaggtaccgcgttcgacgtttctggcgagacttttgaagtttccggtaacttcagtgctgaagaaactggcgctgtctccgcatctatctattcattcacacctagctcgttcaagagcagcggtgacatttctttgagtttgtcaaaggccaagaagggtgaagtcaccttttctttgtcaaatgctattctcaacggtggttctgtttccggtttg

SEQ ID NO: 174117 - DNA, 1242 bp, Saccharomyces pastorianus
ttggaacaacttctctactttttagacctactattttggttatccgagatttatgggttcgaaaaagttctgaatgttgcagtccatttcgttttcataattggtttatcaagatgggaattttatgtaggcctcgacgaagcctttgctgagcgaagaagaaacctttggtggaaagcttattatttcgaaaaaacacttgcatctaaattgggctttccttcaaatattgatgactctaaaattaattgtttgttacctaaggatttcagagatgctggatttttggataatagagatttcattgaaaatgtttgttcagtgcatagaaatgacacttttgataacatgtccatatccgatttaaaatactatggggaattggccattttacagattgttagcaatttttcatcatctgtcttgtttaatgagaaatttacatcaattagaaacacttcaaaaccaactgttgtaagagaaaaattactcttcgatgttcttgcgacttttaaagaaacagaattaaaatttgatgccatcaaggagcaaactggcaagctatttgatattgcattttcggaagatactgctaaatttaaagtttcaagggaggataaaattatagcttcaagatttgttttattttatgagcatcatttttgcagaatggttaatgaatctgataacgtcgttgccagactatgcgctgatcgaaaactcacactgttacttgaaaacttaaagatatatcttcataagatctacaaatcgtggactgatatgaataagatcctgttggcgtttgacaatgactattttgtgtaccgttcgtttgctcattattctattagttgcatcattttagtatcacaggcattttctgtagccgagtttatcaatatgaacgatgttttgaatatgatcagagtattcaaaaggtttcttaacattaggatattctcagaaaatgaaaaaaaagaacatgtctctaacagccaaagcttcaaagattacaccagagcgttttccttcttgacaatcgtcactcgtattatgcttttggcgtatggcgaatcttcgagtaccaacctggatgctctctcaaaatacgtcgaagaaagtgctccagatttgaaaggaataatagagctcgttttggataccaattcctgcgcttatcgatttttactagaaccagtacagaagtcagggttccatctaactgtctcacaaatgtta

SEQ ID NO: 174118 - DNA, 753 bp, Saccharomyces pastorianus
atgatgaacaaagaagttatggccaagactgcccaattatctcaatttgatgaagaattatacaaagtcattgacggtgatgatgaaaaatatttgatcgctacttctgaacaacctatttccgcttaccacagtggtgaatggtttgaaaagccacaagagcaattgccaatccattacgctggttactcttcttgtttccgtagagaagctggttcccatggtaaggacgcttggggtatcttcagagttcatgcttttgaaaaaattgaacaatttgtcataaccgaacctgaaaaatcttgggaagagtttgaaaagatgatctcttactctgaagaattctacaagtcattaaagttgccataccgtatcgttggtattgtctctggtgaattaaacaatgccgcagccaagaagtacgatttggaagcttggttcccataccaaaaggagtacaaaggactggtctcttgttcaaactgtaccgactaccaatccagaaacttggaaatcagatgtggtataaagaaaatgggtgacagagaaaagaaatacgtccattgtttgaactctaccttggctgctacccaaagagctttgtgttgtgttctagaaaactaccaaactgaagatggtttagttgttccagaagtcttgagaaagtacattccaggtgaaccagaattcttgccatttatcaacgagctcccaaagaactctacttctagtaaagacaagaaaaagaaaaat

SEQ ID NO: 174119 - DNA, 2925 bp, Saccharomyces pastorianus
tataattatttattctcggcggccttagccttcctggcgctaactgatgcagcatccgctagtacagaagcgtgtttgccaacgaatgagaggaaaaacgggatgaatatcaacttttacgagtatgcattaggtgacgaatccacatacactgatcctacatatatggcttctggatacgcaaatacgaaaaaattaggctctgttagtggtcagacggatctttcgatttactataacactccttgtgatacctataactcatgtaatgatcccacccctgttaccgagatggcacttatgaagcgttacgatgaaaactgtcccaccgaaaccgaaccggtctacgctagtataaaacgtgacacagacgattgcgaccgagatgctgcttattggagttcagatctatttggcttctatactactccaacaaacgtgaccatagaaatgacaggctacttcttaccaccagaagatggttcttacacattcacctttccaatggtggatgactcagcaattttatcaattgggggtgacactgcatttggatgttgtgcacaagaggaactgcctgccacatcaactgatttcacagtcgatggtgttggaaaacagtttgggtatgtggaagggtcaaaatacatgtatgctggttattactacccaatgaaaatagttttttcgaatgctaattcttcagctacacttccaattggcatgacattgccaaacggtagtactatttacgataactatgaaggatacgtctattcttttgacaataacctggcccaagcgaattgtgatgttacgaatcccgaaaacaacacaattactggcattctgacaaccacaacggaaccatggactggtgtgtatacaacgacagacactaagacatctactatcacaggactcaatagtttaccaacggttgaaaccataattgaagttaaaacaccaaccggcgtcagctcatccagtgtcccatctactgaggtcacaacgggatccaccacatcctctactccggtcacaaccattagttctactacctcatccaatgtaactagctccgttgccacatcctctgctgtctccagttctgttgtctccagttttgttgtctcaagttctgcttccacatcctccgacgagaccagctctgcttcaagctctactgtcacttcttctgacgtaaccagttctgctgtttcatcctctgtagtgacaagttctgcaacctctactccagccacgatcattagttcaattaactcgtctaatgtaactagctccgttgttacatcttctgctgtctccagctcagttgccacatcttctgacgtgaccagctctgcttcaagctctactatcacttcttctgacgtaaccagttctgctgtttcatcctctgtagtgacaagttctgcaacctctactccggtcacaaccattagttctactacctcatccaatgtaactagctccgttgcctcatcttctgctgtctccagttcagttgtctcatcttctgctgtctccagttcagttgtctcatcttctgctgtctccagttcagttgtctcgtcttccgatgtgactagttcgggctcttcgaggttttctaagtcatctaaaacatccactgctccatccacatattcaactgctactccaatctatcctatgaatcaaactgtagttaccagttccgcttcctctacactggctacgtctggatcatccatattgcttgagtcatccagatcatctactataggcccaattttccgcactgtttcggaatcgtctgctggttcagctgttagcactgccacatccgcagacccagccgttagttcttctacatcatccgctgatccaacaaccagctcctccacatcatctgctaacccaactgttagctcttccggaccatctgctgacccaaccattagttctttcactacaggctccgaggatcatgaatctacagtttcttctacttccgctagaaccagctcagcttctaactcttctgataatcaatccaagattattagcacctctaccatttattccaacaattttgaaactaccactgtttctgcttcaatctcttccaagtcgccaagttctcatagtttattgtctatctcgtctactccagctatcactgataccaaatcatccggtatgaaaactgaaaccacgagttctgctattgggtctactccatctagtatgaaaactgaagttattacttcttcctctgcttcatctttcaagggacaggaaactactagcgaagacgctacttctgcatcttaccgcgatcgtactactattgaaaaagtgacttctgctgtcacaacaggcgaaaaaacttctttgattacagttactttctgtgagtctggcgtctgttctgagactgccacttctgctatcttttctaccgccacgaccactgtcagtggcgttgctacggaatacactacgtggtgtcctgtttccactaataaaccaacaaagcaaactactttagttacagttacttcttgtgagtctggtgtctgctccgaaactgcctctcctgccatcgtttctacagccacaactgtcgtcaatgacgctgttacagcatacaccacatggtgcccattaacaaccaatagagtgacggttagcgcaagtactaccactggcgttactgataactctgtcaaccccgaagctgctgaaacgaaaaccgtgacccacagcaacgacgtgccttcgatttcagaatctggtcatgctgaagcacatccaactaccatggctgatgcgattggccatagcagtagcgtgccttcggtttcagggactgctaataccaagggctttgcaagttccaacttgaacactgcctac

SEQ ID NO: 174120 - DNA, 225 bp, Saccharomyces pastorianus
atgccaattataggggtgccggggtgccttatgaaacccttttccgtgcctgtgaagtttccgctttcggtcaaaaagaatatccgaattttagatttggacccttgttcagaagcttattgtctaagcctaaattcagtctgctttaaacggcttccgcggaagaagtatttccatctcttgaattcgtacaacattaaacgtgtgttgggagtcgtatactgt

SEQ ID NO: 174121 - DNA, 90 bp, Saccharomyces pastorianus
gcgttattagcacggtgccttaaccaactgggccaagagaccatgaaaactgtttgggggattggacgttctagattacataccaaaagt

SEQ ID NO: 174122 - DNA, 219 bp, Saccharomyces pastorianus
caattcaaaaacatcgtcgctgttctagccacagtcactgctatacaagctgccaactcgactaccagtccaaacaacactattccaaacaacaccacccctaacaacaccactcccaacgtgaccacgaccgtctcgaccggggccgccgttgccaactccatggcagctggtgttttcggcgcagccattgctgccggtgtagccttcttgttctaa

SEQ ID NO: 174123 - DNA, 1623 bp, Saccharomyces pastorianus
tcggttttagaggcctccactaagatgtccacttctccaagtgggaaagaggaagtcaagcaaactcctgaagtaagagaacttagtccggatataccaaacaagcccatcattgcttactggacggtaatgtgtctctgtctcatgattgcctttggggggttcatctttggttgggatacaggaaccatttccggatttatcaaccaaactgacttcaagagaaggtttggccaagagcagagagacggcagctatcaactatcggacgttagaacagggttgattgttggtatctttaatataggttgtgcagtgggagggttaacactaggacgcttaggtgacatttatgggcgtagaattggcttgatgtgcgttatcctggtgtacatagttggaattgtcatccagatcgcttctattgacaagtggtaccaatactttattggtaggatcgtttctggaatgggtgttggcggtgttgctgtattgtctccaactttaatttcagagatttctccaaaacacttaagaggcacttgcatctctttctaccagttgatgattactcttggtatattcttaggctactgtaccaactacggtactaagaagtattccaactccattcaatggagagttcccttggggttgtgcttcgcatgggccatcttcatgatagttggaatggttatggttccagaatcgccaagatttttagtcgagaaggggagatatgaagaagcaagaagatctttagcaaagtcaaataaggtcacagttaccgaccccggtgtggtttcagaggttgacgcaataactgctaatatggaagcggagagggctgctgggaacgcaagctggagcgaactgttctcaaacaagggagcaattttaccaagagtcattatgggagtcgtcattcagtccttacaacaacttactggctgcaactactttttttactacggtaccaccattttcaacgcagttggaatggaagactctttcgagacgtccattgtgctcgggattgtcaactttgcatccacctttgttgcgctatacatcgtcgataaatttggacgccggaagtgtttattgtgggggtctgcatcaatggccatctgttttgtcatatttgccacagtcggtgtcacaagattatggccacatggaaaagaccagccatcgtcgcaaagcgcaggtaatgtcatgattgtttttacgtgttttttcattttctgttttgctattacttgggccccaatttcctacgtcattgtagcagaaagttacccattaagagtgaggaatcgtgctatggctattgcagttggagcaaactggatgtggggctttttgatcggctttttcacaccctttattactagagccataggtttctcttatggctacgttttcatgggctgtttaatcttttcctacttttatgttttcttctttgtttgtgagacaaagggactaactctagaagaagtcaacgaaatgtatgaagagaggataaagccatggaagtctggcgactgggtaccaagcgctaagaggttagaacaactaacagatggtaccccgctagacacagaggatattaaatag

SEQ ID NO: 174124 - DNA, 114 bp, Saccharomyces pastorianus
tccgataggcgtaagtttgaaaaagcaaactttgacgagtttgagtcggctctaaataacaaaaacgacttggtacattgtccctcaataactttatttgaatcgttcctttag

SEQ ID NO: 174125 - DNA, 81 bp, Saccharomyces pastorianus
gatcaagctgtcgatcatattacaaacgcttggcatgttccagtaacagcacagattacagagaagcaactgaatcaatta

SEQ ID NO: 174126 - DNA, 234 bp, Saccharomyces pastorianus
gtagtggaagaggtagtggaagaggtagtagaggaggtagtagaagaggtagtggaagaggtagtagaagaggtggtagaagaggtggtagaagaggtggtagaagaggtagtagaggaagtcgaggaagaggttgttgaagtggtagaaattgtcgtggctatcatttcagaacttttcatatctgttgacgttctcctagtagttgaagaaatttgggcggaggacaatgaa

SEQ ID NO: 174127 - DNA, 531 bp, Saccharomyces pastorianus
gtttttaatatcctcctcagcactttttttcgactgtctaatttttcatctgatttccttatggtttccattgaggatttcaactccgtttcattgctctcaatcgtactctctagctttttcatcatttctttagacttttcaagctctgctttctcttttgaagattcttcctcaagttttttcagcccttcttcaactttagctttggattcttgtgcagcccgcagctgttctttcaagctctccaggtctcgtttactatctcgctctattgatagaagcttttcgtcatttctagttattttgtctttatatgaaagaatttcatcttgtaagctttttattgtgttttgtttctcttctaaaagctcatcattgcttaaactaaccttctctagttcactcctcgtattatcgatctctttggcttttaattcgttttcattttgtagcctaattaattcatcttccaaagtattgatcttttcagaatattcttgtgtaattgttgaagatccttcattaagt

SEQ ID NO: 174128 - DNA, 246 bp, Saccharomyces pastorianus
gaagcgctttctaatattatttttggacgttatgacggaactttatctgctgcgaagttagttgatctatgtaaaaaagccagaattttgcagtatgctgatagagagattgacttaataaagttaatttgtaaactagtaaagtgttcagtatcagaagccagaagaaaactttcccagggaagcgtgtatctgcatcattcaaaatctaaagtaaacgaaaatatttctaacttccttagatga

SEQ ID NO: 174129 - DNA, 126 bp, Saccharomyces pastorianus
atggatatggaaatcgaagattcaagccccatagatgacctgaagttacaaaaactggataccaatgtttattttggaccctgtgagatattgacacaacctatacttttgcaatatgaaaatatt

SEQ ID NO: 174130 - DNA, 447 bp, Saccharomyces pastorianus
atgcatgataataatggtgctgacctagacgataaggattacggttctgaagatgaagctgtgtctaggagcatcaacactcaaggcgagaacgattattatcaacaggttcagagaggtaaacaagacaagaaaatatctcgtaaagaggctcataagaatgctgttattgctgcaagggaaggaaaattggcggaattggctgaaaatgtctcaggtgatggtaagcgtgccattaattatcaaattttaaagaacaagggtctaacgcctaaaagaaacaaggataacagaaactctcgtgtcaagaagagaaagaaataccaaaaggcacaaaagaaactcaagtcggttcgtgcagtttattctggtggtcaatctggcgtctatgaaggtgaaaagacaggtatcaagaagggtttgacgaggtctgttaaattcaagaat

SEQ ID NO: 174131 - DNA, 447 bp, Saccharomyces pastorianus
atgaatgaacaccaggaaattgttgagaaacttcagaatcaggctttgattgcttcaagattgagcactcaaattcaagagtcagaacacacacataagaaaattactgacgagttagctggaaaacaaagtgaaatattaaaactcgaagaaacaattctatcactaaaagaagatgtattccaagagaagctgaatttaaaaaaactatatggtgatccttctaccgaacttaattttgaaactgttggaaaatcttttccacatataacgaaggaaaagtacgactccttgggtcttgatattctgacagaccttacctatgtgcaatcgcaaaatctaatcaaaaatttattaattgtgttggatatcccattaaaaaccttcttaaaaattgtaccaacaattgtcattcaacttagatgtgagcttacacttctcacaaaa

SEQ ID NO: 174132 - DNA, 612 bp, Saccharomyces pastorianus
atgcctggaaatgactcatcgcactctgatcacaataaaaatatcgctaatctaaagaactctctaataggcaatcagtcaaagggtacagaatacagaaaatcattaattccatattctccttcacaagaacagctccatttggataccgttctccccagcacctcaccaacgtcccaaatcaagtttgccaactcagtcaagcacaaagatgggagagctgcccttggcaaagtcaaaaacctagcagatatggaacatactaggtcttttgaagaagagaatttaaccactgacctgcccgataatagaagtagtgtcgataatgacatttcgttaagaaaagttaaaagcactggcacactgagaaaagtcaaaagcaacgactcttccagtagttctggctctagaaaaagctcatccagttataccaccgcaaatgcttttactggtggcggggttggaatctttagggtgtttaaaagtggaagttcctctgggaacaaatcatctagtaatagaagaagaagtaccggcagtgacgttttagataacagtgatcgtagcggcaagaaaaagaagaaaaagaaaaagtcattgttttccgtttgg

SEQ ID NO: 174133 - DNA, 120 bp, Saccharomyces pastorianus
tggaaaactttggggagagttgaacaactgcttccatgtgccagcctcattttgcgtaatcgagaagttttgttcagagagccaaagcgaggaattgacgagtacgattctttcttttaa

SEQ ID NO: 174134 - DNA, 63 bp, Saccharomyces pastorianus
atgcacccacatcattatgcacggcacttgcctcagcggtctataccctgtgccatttaccca

SEQ ID NO: 174135 - DNA, 243 bp, Saccharomyces pastorianus
tgtacacaacatgagaaatgggtaaatgatgagataattgttgggattccattgttgataaaggctataatattaggtatacagaatatactagaagttctcctcgaggatataggaatcctcaaaatggaatctatatttctacatactaatattacgattattcctcattccgttttatatgtttcattatcctattacattatcaatccttgcacttcagcttcctctaacatcgatgac

SEQ ID NO: 174136 - DNA, 99 bp, Saccharomyces pastorianus
atggaatctatatttctacatactaatattacgattattcctcattccgtttcatatgtctcattatcctattacattatcaatccttgcacttcaagt

SEQ ID NO: 174137 - DNA, 525 bp, Saccharomyces pastorianus
ctatacgcttctaagttattcagcaatctttttggcaacaaagagatgcgtatacttatggttggtctagatggtgccggtaagaccaccgttttgtacaagttgaagttgggcgaagttatcactaccattccaaccattggtttcaacgttgagactgtccaatataagaacatttccttcactgtctgggacgtcggtggacaagacaggattagatctttatggagacactactacagaaacaccgaaggtgttatttttgtcatcgattccaacgatagatcgcgtattggtgaagccagagaagtcatgcagagaatgctgaatgaagatgaattgagaaatgctgtctggttagtcttcgctaacaaacaagatttgccagaagccatgtctgctgctgaaatcaccgaaaaattaggtttacattctattagaaaccgtccatggtttatccagtctacttgtgcaacctcgggtgaaggtctgtacgaaggtctggagtggttaagcaacacttga

SEQ ID NO: 174138 - DNA, 249 bp, Saccharomyces pastorianus
atgaaggaaacaatttacaaagtcctcgtaagtttttatcaatatgtcggtttaggtaaaaagttccatcctagccatgatacagtattaatcattggcggttcttcaaatgagttaggcatcgagctctgcgagacatttatagaagattatcatacaaaggttataaatattgacactatagacagtattaatggaaaaaacgcaaggagaagtgaaaaactgtatacttttatttcttgcaaagat

SEQ ID NO: 174139 - DNA, 369 bp, Saccharomyces pastorianus
tgtcctgtcgaatttcccaagatagtctctggattcgctgaggaagtgaaaatacgtagacaaagttcccaaggacagtacgccgtcgattcacatcctccgaaaagccctgaactgaaacacagaagacagaggtcatcctcttttgttaacggtaaatgcaggaacagggaccttacattgttagataacaagaaagcacaagaaataaacaccaattcacacggccaagacatcggtatcaaaaacttaccaagtcaacgtgagttgttgaatgccaaaaatggaattgattttacgctgatggtggcgggtcaaagtggattgggtaaaaccagacctgcaggcatgcaagcttgcactgccgtc

SEQ ID NO: 174140 - DNA, 168 bp, Saccharomyces pastorianus
tatttgtatgagaggagagtttacgggaatttggcgtatttctttgaagatgacatatgtggtccctcatcttcagagaaacctgtgtctcagttaccattgcattttgaactatggccatatattgaagaagcgcaatcagcctgtggcgatgaatcgttagcgtag

SEQ ID NO: 174141 - DNA, 135 bp, Saccharomyces pastorianus
atggctcatagcgccatctcacatgttccgaaaatttcagctttaagcaatgaaatacaaactgaagtctcacattccggtgaaaaaaactcaagttcaaatcaccatcctcatttccatcatcagcatgggaag

SEQ ID NO: 174142 - DNA, 165 bp, Saccharomyces pastorianus
atgatgataataatatttatagaattgtgtagaattgcagattcccttttatggattcctaaatcctcgaggagaacttctagtacattctacatacctaatattattgccttattaaaaatggaatcccaacaattatctcaaaattcacccactcttcactta

SEQ ID NO: 174143 - DNA, 1212 bp, Saccharomyces pastorianus
atgtgtaatatagagaccctgcggtttatttctttgtggaaatattaccaatttgtgatggacacgtcgtcttcgtcctctttcgtaattgattacgacgaagatatgcatatggcatgtttactatcgttaaatcatgaaactcaaaatcaatctcatattttgacctggaatttcatatttaagaactactgctggagacaccttttcttaggtcaattgccgttgctaatgtctgaacctttcacaaattctaccccaattattgatcctttgttgaacaacgattttgaattgattgattttgaagtaaacttgatgaaatatttgcaaagtaaagatcaacaactatccattgataaaattatacagttaatcaagcttttgaaaaataagaatatcgaggtcagccaaggatgtttaacgactccttcaataattaataatattatggattctctaatctacaggaattcaatgttatatttgaacttttacctcttattgcaatttgagacattgaaaaattatgctaaatttaacgaaattttggaagactttttggagttgtcgagggagaccttgttctttgttttctcgaacttagccaatattaaatttgctggtcatgaattcacattcatcaataaatctattgtggttctgcaaactttagttttaatgcttttggcgctctatcaaaggtcttttgattcttcaaagaggacgaatgatgctaatgaaatcagtgagcaaacagatattcatagtaataacgacaatagtaagagaataaagaataaaaatgttattcatttaattatcaacaaaattgcaatgttgttaagtgattataccaagaattgtaaaaagcaaaataaactcatcgaaaatctgattattaaaattaagacaatctccaagtatatcaaaaatcttgaggagaataaggtaacgactagcgccgattcaaagtattccattaataacggattttctggcatatctgcagagcagttgattaaattaaatcacgagttgagtaaaatttcagaatctctgataaaaacggatttttatgaacagaggaaaaatagcacagtttctaatggagttttaggcgctgcagctcctgttgatagcgacgcaaattcggatactttcggtttaacaaaggagaatttcaacgaagtttttgaggctattcgtagc

SEQ ID NO: 174144 - DNA, 135 bp, Saccharomyces pastorianus
gaaaccctacccgttatccagagcttcagctactcgctttgccgggtcctcagcgcaacgtatacgtcgatgatacaacaagacgcatccaactgtacactgattacaacaagaacggttcatcggagcctcgag

SEQ ID NO: 174145 - DNA, 186 bp, Saccharomyces pastorianus
agcagcagcagcagcagcagcgacaacaacaacaacaacaacaacaacaacatcagcagcagcagcagcagcaacaacaacaacaacaacagcaacaacatcaacagcagcagcaacagcagcaacaacagcagcagcaacatcagcaacagcatcagttgcaggctttaccaagacaacaacagc

SEQ ID NO: 174146 - DNA, 1038 bp, Saccharomyces pastorianus
aaagatggagaagcttctagcaatcattccttatttaataattgcaatttaaagcagtatcagacatttggcacaatgaacacgaaatcacttcaattttacgaaccatacgaggttgaaggtcaaaaatacattaaaatggctgagaagaaggaccttggggtatatgagcctggattaacacaggatgcattcactgccaaggacaggtttgattacaaaggaattatagaaagtatagaaaaatatgggctctgtgtagtcccaaacttcatagaaccatccaaatgtgatcagatattggaggagcttggtccccatttctacaggcacgacgcatggcaaggttctccatttccaaaggaaactacggtagtaacaagggcggtcctccactcgcctaccgtcttgaaggatgttgtatctgaccgtctgttttgcaatatggcaaaccattttgtaaatgagaaaaattacttcatgaccggaaatgtcattaggaagtgttcaagtggtgttcagctgaactccggcattgtctacaaggttggtgctggcactggtgaccaaggctatcatcgagaagaccacatccatcataccattcaccaagcatgtgaccatttcaaatatggaaaggaaacgctacttggagtaggagttgcttttacagatatgaacaaggctaatggagctacacgtgtaattgttggttcccatttgtggggcccacacgattcgtgtgggaagtttgacaagaggatggagtttcatgtaaatgctcgcaagggtgacgcggttttattcttgggcagtctttaccatgctgcaagtgcgaaccatactctagaagatagaattgcgggatatttctttatgtcacagggttacttaaaacaagaggagaatcttcacttcgggacagaccctaaagtcttcaaagctatgtcactagacactttgcaactcttgggattgaaaactagtgagccatattgcggtcacatagactacaaaagtccaggacatcttgcgaac

SEQ ID NO: 174147 - DNA, 198 bp, Saccharomyces pastorianus
cctcaccgtcatcgtcatcgtcatcgtcctcactatcatcgtcctcactatcatcgtcctcaccgtcatcgtcatcgtcaccgtcctcactatcatcatcatcatcctcagtgttaccgtcatcatcctcagagtcctcatcggtatcatcatcttcattgtcctcaccatttcccacctcttcactttgttgatctg

SEQ ID NO: 174148 - DNA, 324 bp, Saccharomyces pastorianus
atgtggacaaacactttcaaatggtgcagcaaaactgagaaggagaccactactgcagacgccaaggtgtgtgctagcgtgcagggcctgaaggccctgcagcagcagattatggatagcaccactgtgcgtgggtccgttaataacacgatgactccaggcgggattaaccagtggcatttccacaataagcgtgcgaacaaagtgtgcacgcctacagtactaatccatgggtacgctgcctcgtcgatggcgttctacaggacgtttgagaacctgtcagacaacattaaagatctatatgccatcgacctgccagccaat

SEQ ID NO: 174149 - DNA, 105 bp, Saccharomyces pastorianus
aaggatgtaatggcaacaacaataaatgagctgagtgttacgcaaaaaggacttataatgggagtacaagaagaactattaacgtcatcagggatattcaactga

SEQ ID NO: 174150 - DNA, 237 bp, Saccharomyces pastorianus
caaatcaaaaacattgtcgctgttctagctacagtcactgctatcaacgcccaagttggcattgaacctaacgccactactccaaatgctacgcagccaaatgctacgcagccaaatactactcttcctaccgcttcggtgactacgacagtttcgattggcgaagccgtagttaataccatggcggcgggtgcctttggagcagcaatcgctgccggtgttgccttcttattctag

SEQ ID NO: 174151 - DNA, 165 bp, Saccharomyces pastorianus
ataagtacactttttctgtgcttcattatcgtagcgataggtatatcactcatcgtaagtgtggacgtagcgatggaggtttctgtgccattaccaccacaaccattctactcttgtagtgatgccgccaacgtggaattatgtggtatcgttgttatctgccgt

SEQ ID NO: 174152 - DNA, 282 bp, Saccharomyces pastorianus
acgaataaaatttgtaagcacctgatccaatccttattattgagcaagagacgtcttgtttctgtactctttgataactatcaaggcgacatgaaactaaggtcatctccatctgccattcctctagttccgtcaacgaaaattcttcaagctatggaggcccggaacgacattgttgacagtctgatcatcaatagtcacgcaacggaaagtgatcgccggactttaggagaccatgaggttagacaatgtgaggataccaacttcggcttcaaaatttga

SEQ ID NO: 174153 - DNA, 201 bp, Saccharomyces pastorianus
gcggaaggcgccaaggtcgtcgtcaacgatcccggcgtggccgccgacggcgcgggcaccagcgcggcgcctgccgaggaagtggtcgaggagatcaagaagcgcggcggcacggccgttgccaatttcgagtccgtcgccgaagcgatcccggcgagcaagatcgtaaaggccgcgaccgaccatttcgggactctagag

SEQ ID NO: 174154 - DNA, 276 bp, Saccharomyces pastorianus
tatataccactctcaaacttaccctactctcacattccactccatgacccatctctcaccatcagtaccaaatgcattcgcatcattatgcacggcacttgcctcagcggtctataccctgtgccatttacccataaagcccatcattatccacattttaatatctatatctcattcggcggccccaaatattgtataactgcaccatatactaaccactcaatttatacacacttatgtcaatataaccacaaaatcaccaccaaaatcacctaa

SEQ ID NO: 174155 - DNA, 351 bp, Saccharomyces pastorianus
gatatccttagaaaaataattattccaaagaggaatacaaatatttactccagttcagtgtcctcaccaaagtcaccaaaagcatatcctaaactaccagatattcagaatttaaacttttctgcaacacctgatgaagctcgcgattggattgcggtaaaatgtcacttgaacagagcaaggactcttaccaaatatgacaaacatccgaggtacatgagagctctcgaagaaaatcgcgacttgatcttacatcctcaagattcgatttataacgggctaaataccaatgaagtcaaaggtaatacaaagcccggtttggtcgatgtggaactggccgaattaacatag

SEQ ID NO: 174156 - DNA, 252 bp, Saccharomyces pastorianus
atgcacggcgcttgcctcagcggtctataccctgtgccatttacccataaagcccatcattatccacattttaatatctatatctcattcggcggccccaaatattgtataactgctcttaatacatacgttatacctctttttcaccgtatactaaccactcaatttatatacacttatgccaatattacaaaaaaatcaccactaaaatcacctaaacataaaaatattctatccttcaacaataataca

SEQ ID NO: 174157 - DNA, 114 bp, Saccharomyces pastorianus
ccagcagcgattgaagttaatttgaccatggtatttgttttgtttgttagtgctgatgtaatcttaacaagaaatagtgaaatgaaagcgcatacctcaaaggcatatagttga

SEQ ID NO: 174158 - DNA, 96 bp, Saccharomyces pastorianus; identical to SEQ ID NO: 173641

SEQ ID NO: 174159 - DNA, 99 bp, Saccharomyces pastorianus
atggccttggtctctagaaggtcgacaagatcggaaagcacctcaattacaaaggaagagcatacaggagaaggttcattgaccaaggtgttcttccgt

SEQ ID NO: 174160 - DNA, 132 bp, Saccharomyces pastorianus
ttttatggaagcttcaataaatgcgtgactggctatagttgtcggatggcaatccattattatgtataccgtattattaagagtgcaactaggcccgactataaatctaacactcagatccttgtactgtaa

SEQ ID NO: 174161 - DNA, 189 bp, Saccharomyces pastorianus
tcgcttaaaacgttactgtgtacgttgttgactgtgtcatcagtactcgctaccccagtccctgcaagagacccttcttccattcaatttgttcatgaggagaacaagaaaagatactacgactatgaccacggttccctcggagaaccaatccgtggtgtcaacattggtggttggttactttcttga

SEQ ID NO: 174162 - DNA, 768 bp, Saccharomyces pastorianus
atgtacattgaaaaggtcattgtaactgattattctaccggtaaaaagtacacatatggtgaccaatctggttcttgggaatctattgaagctgacggtggttctatttacggcaggtatgaccaagcccaagaagatttcgcagttttagccaacggtggtagtatttccagcagctctacatcctcttctactgtatcttcctcggcgtcttccaccgtgtcttccactgtgtcttcctcggtttcttccactgtatcttcttcgtcttctgtatcttcctcttcatccacatctccatcttcttcgaccgctacttcatctaaaacacttgcttcctcatcagccaccacatctagttccattagttcactcgaaaagcaatcctcctcttcatccaagaaaacagtggcttcctcttctacaagtgagtccattatttcctccactaagacccctgccactgtttcctctacccctgccactgtctcctctaccactaggtctacagttgccccaactacccaacaatcttccgtatcatcggacagtcctgtacaagataagggtggtgtcgcaacatcaagtaatgacgtgaccagttctactacccaaatatcaagcaaatacacatctacaatccaaagttcttcctccgaagccagctcgacaaactctgttcaaatttctaacggtgctgatttagctcagagtttaccaagagaggggaaacttttttccgtactcgtagctttactagccttgcta

SEQ ID NO: 174163 - DNA, 150 bp, Saccharomyces pastorianus
cacacggatgctacagtatataccactctcaaacttaccctactctcactttccactccatcacccatctctcaccatcagtaccaaatgcactcgcatcattatgcacggcacttgcctcagcggtctataccctgtgccatttaccca

SEQ ID NO: 174164 - DNA, 1641 bp, Saccharomyces pastorianus
ggttgtccaggacacgataaccgagattttgagttttggcaaacaaattgtcctggtgaacatatcaagacgtgcatagcacctttttttgacgatgcttcaaaagtaactgaacaggaaagacaaagaataattgatactgtcccgttcacatctactgacggtgtcctaaccaaagaatgcggagaacactcaggagttctcgctgcagtggcaaggaaatcgataatggggatgttgaatagcgaaggactgtctaagagcgtcgttagatacaagattagagattggctgataagtagacaaagatactggggtactccaatacccatcattcactgcgacaactgtggacctgtccccgttccagaaagtgatctacctgtcaagctaccagaacttgaaggcttggatacaaaagggaatccgctgtcaacaatcgatgaatttgtaaatgttgcctgtccttcgtgcgggagccctgcgaaaagagaaactgacaccatggatacttttatcgatagttcttggtattatttcagattcttggatcccaaaaacacttcaaaaccatttgatcgtgaaattgcaagtaaaaatatgccggttgatatttatattggtggagtagaacatgctatcttacacttgttatactcaaggtttattgctaaatttctcggatctatcaatgcatggagcgaccctgctggcatcttcgaaccattcaaaaaactggtgacacaaggaatggttcaagggaaaacctatgttgaccccgattctggtaaatttttgaagcctgacgagttaacctttgtaaatgactctccagatggcaacacagtgattattaaatcaaatggcaaggttccggtagtctcttatgaaaaaatgtcgaaatctaaatacaatggtgcagatccaaatgaatgtattttaagacatggacctgatgctacgagagcacatatcctcttccaaagtccaattgcagatgccctgaattgggatgaatccaagattgttggtatagaacgttggttgcagaaggttcttcatttgaccaaaaatattctcagtctcgagaaggatttggcaataagtaaagactacaagaccccgaccgacttaaatgatgcagaagtgaaatttcacaacgatttccaacgcttcttgaaatcaattacggaatcatttgaagttaatctatcgttaaacactgtaatatctgattatatgaagctaaccaatattttagaaagtgcattgaaaaaaggtgaagtaaggaatgaaatgatagtacagaatttacaaaagttggtaaccgttatatatcctgctgtcccgtcaatttcagaagaagctgcagagatgatcaactcccaaatggaatggaaccaataccgctggccagaagttgagcgcactactgagtccaaattcaaaaagtttcaaattgtggtaaatggcagagtcaaattcatgtacacggctgacaaaaactttttgaaattaggtagggatgctgttattgaaactttgatgaacttaccggaagggagaatgtatttgatgaataaaaaaatcaaaaaatttgtcatgaaattcaatgtgattagtttcttattccacaagtaa

SEQ ID NO: 174165 - DNA, 612 bp, Saccharomyces pastorianus
tcagcaaaagatcatccgaaggtgaaagaaatcaagactgttgtgctggtacctcaattaggccacgtaggatccgttcagataagcaacatccctgacatcggagaccttccggatactgaaggccttgaactactcggttggatccatacccagacagaagaacttaaattcatggctgcgtctgaggtagcaactcattctaaactttttgcggataagaaaagagactgcattgatatttcaattttttccaccccgggatcagtatcattaagcgcttataacctgaccgacgaaggttaccaatggggtgaagaaaataaggatataatgaacgtgctatcggaagggtttgagcctactttcagcacgcatgcccaattacttctctctgaccgtatcacaggtaattttataattccatctggaaacgtttggaactacacatttatgggaacagcatttaaccaagaaggtgactacaattttaaatacggcattcctttggaattctataatgagatgcatcgtccagtacactttttacagtttagcgaattggcgggggacgaagagttagaggccgaacaaatcgatgtatttagctga

SEQ ID NO: 174166 - DNA, 267 bp, Saccharomyces pastorianus
cttgtcatccaattcaaccaacttagaggtgaagtgcttagattcttgctcgaaatctggatggtggtaatccaaaccaataattcttttcaagttggcgacagtgttcttgatgttggaagtctgcttgttcttaccagtttcacccaagtatctgttctttggaccaaaaccaacaacagatggggtggaacggttagagacttcattaacgacaatgtcgatacctctgtttctagcaacggccaggacagagttattgttacc

SEQ ID NO: 174167 - DNA, 126 bp, Saccharomyces pastorianus
atggaatctatatttctatatgccaatattacgattattcctcattccgttttatatgtttcattatcctattacattatcaatccttgcacttcagcttcctctaacttcgatgacagcttctca

SEQ ID NO: 174168 - DNA, 159 bp, Saccharomyces pastorianus
cgcggtcattttgttagtatctcttctcaacttgggcagcacaatttcacgatatttaacaggtatcatttgaagaaaagaatcgttttccagatactcgtcaattcctcgcttcggttctctgaacaaaacttctcgattacgcaaaatgaggttggc

SEQ ID NO: 174169 - DNA, 765 bp, Saccharomyces pastorianus
atgactttcccctacgattcccatgtcaagttcccagcatttatttggcaaacttggtccaatgatgaaggtcccgagcgtgttcaagatataaagggcatgtgggaaagcaagaatccgggctttgcgcacgaagtgttgaaccatgacgtgataaacgcactagtacaccactacttctactccataccagaaatcctagagacttacgaagctctgccctccatcatcctaaagatagattttttcaaatacttaatactgttagttcatggaggtgtttatgctgacatcgacacgttccctgttcagccaattccaaactggattcctgaagagttgtcgccatccgacattgggttgatagttggagttgaggaagacgctcaaagagctgactggagaaccaagtatatcagaagacttcagttcggtacttggattatacaagcaaaacctggccaccctgttttgagggaaatcatttctcgaattattgagaccactttacagagaaagagggacgaccaactagacgtcaatctaaggaatgatctgaatattatgagttggacgggttctgggttgtggactgacactattttcacgtatttcactgactttatgagaagtggtgtcagggagaaggttacatggaaattattccataacctaaatcaaccaaaattgctaagtgatgttctggtctttccaaaattctcctttaaatgtccaaaccaaatcgataatgacgatccacacaag

SEQ ID NO: 174170 - DNA, 663 bp, Saccharomyces pastorianus
atgctaacaattgcaaggctggggttcttttataacgaccaactttatgttaaggagaagctggaagcagtcaattctatgattgaaaaaggtggtgactgggaaagaagaaatagatataaaacatactatggtatccactgcttggccgtaagaaactttaaggaagcggcaaagttattggtcgattctctagcaactttcacctctattgaattaacttcctatgaaagcattgccacatatgcatcggtcacaggtttattcactctggaaagaacagacctaaaatccaaagtcatcgattcacctgaattgttatctttaatctcaacaactgccgcactacaatctatctcgtcgttaacaatttccctttacgcgtccgattatgccagttactttccatatcttttggaaacatatgcaaatgttttgattccatgtaaatatttgaatagacctgcagatttctttgttagagaaatgagaagaagagtctacgcacaattgttggaatcatataagactttgtcgctgaaatctatggcaagtgcatttggtgtatcggttgcgtacttggatcacgacctgggtaagtttattccaactaagcaaataaattgtgtcattgctagcgttactgggatcgtagagaccaac

SEQ ID NO: 174171 - DNA, 303 bp, Saccharomyces pastorianus
aacaacaacagcagcaacaacaacagcaacaacggcaacgacaataacagtaacaatagcaataacagttactatagtaataatgaacatgcacccgtaaatggagctgctatttcagaacatactaccgatggtgactcgaacaatcagtccaactcaagtacatatgatgctgctgccaccgcatataatggaaataccgggttgactccatacataaatactgctcagacaccactaggcactaaattctttaatttttcgactgatatttcaggagaaaaaaattcaagcaaaatataa

SEQ ID NO: 174172 - DNA, 318 bp, Saccharomyces pastorianus
ctatgttcatctgccctcgaggaaactaaaccgaactatcgattaaataagttactgaaaatattcacaacgaaagaaaaaatgtctacccttttgaagtccgctaaatctattgttccattaatggaccgtgttcttgtccaaagaattaaagcacaagcaaaaacagcttccggtctatatttgcctgaaaaaaatgttgaaaagctaaatcaagctgaagttgttgccgtaggcccaggtttcactgatgctaatggcaataaggttgttccacaggttaaagtaggtgaccaagttttgattccacagtttggc

SEQ ID NO: 174173 - DNA, 2121 bp, Saccharomyces pastorianus
agctatccgttttcagcacaactcgggtaccacatctcattgatagttgctacgataacaagattttaccatatagataaaccaaatcaagtaattttcgatgaaactcattttggtaaattcgcatcatattacttagaaaggacgtatttctttgacttacacccaccgtttgccaaattaatcatcgcattgactggatatcttttcaattacgatggaagtttcaaatttgatagtattggcgattcttatgacataccagatcatgcgccgcctttcgttgcatatcgctctttgaatgccacttgtggtgtaattactgtcggtgtggtctacaaaatcatgcagcgtttagggttcaagctattgacttgtagtactagtgctttgttggtcgcccttgataatgggcatattatccagtcaagaatcatcactttggattctatcttggttatgtgtataagtttgaccttttactcttacattagattccacaagtgccaatccagggcagcgtttacccgtgaatggtatacctggctttatcttactggtgtatcactttccctggttatatcaacgaagtatgtcggtctcatgacatacatggcaatcggaacctctgttttgagaaacttatggcgtatctcagatattgagaggaaactgagcaaaagagttgtaacaagacatttttttaagagattgaacggattaatatttggacctctcattatatatctattttggttttgggtgcatttcacaattctaaccaaatctggccccgacgatgaattcatgtcagtaagatttcaagaaacattgctcaattcagcggtaggtcacccacaactaaactatcacgatatagttgtcataaatcataaacaaacgaatacatttctccactcttgtgatgttcagtaccctttagtttatgaagatggtagggtatcaacagagggtcaacaagttacttgtcacgcattcaatgacacgaataatgaatgggaagtcatacccactaaagttttttcaccggttgataagattcagcctgttcttttgaacgatacagttcaattgaggcacgtaaagacaaatacgctattactgacacatgatgttgcttcacccttagacgctacgactgaagaggttactacagtttcctttgatgcaggtatgaacgacttttatcaggagacattatttcaattgaagcctattttatctaatgatgtgggacttaaaattagagagaaacgtacaccttttcgacttttccatattgacaccgaagtagtgctttggacacagaacgatactttgttaccggagtgggggtttgaacagcaagaagttagtggtgtgaggaaagccaggtcattcgaagacaattggattattgatcaaatcttaacggaacatgaacaggaagatcacgataatggtgacgataaattattgaaggaggtagcgttttttgacaaatggtcagaattacaaaaatctatgctgatacataacaatctgatccctaaataccatccatatgcatccgaaccatatacctggcctgcgagtgtatcaggaatatcgttctggtcagatgcttcgacaaggaggcagatatattatatcggaaacataatagggtattggtttcaaattatctcgataatgctgtactgtggtatcatcgttatggaccaattaactagaaaacgtggagttttcatcttgaaaagtaaggtcagggataagctgtatggtcctttactatttttgttcatttcgtggtcatggcattattttccattttatttgatgtcacggcaaaagttcttgtaccattacttgccagcccatttgattttgagtttatttgcacctgggttatgggaaatactattaagtgatttcaagaatgtagacaagtcaagagaggaggaacgtgacgttcaatcggaggacggtccaaaagtgaatgatacaaaattatgttgcatatttggcattttaatagccatgctatttggatttttcttttttttttcaccgttgatatatggtaatcgtggactgtcacccatgcagatacagaataga

SEQ ID NO: 174174 - DNA, 291 bp, Saccharomyces pastorianus
  modified_base (200)..(252): a, c, g, t, unknown, or other
atcaaggttgttacagaattgcgttctaaacatgagaatggtgaattgaacgatggtatatctgtcagacgatccggtactacaaacacttatgaagaacatattttacaacctgtactggttagcacaagcgcaatcactttggcttccgaatgtgttaaatcgatcctacgtattgatgatattgcattcagtcgttnnnnnnnnnnnnnnnnnnnnnnnnnnnnnnnnnnnnnnnnnnnnnnnnnnnnnatagtgtacttttctattaaacaaaaacataaaacataa

SEQ ID NO: 174175 - DNA, 174 bp, Saccharomyces pastorianus
attctcaattttctcaacagcagccatacaatccatcgatatcatccttcggccaattcgctgcgaatggattccattctaggcaaggatcagtggctagcgaggcaatgtcccccagtgcgcctgctatgtttgccagcgcatctacaaacccaacgagtaacgtacagcaag

SEQ ID NO: 174176 - DNA, 831 bp, Saccharomyces pastorianus
atgctaacctctccttacacacaagatgaaatcatcaatcatgaaatgaatttcttgaaaggcagactactggaattgcaagaaattacaggtaagaaaattacgggagtaaatcttgatctcaagcaggattcctcagcgcaaatgcagtcttcacactccaatagaaaccaagaggagtttttgacaattaagaaaagaaaactgagtgaagacggcgttacggacggggacggtaagccaattccagagagtgaaagaagacctcatcttaatgaatttaaggatttagatcctcaatttttggatactaataaagtttttaatgtgtttaattctgctatttcagaagaaggtagaaacagattatggctgttaccaaaaaatataaataaaagttctatcttccagattcagtatttgattgaacgtgatcctttcctattcaaattcttcaatgacttgaatatattaattgaaacgcaatttaatggacctttgcacgatttggtagcaagccgtaacagtattgagcgcaacagtggcatatctcaaatattaaagtttccttcacaatcgataacacagacccttatcaacaaatacttatccacgataacggaaacgaattcaatacttccaatattaaaaccaaagagactattacccatagttgagcagctttttccttctaacaccattaataagccaaattctaaagattttgaaactatttttcaagttttcagtgtgaccaatgatcagctactaaatctaggatttattactctctgtctcctgattctttttgaatcgttgaattctacggtt

SEQ ID NO: 174177 - DNA, 129 bp, Saccharomyces pastorianus
catacggatgctacagttatataccatctcagctttaccctgcccattctcactaaatcagtaaatatgcacccacatcattatgcacggcacttgcctcagcggtttataccctgtgccatttaccca

SEQ ID NO: 174178 - DNA, 84 bp, Saccharomyces pastorianus
atggtctctagcgggatcgaaccgctgatccccgcgttattagcacggtgccttaaccaactgggccaagagacctatatcttg

SEQ ID NO: 174179 - DNA, 282 bp, Saccharomyces pastorianus
ggtgagccttgcttatttttgttttgctctttcagttttttcagttcttcctttcttttcaatcgcagtgcctcctgttctagtttctgtttagctttattttccttttgcagttgtaacttctgttctttggccagttttttctgcaattgttgctttttcctctcctccattctcgttttcttggcctctgcatcgttcttccttttcagttccttttctcttttccttgaatcttgttcctcctgccatttttgttcaattttgtcattcttcagtatg

SEQ ID NO: 174180 - DNA, 387 bp, Saccharomyces pastorianus
cacgggtacgctctgcagacgatagtcgtagccaattttgaaagcccaacgggaaccaaacacaggagaaaaccaatatatgcgctcgttgtacccgtttcaaacaacggaagcaaaataaatagaagtccgccaacaaggatcataaaaaacgtaaaaataaaacttagaaaccgcagtggctatcaaacatcaatcacatatcatcaacacaaccggcttttcacgaatccacgccccagcaagacgtacggtataaaaggcgttcacgtaaacttttcatccagcaagaagaggtcctctttcatactcgcctccaattccaacaatggttctccaataccttcaagaagcagcaaaagaactccgtttctcaacacggcgtct

SEQ ID NO: 174181 - DNA, 63 bp, Saccharomyces pastorianus
cactcacatcattatgcacggcacttgcctcagcggtctataccctgtgccatttacccataa

SEQ ID NO: 174182 - DNA, 1008 bp, Saccharomyces pastorianus
atgacaagagacaatttagcaaggtacttcgtttgcggagacgttaaagctgatttctatgggataaatatgtacgaatggtgtgggtattccacgtatggtactagtggatatagggaaagaacgaaagaatttgaaggttatccaattcccgtgtttttttcggaattcggctgcaatcttgtaagaccaaggccattcactgaagttagtgccctttatggcaataaaatgtcctctgtttggtctggtggccttgcatacatgtattttgaagaagaaaatgaatacggagttgttaagataaatgataatgatggagtggatattcttcctgatttcaagaatttgaagaaagaatttgcaaaggcagatcctaaaggcattacagaggaagaatacttaacggcaaaagaaccaactgaagtagaaagtgttgaatgtccacatattgctgtcggagtttgggaggcaaacgaagaactacctgaaacacctgatagaagcaagtgcgcctgtttggatgagattttgccctgtgaaatagtcccttttggtgctgaatctggaaaatatgaagaatattttagttatttgtgctctaaggttgactgttccgatattcatgcaaatggcaaaaccggtgagtacggtgaattctcagattgttctgtcgaacaaaaactttcccttcagctgagtaaattgtattacaaaatcggcgcaaatgatcgccattgtcctctaaatgataagaacgtttacttcaacttagaaagcctgcagccccttacaagcgagtcgatctgtaagaatgtttttgattctataaggaacatcacatacaatcatggcgattattcaaaatcaaatccatcgcgtagcaaggaaagtttgaacgtaaagtacccatcgagtgaagagagagaaaatgacggcaccatcgcatttaaaacttcagggtttgttatacttctaatttctataatagctgctggaattcttcta

SEQ ID NO: 174183 - DNA, 303 bp, Saccharomyces pastorianus
ctcttgttctttttcttggcggccttagcagcttccttagccttctttttgtcagcttttgcggaggcgttagccttggcttcagattcagctttagccttggcttcagcttcggccttggccttagcttcagcttcagctctggcaccggcttctctttcccattttcttctttccttttccttcttctcttcttctttgaacattttaatacggggatcttcactgacagctctttcaacaagtttgaccaatctagcgttatcagcagtcttcttcttgtctcttgcggccttgttcttt

SEQ ID NO: 174184 - DNA, 441 bp, Saccharomyces pastorianus
atgccaagtttgtttggattgaccatcactacgtggattttatctaatatatccgataaacctctagaacctgttgagggtaagaatagaattaaggtatacgatggtatatatcaatcgttggcaggtcaaatgagcagagtcggtataccgagccaaagaatcccattggctttgaaggatgttagttaccttgtcgaagaggtgtttaagggtaaatctccaattagcggcatttccactagactaactttaaccaaatgggatccctctaagcctatctctttgcaaaatgtggtagtactaactaaaaacgaacagaaagtgcacgaagaccgtgtcttgaagggtaaggaaagcttacaagatgtttatgatgccaaagttctaaaactggtttcacaaagattcagagaagaagcttattactctcaattcaga

SEQ ID NO: 174185 - DNA, 456 bp, Saccharomyces pastorianus
ctaactcgtttaaatgacgagctcccaaagtatgaagacttgttcccaaaaaaacccaaaaactgggaacttggtagcaaatctgtggagattgggccagataattctgcccaaatgaccgtggatgattctcaaacttcttctgaagacgatgaattagaagctttacaggtcgggttcaacacaatcttttccaagaagcaaaactttcagaatgataagatgcttctattcttttggatccccttaactttagtactcttattatgtttcacattatcgaatttggggaaagatgatgatatgtttcataatttatccaaaattgttcaggaatatttaagaattggtttagccaaggtactactaggcaacgaaaggatgaaaacctcttttaaaatgcagttatcgaactttcaaaacaataacattctaaaagacatgcgagtcaattaa

SEQ ID NO: 174186 - DNA, 771 bp, Saccharomyces pastorianus
gatggcttagttcatatttcagaaatgtcagaccaaagaacattagatccacatgatgtggtgagacaaggccaacatatctttgtcgaagtgataaaaatacaaaataatggaaaaatatcgctctccatgaaaaatattgatcaacatagtggagaaatccggaaaagaaatactgaaagtgtcgaagatagaggtaggtccaacgatgctcatacaagcagaaatatgaaaaacaaaattaaaaggcgtgctttgacttcaccagaaagatgggaaattcgccaactaattgccagcggtgctgcttccatcgatgactatcctgaattgaaggatgaaatacccataaatacttcctatttgaccgcgaaaagagatgacggcagtatcgttaacggtaatacagagaaagtggactcaaaattggaagaacaacaacgagacgagacggatgaaattgatgtcgagctgaatacagatgatgggcccaaatttttaaaggatcagcaagtcaagggggccaagaaatatgaaatgcctaaaattacaaaagtcccgagaggatttatgaatcgttcagcaatcaacggctctaatgcaatacgagatcatagagaagaaaagttaaggaaaaaaagagagattgaacaacagattaggaaacaacagtcgtttgatgatcctacgaaaaacaaaaaagattccaggaacgaaattcaaatgttgaaaaaccagctgattgttactgaatgggagggatcctctaga

SEQ ID NO: 174187 - DNA, 789 bp, Saccharomyces pastorianus
  modified_base (774)..(774): a, c, g, t, unknown, or other
ctgataaaggagaaatctgaggtgcctttggggcacgttcataaaatttggaggaaagtcgaatcacctcccgaagaagcactgaagcttcttctagccctgtttgaaattgaaccagagtcgaaggccattgtagttgcaagcacaaccaaccaagtggaagaattggcctgctcttggagggagtatttcagggtggtatggatacacgggaagctgggtgctgcagaaaaggtgtctcgcacggaggagtttgtcactgatgggagcatgcgagttctcatccgaacgaaattagtgactgaagaaattgacattaaggaattgaagatggtgatcatgcttgataatagacttaatattattgagctcattcaaggcgtgggaagactaagagatggaggcctctgttatctattatctagaaaaaatagttgggcggcaaggaatcgtaagggtgtattatcaccaattaaggaaggctgtataaccgagcaggtacgtgagttttatggacttgaatcaaagaaaggaaaaaagggccagcatgttggatgctgtggctccgggacagacctgtcggcagacacagtggaactgataaaaagaatggacagattggcagaaaatcaggccacagcctccatgtcggttgctgcgttaccgtctagttcccaggagagaaatagcagtgacaggtgcagagagtattgcagcagtgatgaggacagcaacgcgggcgttcatgttagtagacctgcaggcatgcaagcntgcactgccgtcttt

SEQ ID NO: 174188 - DNA, 486 bp, Saccharomyces pastorianus
atgctggcgctgaaagcggaagaacaagctataagggccattcaatcaataggctgtacaggctccgacggaacctcgaattgtggcttcccaccaaatgtgctgtactgtcagcctcagattggctgggtcggatacactgaggaggggttggcaaaggctcgcatcccatatcaaaaaggcaaggttttgttctcacagaacgttagatataacacgttattaccacgggaagagaatactacagtttctcctttcattaaagttctgatagattctcgtgacatgaaaatactaggcgttcatatgataaacgacgatgcaaatgaattgctgtcgcaagcatcgatggcggtgtcgcttggccttaccgcccatgatgtctgcaaagtaccgttccctcatccgagcttatcggaatcgtttaagcaagccgtccagttggcaatggcaaatggaacatcacctggcgtacatgtccgggaa

SEQ ID NO: 174189 - DNA, 906 bp, Saccharomyces pastorianus
atgcttgcaaactgctacaaggatgatgaaggtatacaagaagatgaaatcaaaccaactctagatcgtattagggagcgtatggtttcaagtttcagccaatctcatcgcgatttttacgaacgtgaatttgaattcttcgacgaagtaactggcatatctggtaagttgaaaccatacataaaaaaaagtaaggctgaaaagaaacataagatcgatgaagaaatgagcaaaattgaggtgaaacctgatgtttatttaccttctaatcctgacggtgtagttattgatattgatcggaagagtggtaagccacttcaatctcacgcaaaggcgccttttatggcgacctttaaaataaagaaagacgtaaaagatcctttgacaggtaaaaacaaggaagttgaaaaatggcaagctgctatcttcaaagtcggtgatgactgtaggcaagatgttctagcgttacaattgatctcgctatttagaaccatttggtctagtattggcttggatgtctacgtttttccctacagagttactgcgacggcaccgggttgtggtgtcatcgatgtgctacccaattcggtatcccgtgatatgttaggacgtgaagctgttaatggattatatgaatatttcactagtaaatttggtaatgaatctactatcgaatttcaaaacgcacgaaacaactttgttaaatccttagcgggatatagcgtaatttcgtatttgttgcaattcaaggatagacataatggtaacattatgtacgatgatcaaggacattgtctacatatcgattttgggtttatttttgatattgtcccaggtggtatcaagtttgaagcagtaccattcaagctgacgaaagaaatggttaaagtgatgggaggttcgccc

SEQ ID NO: 174190 - DNA, 177 bp, Saccharomyces pastorianus
caaatatatgacctatttcccaataagcataatatccaattcacagattctcattcacaggagcatgatacttcgtccagcattgctaagaatgatacagacggaagtataagtataccaggtagtatagacactggcattttaaagagcattattgaggagcacaggttggtatga

SEQ ID NO: 174191 - DNA, 1371 bp, Saccharomyces pastorianus
atgagagcatatggaaagaggggcccagttctcagaactccttgtagatctaataaaggcttgccatcttcttccgatgttgaatttagtgatgacgatgtaaactccgtgattcctgatgtaagttctaccatttcgagcagtattgcagaccacccgatagagggattattggacgagcctagaaaggctcaggacagctcgtcgtcatttgatggtgcaaatgagaagccctcttcacaactggactcaaaaaggaatgaccaaaacgtcaaaattatcactagcagtgatacctcaatggcatttatgaaagatgaaaagttaagtgcctttaatttccttgatggttcaaaggcatctaagagaaaaagaagaagaacttaccaaaagcatgatgcgaacataacgtcttcaattgaaccagacgtacaagatgaagacagcattacaatgcacaatgaatttgaatcaataaggaaaatatacaatgacatcaatgaattcatattgaagctaccgagagctgacgatgatatactgaataaaatgcttgaaaatgagatgaagatggacgacgctatagagaataatagcatacgcacatccaaagacaaaaaatatggcaaatttagaacaatattaataaacaaaaataaagaaaatgaaataatgggagaagaggtagatcagaaagctaacaccttgtccctaaataacgctgacaacagtaatgctgaaaaagaaggattaacttcaacaaatcactacaacgaattaaaaaatatgggagatacaataaaataccaggatgatattgagtttcttctgtccaattctaaaagtaatgacaatactacggtaccaatcaatgaatactttaaaaaacttttaaatttatccctaatgattattaatgacgaagaattttttcaatatgcgaaaagatatttcaaaaaggaaataattaagcttagttttgcgcaatttagatcggattttcctgaattaatcttattacagggttatttactacataaagttagtgaatcacaatccgatttcccgccaagctttgacaatttctctatcgaattaagtaaagatgatggtaaaatacggacaaaaaagaataagcatattaaaaaactctcacacctaaatttcgaagactttcttcggaagactcaattcaaaacgggactttattattcattatcactctgggaaatgcatggtaatttatcgttagatataatcaagagaatctccatccttgcttcaaataaggacttattcagtcggcacgttaagacttttattcctcttttagaaaaattaataaccgcttccgaattttgccacatgtat

SEQ ID NO: 174192 - DNA, 819 bp, Saccharomyces pastorianus
atgtttccttgtttttcagattctagggacccagatgtagtgatttataaattgcacggttctttatcccaacaaatgagaacctctacattgcagcattttgctcgtgataatgaagccaccaagggaaaacatcttattatgttctgtacagatgtcgcaagtagaggcctagaccttccccacgttggatctgttattgagttggatccaccatttgctgttgaagaccatttacatagagttggtcgtacagcaagggccggtgagaagggtgaaagtttgttatttttacttcctggcgaagaagaaaaatatatggactatatccagccgtatcatccgatgggttgggaattactgaaattcgataaagaaatactaatgccggctttcaaagatgtgaatgtcaacagaaatgataaattcattagaaaagatgagaaatcgtccaaaaataaagacgtgggcgataaagaatatgagtgggataccaatgctacgacatggcatttgaatatagaaagacgagtagtgggagattccgcattcaaaaatttggccgttaaaggtttcattagtcatgtgagggcttacgcaacgcatatctctcaagaaaagaagtttttcaacgtgaagttcttacatctaggccatttagctaaaagttttgggttacgtgaaaggccaaaggctatgggattgcaaagtagtaaggatggtaatagtgaaaagaagccaactaaggaaaactctaaaaataaaatgtttcgtatggctcgtatggcagagaagcaaatagcaagtgagtttaactac

SEQ ID NO: 174193 - DNA, 354 bp, Saccharomyces pastorianus
atgtctcaacatgaagctaatgcgtacttaatcaacaccggctggactggttcttcctacgtatctggtggtaaacgttgcccattgaagtacacaagggccattctggattctattcatgatggttcgttagccaatgaaacgtacgaaactttaccgattttcaatcttcaagtacctaccaaggttaacggtgttccagctgagctcttgaatcctgctaaaaactggtctcaaggtgaatccaaatacagaggtgcagttaccaacttggccaacttgtttgttcaaaatttcaagatttatcaagacagagccacaccagatgtattagccgctggtcctcaattcgag

SEQ ID NO: 174194 - DNA, 339 bp, Saccharomyces pastorianus
gacggccagtgccaagcttgccatgcctgcaggtcattggtacgtgattttagagtaaaaagagtccataacacatcagcagaagatgatggcaactggtctgcagaaagttctgagttagttgcatttggtatcacaaataacggtaagttatttgctaatcaagttcttttggcttcggcagttacttccttggagattaccgattcctttctgttgttcaccacggcacaacacaatttacagtttgtgcatttaaattccaccgatttccagccattgcctttggtagaggagggtgtggaagatgaaagagtgcgtgccattgaaagaggttcc

SEQ ID NO: 174195 - DNA, 1302 bp, Saccharomyces pastorianus
atggaggttaaagctagaatcttaaggcatctacctgctttggtttatgcgtcggttccaaatgacaatgacgatttcgtcgataatctagaatcagatgtccgcgtacaacctgaagcgcgcttgaatattggttcaaagagtaacagcctttctagtgatggtaatagcaaccaagatgttgaaattggaaaatcaaagagcgttattttcccacagtcatatgatccaacaatcactacattatatttcgacaacgattttcttgatttgtacaataacagattgttgaaaatcagcggtgcacctacgctgagattgagatggatcggtaaactgctagacaaacctgacatatttttggaaaagagaacttttacagaaaataccgaaactggtaattcaagttttgaagaaatcagattgcaaatgaaagccaaattcatcaacaattttatttttaaaaatgatcccagttacaaaaactatttaattaatcaactaagagaaaggggtactcaaaaggaggaactggaaaaactttctagagactttgataacatccaaaactttattgttgaggagaagttgcagccagttttgagagctacctataatagaactgctttccaaattcctggagatcaaagtattagagtcactatcgattccaatatcatgtacattagagaggattctttggacaaaaataggcccattaggaaccctgagaattggcaccgtgacgatattgattccaatattcccaacccattgaggtttttaagagcaggagaatattcgaagttcccctattctgtaatggagattaaggttataaaccaagataattctcaaatgcctaattatgagtggattaaagatttaactaattcacatttagttaacgaagttccaaaattttctttgtacttgcaaggtgtggcttcactgtttggtgaagacgataaatatgtcaacattttgccattctggttgcccgatttagaaaccgacatcagaaagaaccctcaggaggcttacgaagaagagaagaaaactttacaaaaacaaaagagcattcatgataaacttgataatatgagaaggttatccaaaatctccgtaccagatggaaagaccactgaaagacaagggcaaaaagatcagagtactcgtcacattattgcagatttagaagatcacgaatcatcagatgaagaaggtaccgcattgcccaagaaatctgcagtcaaaataggggagaaattcaaaacgaatgcagctttcttgaaaaatctt

SEQ ID NO: 174196 - DNA, 162 bp, Saccharomyces pastorianus
atgatgataataatatttatagaattgtgtagaattgcagattcccttttatggattcctaaatcctggaggagaacttctagtacattctacatacctaatattattgccttattaaaaatggaatcccaacaattatctcaaaattcacccactcttcaa

SEQ ID NO: 174197 - DNA, 261 bp, Saccharomyces pastorianus
atggaggagtacgattattcagacgttaaacctttgcccattgagacagacttgcaggatgaactgtgcaggattatgtataccgaggattataagcggttgatgggactcgcgagggctctgatcagccttaacgaactgtcacccagggcactacagctaacagccgaaattatcgacgtgacgccagccttctacaccatatggaactaccgattcaatatcgtcaggcacatgatgagtgaatccgaagacactgtc

SEQ ID NO: 174198 - DNA, 564 bp, Saccharomyces pastorianus
gagggtcttaaaaagaaccatcatttgaggtattatgggagacaacaactgagtctgtttttgaaaggtatcggcctgagcgctgatgaagcgttaaaattttggtctgaggcatttacaagaaatgggaacatgacaatggagaagttcaataaagaataccgttacagcttcaggcataattacggtcttgaaggtaacagaatcaactacaaaccatgggactgtcacactattctttccaagcccagacctgggcgcggagattatcatggatgccccttccgtgattggagtcacgagagattatctgcagaattgcgctctatgaagttgacccaagcgcagatcatcagtgttctggattcctgccagaaaggtgaatacacaattgcttgcactaaagtgtttgaaatgacacacaactctgcatcagcggatttggaaattggcgagcaaacgcatatcgcgcatcctaacctatacttcgaaagatcaaggcaactgcaaaagaaacagcagaagccggaaaaggaaaaactattcaataatggtaataattag

SEQ ID NO: 174199 - DNA, 252 bp, Saccharomyces pastorianus
atgacctcgaataatggagtcgaagacagcagcaaaatgagacaatcttcactcaatgaatttcacgtattcgtatgtgctgcattcctcattaagtggagtgatcagttaatggaaatggatttccaagaaactataactttcttacaaaatccacccacaaaagactggactgaaaccgatatcgaaatgctgttgagtgaggcctttatttggcaatctctttataaagacgctacatcccattggctg

SEQ ID NO: 174200 - DNA, 1875 bp, Saccharomyces pastorianus
gatttatctaacttggacgtttctatagggtctaagtcacatttctcgttccatgatgtgaatctgtcacttgatgatctcaacattccaaacgtgcaaataaacgaaggcatagttgacgagcttgtgttaaaattaacagtttctggcggtgtagaaatcgatgggtctggtttaagatttatcatgacacctttatattccagtggctcacaggaacttcactcagattttttggttaaaagcatccaagatcttacgaattcgatgttacaatttagtgatccattgaccacatataataggtacaaagaagatgacattagctcttcagacagtagtagtgatctcaactctaatatagaagcttcaaaaccagccgcaaatggttcttatactcttcaaaatatgcggaacaaggcccttaatgtagccttagcgaaattgaaaatagcattaaaggacgttaccatacgtttaatagtaaatgatagagatccttccgataacatcgtggaggttcatctagaaagcatacaacttattactacagacgcaaatttacgacatataaacattgaaaatatcaccatttcctcaatacaaaaacaagctgtacccgactctcctgtgcatcctttcaataatgacgatctgtcacaaagcgtttatttatcaaaaatggaggctacttcactttatatgagcgccatggaagagcaatcaaatgaagaccccagtgaaccccaagttacacaagaagaacaagagaatgataagtgcaaggaatctttaatggaaataaataatttgaacatagcttttaagggtttatcatcggtcaatgatctcagaatgtctaatattgttattgatattcaggatgttcatttagcgatacacaaaattgtcgaaatcaaaaactccactttgaagaatattatagatatcattgttacacatttggatgccaatgaaagcttttcttgccaggattcccaaagtccttcacctgacaagcaggaaccatcagctctttcttctgttgatatcaaatgtatatacttaaacttaggccaagatatcacagtaattttgaagagctttaaattagagcaaaaggaaaataattcattggcattttctttaggctcattttattctaattcgagtccattgacaattagccataaaactaagccattgctcactggagaacaaacccctcaaagcatctcattaaatatgggcgacgaactagatattattatcagtcatgatggcattgcgcatttctttaaaatctttcagtttgtttcaaaatgtatgtccttttatcagaataagtcaaaagggatgatgcctcaaatagcatcggatactaaaaggaccgtacaacttacctcaaaagcagtgaagttgtcgcttaagtttccatattttttattatgtttccaggtttcacccttcatttacgactctaaccgtgagttgtacattgagcttgtagacgtatttaaaaaactaccttctcggtgcacgaaaatattgacaatgtcgagcattacgatctcgaacttgcaatcccctctacgactgggttcatatgacgatactttgaaagaagcgctaatttatagttctgtccatgcaatcatcaaagaagtgatatttaacgaagaatatgctggaatagtacaattagtcgaagatatttctgcgttgggaaaacttttcacggattcaaagaacagtgaatgtacaggaaagtctaaaagcaagagaggctcctttggcagagaagtgtcagagtacttaattcttccaggttcgtttactagcagagtttatccgctaatttttctctcaaaatag

SEQ ID NO: 174201 - DNA, 99 bp, Saccharomyces pastorianus
ttaatccgatgtagtgtaacggctatcacatcacgttctcaccgtggagaccggggttcgactccccgtttcggagtgatttattttttttttcgtaat

SEQ ID NO: 174202 - DNA, 225 bp, Saccharomyces pastorianus
atgccaattgtaggggtgccgagatgtgccttgaaaaaacccttttcgcgtgcctgtgatgcttccattttggtcaaaaaaagaacgtctgaattgaaccctcattcagaagcttattgtctaagcctttattcggtgttttctaaacgatctccatggaagaaatatttctatctcttgaaatccgtacaagatatcagacgtgtgtcgggagtcgtatactgt

SEQ ID NO: 174203 - DNA, 135 bp, Saccharomyces pastorianus
tcatacatctttgatagacttcgtatgtggagtactgttttatggcgcttatgtgtattcgtatgcgcagaatgtgggaatgcctattataggggtgccggggtgccttatgaaacccttttccgtgcctgttaa

SEQ ID NO: 174204 - DNA, 465 bp, Saccharomyces pastorianus
atgccatttgttaaggactttaagccacaagctttgggtgacaccaacttattcaaaccaatcaaaattggtaacaatgaacttctacaccgtgctgtcattcctccattgactagaatgagagcccaacatccaggtaatattccaaacagagactgggccgttgaatactacgctcaacgtgctcaaagaccaggaaccttgattatcactgaaggtacctttccctctccacaatctgggggttacgacaatgctccaggtatctggtccgaagaacaaattaaagaatggaccaagattttcaaggctattcatgagaagaaatcgttcgcatgggtccaattatgggttctaggttgggctgctttcccagacacccttgctagggatggtttgcgttacgactccgcttctgacaacgtgtatatgaatgcagaacaagaagaaaaggctacgaaggct

SEQ ID NO: 174205 - DNA, 1470 bp, Saccharomyces pastorianus
cttattcctgtgtcttctgggttctcaggactggcttctagatttgtagaggatgctttcggatttgcattgggctggacgtattggatttcctgtatgcttgctcttcctgcccaagtttcctcaagtacattctatctcagctattataataatgtcaatatatcaaagggagtaacagcagggtttatcacgctgttttctgcatttagtattgtagtaaatttactggatgtcagcataatgggtgaaattgtatatattgctggaatcagcaaagtgataattgcaattttgatggttttcacgatgatcatcctaaatgccggacatggaaatgacattcacgaaggagtcggttttagatattgggatagctctaaatctgtccgaaatttgacctacgggctatatcgtccaacatttgacctggctgatgctggcgaaggaagcaaaaaaggcatttcaggcccaaaaggccgatttttagctacggcatcagtaatgctaatttcaacatttgcgtttagcggtgttgagatgacttttttagctagtggggaagctataaatccaaggaaaacaattccttctgctacaaaaaggacattttccattgtactgatatcttacgtttttttgattttttcggtaggcatcaacatatacagtggcgatccaagactactatcatattttcctggtatttccgaaaagaggtatgaagccattataaaaggcacaggaatggactggagacttaggactaattgtcgcggcggtattgattataggcagatttcagtaggaacaggttattctagtccttgggttgttgcattgcagaactttgggctatgtactttcgcatctgcttttaacgcaatactgatatttttcactgctacagcaggaatatcctcgttatttagttgttcaagaacattatacgccatgtctgtacaacggaaggcaccgccagttttcgaaatttgcagcaagagaggtgttccttatgtttcagtgatattctcctctttattttcagtcattgcttatattgcagttgaccaaacagcgattgaaaacttcgacgtcttggccaatgtttctagtgctagtacatctattatatggatgggattgaatctttcctttttgcgattctattacgccctaaaacaaaggaaggatattatatcaagaaatgattcatcatacccatataaatcgccatttcaaccatatctagcgatttatggtctagttggatgttcattatttgtcatatttatgggatatcctaactttatacatcatttctggagtactaaagcttttttttcagcatatggtggcctgatgtttttctttatcagttacacagcttataaggttctcggaacgtcaaagattcaaagactagatcagttagatatggacctgcaggcatgcaagcttgcactgccg

SEQ ID NO: 174206 - DNA, 315 bp, Saccharomyces pastorianus
cgaaggagatttttatcctcccgtggtataaagaatttgctttatagagaacctgaaaacaaaatacaaactgtttcctgtaaagtacgatattactcaattgatcaggtcaagaaaaagcacaagaaagacattgaagactggatcaaaacacaactgagagagcccttaataatgaccaatgtatgtgaacgtcataaaaattttgaacggaatgatcccataaccaaaaatcttggtggattaaaacctctcagaaatcaatataatatagtgaaaaacaaagattttgaaatactgtggaagcaaatttaa

SEQ ID NO: 174207 - DNA, 252 bp, Saccharomyces pastorianus
gaactagatgtggtggctgatgaggaagcaagtgttttagatgaagtagcggtcgaagaagatggagatgtggatgaagaggaagatacagaagacgaagaagatacagtggaagaaaccgaggaagatacagtggaagacgccgaggaagatacagtggaagaaaccgaggaagatacagtggaagacgccgaggaagatacagtagaagaggatgtagagctgctggaaatactaccaccgttggctaaa

SEQ ID NO: 174208 - DNA, 1038 bp, Saccharomyces pastorianus
caaggctatatgattgttgctgctggattcatgtgtaattttattatatttgggttcgcatttacatttggtgtgtttcaggatttttatcttagtaaaggtggtcccttatatggcaaacctgttgctacagtttctgtcattgggactctagcaacttcattaacatatatggtaaccatcggtaataacgtactacagcacttcttttcaatccaacaaacgatggtgctcgggtcacttttgatggccatgggtctaataagcgcatcgtgggcacaggaaacattgagtcaaggagtaatgtttggcattggaggttttctgacatacctaccggctattgttcatgcaccgccctatttcagtgctcacagaggaattgcgatgggaattttattctctggcacaggaattggtgggttagctttagcccctctaacgagatacctgataaccaaatatggatggcaatgggcactaagaatatgtggaataaccacatttgtctgtcttctccctgcaacatttctggtccatccacatcccagctatgttgccacacataaaatcaaatcggctaaaattgaggtactacatttgaatatgagcctagtaacgagcaaaaagtttatcttccacatgacaggagcactattacaatcggctggatatttgattcctggttattatatgtcctcatacggacaaactttgggcttcagctctaacgagggcgcagtatttatcgggataaacaatgccgtgaatggagtttcaaaggtgatagtaggatactttgcagataatttcggccgtttaaatatgttactttgttgctgctttttaagtgcagtgactgtattcgccctatggttagtatctactcgtagcactctcatagatttcgtgattctatacggtgtggtatctggtccaataatttcactgcctccaacttgcatggtcgaattatttggcgtgcaacactatcaatcaagtatatggtctctctatttctgtagaggtgtgggaaca

SEQ ID NO: 174209 - DNA, 78 bp, Saccharomyces pastorianus
ccatggtactctaccagattgagaccagccatctctagtgctttgtccaatgacggtatctacaccgctattccaaaa

SEQ ID NO: 174210 - DNA, 90 bp, Saccharomyces pastorianus
ccaattataggggtgccgaggtgccttgaaaaacccttttgcgcgcctgcgaagtttccgctttcggtcaaaaagaaaatccgaatttag

SEQ ID NO: 174211 - DNA, 267 bp, Saccharomyces pastorianus
ggtttgattttattttgtggggagattgtcaccgaaaatagcagagaaaagagggttgccattggtattgaaccatacaaacctattagcacaactttatatatctgtgataacaagtttcatacagaagttctttccgaattacttcaagatgataagtttggtttcatagttataggagatcaaggtgctttgtttggttccgtttctggtaataacgaagaaatgttttgcataaattcacatacgatttgccaaaaaagcgta

SEQ ID NO: 174212 - DNA, 402 bp, Saccharomyces pastorianus
atgggacccataggctccaaattgtgctcaaactacatctccaccgcatacgtaaaagttccggatcagatatataaggactatcttttgcactcatttgtcgggaagaaccagacggtgcaaccacagacaatcaaggtgttcacccatttgtttgaaaggaatctgatcgctagagatccggtaataaaccacgttcgttttttgaacccagcaacgcctgtcatgttcatgtatggcgagcacgattggatggataaatatgcgggctacttgactactgaatcaatgctaaaaaacaaggcaaaggctagctacgttgaagtccctgatgctggccataatcttttcctggacaacccgcagcactttgcctcttctttagtctcgttcctgtcaaag

SEQ ID NO: 174213 - DNA, 285 bp, Saccharomyces pastorianus
atgctacagtatataccactctcaaacttaccctactctcactttccactccatcacccatctctcaccatcagtaccaaatgcactcgcatcattatgcacggcacttgcctcagcggtctataccctgtgccatttacccataaagtccatcattatccacattttaatatctatatctcattcggcggccccaaatatagtataactgctcttaatacatacgttataccacttttacgccatatactaaccactcaatttatacacacttatgttaatatt

SEQ ID NO: 174214 - DNA, 105 bp, Saccharomyces pastorianus
atcgtaatattagtatgtagaaatatagattccattttatggattcctaaatcctcgaggagaacttctagtatattctgtatacctaatattatagcctttatc

SEQ ID NO: 174215 - DNA, 303 bp, Saccharomyces pastorianus
atgctcaattcattcttgtctaactgtctgaacagtcaagaaataagcaacgatattgtttttcaaaaatttctaaaccctgaatttaattggaaagatgttttaagttcgtcgccgataatcatactacctttgaataaccttttagctccacctttaagcccaacaaaaccaagcccccttcattctattttacctattccatccaactcgtctctgagaaattataattcgatttggcaacaacacatcacagtaaaaagtcataatgaaatttccaacctcccaacagaaattttacaa

SEQ ID NO: 174216 - DNA, 1392 bp, Saccharomyces pastorianus
atgaaaataggcttcattatcattgtcacaggtgttttgttgggtgttaaaactttcaatgaccctgtcgaacaccggtgtatggcattggtagaatgctgtgctttcttatgggctagtgaagccattccattacacatcacaggtttattggttccccttctaactgtcctttttagggtactaaaagacgatgacggtaaggtaatgggagcagcagctgcctctacagaaatcttaggtacaatgtggtcgtcaacaattatgattttattagcaggtttcacattgggtgaagccttgtcgcaatataacgttgcgaaagttttggcatcgtggttattggcccttgcaggtaccaagccaagaaatgtccttttaatggcaatgagtgttgtattctttctttcgatgtggatttccaacgttgcctccccagtattgacatattctctattaacacccttactagatccgctggactacacttcaccgtttgctaaggcattagtcatgggtgttgcactttcggcagatattggtggtatggcttcacctatttcttcgccacagaatatcatctccatgcagtacttaaaaccttatggaatcggctgggggcaattttttgctgtcgctctgcctacaggtattctatcgatgctgtgttcctgggccttgatgatactcacctttaaaataggcaaaactaaactggaaaaatttaaaccaataaggaccagatttactataaagcagtattttatcattattgtaactattgctactattcttctatggtgtgtagagtcacaaatagaaagtgcttttggatcgtccggtgaaattgcagtaataccgatagtcctgttttttggtacaggtctactatcaacaaaggatttcaacacattcccttggtcaattgttgttcttgctatgggtggtatagcccttggtaaggcagtttcatcttcaggcttgttggtaactattgcaagagcattacaaaagaaaattcagaacgatggtgtttttgctatcttatgtattttcggtattttaatgttagttgtaggcacttttgtctcacatactgtgtcagcaatcatcattattcccttggtgcaagaagttggtgacaaattatccgatccaaaggcagctccaattcttgtgttcggttgcgccttgttagcctcatgcggtatggggttggcttcatctggatttccaaacgttactgctatttctatgaccgatagaaagggtaatagatggctaactgtaggcgcttttatctccagaggtgttcctgcttcgttgttagcgtttgtctgcgtgattactctcggttatggcattagttcttccgtcttaaaaggtagcact

SEQ ID NO: 174217 - DNA, 363 bp, Saccharomyces pastorianus
gtcaaattagcttctatcgccgctggtgtcgtcgccatcgcttccggtgccgccgccgccaccaccaccctagctcaatccgacgaaagagtcaacttggttgaattgggggtctacgtctctgatatcagagctcacatggcccaatactacctgttccaagccgctcacccaaccgaaacctacccagtcgaagttgctgaagccgttttcaactacggtgacttcaccaccatgttgaccggtattgctccagaccaagtcaccagaatgatcactggtgtcccatggtactccaccagattgagaccagccatctccagcgccttgtccaaggacggtatctacactgtcgccaaatag

SEQ ID NO: 174218 - DNA, 186 bp, Saccharomyces pastorianus
ttcgaagattgtatttttcttgtgcatcatataatcttaggaagaaggacactattatataaatatcgtctattaagtactattcgtgttactggtatattattatatatggttgttggaataaaaatccactatcgtctatcaactaatagttatactatcaatatattatcatatacagtgtta

SEQ ID NO: 174219 - DNA, 126 bp, Saccharomyces pastorianus
gtgattgtgacttttcttggtaataatgtcattaaatattatgagaaatgggagtgggtaccaaagtacgctgttttcttagtaatcatcgcgagtttgacaagatctggaaaatttgtcatagga

SEQ ID NO: 174220 - DNA, 1077 bp, Saccharomyces pastorianus
atgaccaccgtcaccggtaccaacggtttgccaactgatgaaaccatcatcgtcatcagaacacctacaactgccaacaccatcataactacaactgagccatggactggcactttcacctctacgtctactgagatgactactgtcactggaaccaacggtgtaccaactgacgaaaccatcattgttgtcaaaacaccaacaactgccaacaccatcataactacaactgagccatggactggcactttcacctctacgtctactgagatgactactgtcactggaaccaacggtgtaccaactgacgaaaccatcattgttgtcaaaacaccaacaactgccaacaccatcataactacaactgagccatggactggcactttcacctctacgtctactgagatgactactatcactggcaccaacggtgtaccaactgacgaaaccatcatcatagtcagaaccccagccagcgtcagctcatcttccgccgcatcctctaacgtgactagctctgccgccacatcagacacaattacaggctcgaaggatctaacatctatagtttcttcgaccaccacttcaaccgactctggctcccctaagccttctggatccacagctacggtaacaaacgaacaaactactttaatcacagttacttcctgcgagtctggtgtctgttctgaaactacctctcctgctatcgtttctacagctaccacaactgttggcggtgtcgctacagaatacactacatggtgtcctgtttccacttctgaaccaacaaagcaaactactttagttacagttacttcctgcgagcctgatgtatgttctgagactgcctcttctgccattgtttctaccgctacggccactgttagtggcgtcgctactgaatacactacatggtgtcctgtttctactacagagccaacaaggcaaactactttagttacagttacttcctgtgaatctggtgtctgttccgagaccacctctcctgccatcgtttctacggccacaactgtcgtcaatgacgctgttacagtgtacaccacctggtgccca

SEQ ID NO: 174221 - DNA, 111 bp, Saccharomyces pastorianus
ggcgtgtggtctagtggtatgattctcgctttgggcagccttctgcgttacaacagaaagacaaagcatgcgagaggccctgggttcaattcccagctcgccccatttttt

SEQ ID NO: 174222 - DNA, 453 bp, Saccharomyces pastorianus
gccatgcttgcttgttgggctggccaaggccaccccatctactggttcatgcacactgagcaattcccggtatacatatcagatattggtgccaccaacctaaggcctctgtttatatcgtgcgcagcgtggcaaggtctaggctatgtaattactgtcgcctgcgagtttttccagaggtccggatacctaccattccaactgaagaagcatgacccatctatttctgactcaacgtcttatgctgaaaaatttcatagtggtaagttcttgatgcctccttactacaccaaagatgaacgaaatctgatcttcacggccttcgtctttggttgcatcggtgagttgggtctttgttctgctctatcttctccaccgctcactacgatcacgtccacgtcgccatggtctccgtctttgtcgttttcatgttcctgtctatttgctgtttga

SEQ ID NO: 174223 - DNA, 1170 bp, Saccharomyces pastorianus
atgacatcgatttatacatcaacagagcctacgaattctgcttttactaccgaggactacaaacctcaattagttgaaggagtaaattctgtacttgtcattggatcaggagggctctctattggtcaagctggtgaattcgattacagtggttctcaagctatcaaagctctgaaggaagataacaagtttactatattggttaacccaaatatcgctactaaccagacttctcattccctggcggacaagatttattacttgcccgttacaccagaatacatcacatatatcattgaacttgaaaggccggatgctatacttttaaccttcggtggtcaaacaggtctaaattgtggggtggctctggatgaatctggtgttttggctaaatacaacgtcaaagttttaggtactcctatcaaaactttgatcacttctgaagatagggatcttttcgcatctgcgttaaaggatatcaacattcccatcgcagaatcatttgcttgtgaaaccgtggatgaagctttggaggctgctgaaagggtcaaatacccagttattgtcagatctgcatacgctttgggtgggttaggctcaggtttcgctaacaatgcaagtgaaatgaaggaacttgccgcacagtccttgtcgttggccccacaaattcttgttgaaaaatctttgaaaggttggaaagaagttgaatatgaagtggtcagagatagggttggtaactgtattacagtatgtaatatggaaaatttcgacccacttggtgttcatactggtgattctatggtttttgctccttcgcagaccctatcagatgaagagtttcatatgttaagatccgccgcaattaaaatcattagacaccttggtgttattggtgaatgtaatgtccaatacgctttgcaacctgatgggctagactatagagttattgaagtgaacgcgcgtctatctcgttcctctgcattggcgtctaaggccactggttatcccttagcatacactgccgccaaaattgggctaggctatactttgccagaattgccaaacccaatcacaaaaactacagtggctaactttgagccatctttggattatattgtggcaaaaatacctaagtgggatctttctaagttccaatacgtggacagttcc

SEQ ID NO: 174224 - DNA, 150 bp, Saccharomyces pastorianus
atgagcccgaaaaacaaatatgtatatatctgtgtagaatatatatatatatatttcgcaaaaatacataaacaatcaaccctctcctcagatactactaagatgtttgtactgatagataatgtcctcgcctaccttcttgaacaagat

SEQ ID NO: 174225 - DNA, 114 bp, Saccharomyces pastorianus
tctatacaaattttattccatttctgcatccaatctggtatttggtcaatacggcgtcattggatcctcattcatgcaataatactgtccgtattaactaagaatgtaaattag

SEQ ID NO: 174226 - DNA, 327 bp, Saccharomyces pastorianus
atctcatcatcgtcatcatcgtcattagcatttgattttgcgcctgcttctgcatctgcgtccacctttgtatctgcagcagttgaagcggcagatgtttttgagttttcttcgatattgctgtcattggggttttgtttaacgctgtttaaattactgtcttttggttctgttttgactgtatcagttgcatcagtcacatcttcaaactcatcctcgaatgcgttttcagccgcatcttcatcatcttcatctcctacatcttccatatcctcttctacgtcttcttcctcttcctcctcctcttcttcttcttcctgttccttg

SEQ ID NO: 174227 - DNA, 387 bp, Saccharomyces pastorianus
atgaatgcgcatttcttcaagcctgatattcaagaagagacggaacttgcctttgaaattttgagcaagacaacgctgacagagaaatacgttaacagtttggagtacttcttgatggaattcaggtgggagaataaactagttggtctaggcttaaaacttcgggaatccaaaagaacctggcaaaggagaaaggcgttatttgcccttttcgaattttggagagaccaatcaagagacaaaagaagattccacaactacaccatcctgcatgcggtgaaagagatggaaaactacagaatatttattaatcgatccgtttcatggttctacaaccatattaccctgctaaaaatgatcctctacgacctctgcgacaatgtgaca

SEQ ID NO: 174228 - DNA, 645 bp, Saccharomyces pastorianus
atgaattataataactttgaaaattcgaagggtgatggacattctaggcttcccaaacctacatactccggaacgctgtcagatggctatgatgaatcgaaaattaaaaggcaaaaaacagactctgcttttaatgcagcttactcacctcatatgtatccgaactctccgtattatgaaggttcatggaataccggttatactcctcaacttcatcatgtagcccctcataatcaatatttccatccaatacaaccgtccactcagtacaattatacgagtcctcccaattatacagaaaattacataccgccagttcatcagaatatatcttatgcaccagcgcttaatttacagaagtggccatcatcatattgtgaaaacactcaagccttaaagaatgataaagattaccaaacatcaattagttatgaagatgttgcaataccgaccgcaaaggaaatacaattgattgagaaaaacagagggaaagatacgtttatgaatgaaataagtccagtaccatcaagcaaggatcaagcatctgcggagcctacagaaatcccaagaaaggatcccgagctggcaaattctaatgccgaagatgatcataataacttagggctagaagatgatgatcgtgat

SEQ ID NO: 174229 - DNA, 105 bp, Saccharomyces pastorianus
agtgaaagtacgcatcgtagagctgtcgttcggcctggcactcgctatttcgtaacaacgttccaggacacggaaaactcaactcattatagtatcctctgttga

SEQ ID NO: 174230 - DNA, 579 bp, Saccharomyces pastorianus
gtcgtagacaaaataggccgtcgtaaatgtctgttatttggtgcagctgggatgatggcttgtatggtcatatttgcaagtatcggggtgaaatgtctttaccctcatggccaggatggtccatcttcgaaaggtgcaggtaatgccatgattgtgttcacttgcttctatatattctgctttgcaacgacatgggctcctgttgcttatattgtggttgccgagtcgttcccttcgaaggtcaaatctagggccatgtcgatttcgactgcatgcaactggttgtggcaatttttgatcgggtttttcacaccattcattactgggtctatccacttctattatggttatgtgttcgtaggttgtttggttgcgatgtttttgtacgttttcttctttttaccagaaacaattggtctatctttggaggaaatccaattactatatgaagaaggtataaaaccatggaaatctgcatcttgggtcccaccttctaggagaggtatttcttcggaagaaagtaagaccgagaagaaggattggaagaaatttttgaaattctctaagagttctgattga

SEQ ID NO: 174231 - DNA, 216 bp, Saccharomyces pastorianus
tcgaggtcattttggtcaagctcgtgtgtttcttctgctggagcctcaccggcatcgccggtaatcttgccctcttgcgtgtgttccccttcgtcgttctcatcctcttcttcgttctcatcctcttcatcttcttcttcttctgcctcgtcttcttcttcttcgtcctcgtcctcatcctcgtcttcttcttcgttgtgtgggacttctgtgtca

SEQ ID NO: 174232 - DNA, 810 bp, Saccharomyces pastorianus
atgaacgagacagatactactctttgtcaggttaggtttcagaaaagcttttttgaggagtatgagtttaaaccacatgagattgtatttggagaaaatggggttcaagttatagaagatacgtacggcaatagtcataagttatactccttccgtgttaatggaagacacctaacaactatatcaagaaagccggatggtgatggcatcaaatcattcacaattgcggtaaacaacacttctacctgtcctgaatcacttgcaaatagattgattgtggtgattgaaatggattcgttaatagtcaaagaatactgtccccaattccagccaataaaatacgatcccataataatcaaccttaagtacaaaaggaggtttttggatgtttttggaactgctgcctccgatcggaatccacaggagcccttggaccctaagctattggacgtttttacaaatacagagcgtgagctaacatcagccttatttaacgaagaagtggaatcagacatacgtaaaaggaatcagttaacggctgctgatgagattaattacatttgttgtaattcaactttattgaagaattttttagacaactgcaatgttaatgtaaccgatgaagtaaaattggaaattaacgtacataggctaagcataactgcattcaccaaggccgtctacggcaaaaataacgaccttttaagaaatgcgttaagcatgagtaacactatcagtacgctcgatcttgagcattattgcttatttacaacaatcgaagatgaaaaacaagataagcgatcacatagt

SEQ ID NO: 174233 - DNA, 96 bp, Saccharomyces pastorianus
gattcagtagatctagtacattatgggtggtatgttggaatgtggatcgactatcatctactaactagtatttatgttactagtatattatcatat

SEQ ID NO: 174234 - DNA, 750 bp, Saccharomyces pastorianus
atgacagaattttattctgacacaatcggtctaccaaagacagatccacgtctttggagactgagaactgatgagctaggccgagaaagctgggaatatttaacccctcagcaagccgcaaacgacccaccatccactttcacgcagtggcttcttcaagatcccaaatttcctcaacctcatccagaaagaaataagcattcaccagatttttcagccttcgatgcgtgtcataatggtgcatcttttttcaaactgcttcaagagcctgactcaggtatttttccgtgtcaatataaaggacccatgttcatgacaatcggttacgtagccgtaaactatatcgccggtattgaaattcctgagcatgagagaatagaattaattagatacatcgtcaatacagcacatccggttgatggtggctggggtctacattctgttgacaaatccaccgtgtttggtacagtattgaactatgtaatcttacgtttattgggtctacccaaggaccacccggtttgcgccaaggcaagaagcacattgttaaggttaggcggtgctattggatcccctcactggggaaaaatttggctaagtgcactaaacttgtataaatgggaaggtgtgaaccctgcccctcctgaaacttggttacttccatattcactgcccatgcatccggggagatggtgggttcatactagaggtgtttacattccggtcagttacctgtcattgtcaaatttc

SEQ ID NO: 174235 - DNA, 231 bp, Saccharomyces pastorianus
aaatacaacagcagcaacaaaagcaacaacaacagcagcagcagcatcagcaacaacaacaacaacaacaacaacaacaacaacaacaacaacagcaacagcagcaacagcagcaacagcaacagcagcagcaacaacaacagcaacaacaacaacagcagcagcagcagcagcagcagcagcagcagcaaggacaaataccgcaatctcagcaagttcctcaagttagat

SEQ ID NO: 174236 - DNA, 114 bp, Saccharomyces pastorianus
cccagaaatctcatgactaattcaaacgtcaggaatgtcgcaccattaacgggcgcggacctaaccattgttggcccaaaccctttgaaaaaggctctgataccttcttttgca

SEQ ID NO: 174237 - DNA, 531 bp, Saccharomyces pastorianus
tctggagaaactactttttcttcttctaattcattctcttcatcctcttcgtcttcttcgttcaattctgggacttcttcttcactagattcttcggaaaattctgctctttcggcttcctcctcatcttcctcctccttttcaacggcctctgtttcgttggcctgttctggaccagattccgccttttgttcttccttcttaatttcacttatttccttcttcatttcatcaacattctccaaaggagagtctgtctttttaacagcttttggttttggtgtggcaatagcagcccatgacatcttctttggttgggaggtagttggctcagaagccttctttgacattaatgaaggttgttctgtatgcttgtgttcttctttgttttcttgttctacttgcagttgctgttcttcttgcagttgctgttcttcttgctcctgtgcttgcttctgttcaagttctttttctttttcttcttcttcttcttcttctgattcttcttcattatcattagtatttgtatct

SEQ ID NO: 174238 - DNA, 489 bp, Saccharomyces pastorianus
gatactacccctagcactgctcaaggtgaatattgtacatctaaggctatttgggttttgaagaagatatctatactggtctttatttattttgtaattttgtttcaattgacaccagatctgcagtacctcggtagcaagtaccccatgttttcgggatattctgggtatgttcaaagttcaagtctggtattagcattgctaagtgggattttttatttttcttgtatatttaatccaacccttaatcgagagaaggaagaccccctaaagcttccggaaacggattgtttgaaaaatgacatgacgaaaaatcatccaaggagaatttattggttattattttctctcatgatttctggggctttttttgcaatcaaaattagggatttcttccgcaacgatcaaacgatctatgcaagaaggttattacagttattgggctgggatgtcggttatctaggtaatttttttgtgttttaccaaata

SEQ ID NO: 174239 - DNA, 1149 bp, Saccharomyces pastorianus
gcgctgaggtactatctaacgacatattcgaatctatgttggttgttcggtcagttgttcgccgcaggtattatgaaaaattcccaagatagatactcagactcggacatgggatataccctcccttttgctttacaatggatctggcctgttcctctagcagtagcgatattttttgcacctgaatctccatggtggcttgtcaaaaaagggagactagagcaggcaaagagagcgctcgaaagaacattaagtggtaagggagccgagaaagaattacttgtggctatggagctggataaaatcaaaatgactatagagaaggacaagaagctgtcagacaatgaaggctcctatttggattgtctgaggggaaaggttaatcggagaagaacgagaatagcctgtctgtgctgggccggccaaactgtttgtggtgcatcgctaataggttactcaacttacttctatgaaaaagctggtgttagcactgaaaccgcattcacttttagtatcattcaatactgtcttggtattgccgcgacatttttatcctggtgggcctcaaaatattatggtagatttgatctctacgcttgtggactggccttccagaccgttatgctgttcattataggcggcttgggatgctctgacacccacggtgccaaaatgggaagtggcgctcttttaatggtcgtcgcattctcttacaacttgggaattgctcctgtcgttttttgcctagtctctgaaataccatcttcgaggctgaggactaaatcgatcattttggctcgtaatgcgtacaacataggaaatatcgtggtcgcggttttgattttgtaccaactgaactctgaaaaatggaactggggtgcgaagtcaggctttttctgggggggattatgcctggctgttttaatttgggctgtctttgatctgcccgaaactgcaggtagaacatttattgaaataaatgaactatttagacttggagttccagcaagaaaattcaagtcaacaaaagtggacccatttgccgccgccaaagcaatctctgatgacatcacccctaaagatcccaaggaagatatggaagctttcgccgaggagagagagcaaagcaccccatctctcatgatttga

SEQ ID NO: 174240 - DNA, 177 bp, Saccharomyces pastorianus
gagaccagtgctctggactccacctacgtcgaggacgcgttcttgaccatggccagacagatcaaggagagtatgtcccaacagaacctgaacgagaccactcagaagaaggatgacaagggcaacgtcaacctaaagggccagagcttgacctacaccagcggcggctgctgttaa

SEQ ID NO: 174241 - DNA, 237 bp, Saccharomyces pastorianus
cctatattggaaacgatagcctatccacgtatacaccaccagttactgcccgaccgcatagaactggaaagcttccccatgatcggcaaagccgtactaagcactctcaaggaaatgggatatacgatgaaagaagtatttcccaagagcgtagttaatgctatacgcaatgtcaggggagaatggcatgcggtgagtgactattggagaaagagaggaatctcctccgtatactaa

SEQ ID NO: 174242 - DNA, 72 bp, Saccharomyces pastorianus
tttgcattacaagtgcaacgctctaccactaagctaaggaggcaagtctttcttatgttacagcaaaattag

SEQ ID NO: 174243 - DNA, 90 bp, Saccharomyces pastorianus
atgatcaccggtgttccatggtactccagcagattaaagccagccatctccagtgctctatccaaggacggtatctacactatcgcaaac

SEQ ID NO: 174244 - DNA, 615 bp, Saccharomyces pastorianus
atgcctaaatttgaaaaaattaccgaggaacaggataatggaaaagctttatcgaaaaaccttatctccaacgaaccagttgatctgctgtcagatttattgggtgaggatagcaaggctgaaagcaaggcttctactggcgacaatgtgaaaccaattgacatattagaagagatttttggagagaagaatgacattgctcagctgcccaaaaatgcgaacaaggaagaatcaatcaatcattcgtcggcagtggaggcaaactcaggtgtcaccttaccattggatgccaacaagatatatgacagttcctcactgaatgtatatgcttccttgctctctgcaaattctggattagcacatttggatttatattttcaggcaaagtctttaatatctgacttaaaaactttctgtgccgttcctaaagctcaaaagctaacactaggccagttatatccatcttccacaataaacgccagccaaatttgcaagcagtcattgaaaatttctggatctgggaaactgaagttaagagttaagttggattttcatttaaatggctcttcatctatcaccaatgaacagtttgatcacaaattcgatgaaactcta

SEQ ID NO: 174245 - DNA, 96 bp, Saccharomyces pastorianus
gattcattagatctattacattatgggtggtatgttggaataaaaatcaactatcatctactaactagtatttacgttactagtatatcatcatat

SEQ ID NO: 174246 - DNA, 210 bp, Saccharomyces pastorianus
atggtcaaattaacttcaatcgctgctggtgtcgctgccatcgctgctactgcttctgcaaccaccactctagctcaatctgacgaaagagtcaacttggttgaattgggtgtctacgtctctgatatcagagctcacttggcccaatactacatgttccaagccgcccacccaactgaaacctacccagtcgaagttgctgaagccgtt

SEQ ID NO: 174247 - DNA, 912 bp, Saccharomyces pastorianus
atgcagctctttccttttctatcgttgacattgtttttgacgtattccgaggctgtttttggctcttcctcaaactcttatgtcaaacttccgattcagaagttagctaatattccaaacataaacttagaggatgcatctggtatttctaaaagaagcgaagctttcaattctaccttgataaatgtgtttgcaagtgcacaaatgtatgttgtcaagatggaaatcgggacccctccccaaacggcttatctccagttagacactggctcttcggatttgtgtgttaatgaggccgatacctcttactgtaaatcattggccgacgatgataacatttggactagtaattacgagctcacagcaactgcttctgagatttcctctacaactacttcatctaaggcttctaatacaccctgctcgtactggggtaccttcaatcccaacacctcttccacgtttaagtctaacgagacgttttttaatatatcatatggtgatggtacgtattatgcaggaacttttgggacggatgttgtctctttgggtaacattactctaagtaatttcacttttggggtatccaatgatacggcaaataatggtggcattttaggcgtatcgcttccttctgcagaagaaacagatgaattgggaacgccctccggtaaaacaccctttgtatacgataactttccaatggcattgaaaaaccaaggaaagatcaaaaagatggcatattctttgtttttgaatgaccctaatgcacgctttggaagcatcttgtttggcgctgttgacaaaagtaaatactcaggacagctttacactcttcctatgctgcaggctttcaacaccttcgattctgagtttgcaggaatgtttgttacagcacagagcgtcgccata

SEQ ID NO: 174248 - DNA, 279 bp, Saccharomyces pastorianus
atggaagacaaaaagatcgaagatgaaaagagcgtaggcttattatcgtctaagagtgttgaatcacaaaacatcgtactaccaaaggatatcttcagaaattcatttacttggttctgttacgagacttacaagtccctagcgtttcgtatctggttcatattatggttgccgctcactgcttggtggaaggtgtccagtgaatggatttatcccttcttagctaccctttttttggttgaagtgctattcttcctccccctcattctaattttagtc

SEQ ID NO: 174249 - DNA, 84 bp, Saccharomyces pastorianus
ctacaaatgtcatgctacagcatagctacgaatctatcagcccgtaacttaaacgtgcttgaaataaatcattataagtcataa

SEQ ID NO: 174250 - DNA, 345 bp, Saccharomyces pastorianus
atgcaaacaccttcagaaaataccgacgttaagatggatactctcgacgaacccagtgcacatttaatcgaagagaatgtagctcttcccgaagacacattcagttcacatctgagttatgtactttatgaaattgctcattgtaaaccgatcatgtttatgatcatcataatcgtgagtttgatctcattgattgtgctttttcatgataacgacgagtgcactgtgatcttaatgatatcccttttagtagcctccatggctttactggtggttgcagcattcacattcgggaaagcgataactgaacaggagttcatgataaagcttttagcggaggtgatc

SEQ ID NO: 174251 - DNA, 165 bp, Saccharomyces pastorianus
atgatgataataatatttatagaattgtgtagaattgcagattcccttttatggattcctaaatcctcgaggagaacttctagtactttctacatacctaatattattgccttattaaaaatggaatcccaacaattatctcaaaattcacccaatcttcacatt

SEQ ID NO: 174252 - DNA, 408 bp, Saccharomyces pastorianus
ctgcaggtcatggaaagaggcagatatggtatttcaaagtcaatgaacacaattttggaaagcatacatccattgacagacgcgaaagttgataacatactcttgcatttagggctctgcctcaatatttgcagtagagaaaatagtcgtttaaaacttgacggcaaattatggtatgatatgaaaactatatttgttaaaatgatccgtgacggttctgacactgaaaataggttagtacagggcctgttttacttaaatttttcatttttaattaaacaacggaaagaaaatagtaatttagacccaggggagctcaatttgttactagtagagctggaagcatttaaatcggaaacatctcaatttaatgaaggtatttcaaataaaatcgaaatagcgttaaat

SEQ ID NO: 174253 - DNA, 192 bp, Saccharomyces pastorianus
atggtttctaccacgcaatcgaggtctttgaaggccatgggagaagagatctggaaaaataaaacagaaaaaatcaatacagaattatttacgctaacatatgggtccatagtggcacaattgtgccaagattatgaacgggactttaacaaagtgaatgatcatttgtatagcatggatataatattgggt

SEQ ID NO: 174254 - DNA, 816 bp, Saccharomyces pastorianus
gagattctaggttattacaggttgtataggagagcgagtgcgagcgcgagatcgcgtaaggcgggtgacgacggagcgcccattgcgtacgaaatgagcgctgagtgggttgccctggagacaaaactgagcaagacagtgatggccatcacggaaggcgcagccgaggttgccgatgaggaaggatactgcgagggccttatcgattatgaaagctggaaacgcaggtgggtggccatctactcgcacagccgtatcgcggagataagacccttgccccgccacgcgctgccgctatcgcgcagcgcgacgcagactttggagcgctgcgtaagtcgctacacacgtacattgctgtggtgcacggcccttgcgggtatggcttcccgcagcgtcagcgccagggcggccgaatctcgaggacacaagtcgctaccgacggtggtaactcgccggcaagttgagcgtgcactatgcacagaagcccgatcacgtgacctacacgtgcttccaaggcgcattgctttgacactgcgcaaatgggaactagactatccgcgagagggcaaactgttccgcaccaaggagatggcacatctgtttctacaaagccagttgtccagacgggatgcgcccccagtccatcaagacgaaaatcaagaaaatcaagaaaatcaagaaaatcaagaaaatcaagaacaagataacactgcaagtgaaggtgaaagcgaggcagaaagggatgaaatcgacgaagcggacttgttccgatcagcattacatgaaaatcagttgctaaaatggttatccaaatga

SEQ ID NO: 174255 - DNA, 351 bp, Saccharomyces pastorianus
actttaactaagcaaacatgcgccaagcaggcatgcgactgctgtcgtattcgtcgagtgaaatgcgatggtaaaaggccgtgtagcagttgcctacagaatagtttggattgcacttatctgcaaccgtcgagaaaaagaggtccgaagtccattaggttgaggagcttgaaaagaatagcagaagtgcagagggaaagcggtcctaacaccattgcaactgctcctgtaatatataagagggttcccaaaaagctaatcgatcagtgcttgcggctctatcacgataatttatacgtaatatggccccttctttcgtacgatgaccttcacaaacttctggaggaataa

SEQ ID NO: 174256 - DNA, 204 bp, Saccharomyces pastorianus
atgagtcaggcaagtaaggacaaggcttcgctcaataaaaaaagatcttcattggcttatgaccctgtcaacatggctaaaaggttgagaacacaaaaggagatctttgatcagaataacaaagctctaagaaagggaggtcatgacagcaaaactggaagtaataatgccgacgatgattttgacgcagatatggaactggaa

SEQ ID NO: 174257 - DNA, 306 bp, Saccharomyces pastorianus
actgtggtatccagcgaggaatattctgaattgcaacgcaaatactcagaattggaaaaggaagtagaacaaccatctctagcatacttagttgaacacgccaaggctaccgatcaccatttactatcggatagtgcatacgaagacctagtcaagtgcaaggagaatcctgatgtggaattcttgaaggagaagtctgctaaactgggccatactgtggtatccagcgaggaatattctgaattgcaacgcaaatactccagaattggagaaggaagtagaacaacccgtcactggaatacctag

SEQ ID NO: 174258 - DNA, 90 bp, Saccharomyces pastorianus
atgcctgcaggtcttttatatgtttcattatcctattacattatcaatccttgcacttcagcttcctctaacctcgatgacagcttctca

SEQ ID NO: 174259 - DNA, 612 bp, Saccharomyces pastorianus
atgaataatgagcatttgctgaaggtggatcccatccccgatgtgactattaaacgcggccctttgaggtcttttctcataacaaaaccctgtgataatttgagttcattacgaacagttacttcatctaaggaaaagcttctagttggctgtttgctgatatttactactatcgtaaggctacacaatatctccctgccaaatagtgttgtttttggtgaaaatgaagttgatacatttgtttctcaatacgtgaacaacatattcttcaccgatgttcatcctcctttagtggcaatgctatatgcaaccgtgtcctctgtttttggttataaagggcttttcaattatgggaacattggtactgaatacacggcaaacgttccatacgtcgcgatgaggttcttttctgctactttgggcatcgtgtccgttttggtattatacttaacgttacgagtttctggcgtgaaaattgcggtagctgccatttgtgcagtatggtttgcaattgaaaactcctttgtagcgttgtctcgtttcaccttgatagagggaccctttgttttttcatgggatgtgcagttaattcttagaagatcgaacttattt

SEQ ID NO: 174260 - DNA, 1983 bp, Saccharomyces pastorianus
atgaggttaaaagtatcagaaatgatagggccgcaattcggtgctgtggaagcattactatcaaatgatttctttgcgattacggatgactctcaaattgtatattttacaaagaacttaaaggtagaaagaaagacaccgtcattattagagccacaagaaatcatgtcagtagttttgaataaagcagttaacgaacctgtactatatgttcatagaagggcgaatggaaagttaaaagtcatttttaacaacattcgcatacattactatgcaaggtggttagaaatactaaagaaaaacatcggcccggataatgccagttcaaaagatgaacctgttgcacaaaagcttagtaaaaaacaaccgacttcaggatttccctgggaactcaaatgtctggactgctctctaattctgcaccctttcagattaaaaagtgtaatggtcattgtacttgacaatctaacaactggtggaagttcatttattccgcaggcaaagcttctttcaaaggcgaatacactcttcctaatagatgactatcagaatttcaaaattcaaaaagataagaactggcctagtttgataaatttttatgctggtcaaggtttctctgcaatcggtaaaatagatactttgaattttttaataaacaaatccgatggtgcccttttattggattgtaaaatagaacaagttggtctttcattatgcgcggattcttttcaaactttttgtcagctttgtattgatttaaagtatcctcagacgtttcctgatgaggaaaaatttagaacgcagttgaaaaatcctatcgatgtattcaaagacatcgattgtgatcttttcaattctgccttcatccgggagaacaatcatcaaaatgattacgactcagtgcatttggtagacagttttctcgacaaaactcacgagttcaacaatggtgccagaagtaaactatcctctcagggttcatatgaaatggacagttcctctggaactgccacgggtggtattttacttccccatgagagttatctagactctgctcagccaaaaaaagaagatactccaccaatcgcctcaaatgagcaagaaagggatgtggatataaggggtagtatagacgtcgaaaaagttgttataaaactattcgatgggtatgattggaaatatacgcggaaatttatcgctaatactgttgaaaaactggataaagagctcagtaaagcggaagcaagtagttcgaaatcaaatgtaccccaatcagaggcaaatatttttgactctatttatatatctgctaacaaaaacaatgtcaccgatttgagaagaaatcttgatggtgagatccagggggttcaaaattccttctctgatgtctctaaagttaatttgcgaccttctaagcattacaaagccctgattcaattgaacaaagtacatgtcaatttgaagaattatcgagtagatgaacccgatgagtctaactctgataattccacagatgttttgaaccgatgtgtagtttccatttacgaatttgaaattatcgataatgttcccacgtccgcctggaataaatttgtaactttgctaaagcacgaaccgtggccacacagttctccgatgtttcttctggacctggaatttatccggccggtcgactttttgcaagcagtggaattagtcatgcaattaaatgttgcgcctttacgccttcacgtggatcaagacactttagagtttctaataaggttcttagggttcaaagataaaagatttgaattaattgatgagtatccagatattgtatttattcaaaaatttagcattaattcaattaagttaagattagattataagccgaaaaaagttgattatgcgggtttaagatcgggccaaacttctgaactgatgaatttttttacccttgatggatccaagattattttgaaaagcgtagtcctgtatgga

SEQ ID NO: 174261 - DNA, 558 bp, Saccharomyces pastorianus
atgtcgatcgttgcgttaccgtctagcttccaggagagcaatagcagtgacaggtgcagaaagtattgcagcagtgatgaggaaagcgacacgtgcattcatggtagtgctaatgccagtaccaatacgactaccaactccagcactaatgctactaccactgccagcaccaacgtcaggactagtgctactaccactgccagtaccaacgtcaggactagtgcgactaccactgaaagtaccaactccagcactaatgcgactaccactgccagcatcaacgtcaggactagtgcgactaccactgaaagtaccaactccagcactaatgctactaccactgccagcaccaacgtcaggactagtgctactaccactgccagcatcaacgtcaggactagtgctactaccactgccagcatcaacgtcaggactagtgcgactaccactgaaagtaccaactccagcactaatgctactaccactgccagcaccaacgtcaggactagtgcgactaccactgaaagtaccaactccaacactagtgctactaccacc

SEQ ID NO: 174262 - DNA, 339 bp, Saccharomyces pastorianus
gcaccattagattcaccacccgacgcccaagtggatgcaccgccccaacttgatttgttaccccaggctgaagcaccaccccaagtagaagtagcaccagtaccttggccgccccaagctgaggcaccgccgccagcaccgccccaagcggatgcacctccattaccttggccaccccaagtggaagcaccaccccatgaggagacaccaccaccacctgagcctccatgcgcatttacagctggtgttttgccaccatcgaaggagctccatcctggtgtcataccaccgctaagaccagaagaggtagccgcagcacctgctgcaataccgccagtg

SEQ ID NO: 174263 - DNA, 486 bp, Saccharomyces pastorianus
gaaattcgtgttcagggtacaaattacgtggaggatagaattattgccttaaggaacaatacagcttcaaaacatggatttcaaaacattaatgtcttgagaggtaacgctatgaaattcttgcccaacttttttgaaaagggccagctttctaaaatgtttttttgtttccccgatcctcatttcaaacaaagaaagcataaggcaagaattatcactaacaccttgctgagtgagtacgcatatgttttgaaagagggcggtgtcgtgtacacaattacagacgtcaaagacctgcatgagtggatggtaaaacatttagaagagcatcctttatttgaacggttgagcaaagaatgggaagaaaacgatgaatgtgtgaaaataatgagaaatgccacagaagaaggtaaaaaagtggaaagaaagaagggtgacaagttcgtcgcttgtttcacaagattaccaacgccagccatattgtaa

SEQ ID NO: 174264 - DNA, 84 bp, Saccharomyces pastorianus
cccgcgttattagcacggtgccttaaccaactgggccaagagaccaagaacttgtatgatagtccagaggagagtagcgggaaa

SEQ ID NO: 174265 - DNA, 288 bp, Saccharomyces pastorianus
gatttcatcaagcctgtaataagaaattttatgaccaacgcattgaataagcacaaattagatggtattggtctagaacttttagatattctaatagtgactacctattatggtccgaataaaatcaatgctttcttaatggatacatttatcttaaacttgctaaaacagtgccattacaagttttttgtcagtaatatctctgagctggttattcaaatttctaaaatcgattgtgacttagtcattctgctagaagatttaaggtcacggattgatttagattga

SEQ ID NO: 174266 - DNA, 1140 bp, Saccharomyces pastorianus
atgttaatttcaaaccatgaaaacttcaaaaagtttgatatttacgaaaagtttatcaaatgcctaggaaagttatatttcaatttagtcactggctctccggctaatttcatattactgccatgctctacgcaaattctaatcacttatactaggctaatttttgataaggcccctaaagtatatagagagaattctgatgtcacgggggacttttgggaacagactgctattagagggcttttaattttgaaaagggtcattaatttcattcacaaaaagggggcaattacgttaaaggcaagaagtgataaactaaccatagatgcttctatcaacaaaatcaacacagaatttctgaatgagaatttgataacaaggttggttgacactttaatggaatggtacttgaggttaagaccaactgaattagaaaattggtttatggatccagaagaatggataaacgaacaaatggccacgagttacgaatatcaaatcagaccatgtgcagagaacgtttttcaagacttaatgaatactttctctgagctgttggttccctacctgttaaagaaaattgaaaatgatgcttcaaagctatcaaactcattagacgattttttaaggaaagacgcaatttatgcaagtttccaattaagtgcatccgctgttagtgaaatggtagattttgacaggttactaattcaggtttttttaccagaagctacaaatacaaacatatcaggcgacgaattaaggattatcagaagaagagttgctttaattataaacgaatggtctactgtgaagtgttcggaagaatctaaaagtttatgttacaagttatttacaaacttcctgacagatgaagacgacaaagttgttttgttaaccacagtccagactgtcagaaccatggttgatgactggaacttcaacaaggatacttttcagccatttttaactgaaaatgttcatttattgttgaggaaaattttaccatctgtgtcgttaaccgagacaaggctatatgttctaaacaccttgagcgatatcataattcaaacaaaacctttaattagcagggatctattagtcgaaattttgcaaatcataccaaacctttgggaaatagca

SEQ ID NO: 174267 - DNA, 165 bp, Saccharomyces pastorianus
atggatcaagataaagtcaatttcgcatcgggcgataacaacgccgcctcaaacatgctgggaaccaacgaagacgtgatgatgtcgggtgctgagcaagatccatatttcaacgcatctcaaatgggtaatactggatcatcaggcgggtatgacaatgcttgg

SEQ ID NO: 174268 - DNA, 66 bp, Saccharomyces pastorianus
atgtggttgtccaagcaagagtggcaagaaagtgggccagccgcaatgagtaaatttggtccgaga

SEQ ID NO: 174269 - DNA, 660 bp, Saccharomyces pastorianus
  modified_base (497)..(531): a, c, g, t, unknown, or other
  modified_base (607)..(607): a, c, g, t, unknown, or other
atgaatttagggtatatggggcatattgtattgatcgctgaagaagtggtcaagttttccaagctgtacaaagttgaattgatctcgcctgatattcaagaaattctgcaaaccgaggattggcaatactactctgaagaagtactgaacgaaacgagaatgatgtactcaaagattcttggtggtggcagctacatagacgatggtaacggtaatattattcctcaactacccgataatagcgcagtactgggctccaatatggatgctaatgataacaatgaaatgtttgattcagatacagggaatgacagtgacagtaatggtggcggtcaattgatcaacgttgagtctttagaggaacaactgtgtttatccacggaatcagatttacacaacaagttaagagaaatgttgattaataaggctcaagaagacgttgataacaagaacacagaaaatggggtcttcatactgggaccaccagatgatgacgnnnnnnnnnnnnnnnnnnnnnnnnnnnnnnnnnnngacaataacaataacaacgacaataataacaataacaataataataataacgataataatgataatgacaatgacnaaactcgtgattataatgaaaatgctgctaatgataatgattatgatagtgaa

SEQ ID NO: 174270 - DNA, 1491 bp, Saccharomyces pastorianus
atgggtcctgccatacataatcaactatatgaatgtggattaaagactacgtctcaagatggcttcttgatcgacaattatgaaactcaattatttcaatcgttgaacaggtttatcaatttcataaacaatgctaatcagtcagctagtaataaagaacaaaatacaaaattttgcaaatcctcctcaaattttttacgcttgaaactactaacggttctaagacaatggtgtgattcttcacgaagcaactgtacactggaggttagagatgttttgacccaatggtgggtcacacttttaaactttctaaattctgacacctcgcttcaaatagatactgcccttgaattgagcttgagcatagaactaacttctgtgtgtctcgagtgcctcagcaaaattatgaccatactaataatattgcctttccattcatccagagacatggaaatatactcacatcatcttttgctgaccattcattgcataacaaacaagttgattttgatttctaaaaactccaaaaaacttaaacgtacaaatagtgatgacaagtgctctataaacgacaagaagctgcaataccttaacaaatattcttccttgctgcgagcattcatcgggaagttaaatgcttacgcatttttttatctaccagaagactttcatttcgatacaattttgttattgacagtttctcctcaaatctcttcaagtattcaaacatctttgttttcatggaagaagagacaatataaattcaccgacgatcagggacaaatgatccgcactgaagcttttgaaaataaagatactaaattttttaagatcattgtttcttatattaaaaatgattttgtacttatgtcattttattggcactattggtatatcatacttcaatttatgaaattctctgattcagatgtaggaattaaaaaatcgacattgtcatgcatacctggctcagaaattttattgacgcatgtaaccactagattcttgaattcagatttgaataaattcacgcgaattattaaacaaacgccgaatccaaggatagcaaatgagaatgtgacagagtcacatccaaatttcaagagtttgaatagtagcaatgctttaattacatctgaaaggattaatgattacgtattttctaattttaagacaatcaaattatgggaatgtcttagaagcctttcaggatgcattcttaaagaaaatcatccggaatacctggaaaatatgctttccttacatgagtctctattgatagactatgtctccactatttcagcgtacgattatattgcagcgaacgtcatttacaataaggttctccagtttattattttccagtttgaaagtttaccttctctgaaattcattcaatggaggtcgtggtacaatgggcttttgagtatgttaaggaccacaaatgtttactgccagactgtttctttattatgccttttcaatatttgg

SEQ ID NO: 174271 - DNA, 411 bp, Saccharomyces pastorianus
atggccctgattgcaaagacaacatctgatgactacaatcttttaaatttagtttccaccaatgaaaatattttcaatagaaatgataatgactacaaagtttgcattattgatattagcacaaactctattacattccatattgaaaatttacatgatggcgaactcattgttttagtaaacggtgttatctggtcagaagtttcatgcgcttcaattttagagcatgtaggcgaagaatacgttgtcgttaacggattagtcccttcttgttcttatgatattcaattcatcaacagactaaatcaccgagatgattatctggtctctgattcacttgtaaggacttgtgggaataacaatgcgattgccggaaaatttgaaaaccttgatttcagctacccttcatac

SEQ ID NO: 174272 - DNA, 528 bp, Saccharomyces pastorianus
atggctacactggtgaccaattcaaaggcgtacgccgttactacattacctcaagaacagtctgatcaaattttgaccctggtgaagagatgtgccagagaggcccaatatttcttcgaggatttgatgtctgaaaatcttaaccaggtcggtgatgaggagaaaactgatatcgtcatcaatgccaacgtggacatgcaagagaagttgcaagagctatctttggctatcgaaccgttattgaacatacaatctgtcaaatcaaataaagaaacgaacccacattctgaattggttgccactactgacaaaattgtcaaatcctcagaacacttacgtgttgacgttcctacaccattgttgtcattggcattaatgattattgatgctgttgtggatttggtaaaggctgctattcagtgccacaatgaaattgccaccacgacaagtattcctctgaaccaattctacttgaaaaacagcagatggacagaaggtttgatctccgcggaaaaggctgtggcaggt

SEQ ID NO: 174273 - DNA, 1104 bp, Saccharomyces pastorianus
gaatcattgtatcgctccgttgagagtggtgagtttgaatttgacctgtttaaagaaatacttcctgatttacaaaatttaaacttgaacactgacaaactgaagaataataccagccgatctcaattagaaaaaggtgaggttacattatcagacggttcgactttcaaactgaaccaagagttcatatttgaagctatctctttgtctgatgaattaaatctagatgaaatcgttgtatgtgaattaatactttccggtgatgccactgccaacaatggcaaagtacaatactttttgagaaggcaatacattctgcaaattgtttcctttatagtcaactgcttcgataaagatactcaattgtaccaagaattgataaaaaatggagccttggtttctaatatactcttagcattcaagttcattcatactcaactatctgaaatcaagcaacaaatcaataaggcccaaatactagaaaattataatgctctattcaggcaaaacattaaattccgaagagacttcttgttgagggaatatgatattttgagtcaaattttatatggtttagtggacaaaggtgccgtcacaggaaataaagatttcatagtatctttactcgaccacgtatcagagttggattccgatgattttttcataatatattacatccctgcattcttccatctattcgcatctttgagagttttacctgatacagatgttaaatttttacactctaaattcttgacggacttaaaggatgactcagtatattctaaaccggttaaagtagctctcatatttatttttttggcttacttcattggatggtgtaaagaggatcctaagaagagggctgacatgatggacttcaaaaccgatgttgatgagccaatgacttctgcggtagaattgggcgccattgaacaacttttaatatttgccgcagacacttctattgtggaacaagacaagagtatggaacttttctacgatacaaggtctttgctagaaagacacattccaagattagttcccaaacagcttcttgatgatgagaaaatattccatccaaacaaacaaatctacctataa

SEQ ID NO: 174274 - DNA, 84 bp, Saccharomyces pastorianus
tgtggtcgaggatgctgtgacatttgttgctgtgacatttgctgctgtggttgttgttgctgttgctgttgtggttgtgaattc

SEQ ID NO: 174275 - DNA, 165 bp, Saccharomyces pastorianus
atattggatatactggaagatactgaggcagctcttttgaaattggccagggacgtggacgacattggcttgataagtgagttttttcttacagaatttgttgtgttggatgaagataatcctatcgaatcgctcttcttcagaaaaggatgctggatatactat

SEQ ID NO: 174276 - DNA, 426 bp, Saccharomyces pastorianus
atgtccatcagagatttatatcatgcgagggcttccccgtttatatctttagaattcttccctccaaagactgaattagggacgagaaatttgatggaacgtatgcatcgtatgactgctttagatccactgtttatcacggttacttggggagcaggtggtactactgcggaaaagactctggcattagcttccttggcacagcagacactaaatataccagtttgtatgcatttgacctgtacaaacacagacaaagccatcattgatgatgcgctggatagatgttataatgcaggaatcaggaatattttggctcttcgaggtgacccacctattggggaagattggctagattctcaatcgaacgaatcaccttttaaatatgcggttgatttagttcgttatatcaagcaaagttacgga

SEQ ID NO: 174277 - DNA, 96 bp, Saccharomyces pastorianus
gtgtcgaccttcttttcgccacgtaaacttgcttggatagctcatctacgtgtagtaaccatatttccttatggtgctttcccttacaataggtgc

SEQ ID NO: 174278 - DNA, 249 bp, Saccharomyces pastorianus
atgcccttattaaatctttcgttgaatgattttataatccccctaacaatactattaagatacaggtaccaaagaaccaacgataatttttcatataaaccggtagagaatgacattgagaaattgaacaagctcttgcccaggggcaagtcgtcggatatagaaggtatcccatggacgtttcaaaatggtcatttaacatttgaaaactcaaacgacgctagcaatgagaacgaaaactacttctga

SEQ ID NO: 174279 - DNA, 285 bp, Saccharomyces pastorianus
atgcatgagctcataggaaacaacaattttggtaaaaagacctactacgtggaaagaagcaggaccggaaatctaccggtgtattccgcttataaaaatggaggtaacaaaattatcacggagatcagaaagattgaaggagatgtaattcaactaagaaatgacttgcaggagcaactgcctttcatacccaaaaaatcatggtctgtggtgatgcaatcgaaaaaaattattatcaagggcaatgcagtagaggctgtcaaaagggtattaaccaagaaattt

SEQ ID NO: 174280 - DNA, 609 bp, Saccharomyces pastorianus
atggctgcctccagagctgctgccgctgaaaagaacgtcccattgtacaagcatttggctgacttgtccaagtctaagacttctccatacgttttgccagttccattcttgaacgttttgaacggtggttcccacgctggtggtgctttggctttgcaagaattcatgattgctccaactggtgccaagaccttcgctgaagctttgagaatcggttccgaagtttaccacaacttgaagaagttggctaagcaaagatacggttcctccgccggtaacgtcggtgacgaaggtggtgttgctccaaacatccaaactgctgaagaagctttggacttgattgttgacgctatcaaggctgctggtcacgacggtaaggtccaaatcggtttggactgtgcctcctctgaattctacaaggacggtaagtacgacttggacttcaagaacccagaatccgacaaatctaagtggttgactggtgttcaattagctgacatgtaccactccttgatgaagaagtacccaattgtctctattgaagatccatttgccgaagatgactgggaagcttggtcccacttcttcaagaccgctggtattcaattg

SEQ ID NO: 174281 - DNA, 906 bp, Saccharomyces pastorianus
atggatgtgcatcctcctcttgcaaagatgttgtatgctggtgtggcatcgcttggtgggttccagggtgattttgacttcgaaaatattggtgacagttttccatctacgacgccatacgtgttgatgagatttttctctgcttctttgggggctcttactgttattttgatgtacatgactttacgttattccggtcttcgtatgtgggttgctttgatgagcgctatctgctttgccgttgaaaactcgtacgtcactatttctcgttacattctgttggacgccccattgatgtttttcattgcagctgcagtctactctttcaagaaatacgaaatgtaccctgccaactcgctcaatgcttacaagtccttgcttgctactggtattgctcttggtatggcatcttcatccaaatgggttggtcttttcacggttacatgggtgggtcttttatgtatctggagactatggttcatgattggggatttgactaagtcttccaagtccatcttcaaagtagcatttgccaaattggccttcttgttgggtgtgccttttgccctttatctggtcttcttttatatccacttccaatcattaactttggacggggatggcgcaagcttcttttcgcctgaatttagatctacactaaagaacaataagatcccccaaaatgtcgttgctgatgtcggcattggctccattatcagcttacgtcatctctctaccatgggcggttatttgcattctcattcacacaattatccagctggttcggaacaacaacaaatcactttatatcctcacatggatgccaataacgattggttgttggaactttacaacgcacccggcgaatctttaacaacattccaaaacctaaccgatggtacccaa

SEQ ID NO: 174282 - DNA, 198 bp, Saccharomyces pastorianus
aacttccgtggcatctttgcagcacacaccaaaggcgccactgataccatccaaatgccatgggtgcacgtgcactgttttgaaaagtacccgcctggcgaccaagtcactgaggacgagttgcatgcacgcgttcatgcccgtattattgccgcgcttcaaggtcactgcagacgatcttccgttgacatgccgtaa

SEQ ID NO: 174283 - DNA, 240 bp, Saccharomyces pastorianus
acggtgatcttactttgcttattctttatttatcgttcgcggatatcaaatattttcggtcatatcctttatcctggttgtattttcctcgtactggcaaaaagtttccaaaactcaagaactgtaccagtgaaaattgaagacaagatgcaatatcttttagttattattagtgagcaagaaataggtgctagcggaggggatgtaatcgcaaaaaaaaacgaatgtgtatttgtttga

SEQ ID NO: 174284 - DNA, 165 bp, Saccharomyces pastorianus
atgttcaacttcgtgagtacctcacggattttagatttaaatcttgatcaacctttggcagaagatgaactctggcatgaaagagatcattcttacatttcgtatttaaagcgcaagaggaaaaatatacgactcaaatctcaaaatgttgttacatattacaaa

SEQ ID NO: 174285 - DNA, 1293 bp, Saccharomyces pastorianus
atacccaaagagttggagacgttttccagattcttaacatcttctgttccggtaaagtctttcaacatagaaagacttcaatgcataatgttaaaagtgtgccatttcgatttcacatctttttcaggttgcgatttctccagagtgtatatgcttatccagaccgcttgttcgttagcatgcactttaggtttaaaccgtgatattgagattcccatcaattctcatgatcaggtatacattgaaaatctttggtggtggattttatacatggacgttcaagtatcctttaatcttggcatcgcactgcagattaatggtctacccataggtcgcttcaattattcaccaatggaggacaggcaagacgtaatttttaggaaatctatactgatgcttagaagtatacttgaaaaaatatatgacaaaaacaacattccaagcgttaaacagcttatactggatgctaaagaatttgtcaatctgaattacaaatccctttcatattatatgtcacctgatagctgtgatttcaatgagaggattgaagtacacactctcttacttcttcttaccagcatttcaaatttatctaatatacagagatacttcttcaatgataaaggctttgaaatattcaacacgtcaatacacttgtcctttacttccctgtatatatcaatcgcggtattgaattcctatttcaaaatggatattgaagatccccattatgaatctaccatgaagtttggtgggctgcctccacatattcagctaggcatgtgggttacatatcacacgatagggagagttctttacgaaatgtatggtacactattttcgagcctcttgtctccaatacctcagtctgcttacacagaagagtttgacttttcccaacctccgtttgagtcatttcaaatacccactgatcattacataagcctcaaaaatgtcagtaagagcttaaattcggcatttgatacattttatgcgccagattgcaaacagctcttaaaaataatgaaaaagcattattcttttctttttatcttttcgctggagaatatctgccgtatgatatttgagaatggactcagagtaaatcaagaatctcaaaacacaacaaatgctgtgccgagtttagatatggatgaaaatataaattcacgtgagattaagaacatttttacaaatagttttaaggagaatggaacaacggaccttttctgggatcactacgatagctccatcgctgcctggatgaacaaagatctagaacctttcctttca

SEQ ID NO: 174286 - DNA, 174 bp, Saccharomyces pastorianus
ggcgatagtactttcagcaatcagagcggtcgccgccataatattaactgcattcaccggataatcacccttcgccgtttctccagaaagcataacacaatcagcaccatccaacacagcgttaaccacatccgatacttcggcccttgtcggtctcggattgtgtgtcattga

SEQ ID NO: 174287 - DNA, 1314 bp, Saccharomyces pastorianus
ttgacttccgtaccgcaaagaacgaacaatgaaaatggtaaagagcgaccatccactgctaattctagctccatcacaccaacacctgttacgccgaacaacttaattcaaatcaaaagaaaaagaggcaggcccccaaaaaagagaacagtggaaacaatgatatccaattccacggatacgatagataagtcagatgcatccaatcggattaaaaacgagattccaataaattccttgcttccatcttccaaatttcatcaaataccatcatctccatccaatcctgtgtcacaaccggctccggttcggacttcaaggtcagccacacaagaaatagacattaaaagtttagaactggcctctccaatttcaactaatggtgatccaaacgcagaggattcgaatactactgatactgttcataataacgtggaaggaaaggtaaatgttgaagaaaataaaaccgagaaggagaaaataataaccatcaaatcatccagcgaaaatagtggtaataatacgaccaataataataatactgacaacgtcattaaattttcagctaattcagatatcaatagtgatattcgccgattaatggttaacgatcagttttcattaagttatgacgccagcggtaatattacggtcaaattaccacccgtttcctctccagcaggagcaacagctgccgctgctgcggcggttacgtcagagatgaatagacaacaaagagaattagataaaagacgtgattcaagggagaaaatgcttgttaatatgaaatataacgatcgcgataaagcaaagtcatttatggagtctaataagaaactcttaaaagcaatgaaagaagaagagaggaggaaaagaatgacttcgataatacatgataatcacttgaacttaaatttgaatgagatctccacccgttcaaagataaaaagtgcagaaaaaccaacaactaaaggttcttcaatgtcgccaaaaccaagatcggcctccatcagcggcatttcagaccaccaacaggaaggatatcaaccattagagcaagaaaaactcgtcgatattgacaatgagggctcaaacgcaaacagcgactctctcaagatgggtctaaccatatccgctgccgatacggttcacaaagttggaatacagtccatgctaaattctggggaagaggcaattaccaaggagaatgcagaatatgaaaggaagaccccgggagatgaagaaactaccacattcgttccattagaaaactcacaacctttggacacgattaggaaaagaacagcagcgatg

SEQ ID NO: 174288 - DNA, 126 bp, Saccharomyces pastorianus
atgaatcctaagggtactgacaaatttagcatcgagaacacgctatgtaatcatttcacactattaacatttggaactatttccatcgggattatagctattgtcttcaagatcctttcccccaac

SEQ ID NO: 174289 - DNA, 96 bp, Saccharomyces pastorianus; identical to SEQ ID NO: 173780

SEQ ID NO: 174290 - DNA, 1149 bp, Saccharomyces pastorianus
aaagacaatgaaattggggatgagaagagcgtagatgtgttatctgtcaaaagtctcaaatcccaaaagactgttctacctcaagatgttttccgaaacgaattgacctggttttgttacgaaatgtccaagtctttagcgtttcgcatctggatgctgttatggctaccacttagcgtctggtggaagctttccaataattgggtttacccacttatagtttcacttcttgtcctagttttgggaccaatatttctccttgttattcgtgaaccttctcgtaagcgctctttatcgaaacaactcactcagttttgcaaagagattactaaaaacacaccaagttcggatactcataattgggaagtcgttgtagcaaatctaaattcgtacttatatgaaaataaggcttggaatactaagtacttctttttcaatgctacggattgtgagaaaatgttcagaacaactgttcttgaaccattttctttgaaaaaagataaagctgccaaggttaagtcatttaaggattccgttccttacatcgaagaagcattgggagtttattttacagaagttgaaaaacattggaagttgtttaatactgaaaaatcatggagccctgttggcctggaagatgctaaacttcccaaggaagctcagcggtcaaagtttacttggttactagggaggattttcactatttactttcttccattatgccttgctttttttaattgtatctacacgtcacgaaatgatgaccttatatcagatttcttgtgtacggtggtaatctttctcttcatggtgtggcttttccgtaatataagaatgattgttttatccgttaaaatggaacacaagatgcagttcttgtcaactattataaatgagcaagaaagtggtgcgaatggatgggacgaaattgcaaggaaaataaataggtacttgtttgagaaaaaagtctggaataatgaagagtttttctttgatgggattgactgtgaatggttttttagccacttcttctaccgccttctatctgcaaagaaatctatgtggcttttaccattgaatgtggaactatggccatatattaaagaagcgcaattgtcccgcaatgaagagtctttaatgaagaaatga

SEQ ID NO: 174291 - DNA, 204 bp, Saccharomyces pastorianus
atggaaatgactgattttgaactaactagtaattcgcaatcgaacttggctatccctaccaacttcaagtcgactctgcctccaaggaaaagagccaagacaaaagaggaaaaggaacagcgaaggatcgagcgtattttgaggaacagaagagctgctcaccagagcagagagaaaaaacgactacctctgcagtatctcgag

SEQ ID NO: 174292 - DNA, 99 bp, Saccharomyces pastorianus
tttcccaagaaaaaagccttgttggcgcaatcggtagcgcgtatgactcttaatcataaggttaggggttcgagccccctacagggctttctttttttt

SEQ ID NO: 174293 - DNA, 135 bp, Saccharomyces pastorianus
ttattttttcttccttgtcgtacattatcttacttcatcatcaatcctcgtgtctctgcttatattaagtttgatgaccgtttctcaatctttatgacatcttcttacacagtatattgcaaagtactagtaata

SEQ ID NO: 174294 - DNA, 198 bp, Saccharomyces pastorianus
atgatatatcttggaactggtgtattgttacttctatatgaaaagcaagcaagcgacgaggaaacggatgagacttttgagaagagaagagaactttttcagaatgtttttacttatctaggatatataaccgcaatgactacagtcatgagcggagcatcctatgcattgaaaagaaatgccgtcaagcttctaaaa

SEQ ID NO: 174295 - DNA, 675 bp, Saccharomyces pastorianus
atgaattactttaaacctagcattaagttgattcatttcattgggaaacacaagccatggtcattgtggtcccaaaagattttcattaaaaacgagtatcatgatcaatggaatgaggtatacgaggaatttaaggaagaacatcaattaaataacgaagtttcgaagccaaagattagtgattccgataaaactgagactcctgaaacgataaccccagtggatgcccctccatcgaacgaacccactacgaatcaagagatcgacacaattagtacagtggaagaaaacgtggacaaccagaacgccgagcctgttcctaactcggatcatagccctgctcctaaccctgtcccattggattttaccaagtggttaacaacctttattaacaaagatcacttgactaatcagccagtaaatgaaagcagagaatattcgaaagagaatgataacaatataatcaatagcagttcaaaccgcgaccaagaaagtcctccaaatagtactcaggaaccaaacagctcttatagcgttgtgagtactcaagctgatagcgatgagcaccaaaatgcagaagaggaggatagtacgacagataacgcttcaaattctggagaagaaagccacctcgatgatataagcacggccgcttcttccaataacaatgtaagt

SEQ ID NO: 174296 - DNA, 123 bp, Saccharomyces pastorianus
ggggagctcagggatgacatcgcatctttgcaaggattgcttgatcgacacgttcaatttggcagaaagctacctctgcaggacgccatacgccacatccactggaattttatcacacattaa

SEQ ID NO: 174297 - DNA, 483 bp, Saccharomyces pastorianus
  modified_base (433)..(433): a, c, g, t, unknown, or other
atggaaaaaaatacggcaccatttgtcgtcgatacggcacccacaactcctccagataaacttgtagcaccttctatagaggaagtaaatagtaatcccaacgaattaagagctcttagagggcagggtagatattttggcgtaagcgatgatgacaaggatgccattaaagaggcagcacctaaatgtaataattgctctcaaagaggtcatttgaagaaggattgtccccatataatatgttcgtactgtggggcgacggatgatcattattctcgacattgtccgaaggctatccagtgttcaaagtgtgatgaggtgggtcattacaggtcacaatgtccacataaatggaaaaaagttcagtgcgctctttgtaagagtaagaaacactcaaaagaaagatgtcctagtatatggagagcatatattntagtagatgataatgaaaaggctaagcccaaagtccttccctttcatact

SEQ ID NO: 174298 - DNA, 198 bp, Saccharomyces pastorianus
atttgcgcatatataacagagataggtttaaataatttaataattgttgggatttcacaactattgaaggctataatattatgtataaagaatataccaggaagtcaactcccagaccttgaaatcctcaaaatgaagacgatagttttacataataatattactttttcttctttccttctatatttgtccttcaca

SEQ ID NO: 174299 - DNA, 627 bp, Saccharomyces pastorianus
cctgcaggtcctgccaaatatcaggctacggaactcggagagcaaatgagacaagattttgacctattgaataagagcattctacaaaacatcaagatattttcatcgtctgagagacgtgttcttcatacggcgcagtactggaccagagctctttttggggccgatgaattaggtagcgatgaaatcagtattagaaaggatcttttagatgacagtaatgccgccaaagatttaatggataaggtgaaaaagaagttgaagccacttttaagagagggtaaggaagctcccccacaatttgcctggccttcaaagatgccggagccatatttagtcataaagcgagtggttgaattgatgaattaccataaaaaaattatggataacaactttgctaaaaaggatgtcaactcgatgcaaacaagatggtgtacttctgaagatcctagtttgtttaaggaaaggtgggataaacttttcaaagaattcaataatgctgaaaaagtcgatccttctaaaatttctgaattgtatgatactatgaagtatgatgctcttcacaacaggcagttcctagagaacatatttgacccgggtcttccaaatgaagctatcgccgatgaa

SEQ ID NO: 174300 - DNA, 2547 bp, Saccharomyces pastorianus
ttgactgtagaaaatcaggaacacaatgttcaacccccatcggtaactagtgctggagattcgtattcgacacttgctacagatcttcccttaccaagtacgaatgatattatagaaagtcgagatcaacttacagaaagtgacttagatgaagcgataaatgccactgagaattttgcacaggagttatcatctcaaaggaaatcttctaaattgaaaggtcataaaaagaaaaaccagggacaaataaaggcgaatcgtgacagagatactattgtaaaactttccagttctgttggtgaaaccgaggaagcttccacacgggatgcaatctctcatgatttggaaagaaaagacgacgtaatagagatagccacagatacaataaatgacgctacagaatctcccacacagatcccaatagacgtcaatgtagttatcaaagaaacttctactaacaatgtagcggaaggcacagaaaatgtaccaccaatcaaagaatccacaggaattgaggttggcaatagcccaattacgagaagaaaaaaaaacaaaaagaaaaaaaccacgaatagaagaagtcgtaattcttcaaatcctgcagatactactgatttgtcaaaacagtcaactttagattccatactagtaggcattgaagagtacctacaggaagatggttcaaagaacgaggatatcaaagtaaatattgtccaagatgagcctgttaatgtcgaaaaaatggatatcggaaccagaaatgaatctagtgacgaaaccttcgacatagatgtgcctaacaaagataatgttgacgaaacttcctcaaagtccgagaacaatatcaacgaggaaaaggcagaacataccttacctcgagaagagactgagatcttaaatgttaatgagggaaatgcaacttcttttaaacaccaactagagccgcacggtttggagggaggtgatgaaaatgggcaagcgtctactaaggatgttgaaagtgaaagtttaactaagaatgggtttaatttcaaagagaacgaatcaaaacatttgaaagctggggaaaagcagcagactgaaagtgatagagacggaataagtccttcagttcttgcaaaaaatgagaaagaaacagaaatcgggaaagaagaccatgtttttgaacagaaggataaagaagacgaaaaatgtaggaaagaattatctgttaatcatgagaataacatgagccataattttaacgcagctggtagtgatagtatcatccctccagaaactgagcgagagacttatgatgacgaaacgatgggaccaacaaagcgcattagtgacaatgaaaaaaatctacaacacggtactaacgatatatctgtagaagttgaaaaagaagaagaagaagaagaagaagaaaattcgactttttcaaaagttaaaaaagaaaatgtaaccggggagcaagaagctgtaagaaataatgaagtgtccggtaccgaagaagaatctacatcaaaaggagaggaaattatggggggagatgaaaagcagtcagaagcgggagaaaaatcttccattattgaaatagagggaagcgcaaactctgcaaaaatttctaaagataaccttgttcttgaagatgaagctgaagcacctactcaggaaaacaagcctacggaagttgtcggagaaatcgatatacctgacgcgcctagggatgatgtagagattgttgaggctgtggaaaaaaatataatacctgaagatctcgaggttgccaaagaagatcaagaaggggaacaagtcaagctggatgaacctgttaaggccatgaaagatgataaaatagcaatgagaggtgctgagtctatcagtgaagacatgaaaaagaagcaagaggggactgctgagctttccaacgagaaagcaaaaaaagaggttgatgaaacagcaagagaaagtgcagaaggtgtagaggttgagaaatcgaagactcctgagtctccaaaagtagttaagcgttgtacctccggaagaccagaagatcttcaaatcaacgaaagagatcctgaggttctaaaggaagatgttagagttcccgatgaagatgtaaagccagaaattgcaacaaccattgagaattccgaagaagaagatcccaaatcccagcgcgttcaaatttcaacagaacaagctgaaactacacaaaaggatatgggagatgtaggatctactactagtttcaaagaagaagaaaaacccaaacgctttgaaattacacaagaaggcgataaaatcaccggcaaagatacaaatcatgaacatggtgaagctactgaggctgcgagcgaaaattcaaaagcaagtgatgttggaactgccgaaaaatatatagaacctagcagcgaatctgtcaagaaggacaccgaggaagatgcagaagtggagaattccgaaaaaactgaatttatcaaggtaaaggcagagcttggaaatcttgacgctccaaaagaggcagaagtcactgctgaactgaataatcgaaaatga

SEQ ID NO: 174301 - DNA, 372 bp, Saccharomyces pastorianus
atgaagggcgccaattttttttcgaatagtaacaatgcccacataccagtcgaaattgccagggatatgctagacgatatatttctaagtccaaaaaatctttatgaagttcacggtcctgggatatcagcaaaagctctagaaatagccaatgcattagtggatgttgtaaaccactatgaccaaaatatggagttggaggcttggaatgttttgcgcgatgtggttaagtttgttttctccctgaaatactgtgatcctaacatgatacagaaattcacgactaaatgtcaaagtgctctaattactctgcctatcacgagacttttgcaatcaagcgttagttccaaagaccatgccgatatagtcctt

SEQ ID NO: 174302 - DNA, 255 bp, Saccharomyces pastorianus
atggctaatttggcaggtgtgtcgaaattcgaatatttaaacaaaatacttgaaaccttggtcgagaagcgcaaagtaagatctgttatttctttagctaagcacttgtttttttatggtgactatcacggtaatcgatcaccgatagcagatccgaatatgcgcgcttgtattataggacaatctatggataactcaattgaagacttagcggttatgtatttgagtgcctgtgaattcatatcacaacaaaca

SEQ ID NO: 174303 - DNA, 465 bp, Saccharomyces pastorianus
ttagatatcagttctttatccacggattctgagtcgcttgacttcttcagcatacttaaggcttttgttagatgctcgtttagtatgatagcttcatggcgcagcttgccgatctgtaaaacatgctgttttgattcttcctcgtatttttccttcatagacacgtcctctttcatgtcctctatttcttttttcaagctttcaagaattgtaatatcattgttgtgtgcttccagctctgtgtcaagttgtgagcgcaaatcttttacttccagatccttttctcttaattcctcttcctttttgctgacaagttcttcgatttttagttccagatcgttcaccgagttttgcaatgctgttttctcactttcgtgtaattccaaagcttgcttcaaatcatctttttcgtttctcaggtcagatatatcttgtttgaggttctctaaaattatcatcagctct

SEQ ID NO: 174304 - DNA, 243 bp, Saccharomyces pastorianus
ctagaggggaacccgttcgcggtgagagatcctctccagctaaggaggttctacaaaattcacaatgcctgcgtgcaattaagggaggcaataaaagtcatctacgatagcgcccctaccaatgaagatatcaatgatatggtcaagaatgggtctcagctagaacaaagcattggggtgagccccgccatgtccgtagctagctatttgaagatggaacaaagatcactagacatagaaagt

SEQ ID NO: 174305 - DNA, 1032 bp, Saccharomyces pastorianus
aggaaccaggctagacagaaactggccaatctatcacaaactcgattcaatgatttgttggacgatatcctttttgagatcaagagaagagggttcgacaaggatttggatgctccacggcccccattaccgcagccgatgaaacaagaggtcagcaaagacagcgatgatactgcaagaacatccacagattcttcctctgtgactcaagtagctccaaacgtctccgtacaaccttctttggtcattcctaagatggcatctatcgattggtcttctgaggaagaagaagaggagcaagtaaaggagaagccaaatgaaccggagggaaaacaaacaagcatggatgaaaagaaagaggctaaacctgctctaaaccccatagttacagattctgatctgcctgactcccaagtgctcgctcgtgatatcacatcaatggcaaggactccaacaacgacgcataaaaattactgggacgttaatgattctccaattatcaaggtagataatgatatcgataacgaaaagggtcccgaacagttgaagagccctgaagtacaacgggctgagaacaataaccctaactcagagatggaagacaaggttaaagaactgactgatttaaacagcgacttacatttgcaaattgaagatttgaatgctaagttagcatctttaaccagcgagaaggaaaaggagaagaaggaagagaaggaggaaaaagaaaaggaaaagaacttaaagagtaactacaccattgatgaaagttttcagaaagaattgctgtcattaagctctcaaatcggtgaattatcaattgagaatgaaaatttgaagcagaaaatttcagaattcgaactgcatcaaaaaaagaatgacaaccataatgatttgaaaatcactgacggttttattagcaagtactcttctgccgatgggctcattccagctcaatacatcttaaacgctacacacttgatcatccacttactactacgcttccgcagtaccataggcgactcacggcaa

SEQ ID NO: 174306 - DNA, 447 bp, Saccharomyces pastorianus
atgagtttcggtagtaaagtctccagggctttgagatttttggaaattcctgtcaaagacagggcatctgtgagtttcttgaagaacccggatttgcaacctattaagtcggttaaccaaacatgggggttctggtctaattttgcatactggggtgttatgtccttttcagtgagtacatggatgagtgcctctgctgcactaggtgttggattaagttacccagaaaccattggtacatttatcgtcggtgatgtgttgaccattattttcacattggcaaactcgtgtcctggttacgactggaaggtcggtttcactttggcccaaagattcgtcttcggtatttacggttctgccttcggtatcatcatcagaattttgatgagtattgtcaactacgggtccaacgcttggttgggaggtctttgtatcaatatgatcttg

SEQ ID NO: 174307 - DNA, 84 bp, Saccharomyces pastorianus
gctgataaggatcatatgtggttgtccaagcaagagtggcaagaaagtgggccagccgcaatgagtaaatttggtccgagatag

SEQ ID NO: 174308 - DNA, 684 bp, Saccharomyces pastorianus
atgttgggtatggtgatttatttagctaaccaggctcacggtgttggagaattgtttacctccactaaatccactgccactggctccaccaaagcttgggcttgggtttatatgatctcgtactggttcggttccgtttctccaggttccaccaaccaaagtgattactcgagatttggttcctccaattgggctatctgggccggaaccatctgtgcattgttaattccaaccactttaatcccagtttttggtgttattggtgcctccacctgtgacaaactatacggtgaacaattttggatgcctatggatatcttcaaccattggttgacaactaactattctgcaggtgctcgtgccggtgcgttcttctgtggtctttcatttgtcctatctcaaatgtcctacaccatctccaactgtgggtttgccagtggtatggatttggccggtttattacccaagtacgtcgacatcaagaggggtgccctttttgccgcatgtgtctcctgggcttgtttgccatggaacttctacaactcttcttctactttcttgactgtcatgagttctttcggtgttgtcatgactcctattattgctgtcatgatctgtgataactttctgatcaggaagaggcaatattccattactaatgcctttattttaaagggtgaatac

SEQ ID NO: 174309 - DNA, 237 bp, Saccharomyces pastorianus
atggagatgctcttgtttctgaacgaatcatacatctttcataggtttcgtatgtggagtactgttttatggcactcatgtgtattcgtatgcgcagaatgtgggaatgccaattataggggtgccggggtgccttatgaaacccttttccgtgcctgtgaagtttccgctttcggtcaaaaagaatatccgaattttagatttggacccttgttcagaagcttattgtctaagcct

SEQ ID NO: 174310 - DNA, 240 bp, Saccharomyces pastorianus
atgatcactatgaagatgtttttgtttttaaacgaggcatgtatctttatagattctgtatgcgaaggtattgttttctggggcctttgtctattcgtatgcgccgaatgtgagaatgccaattataggggtgccgaggtgccttataaaacccttttccgtgcctgtgatacttccttttttggtatagcagaatgtctgaatttagttgctatagatcctcgttcagaagcgtattgc

SEQ ID NO: 174311 - DNA, 570 bp, Saccharomyces pastorianus
atggatatggagtcggctagcaaagaggaattgttggaaaagctggaccaagaaatcacggtaaacttgcagaagatcgactcgaatttcagtttttgctttaataagatcacccaagacatcataccgcatgtggctaagtactcagaagtatgcgagcggatcatggacagcaccgaatggctgggtaccatgttccaggagactgggcttgtgaacttgcaggccaacgccgtgtcggagaagaacacccccgccaagaagaagatcgataatgatgctagcatgtttcccacatccacggaggacccgagcggggcgtttcaagcccatggtgatggcgactttgttccggtcatggatgccaaccggaacactcattcaatgttcactaacgacgacacagacgatttccacacagcaaacataacgtcaaccggacaggtattgaagctgcccgattctagtgatgaagacaacggcggcgaggcgccatcttcaaggagccaacgagacctcgctgaagaggatcatagcgacaccggtcacgaccaggacgaaagcacaatc

SEQ ID NO: 174312 - DNA, 2442 bp, Saccharomyces pastorianus
aaaaaggcaaagagaagcaatttatatactcctaaagccgagatgccaccggaacatctgcgaaagattattaatactcacagtgacatggcctccaaaatgtacaatactgataaaaaggcttttctaggcgccctaaagtatttaccgcacgcgatcttaaaattgttagagaacatgcctcatccatgggagcaagccaaagaagttaaagttttatatcacactttaggagccataacatttgtgaatgaaacaccaagagtaatagagcctgtatatactgcccaatggtcagctacttggatagcaatgaggagagaaaaacgagatagaacacattttaaaagaatgagatttccacctttcgatgatgacgaaccacctctgtcatatgaacagcacatagaaaatatcgagccactggatcctataaatcttcccttagactctcaagatgatgaatatgttaaagattggctctacgattcccggcccttggaggaggatagtaaaaaggtcaatggtacatcttataaaaagtggagttttgatttacctgaaatgtcgaacttatataggttatcaacgccacttagagatgaagtaactgacaaaaattactattatcttttcgataaaaaatctttttttaacggtaaagcccttaataacgcaatccctggaggtcctaaatttgaacctttatacccaagagaagaggaggaagattataacgaattcaactctatagatagagtaatatttagggttcctattagaagcgaatataaggtagcgtttcctcatctatataattcccggccccgttcagtgcgcataccatggtataataatccagtgtcgtgtattatccagaacgatgaggagtacgacacgcctgcacttttttttgatccatcgctgaacccaatacctcactttattgataataattcatccctcaacgtatcaaatacaaaggaaaacggtgatttcactttacctgaagattttgcacctcttttggctgaagaagaagaacttattttgccaaatacaaaagatgcgatgtcgttatatcattcaccttttccatttaatagaactaaaggaaaaatggtgagagcacaagatgttgccctggctaaaaaatggtttttgcaacatcctgacgagaagtatcccgttaaagttaaggtctcttaccaaaagctcttgaagaactacgtgctaaatgaattgcaccctactttgccaacaaaccacaacaaaactaagttattgaagagtttaaaaaataccaagtattttcaacaaactacaattgattgggtagaggcaggactccagctatgtcgacaaggacacaatatgttaaatttattaatccacagaaagggcctaacttatttacatctcgactacaatttcaatttaaaaccaactaaaaccttaaccacaaaagaacgtaaaaagtcaagacttggaaactcatttcatttgatgcgtgaattgctaaaaatgatgaaactgattgtagatacacatgtgcagtttaggttaggaaatgtagatgccttccagttagcagatggtatacattatattttgaaccacataggacaattgaccggtatttatcgttataaatataaagtaatgcatcaaatccgcgcatgtaaagatctgaaacatatcatatattataagtttaataaaaatttgggaaaaggacctggttgtggattttggcaacctgcgtggagagtgtggctaaatttcttaagaggcactataccactactcgaaagatatattggaaaccttatcacacgtcaatttgaaggccgttctaatgaaattgtcaaaactacaactaaacaaagacttgacgcctactacgatcttgagttacgaaactcggtcatggatgacattttagaaatgatgcctgagagtattcgacagaaaaaggcaagaactatactgcaacatttaagtgaggcttggagatgttggaaggctaatattccatgggatgttcctggtatgccagccccaatcaaaaaaataattgaacggtatataaaatccaaagctgatgcctgggtatctgcagctcattacaatcgagaacgtataaagcgtggagctcacgtcgaaaagactatggttaaaaaaaatctggggcgtttaacgagactttggatcaaaaatgagcaggaacgtcaaaggcaaatacagaaaaacggtcccgaaattactcccgaagaggctacgaccatattttctgttatggttgagtggcttgaatcaaggagcttttcaccaataccatttccacctttaacttacaaaaatgatactaagatattagttcttgccctcgaagacctaaaagatgtctacgcatcaaaagtacgtttaaatgcattctga

SEQ ID NO: 174313 - DNA, 1098 bp, Saccharomyces pastorianus
gtaccagctatgaaaagattgcctattccacctttgaaggatacattgcaaagatttttggacagggtcgagccattacaggatgctttgcaaaatgaaaggacgagatcgaccgtcttatcgccgacgaatttaaagctaatggaaactttacataataaactgctggaatatgactcacaaatcgccaaagaaactccacattcttcgtatatcgaacaattttggtatgattcttatctgacatacgacgcctcagtagtgctaaatgttaatccctttttcaaattggaagatgaccccataattaataatcacaccttccattcggaatctgctccatatggggagcatactttgcagattaaaagatgtgccaaactggtcacctcgatgttaaagttcgttaaaagcatccgttgtaggacactaaagcctgataccattcatggtgagattcaattatctatggatcaatatgataagttgttcggatcaagtagaataccacctagtacaggccaagagtcgtgccatttacagacagaccctacttcccatcacgtcataatcgtgtataaatcccaattctattggtttgatgtactggatattgacaattcgcctattttttcaacatctgtggaattagaatggaatttgtactcaattattaacgactatgaagaagcctacaagcatcatcgtcgccaccacaatcacccacagaacgataataaaccctttccatttggtcttttcactacagaaagtagaagatcgtgggcaaaagtaagagattacatatctaaggatccagagtcaactaattgcaggaatttgaagttaattgaaagtgccttattcgtgatatgcctagatgatgtgtcatttgaagagggacaagaagatgagctggtgaagtctatgctatgcggcacttcgaatgtcgatttgagctccaaattgttacataatagtagcatgccgattacgttaagtttgcagcatggcacttgcttaaatcgttggtatgacaaattgcaactgatagttacgaaagatgggaaagcaggcataaatttcgagcataccggg

SEQ ID NO: 174314 - DNA, 216 bp, Saccharomyces pastorianus
tatgcacacggatgctacagtatataccactctcaaacttaccctaatctcactttccactccatcacccatctctcaccatcagtaccaaatgcactcgcatcattatgcacggcacttgcctcagcggtctataccctgtgccatttacccataaagtccatcattatccacattttaatatctatatctcattcggcggccccaaatattgta

SEQ ID NO: 174315 - DNA, 702 bp, Saccharomyces pastorianus
atgcaagctactgccacactagctatggacaatttagtcgataacttcaattatgcaatgttactgcatggagaacaatattttaagctctgcacgccgacaatgccaagtaatggaactctaaagacacttgctaaacctttacaagtacttgacaagaatggtaaagccgctttagttgttggtggcttcgaaacttatgacattaaaactaagaaactcatagcttataacgaaggatcgttcttcatcaggggcgcacatgtacctccagaaaaggaagtgagggatgggaaaagagtcaagtttgctgtccaaaattttgaagtgccacatggaaaggtaccagattttgaggcggagatttctacgaataaagatcaagccgcattgtacaggttatctggcgatttcaatcctttacatatcgatcccacgctagccaaagcagttaaatttcctacgccaattctgcatgggctttgtacattaggtattagtgcgaaagcattgtttgaacattatggtccatatgaggagttgaaagtgagatttaccaatgttgttttcccaggtgatactctaaaggttaaagcttggaaacaaggctcggttgtcgtttttcaaacaattgatacgaccagaaacgtcattgtattggataacgccgctgtaaaactatcgcaggcaaaatctaaacta

SEQ ID NO: 174316 - DNA, 138 bp, Saccharomyces pastorianus
cagtttaataggattattgaaaaccctactgtgcaaactgctgtacaaaatggagaattacaggtatacggtctgctttacaacgtagaggacggtctactgcaaacagttagcacttacacaaaagttacccccaaa

SEQ ID NO: 174317 - DNA, 1401 bp, Saccharomyces pastorianus
atgttgaagtcagccgtttattcaattttagccgcttctttggttaatgcaggtaccatacccctcggaaagttatctgacattgacaaaatcggaactcaaacggaaattttcccatttttgggtggttctgggccatactactctttccctggtgattatggtatttctcgtgatttgccggaaagttgtgaaatgaagcaagtgcaaatggttggtagacacggtgaaagataccccactgtcagcaaagccaaaagtatcatgacaacatggtacaaattgagtaactataccggtcaattcagcggagcattgtctttcttgaacgatgactacgaatttttcattcgtgacaccaaaaacctagaaatggaaaccacacttgccaattcggtcaatgttttgaacccatataccggtgagatgaatgctaagagacacgctcgtgatttcttggcgcaatatggctacatggtcgaaaaccaaaccagttttgccgtttttacgtctaactcgaacagatgtcatgatactgcccagtatttcattgacggtttgggtgataaattcaacatatccttgcaaaccatcagtgaagccgagtctgctggtgccaatactctgagtgcccatcattcgtgtcctgcttgggacgatgatgtcaacgatgacattttgaaaaaatatgataccaaatatttgagtggtattgccaagagattaaacaaggaaaacaagggtttgaatctgacttcaagtgatgcaaacactttttttgcatggtgtgcatatgaaataaacgctagaggttacagtgacatctgtaacatcttcaccaaagatgaattggtccgtttctcctacggccaagacttggaaacttattatcaaacgggaccaggctatgacgtcgtcagatccgtcggtgccaacttgttcaacgcttcagtgaaactactaaaggaaagtgaggtccaggaccaaaaggtttggttgagtttcacccacgataccgatattctgaactatttgaccactatcggcataatcgatgacaaaaataacttgaccgccgaacatgttccattcatggaaaacactttccacagatcctggtacgttccacaaggtgctcgtgtttacactgaaaagttccagtgttccaatgacacctatgttagatacgtcatcaacgatgctgtcgttccaattgaaacctgttctactggtccagggttctcctgtgaaataaatgacttctacgactatgctgaaaagagagtagccggtactgacttcctaaaggtctgtaacgtcagcagcgtcagtaactctactgaattgacctttttctgggactggaataccaagcactacaacgacactttattaaaacag

SEQ ID NO: 174318 - DNA, 438 bp, Saccharomyces pastorianus
catagttattcatttttctccattactaaaggctcttcatggcatttagatgatgcaaaattgatgaaagcactagaaaaccacatcttatcctgcgtcgttaccggatttatttttggcttctttatcctatatggtgaattcacgttctattgctggttgtgttccaagaatttcagtaatctaaccaaaaattggaaacttaatgctataaaagtaagatttgtcgcaattctaaattcattaggcttaagactaaagttgagtaaaagtaccagtgatactgccagtgccactttgctggcaaggcagcagaaacgattgaggaaagattccaatacaaacatagtattactaaaatcttcaaggaaaagtgatgtttacgatttagaaaagaatgattcttctaagtactcactgggaaataacagctcgtaa

SEQ ID NO: 174319 - DNA, 372 bp, Saccharomyces pastorianus
ttcagtatggaagatggacctcatcagttgacagtgaacaattgtggaaacaccaaccacagtagcatcagctccttccatctcaagaagtataaggcatccaaggtccaaaatcctcttgatgacctttacattgttgaatttacgttattggatgaccacacactgcccaatgaatttccgggagatctagctgtaaacttaaagtacacattgaacgttgctgacatgaccttggacttggaatacgaggcaaaactggtcagcggtgaggctactcccatcaacatgacgaatcacacgtacttcaatttaaacaaaactatggataaaaaatccattagcggtacggaggttaggctctgctcataa

SEQ ID NO: 174320 - DNA, 225 bp, Saccharomyces pastorianus
atgggggattctaattccagccaagaagcgtattctgatacaacatccacgaacacttctagaatcgcagatcaaaatcaacttaatttaaacgtggatcttgaaaaaaatcaaacagtaaggaagtcaggttcactggaagcattacagaatgcaaagatacatgttcccaaacacagtgatggttcaccactagatatccagaaattaaatacttacacgttt

SEQ ID NO: 174321 - DNA, 96 bp, Saccharomyces pastorianus
cctattataggggtgccggggtgccttatgaaacccttttccgtgcctgttaagtttccgtttttggtcaaaaagaatatccgaattttagattaa

SEQ ID NO: 174322 - DNA, 1011 bp, Saccharomyces pastorianus
aacattagaataccgtctgatcttccagtagtgcgtaatagagctgaaagcgtaaagaaaagcaagtcagataatacctccaagaggaatgatcaaagtagcaatgtcttcgcatccaaacagctggtcgcaaacatttataagcccaatcagattccaagagaattaacttctcctcaggcgttaccattatcgcccatcacctcaccaattctcaattaccaaccattatcaaactccccgcctccagattttgattttgatctagctaagcgcggcgcagccgattctcatgctattcctgtggatcctccatcatattttgatgtattaaaggccgatgggattgatttgccatactacgatacaagttcatctaaaattcctgaactaaaactaaacaaatctagagagacattggccagcattgaggaggactcattcaatggttggtctcaaattgatgacttatccgacgaagatgacaatgatggcgatatagcatctggtttcaacttcaagctgtcaaccagtgctccgagtgagaacgttaattcacacactcctattttgcagtctttaaacatgagtcttgatgggagaaaaaaaaatcgtgccagtctacacgcaacatcagtgttacctagtacaataagacagaacaatcagcatttcaatgacataaaccagatgctaggcagtagtgacgaagatgcctttcccaaaagccaatcattaaatttcaataagaaactaccaatacttaaaattaatgataacgtcatacaatcaaacagcaatagtaataacagagttgataatccagaagatacagtggattcttcagtcgatattacagcattttatgatccaagaatgtcatcagattccaaatttgattgggaggtaagcaagaaccatgttgacccagcagcctactcggttaacgttgctagtgaaaaccgtgtactggacgactttaagaaagcatttcgcgaaaagagaaaataa

SEQ ID NO: 174323 - DNA, 1665 bp, Saccharomyces pastorianus
aaagaaggaagaaacattgttactgaaaagagcaccgtatcttctgcccatgaaggctttcagcaaagctcatctgcgttttcgtctcaggacggaaataaaattatcaaaaccagaggtgtcacaagaattgaggtagtcaaagaaaagatgacaaccaaggtcaaatggattctggcagcttccgttcttttaacatcgtggattgctgctttggatgccacaacaacgtataactatcaaccgtatgccacatcctcattcaacaggcactcgatgctatcaactttgacaattgcaaattctgtcattggggctgtttgtaaaccgtttattgccaaaatctcagatttgagttccagacctgttacatactttgtggtgttagtactatatgttataggtttcattgtcacggcttgttccccaactattggtgcgtatgtgatcggttctgtttttattgcagttggccagtcaggtatcagtttaatgaacatggtcattgtagctgacacaacttcactcaaatggaggtcttttgtcacctctctattagcggttccttacttggttaccacttggatctccggttacattgtcgagaatattattagtagcaactggagatgggggtacggtatgtttgctattattacaccagttgctttaactcccgcaattcttattatggcctacctggagcaccaagctaacaagacgggggaaattcccgttgggtccgatccgcttgccgagaagaaaagagaggttagagaatctggtattagtgggttcaaagcgtattggcaactcctgaagacttctctaatagagatcgatgcatttggtttagttctacttggccttgctttttctttaatcttgcttccatgctccctgtactcttacgctgaaggcggctggaaaaacccaagtatgattgccatggaagtatttggtggcatttttttaatttcgtatgtcatcttcgaggttttcttcgcaccatttccgttactgccaaagagagtcttagtaaacagaaccttcatttgttgtgtcatcattgatttcatctaccaaatgggcggctatttctctcttttgttctttacatcttacaccttcgttgttttgaatttatcctacagagactgggtctacctctcaaacactaccactatgggtctctgtttctttggagtagtttggggtggcctgttcaggtatttccaccgttataaaatattccaagtcattggtattgctattaaattaatcggtatgggtctttacgttgcatgttccaaaaagagcggtagcccaggaattggtcttgttgctgctgcgttgattgttactagcattggtgacgctgctaacgttatgggtactcaagttgcagcacaagctgccgtccctcaccaagatatggctgcaactatttccgttttgtctctttatacttcgataggtgcagctgttggtacggctattacttctgctgtttggaccaaagaattgcctggcgccttgtccaaatacgttccggacagtgaaaaggcgatcgcattttatgagtctttaactcttatctggcaagagccatggggctcagcaaacagggaaggcgctatcgcagcgtatcaagaggtcaattat

SEQ ID NO: 174324 - DNA, 786 bp, Saccharomyces pastorianus
atgagtgataaaaacagtcgtatcgctatcgttagcgctgataaatgtaaaccaaaaaagtgtcgtcaagagtgtaaacgttcgtgtcccgttgtgaaaactggtaaattatgtattgaagtcactccaacttcaaaaatcgcattcatttccgaaatcttgtgtattggttgtggtatttgcgttaagaaatgtccatttgatgctattcaaattatcaatttgccaactaatttagaagcccatgtaactcaccgttactctgccaatagtttcaaactgcacagattgccaacaccaagaccgggtcaagtccttggtttagtcggtaccaacggtattggtaagtctaccgccttgaaaatcttagccggtaaacaaaaacctaatttaggtcgttttgatgatcctcctgaatggcaggaaattattaaatatttccgtggttctgaattacaaaattacttcaccaagatgctggaagatgatatcaaggctataatcaaacctcaatatgttgataacattcctcgtgctattaaaggtccggttcaaaaagttggcgaacttttgaaattgagaatggaaaaaagtcctgaagatgtgaaacgctacatcaaaattttacagttggaaaacgttttgaaaagagatattgaaaagttatctggtggtgaactgcaaagatttgccattggtatgtcatgtgttcaagaggctgatgtttatatgttcgatgaaccttcatcttatttggatgttaagcaacgtttgaatgccgctcaa

SEQ ID NO: 174325 - DNA, 180 bp, Saccharomyces pastorianus
ctaaattactacagaatgagcaacacagtgaacaccgagcccaataggtataccgaggagtttcggtcaagccactacaactcacaacctttcatgccctttgcatcatcgcctccttgtaacggggccctttgcgaagagtacgcggtggatatgaactacgtttacaggttaccatta

SEQ ID NO: 174326 - DNA, 219 bp, Saccharomyces pastorianus
ctggcagaggtaagaaagaatatcatggcaaaccgttataaagaggcgtttattgtttgtcgtacacacagaattaaccttgatattttgcatgactatgcgccagagttatttattgaaaacttagaagtatttatcaaccaaatcggaagggttgattatctcaatttatttatttcctgtttgtcggaagatgacgttaccaaaacaaaaatataa

SEQ ID NO: 174327 - DNA, 834 bp, Saccharomyces pastorianus
gtccttagaattttcttcggtcgagcacaagtccccccaactagtggacagaaaagaagccgcaaaatagctgtcatttcagttttgccaaattttaagaagccatatattaatgattttttgagtttggctagtgaaaggctggattataattatttttttgggaacagccatcaaataaatagctcaaaggctaccttgaaaactatcagacggatgactggtttcgttaacattgtaaattctactctgtctgtattaagaacaaattttcctttgcatactaattcagtgctgcagccgttgatctattcaattgctatggcatactatgtcttagatactgagagcacagaggaggtacatttaagaaagatggcaagtaatttaaggcaacaaggtctaaaatgtttaagtagtgtctttgaatttgttggaaatgcatttgattggtctacttctatggaagatatttacgccgttgtagttaagcctcgtatttcacatttttcggatgaaaacttacaacaaccctcctctttactaagacttttcctttattgggcacacaatccatctctgtaccagtttttgtattacgatgaatttgcaactgccactgcattgatggacaccatatcaaaccaacacgttaaggaagctgttattggcccaataattgaagcggcggactcaattattagaaatccagtaaatgatgatcactacgtagatttggtgactctcatctgcacatcatgtctgaaaatacttccttcgctatatgtcaaactttctgactcaaactcgatttccacatttttgatttgctag

SEQ ID NO: 174328 - DNA, 384 bp, Saccharomyces pastorianus
atggacacatatgttgtctatgatttagaaaatcacgaagtttctcttgctcaggccagctttaataatgaagaagaagatattgagattatctctgacagtgtcccaggtgccacacctgctcccggatactccagtacgtgggtgcatacgcctggtagtcccatcggaacaggagactttctcgatgtaagttggacctcctattcagagttttcacaataccaaccaattcattccaccgaaattggtgatgggactagttcttcctcaagcggtagtagttccagtgaaacgaccaccaaaaagaaaaattcgggttacagatgccgtcgttcatctttctccttttcaatattatctgttatatcttattttcttttg

SEQ ID NO: 174329 - DNA, 504 bp, Saccharomyces pastorianus
atgaccaccgtcaccggtaccaacggtttaccaactgacgaaaccattatcgtcatcagaacacctacaacagcaagtactgcgataactacaaccgagccatggaccggtactttcacatctacatccacagaaatgaccaccgtcaccggtaccaacggtttaccaactgacgaaaccattatcgtcatcagaacacctacaacagcaagtactgcgataactacaactgagccatggactggcacttttacatctacatccacagaaatgaccaccgtcaccggtaccaacggtttaccaactgacgaaaccattatcgtcatcagaacacctacaacagcaagtactgcgataactacgaccgaagcatggactggcacttttacatctacatccacagaaatgaccaccgtcaccggaaccaacggtcaaccaactgacgaaactgtgattgtcgtcaaaacacccaaaactgctagcaccgtcataactacaactgag

SEQ ID NO: 174330 - DNA, 366 bp, Saccharomyces pastorianus
atggatattcgtggtagaaaaatgaaaaaaccgcctgcatgcgtgcagtgccgtaagaggaagataggctgcgatcgtgttaagccgatttgtgggaactgtatgaagcataataaaatggactgcttttatccggacgttcccggacaatacgttccctctagttcttcctcttccaatacacgccaagtagccaacggtccgtacttaaactcttattacgcttctcgtcgtgtctccaaggaaactgctgtacttttgcagaaaaatccagaactggcttctttggagcaaataagagaatacaacacgcgtctgcaactgctcaatgctcaaaatcaacttaataatagatcatctgcggca

SEQ ID NO: 174331 - DNA, 231 bp, Saccharomyces pastorianus
gaagaggacagcgacttagcacttccaccaccaccaccaccaccgcctggatacgaaatcgaagaactggataatccgatggtgccatcatcggtaaatgaggatacattccttccgcctccaccacctcctccaagcaacttcgaaataaacgctgaagaaagttgtgacttcacattaccaccgccacgggatcctctagagacaccctgcagcatcagctgcctgccg

SEQ ID NO: 174332 - DNA, 489 bp, Saccharomyces pastorianus
tttcacctttcgcacacagaagaggacaagttaaatgagttccaggtcatcacgaatttccccccagaagacttgccagatgtggtgagactgttgaggaaccatggttggcagttagaaccagcattgagccgatatttcgatggagagtggaaaggcgaaccagaccagatgggagagtccactcaaacgtctacacccatggctgagaccttggttcctcccgcgttgggacctagaccgttgttatttacagcctcactgcccgtagtcagaccattgccagcgaacttccgcaatgatttcagaacaattggtttaaatggacgctctaacactgtatggtccatgtttgaatcttttagttatgatggtaacccctttctttttattttactgttgatccctcggataatcaataggttatctgccacaatattcacgtctttgcactctattgtccctgcattcgataagtggtggcggtaa

SEQ ID NO: 174333 - DNA, 915 bp, Saccharomyces pastorianus
agagtcctactttccttgttagaagccgaactcttggtcggtacagaggactgtggtccaattggtacattccttaaagaggtcgagacacaaaaaaacgcaaaactggcgttgtccgaagtcaaagaaggatgttctgatagagtcttaattatcgaaagtgaggacgctagaaacgtctgtgaagctctggcaaagattttggaatgctttactggcgatgatgagatcatggaaaaactgcaccaaaatgaccataaatttcatttcttgaaaattcttctccccacaccaacggagtttgattttgagaaagttacaaacaaaaatatgctaactacagttagattacttttttccaattcagaaacttctgctattattggaaagaatggcgttgtaattaagaagctaatggatgacaacgaggtcagaatacttgcctcgaagcattgcttaccagacagcgaagatcgggtactagaaatccaaggtctgccatcctccattggccaaacttggctgcatatttcccaattggatatggagcccacctcagaaagttcgtctaatgataagcgttcggaaaggatgtattttcctcatcttgcaaaggctctaagaggctctaatgatagatcagcagagtttaaatctaccgtcatgattccggaagaatttgtcggcgctcttgtgggtagaggtggtaatagaattgctaatttgagaaaatatactaagaccaagatactaattgaaaaccaagataatgcaaaggggaaaccttcacaagaaagagctttcaccattgtgggaaacttggaaagaaatgtccaaattgctgaaaagatgctatttaacaatttgaagactgaaagggaaagacgtcaaaattattcctcaaaaaagtcatca

SEQ ID NO: 174334 - DNA, 606 bp, Saccharomyces pastorianus
atgacaaaatcagacgaaacaacagctaccagcttgaatgctaaaactctaaagagttttgaatccactcttccaataccaacttatccaagagaaggtgttaaacaaggtattgttcatctgggagtcggtgcattccaccgttcccatttagctgttttcatgcaccgtctgatgcaggagcaccacttaaaggactggtccatatgtggtgttggtttaatgaaggcagatgcacttatgcgcgatgccatgaaggcccaagattgcctatacacccttgtggagcgtggtatcaaggacactaacgcttatatcgtcggttccattactgcttacatgtacgctcccgatgatccaagagctgttattgaaaagatggccaatccagacacacacattgtttctttgacggtcacagaaaacggttactaccacagtgaagcaacaaactccttaatgacagatgctcccgagattatcaatgatttgaaccacccagaaaagccagatactctgtatgggtatctatatgaggccctgttgttgcgttacaagagaggtcttaccccattcactattatgtcatgtgacaacatgcccaaa

SEQ ID NO: 174335 - DNA, 330 bp, Saccharomyces pastorianus
atggataggaaaaggtcttttgaaaaaattgtcgtttccgtcatggtcgggaaaaatgtacaaaagttcctgacgtttgttgaagacgaaccagatttccagggcggaccaatcccttcaaagtatcttattcccaagaaaatcaacttgatggtctacacgttgtttcaagtgcatactttgaaattcaatagaaaggattacgataccctttctcttttttacctcaacagaggatactataatgagttgagttttccgtgtcctggaacgttgtcacgaaatagcgagtgccaggccgaacgacagctctacgatgcgtactttcac

SEQ ID NO: 174336 - DNA, 75 bp, Saccharomyces pastorianus
tgccttaaccaactgggccaagagacctatttttttcggaagtcactgattaatagtttgataatacaggtgtaa

SEQ ID NO: 174337 - DNA, 525 bp, Saccharomyces pastorianus
ctgacaagattaaactggccctttttcaatatgctttattgtaggacggtaggtgccttaatgaggaaaaaggagattcacacgtacaacggggtattgtggtacctcctggggttggtgttttcctttagttttttttccaaagacgttactttgatatcattgttcctactgagttggtccgatacagccgccgcgacgatcggaaggaaatatggtcatttaacacccaaattggcgagaaacaaatctcttgcaggctcgatagctgcatttacagttggggccatcacctgttggacattttatggttattttataccaacttactactacgtcaataaacctggagagattgaatggactccagaaacaagtaaattaagcttgaatatgttatcgttgttaggtggtgtggttgctgcattgagcgaaggtattgatttgttcaactgggatgacaacttcactattcctgtactatcatcacttttcctaaatgctctaatcaaagctttcaaaata

SEQ ID NO: 174338 - DNA, 1017 bp, Saccharomyces pastorianus
atgaacattgttaatatctataaagagcttgaatcagttaaatctttaagtgacttgagtaaagatctcttgcagagagccaagaaattagggttttcagataagcagattgcggttactataaataaacacgcctccacaaacattaacgaactggaaatcagaagtttaagaaaaacgttaggtataatcccttttgtcaagagaatcgatactttagccgcagaatttccagcgcaaaccaattatttgtataccacttacaatgctacaaagaacgatgtggagttcaacgaaaatggtatgctggttttaggctctggtgtctatcgtattggttcatctgtagaatttgattggtgtgccgtgaacaccgcgaagacattaagagatcaaggcaagaaaactatcatgataaattataacccagaaacagtttccacagatttcgatgaagttgatagattatactttgaagaattatcgtatgaaagagtgatggacatttatgagttggagcaatctgagggttgcattatttctgtcggtggtcaattacctcaaaacattgccttgaaactttacgataacggctgtaatataatgggtaccaatccaaacgatattgatagagctgagaacagacacaaattctcatctattttggattctattgatgttgaccaacctgaatggagtgaattaacatcagtagaagaagcaaaattatttgcttctaaagttaactaccctgtgttgattcgtccctcatatgtgctttccggtgcagcaatgagtgttgttaataatgaggaggaactgaaggctaaattaactttggcatctgacgtttctccagaccacccagtcgtcatgtctaaatttattgaaggtgctcaagaaattgatgtggacgccgttgcttataatggtaatgtcttggtacatgccatttccgagcatgttgaaaatgcgggtgtgcactccggtgatgcttctttagtcttaccaccacaa

SEQ ID NO: 174339 - DNA, 189 bp, Saccharomyces pastorianus
atgcattcgttaaaaggcgtttttgtatcaaataacgtcactatcagccattgtcacttgccactgtcgcctgccaccgctattgccattatcatttgctttcgcatcgtcaccgatttaaagctctctaggctaacgtacgcatttcacctcccaggccctatctcttttctacctgtcatccctata

SEQ ID NO: 174340 - DNA, 129 bp, Saccharomyces pastorianus
ccgtattgcacatgcagcgggctgaaagtcgaatacctgaaggtcgaagagccacagctgcagtaccagtcgttcccttgggtccgatacaagaccatcagcgacgacgagtacgcatacatcgtctga

SEQ ID NO: 174341 - DNA, 828 bp, Saccharomyces pastorianus
atgaacaagtctgccgctagaatttgtttgccaactttcgaatctgaagaattgatcaaacttaccgggaaattgatcgaacaagataaacacttggttcctcaaggtaatggttactcattatacatcagaccaacaatgattggtacatccaagggtttaggtgttggcactccctccgaggctcttctttatgttattacttctccagtcggtccttattataagactggtttcaaagccgtacgtcttgaagcaacagactatgctacaagagcttggccaggtggtgttggtgacaaaaaattgggtgctaactatgccccatgcatcttacctcaactacaagctgccaaaagagggtaccaacaaaatctatggttgttcggcccagaaaagaacatcactgaggttggtactatgaacgtgttcttcgttttcctcaacaaagtcactggcaagaaggaattggttaccgctccattagatggtaccattttagaaggtgttaccagagactctgttttaacattggctcgtgacaaactagatcctcaagaatgggacatcaacgaacgttattacactattactgaagtcgccactagagcaaaacaaggtgaactattagaagccttcggttctggtactgctgctgtcgtttcacctatcaaggaaattggctggaacaacgaagatattcatgttccactattgcctggtgaacaatgtggtgcattgaccaagcaagttgctcaatggattgctgatatccaatacggtagagtcaattatggtaactggtcaaaaactgttgccgacttgaac

SEQ ID NO: 174342 - DNA, 183 bp, Saccharomyces pastorianus
tctttttcttcttcttcctcttctctgtacattgctgctccttctctttttaaatttcttagacgagaggcgttctcttcatccgcgtcctcttcttcttcttcttcctcattatcatcctcttcgtcgtcaaacgcagcctcctcttcttcatcgtcgtcgactaaaaagtcatcttcttca

SEQ ID NO: 174343 - DNA, 360 bp, Saccharomyces pastorianus
atgtccttctctgtgggtgcctggattagtgcctcgtgtgcactgtccgagggactgagttattcagagactatcggtacgtttattatcggtgatgtgttgactatcctatccaccctggcctactcatgtcctggttacgactggaaggttggttacacgttggctcaaagatttgtcttcggtatcaatggttgcgctttcagtattatcatcaactatggttccaacgcttggttgggtggtctttgtattaacgtgatctcagattcctggtctcatcactatttgcatttacgtaacactttgttccccagtgtcgccatgactactaaggagttgatctctttctttgtttac

SEQ ID NO: 174344 - DNA, 585 bp, Saccharomyces pastorianus
aaaaagcaaaatggtaggagaaatgtacaaccattcaatagagatactcaaattaagaatcccagtaaaatcataagattcaatgacccaaacgaggacgatgatgtctccaacagacttttgaaaggtgatgttgttacatacaaatccttgaagagtcgggcaaatgagttacttcgagtgagaaagacattgccggtttatcaacacaagagcgagataatgccctatatcaatgctaatcctgttacagtgcttattggtgaaacgggttctggtaaatcgacgcaaattccacagttcattttggagcagatatatgataaaaagaaacacggatccattgctgtcactcaacctcgtcgtgtggcagcgattaatttggctacccgtgttgcccaagaacatggttgtaaattgggtgaccaagtgggttattctgttagattcgacaatactaccactgcaaaaactagacttaagtacttaaccgatggtatgctacttagagagctaatgatgaataataacctcaggaatacagtgtcattatcatcgatgaagcgcacgaaagaaccgtactga

SEQ ID NO: 174345 - DNA, 135 bp, Saccharomyces pastorianus
  modified_base (66)..(66): a, c, g, t, unknown, or other
atatctggatcgatcatggaagacttgattaggaacgctgttagatacggttctgagaaacctcanatatcgcacgatgatcttaatgatgtcgtagagactgttctaaggaagtttgcggattacaaaatctaa

SEQ ID NO: 174346 - DNA, 162 bp, Saccharomyces pastorianus
ttagaagttctcctcgatgatataggattcctcgaaatggaatctatatttctatataccaatattacgattattcctcattccgttttatatgtttcattatcctattacattatcaatccttgcacttcagcttcctctaacttcgatgacagcttctca

SEQ ID NO: 174347 - DNA, 81 bp, Saccharomyces pastorianus
ttgtgtgggttattaaacgtgggactttggaaatacatccaagaagcacaattgagctctaacgatgaaccgttaccataa

SEQ ID NO: 174348 - DNA, 102 bp, Saccharomyces pastorianus
atgagacatggctcaaatatacagacaggtattctggcgtactataatgtgtgcgatgccatcgagcaagagatagatcgcctactgaatgaccccgtaacg

SEQ ID NO: 174349 - DNA, 774 bp, Saccharomyces pastorianus
atgccttgtttcgacaagaagctggaagcctcccgtccagagtccctggacgacgccatcgattgtgtgatcacaccccgcgaggtggtcacgatgctgcaagaactggggttggactacaaaacgtttgccaccgagaacaagaccctgtacgggcggctatcgccgcccgggtgggacccgcacgtgcactgggcgtcgaacctgggcggctcctgcggcggctacgcataccagtacgtggccgccatgcagcggctgcacccgggtagccaggtggccgtcctggagggtaagaacagcgacatcgtcgagtaccgcctgcagatgcacggctcggacaccccgatagccgccgcgagcgagctgtctggtttcagaaacatccagaacctggtgcgcaagctgaccgtgggcggcgccgggcccgagcgcaccaggagaaacgtgaccgtgctgcgaaagaggcgcgctggccccggccccggcgcaagctcacgccgggtggcgtccgccgccacggccgacccgttccattgcgactacatcgaggtgaacgcgtgccccggcgcgtgcatgaacggcggcggcctgctcaacggcgagcaaaacagtctcaagcgcaagcagctcgtgcaggcgctgaacgagcgacacgcgcaagagctcgccatggtggatccgctgacgctggacttggagctggacctggacttgaagtctctcccgctggagtattcttcgcgccccgtcgagcagtccgtcgagaaggat

SEQ ID NO: 174350 - DNA, 411 bp, Saccharomyces pastorianus
acaagtgactcgaatgtatacccaggaaaggctaagtcgcatgaacccagctggatagaaatggatgatcaaactaagaaggacggcttagatattgttcatgttgagttcagtccggatacaagagcgccaagcgatagcaataaagtaataacagagatatttgacgctactgaggatgccaaggaggcagacgaaagtgaaagaggaatgccacttgcgacagcattgaatacatatcccaaggcagcagcttggtcactattggtctctacaactttaatcatggaagggtacgacacagctattcttggagctttctacgccttgcctatttttcagagaaagtttggctcacaaaatgacaaactggagaatgggaaatttcagcgtcatggcaaatcgggctga

SEQ ID NO: 174351 - DNA, 177 bp, Saccharomyces pastorianus
gaaacggttggggcagaagtagttgaagctgtagaggtgattgtcgagggggacgaagaagtggacgatggtgtagatgaagaggaggaagaaaaagatgttgatgacgactcggacgtagacgatgatgctgaagacgttgaggttgaagaaacggaagagctcgaagaatccgat

SEQ ID NO: 174352 - DNA, 312 bp, Saccharomyces pastorianus
aaactcgaatatgaaaagagcgtaggttcattttcgtctaaatgtcttgaaacccaaagtattgcgctaccaaaggacgtttttagaagttcatttacctggttctactatgggatctacaagtcattcgcctttcgtatctggctagtgctatggttgctgatcattttttggcaaaagttatccaatgattggctttatcctttcatggcttccagatttgtgcttttagggctaattcccttgccctatattgtaaagatgtatcataaatgtgccctctcgaaacaagttactcaaagaaatcattga

SEQ ID NO: 174353 - DNA, 1077 bp, Saccharomyces pastorianus
atggatggtcccaattttgcacatcaaggcgggagatcacaacgtactactgaattgtattcgtgcgcacgatgcagaaaattaaagaagaagtgtggtaaacaaataccgacatgtgcaaactgcgataaaaatggggcacactgttcatatccaggtagagccccaagacgtaccaagaaggagttagcggatgctatgctacgaggggaatatgttccagtgaaaaggaacaagaaggtaggaaaaagcccattgagcactaagagcatgccaaactcttctagtccgctatccgcaaatggcgctataactcccgagttttcgccttacgaaaacgatgatgcacataagatgaaacagctaaaaccgtcagatccaataaatcttgtcatgggggcaagtccaaattctagcgaaggtgtctcatcgctaatttcggtgcaaacatcactaaatgataattgtaatcattcttcgcacttatcctctaatgaaaattccatgattccttcccgatcattaccagcttccgtgcagcaaagttcgacaacttcatcattcggaggatataacacgccttcaccactaattagcagtcatgtgcctgcgaacgcccaagccgtaccgctacaaaacaacaatcgcaatactagcaacggggataacggcagtaatgttaaccacgataataacaatggcagtaccaacacaccgcaattgagtcttaccccatatgcaaacaattcagcccccaatgggaaattcgattctgtgccggttgatgcatcctcgatcgaatttgaaactatgtcctgttgctttaaaggtggtagaacaacatcgtgggtcagagaggatggctcgttcaagtcaatagatagatccttactggacaggttcattgccgcatacttcaaacacaatcaccgtctatttcccatgattgataaaatagcattcctaaacgacgccgcgacaattaccgatttcgaaaggttatatgacaacaaaaactaccctgacagctttgttttcaaagtatacatgatcatggctattggttgtacaagactc

SEQ ID NO: 174354 - DNA, 168 bp, Saccharomyces pastorianus
atgatgataataatatttatagaattgtgtagaattgcagattcccttttatggattcctaaatcctcgaggagaacttttagtactttctacatacctaatattattgccttattaaaaatggaatcccaacaattatctcaaaattcacccactcttcagaacgag

SEQ ID NO: 174355 - DNA, 426 bp, Saccharomyces pastorianus
atgttattccctaaacgtctgattgtgtggggtgttctattgattttaagtttatcacaatttgtcctctacctgccagccacaacatgtacgaactctaagggacttaggctatgcgctccacagtttactataactgtgattggaggatccagtactgcaaacgagtttattgcaagtgtaagagaatttctgcgattgatttcgtacctgacaattgacatgggttggtcgaatgaattcactgatccaagtgtgtatgaggatgaaaatttggtggacacatttcagcctgataaggtttttgagctcaattattttggattttgtaaacggagtaataaaagcaaagtttattgtacctctaatgagaattatggcatggacgtacttgaagtacttgtcagagacgttgggattcaactt

SEQ ID NO: 174356 - DNA, 402 bp, Saccharomyces pastorianus
aacttaccaacatatctcattccaactctggtaccctttttggcatgtgggccttttcctgtgacgcggtcttcaatgataataccgccttccagtagcttcgtctttggctttgttttgctctcttccgagtctttaactttctctgctttcttgtctttcttggtcgtttgttttttctcggcaggtttagcactttcttcctcatcttcttcatgtttccttttactgtccttcttgttgtttttcttcttttcgtccttttcgactaattcatcaagacgactttcgatgtcactagcatctactaaatcatcaagatcgtcatcaccggaacttagttcctcatcgtcctcttcttcttcttcttcttcttcttctccattggaagattcttcgtca

SEQ ID NO: 174357 - DNA, 615 bp, Saccharomyces pastorianus
tacgtaaaggcaaataaaggtatcactcgagttttgttatcgaaagttctaagtgctccaaatcatactgttgattgtaaaatattccttgaaggcccatatggtgtaacggttccacatatcgctaagctaaaaagaaatttggtaggtgtagccgctggtttgggtgttgcggctatttatccgcactttgtcgaatgtttacggttaccatctactgatcaacttcagcataaattttactggattgttaatgacctatcccatttgaaatggtttgaaaatgaattgcaatggttaaaggagagaagttgtgaagtctcagtcatatatactggttccagtgttgaggacacaaattcagatgagagtacaaaaggttttgatgataaagaagaaagcgaaatcactgttgcatgtctcaataaaagacctgatttgaaagaactagtgcgctcggaaataaaactctcagaactagagaataataatattaccttttattcctgcgggccagcaacgtttaacgacgattttagaaacgcagtggtccaaggtatagactcttccttgaagattgacgttgaactagaagaagaaagttttacatggtaa

SEQ ID NO: 174358 - DNA, 111 bp, Saccharomyces pastorianus
cttgcatttcagcttccattatatttgatgactgtttctcaatctttatgccatcttcttacaccgcatatgataatacattctaataacatgaatactactaataaatga

SEQ ID NO: 174359 - DNA, 984 bp, Saccharomyces pastorianus
atgacttcgaaaccatccaccagtgacggcagggctcactcgatttcccatgtacctggcacgcacatgagaggaacatcggcatcacacagccccagaccgtttaggccatgtgcggattgtacgtgttctccaggcttactgtctaggcaaggtcgtagagcctctctatttttaagacagttagaaaattcaaggaggtcctccagcatgcttctcaacgagttgaagggcgctggcggaggtagcagtgctggaaatgggtctgtttactcatgtgactctctatgcgctgttaacagggaagttaacactactgatagattgttgaagttgcgtcaggagatgaagaaacacgatttgtgttgttatattgtgcccagttgtgacgaacatcagtccgaatatgtatcattgcgagatcaaaggcgcgccttcatttcagggttttccggatcggccggtgtagcctgtatcaccagagacttgttaaatttcaacgatgaccatccggatgggaaatccattttgagtactgatggaagatatttcaatcaagctagacaagaactggattataattggacacttttgaggcaaaacgaagacccaatcacttggcaagaatggtgtgtcagagaagctttggaaatggccaagggacttggcaataaagagggaatggtgttgaagataggtattgacccaaagcttatcactttcgacgactatgtttcttttagaaaaatgattgacactaaatatgacgcaaagggtaaagtggagctggttcccgtggaggaaaacttagttgacagtatttggcccgattttgaaactctacctgaaaggccttgtaatgatttactactgttaaaatacgagtttcatggtgaagaattcaaagacaagaaggaaaagttactgaaaaagctgaatgataaggcttcctctgcgacgaccggtaggaatactttcatagta

SEQ ID NO: 174360 - DNA, 294 bp, Saccharomyces pastorianus
atgaagaaactactaatcacattttacttactgttagcgactttgctaacaaagtcggtagcagctgacaaatcttattctgacctcgttaaaagagacgaaagtgctgccatcaacggttgtcccaatttggacttcaactggcacatgagccaacaaaacattttacattatgacatggatgtcacttctgtgtcctggatcaaagacaacgtttaccaaatcaccattcatgttactgcagtcaaagacatcccattgaagtacttatattccttaaaggttatcggcgtc

SEQ ID NO: 174361 - DNA, 564 bp, Saccharomyces pastorianus
atgtttgttaagtctttgtttgataagactctaacagatagacggagaattgaattacttcatcaatcgtgtaaggaacattctcggattacaaaagaatgctccatgggattgggtcaagaccgtcatttgtatgcaatgtactgtgtctggaatgaatggttcaaaggcatactaccgttaccaccattatatcatgataactcctggagtattctgaatacaaatatcctaagtacttcaaattgtggtaatccttgtttaaaaagctttggctttggccccgtgactgctaatgggtttgggattggttatgttattcgtgaagaatctatatccatcgttgtatcttccaaacataggcaaacgcatagatttgcatctttaatggagaaagcactactagtcatggatcgtatcttccagaaagaatcaagaatacccagtgatggacctatttctaagcaaagtccagatgagtctgcacatcattcacaacatcaggccgaagctctagactttttgttgtccggatacggctgtttcgatgttaatgtttctggg

SEQ ID NO: 174362 - DNA, 75 bp, Saccharomyces pastorianus
aaccaactgggccaagagaccaatttggatcgaaagttaaccattaatatttcacctaattacacactcttctaa

SEQ ID NO: 174363 - DNA, 549 bp, Saccharomyces pastorianus
tcttccgcatggtatttttcaggactggcgtttaggattgtccatgagattggtctgcagttaaatcctgctgctttaaatgacgtcagcgatggagacctaactaaaatggatattgaagtgcgagtacgaatttattggggttgttatctagtggatcactttatagctgaattatacggtagggtaaccgttttaacattatcaaattctgctgttccggagacagatgagctaccagatatcaatgcaggttatgaggactacatgtattccgatccagataaacctttacttgttgcagctccagtaaaaagtttgattttgctgtctagaattactgagttgtataaacgagaaaatacacaacttaaaactacatctgagaaaatgaacgccctttctgccttaaatatagatttacagaaatggagatctagcttgccggacaatcttacatggacaagcaaaacactaatcacagtaaatgacttcgatcccaccatatcgtttgtgtggtaccattactatgatactgctttcgtataa

SEQ ID NO: 174364 - DNA, 3909 bp, Saccharomyces pastorianus
aataacgtgaacggtgacagcttatggagctcgccttatcctggaacgatggcctccaccagtaccactcaattggatagtgtatccactaatgccagtgaacactcctatacaaacattgttttatccgatcaaactcaagagttttttctcgcagcctttgatgacatgctacaaacgattatcacagattgtgcctttctacttacaaaaatcaaagatgcggaggaagattcgttgttatctggtgaagatttaactttggacgatatttcactaaaggcagatttagaaaggtttttcttgtcaatatattttttctatgcatcaaggcctgaatattcccgtgctttctggtctgataaagagtcaaacgcttacggtttcattgaatggtgttccagatgcaatgataacttaatgaggtcttgtttctacctaatgatttctagtttatcctttggtcccgaaaattccttggatgtttatcgttattttggtgagaataattcggtttcatggaaaaatattgcacaatgtgtcggcgattacactaaaaaaataagtaacttcaacacaagccttcaaaaaagacagcgattcagtgaagtaacccataatgatatcgattctacggcggttgctttagaagaaggtttaaatgaagaggccgtaatatttctttcttctctattaactctggttggttcggttacataccatgtcaatgaagatgtaaaaagttcgctatcaaccgtcttttcagaggttctgttcgaatttacgagaataaacacccccctggtaggcgcttcattcaaagttttaagcaatttggttccaaaacttgaatcatcaagggcaaattattgggctttcttggactctttagttttcaaaaatatatcacagaattcttcctcagaatcctataaaactgcatttgcaagcgtattaactaaatattctgaagttttaggatttttgcaactgttccagaatttggtcgttattgattcctgtgaaaatggtagtgaatacatggtttttggtaagttagcatttccagcaaaattgggccaaggctatagaaagataggaatatggccatattttgattatattctcaatgatattttagctcatgtacatcagatcactgatattagaaacagaagggccatccaactccctattttaaaaattatctacacagggctatgttcttttgactacagcgtaatattgaactctattcctgctgctgctaacttgaattctttagtcgattgtgaaagcttcttcaattacgtccaagagtgtccaacaactccagtattcaactatatttttactgaaaaggtttacaaaagtatatttaacattattgatgtaggtgttgatcaattatccatagagttggaaggtggtaaaaaccaagctgaattgttacaagtggctgtgaaaattatcaataaagccttggagtatcaagagacttacgtagaagaattgtttccgattgtcaaaagacacggcaaaagcgattatttcatgccgaaaagtttttcacttcatggcttacgttcattttacgatgctattttttttaatatcccacttgtcgcgcacttaggtttatatgtcggcgttgatgatcggattttagcctctaattcattacaaattttgaaaaaactgtcagaacgccctgatgactcttcagcattattctccaagagaggtaaattattgactatatttgattctgttgatgaatctgctagaataaaggatgcattcattacacagttagaaacgccaataacaaatgatagtgttcttactttgaaattagaattactggatttcttaacttcaaatctgactaactccacccgaatcacgagtgtttctcatttactattagggttccaagtttcaaacgtcatatctctagggcctaacttagcgacgtttatttcttctgaaacttctttgctaaattctctcataaatctattagaagcttcattgaacagcatcactatagacaatatcgattatgcacctatgcgactagctacagcagcactagaaattatcctaaaattgtgtcgtaatccgttaacctctggtttattatactcgtacctaatcgaagagaacttctttgaaagaataatgattctcgatccacaaattacaggatataccatgtggaacggttccccatttgataattcaacagaggagaaacgcaaagacctagtcgagagcgaatctattggggcgtttttatcatttttagcgtacagaaattattggacacaatatttgggtttacttattcacaaaatgtcattctctgggacgaaatcagaagtttcaacatatgttaattacttgatatcaaatacaatgtactcggtaaggttgttctccttcttggacccactaaattacgaaaatattcccgaatcgagagaaaccctgtctactttttctgatgttcctttcaatttagatcaagtcaccattaacaaaaactgttctggtaacatctatgatttcagcgaaatggaaaagctcatgcgcctaatcaaaagagttcgcgttgaaagcttgtattccaataattcgggtttcgggatgacgaaggatcaatttttaaaagaagcaagcatcgaatgcacaaaagcaaagagccatttcacaaattacatttctagaaataaagcattggagttaaacctatcagtacttcactcgtgggtgcagttggtacaagttattgtcactgatggtaaattggaaccacctactagatccaactttattttagaggtttttggtacgatcattcctaaaattaccgactatgtcgagtttgacataactttctcagaagaactggtttctctcgctgttttcctattcgatatatacaaccgcgaccgtaagttcataactgatagaggtacggtagacggcagattgtaccaattgttcaagacctgcattcagggtattaactctccactttcctctgtgacattgagatctgatttttacatattagcaaaccactatctgagtagggttttaagtgacaaacaaggatccgaaagagttttacaagatttgaggttaggaagtaagaagttggtagaaattatatggaatgacgttatctatggcgaaggtactagcaggattacaggtattttgctgttggattctttgatacaactagcaaataaaagcaaggaaaatttcatattggactcattgacgagaaccacgaggttgcttttgattgtacgctcattgaaaaacactgacgctttgctaaactccaccacagaacatataaatatcgatgatttattatatgaactgacagctttcaaagcgaccgtattctttttaattcgtgtggccgaaactaggagtggagcaagttccttgatcgaaaacaacttattccgaataatcggcgaattgtcgttcttaaaagtcgatcctgatttaggtttagagcttatgtttgacgaggtttacgctcaaaattctaacttcttgaaagtcaatgtcactttagacaatccgctaatagtcgacaaagattcgaacggcgtttccctgtttgaattgatcgtccctgtctttcaattaatagctgctgttttagtgagtatggggagtgcaaataaaagtgttgttcagaaggtgaaaagccttttgagtgcgtacaaaaggttagtgataggtatcttcaaaagagacctattaagtgaaaaagaaggtgaaactaagttgacggattccaatcgtcaaagtttagacgagatggtgaagttaattgtgatgttatgcactttgacagggtatcaaaatgaggattga

SEQ ID NO: 174365 - DNA, 216 bp, Saccharomyces pastorianus
tggctggtcgatcagtgcctgtatggcagaaaacttcccaatgttgtcgagcaatgcgtttgggatagcgtagatagatatgcttccaccacggttgtgccagtgagtacgctaaaggcgatggccaaacaaaagagaaaacagatgaaagaagaaatcaagaatatcaagaaggaaaaccgtgtagttcttgtagaccacaatagctcgtcgtga

SEQ ID NO: 174366 - DNA, 408 bp, Saccharomyces pastorianus
atggccagtcaccattttcccaacgagaatatagtttataatccatacggcataagcccaaaccatgctaggccagatactgcatttgcagacactctgaatacgaataaggagaacgatttgagtttttacatgcatgatggtaacagcaagatacggatgttgccccttccaattgctaatccgaacgattttttgcccgaagatatgaaacaatatagtgtccacttgacggataatttcgtatttgatacggacaataaacctattggttcgggtgggtctagtgaagttagaaaggttaaatcaagttacaggcaaaaggatgtttacgctctaaaaaaactgaatatgatataccacgagtcacccgagaagtttacaagagatgctcaaagaattatcata

SEQ ID NO: 174367 - DNA, 129 bp, Saccharomyces pastorianus
gacaggatagctgcgtgggagaatattgttgagtgcacctttaggaccaacaacgtaaaattgggttacctcattgtagatgagtttcacaactttgaaacggacgtctacggcagtcgcatttggggg

SEQ ID NO: 174368 - DNA, 648 bp, Saccharomyces pastorianus
agtgcgttactatcggaatcagacctcaacgacttcatcagtcccgcgctggcgtgcgtcaagcccacccaagtaagcgggggcaagagcaccaacacgaacggcgagtacgaagtgaccacggagccggaccagccggagaaggtttccatcacgctgtcagactgcctcgcctgctccggctgcataacctccagcgaagagatcctactgcgcagccaaagccattctgttttcctagagaactgggggaagctttcacagcacccggacaagttcctcgtggtgagcgtttcgccgcagtgcagactgtccctggcacagtactacgacatgacgctggaggcggccgatctgtgcttgatgaattttttcgaaacgcagttccgctgcaaatacatggtcggcaccgagatgggcaggatcgtgtccatcaacaagaccgtggagaagatcatcgcccacaaggaccacgagcgccagcagggcaccgcggcggacagcaagccattgctgtccgcggtgtgtcctggctttctcatctacacggagaagaccaagccgcagttggcctccatgctactgaacgtcaagtcgccacagcaagataacaggctccttgatcaagaaaccttccacgacctcggc

SEQ ID NO: 174369 - DNA, 138 bp, Saccharomyces pastorianus
tttgtattaggagatgctttccttgtcgacgcatatgttgtctatgacatagaaaacccacggactttcaatgctcaggcaagttttaaaaatcgcgaagaagacattaaaataatatttgataaagccgctggtgcc

SEQ ID NO: 174370 - DNA, 288 bp, Saccharomyces pastorianus
atgactgcaggcagtctgcagcacgacccaagcgtactggcaagcccattcggcgacccaactccctccagaagagcctctacattcgtccattcgcccactccgaggcaccatgataaggtagcatctactattaccctcggtgaagacaccgtactggtggaccagagactggaccccagcaagatgttaaacaccatggccaatgacgacgccacaacccactctgcggtctcgttatcagataacgtggactactctagaagagtgctgcgtgtcatgaacgag

SEQ ID NO: 174371 - DNA, 144 bp, Saccharomyces pastorianus
atgaattttgaggtaatttttgggatgccattgctgttagagatcatagtattaggtgcacaaaatgaacaaggagttctccttaaggacatacgaatccacaaaagggtatggaaatttctacatagtattgtgattatcgtg

SEQ ID NO: 174372 - DNA, 216 bp, Saccharomyces pastorianus
acagaactgacaagttttgtacacatcaggcacacaaggcccgatttccacgaactgataaacgagtcaatgaagaatgggagtccagcggactccgtagcaatcgtatgctgcggcccgcccgccttggtcgacgacgtaagaaacaccgtttcccaaacagtcatcgaccaccctggaaggattatcgagtactttgaagaataccagtgctgg

SEQ ID NO: 174373 - DNA, 186 bp, Saccharomyces pastorianus
atgggatcgtctagttttgctctttcgtataagtcaggaagtagcaccaccacactttctcctaagtctgtatcaccaatatccgtcgtcgaaaaaagaaagaaaggggaaaagagtggtgttacgtcaacagcaaatttagacttaccgtccattggaaattcctcgattgtggtgaaacagatc

SEQ ID NO: 174374 - DNA, 333 bp, Saccharomyces pastorianus
atgttgcagagacattccttgaagttggggaaattctccatcagaacactcgctactggtgccccattagatgcatccaaactaaaaattactagaaacccaaatccatccaagccaagaccaaatgaagaattagtgttcggccagacattcaccgatcatatgttgaccattccttggtcagccaaagaagggtggggcactccacacatcaagccttacggtaatctttctcttgacccatctgcttgtgtattccattatgcatttgaattatttgaaggtttgaaagcctacagaactcctcaaaatactatcaccatgttccgtccg

SEQ ID NO: 174375 - DNA, 585 bp, Saccharomyces pastorianus
ttcaaagaaaactaccccgcatccaccaccatcttgttcgatctgaacgggttctccatgtccaatatggactatgcccccgtcaagtttctaatcacttgttttgaggctcactacccggaatctttgggccatctacttatccataaggccccttggatctttaacccgatttggaacatcatcaagaattggctggatccggtcgtcgcgtccaagattgttttcactaagaatatcgacgaattgcacaagtttatccaaccccaatacatccctaggtatctgggcggagaaaatgacaatgatttggatcattacactccaccagatggctctttggacgtccatctgaaagacaccgagactcgcgctatgatcgaaaaggagagagaagaattggtcgaacaattcttgactgtcactgcccaatggattgaacaccagccattgaacgatccagcatacattcaactgcaggagaaaagagtacaactttccaccgctctttgtgaaaactactccaagttagatccgtacatcagatcaagatccgtttatgactacaatggttctctaaaagtt

SEQ ID NO: 174376 - DNA, 774 bp, Saccharomyces pastorianus
accatctccaactgtgggtttgccagtggtatggatttggctggtttattaccgaaatatgttgatattaagagaggtgctatttttgccgcatgcgtctcctgggcctgtttgccatggaacttttacaactcttcttctactttcttgactgttatgagctctttcggtgtcgtaatgacacctattatcactgtcatgatctgtgacaatttcctcattaggaagagacaatactccgttaccaatgcctttgttttaaagggtgaatactattttaccaagggtgtcaactggagagctatcgttgcctgggtgtgtggtatggctcccggtctacctggtatcgcttgggaagtcaataatgactatttccacaacactggtattataaattttttctatggtgattctttcttctcctttttgatttcctttttcgtctattggggactatgcctcctcttcccattcaaaattactgtcaaacatgatgacaaagattactacggtgcgtttaccgacgaagaagcaaggaagaagggcatggttccatacagtgaaatttctgaagaagaaatccgtgcttacacattaggcgaatgcttcacaagtggacacgaatacaaacctgagagctccgatgatgaactacctgagttgacaaaaactagttcagaaaacacaaaagtgtttgaaattgttcatcagaaagataatgaaaaggaatcctctacttccagtgaaaaacaattgcctaatgagccaaaaacg

SEQ ID NO: 174377 - DNA, 846 bp, Saccharomyces pastorianus
atggctgaaagtaccacgttagaaactattgagatacacccaattacttttccacctgaagttcttgcgagaatatctccagaattgtctttacaaagacacttatccctaggaatcaggccatgtctaagaaaatatgaagaatttagagatgttgctatagaaaataatactttatcgcgttatgcggatgctggtaatatagacactaaaaacaacattttaggctcaaatgttttgaaaagtgggaaaaccatagtcataacttctattacgggtggaataatagaagaaactagcgcctcgatcaaagatttggatgatttcggtgaggaagaattgttcgaagtgaccaaagaggaggacataattgcaaattatgcttctgtctatccggtggtggaagttgaaagaggtagagtgggcgcttgcaccgatgaagaaatgactatatcacaaaaactacacgattccatattgcactctaggatattgcctaaaaaagccttgaaggtaaaagctggtgttcgtagtgcgaatgaagacggtacgttttccgtcttgtatcccgatgaattagaagatgatacgctgaatgaaacaaacctgaaaatgaaaagaaaatggtcatacgttttgtatgcgaagattgtagtcttgagtcgcactggtccagtcttcgatttgtgttggaattctttgatgtacgctttacagagcgtaaaattacctagagcatttatagatgagcgtgcgtccgatttaagaatgactataagaacaagaggaagaagtgccaccataagagaaacgtatgaaattatttgcgaccaaactaagtcagta

SEQ ID NO: 174378 - DNA, 306 bp, Saccharomyces pastorianus
atactcattgaatttgctaaagcagagatcagcgacccgatttcaaaaatgacaatagcaaatagcatggtctccttgaatccgataggtgtggcaattcttccccatatcaacgccaacagagcgtttggtaagctatacccggtaaataaccacccgatctcagagtacgatccaaactgtttagctacttcttcaatgattgtagaaactatcatgatatccaaggctgccagaaacagcgacaaagccaatgctatcaaagatgcgtacaagataaaccctttaggtagttcattactttcg

SEQ ID NO: 174379 - DNA, 252 bp, Saccharomyces pastorianus; identical to SEQ ID NO: 173789

SEQ ID NO: 174380 - DNA, 1761 bp, Saccharomyces pastorianus
cttgtcgatccaaatttcgctgcaaaagagcttcaaaagaagacgtacttaaagcaaatatcatctccgctggtgctacatgaagctcaaaaccttgccaataagaggttgcgggacattgactctaacaatacttatttgattctgtttggtaatcaagcttacaacaagcttgctgtagacattgctttaaagcactactcggctaatcaagagcagaagaaaaaaatctacctaggtggtggcttgtggataactccagaagaagttaatactgtagccaaaaatttgatatcgcccgtaataaacgaaattagcgagagggctaatagacagcgtaacgttgaccgggatattgagaaaaggacaagtatccttgaccaagagcatgaaaactggaaatctatggaacgtacaaaagagcaaaatgacaagcagattttgttagtgatggaatcaaaacggcaccaggaaaaagtagccaaaaaagcagagagtgaacaaacctacaacatgctggtatataatatggatgctgaagtagaggagaaggagaaggagttggaaattattaagcaagatcgggaacatttgagggttgaattgcaaagaatgctgtccaaaagcatatcagaagaagaaggtaacataaaagattggagtgaatcctgtcaaagagatctcgataatacaaatattgaacacgctcaggcagctagactgtaccctgatgatttgagagcctcgacaaatgaatatgacgaactgctagacgagcacgacggagtacaggatcggatcaaaaagttgaatttatctattaatgagcacagaagtgtcatccatgattttaaagtaagaattgatacggggggaggtttgacagccacacaaaaagagaaagttggtagtggagggcatcttatggatgctactgtgaatgattctgttgttattcttgcagaaaaggcgaaacaagaagctgaattggcttcagaagaggccatgctgcaacaattggaaattgatgatatggtcaataaaagaacaactaggctgtacgcccataaaaaccaactcaggaaggagaaaccatcatcgacaagatcacagaaggtcactgaaggcggagaagacttaaggaatgaactcaatgctgctcaaggcgacatattgtacgcgccaaccacagatgaaaaatcggcacgcgtggtaagaagtgcgtctactgtaaagaaccgattcctttctgcatacagttcagggaaagatgtggatagctcggcaagcgccagatcggtcaccggtgttagtggtgttttggatgaaagaactgaaaccccgactactgataaggaagcttttccggttgataaggaagcgaggccaggcaatgtacgccaagcccctgtcctagttgaaaacgagaagacctcaaggccagttaccgaagcgcgaggaccgacaacaatcgagcaattcttatttggtaagaccgccggtaaaaaagggccatccggtaaagaatttgcaaccttaaaaagtgggccagtggtgaacgcaacagaatcagaaatggagaaggaatctgttcatcgcaatgacaaaccccgtgaatccttcagtggattttctcaaggttcattcgaaaacgattacggtaacgaagttaccgatgatcaagatgaatccgacataaagattcgggactcgagcgattcgaatgttcgcggtgaagaaagttttttcaaggagattatt

SEQ ID NO: 174381 - DNA, 75 bp, Saccharomyces pastorianus
gacgctcttcctactgagctactgaagctatctgttattgaagattctagcattaaatgctttaatattcaataa

SEQ ID NO: 174382 - DNA, 111 bp, Saccharomyces pastorianus
attccccattccgttttatatgtttcattatgctattacattatcaatcttgcatttcagcttccattagggttgataactgtttctcaacttttatgtcatcttcctgaa

SEQ ID NO: 174383 - DNA, 507 bp, Saccharomyces pastorianus
  modified_base (497)..(497): a, c, g, t, unknown, or other
ggggagaacgttacgaaggccatcaccacagagagaaaagtcgaggatgatgctgctaaggaaacagagagttcaccacaagaaagaagagaggtgaagcggaagttaaggcagcggcatatagggatgattgctctcggcggcaccattgggacgggcctcataattggtattggtccgccattggcacacgccggccctgttggtgccttgatatcgtatttatttatggggacagtgatttactccgttacacaatcgttaggagagatggccacttttatcccggttacatcttcattttctgtcttcgcccaaagatttctgtcgccagcgctgggagcgactaacggatatatgtactggctgtcgtggtgtttcaccttcgcactggaactatccgttttggggaaagttattcagtactggacagaagcagtgcctctagcggcttggatcgtgatcttttggtgcctgttaacttcaatgaacatgtntcccgtaaag

SEQ ID NO: 174384 - DNA, 96 bp, Saccharomyces pastorianus
ggaagctgtttaataggttttcatggcatgactaggccactagagctttgtccaataatcgaagaattactgaatcaaccaccagaagtacagatt

SEQ ID NO: 174385 - DNA, 438 bp, Saccharomyces pastorianus
aagcggttgaaaccgatggcaaaactatgtggcaaagaccgtattgttgtagatttaagttgtaggaagacgcaagatgggcgttggattgtcgcgatgaacaagtggcagaccttgactgacctcgagcttaacgcggaaacgtttcgagaactaaaagagtacacaaatgagtttctgattcacgccgccgatgttgaaggtttgtgcggtggtattgatgagcaactggtatctaaattatatgaatggaccaagaattacgacgacttgaaaattgtttatgccggcggagccaaaagcattgatgatttgagattggttgatgaattaagccacggtaaagtcgatttgacgtttggtagttccttggatatatttggtgggaacttggtcaaattcgaagactgctgtaaatggaatggagtgcaaaattag

SEQ ID NO: 174386 - DNA, 336 bp, Saccharomyces pastorianus
  modified_base (105)..(105): a, c, g, t, unknown, or other
  modified_base (112)..(112): a, c, g, t, unknown, or other
  modified_base (176)..(176): a, c, g, t, unknown, or other
  modified_base (239)..(239): a, c, g, t, unknown, or other
cccacttatgaaaaatactattcaagtgattacgtttttgttcagggattcagaaattcagattcatctgcaatgacaatggcatatactgctatggggtacctngatagtnattgggatggtggttgctattcgtgggacgtgtgtgctggatggtgtattttgaaagaggtggncggtcgtgtagtaggtgccaatccaggtgaatggagtattgatgtcgacaataggacatattnggctgtgaggggaacaattaataacgaaagtgacgaacaaacaaaatatatcacagacttttggaactgtgttgatggccatttgaaatatgactga

SEQ ID NO: 174387 - DNA, 279 bp, Saccharomyces pastorianus
aacaacaacagcaacagcagcagcaacagcaacaacaacaacaacaacaacaacaacaacaacaacaacaacaacaacaacaacaacaacaacaacaacaacaacaacaacaacaacaacaacaacaacaacaacaacaacaacaacaacaacaacaacaacaacaacaagtacaagtacaacaacaacaagtacaacaacaacaagtacaacaacaacaagcacaacaacaacaagcacaacaacaacaaatactacagcagcagcaacaacaacaac

SEQ ID NO: 174388 - DNA, 141 bp, Saccharomyces pastorianus
catttaaattgtatgatgatctttgggattccattgtttcttaatgttataatattacgtatatatattatactagagattctcctcatggatttaggaatccacagaaaggaatcaataattctacataatattataaat

SEQ ID NO: 174389 - DNA, 90 bp, Saccharomyces pastorianus
atgatcaccggtgtcccatggtactccagcagattaaagccagccatctctagtgctctatccaaggacggtatctacactattgcaaac

SEQ ID NO: 174390 - DNA, 222 bp, Saccharomyces pastorianus
aacgcttatagatatgttcaaagattggaaactattgttgcgttggtgttctgtgcccctttgattgcgttctcgttgtgtctaagagatcctaaattaaccgatacagtcgctgtcgaaaacatcgaagaaggtgaatacgtcgacaccaaggacaatgacccaattcttgactggtttaaaaagtttacatcaaagttttcttcttccaaaaaggaatag

SEQ ID NO: 174391 - DNA, 894 bp, Saccharomyces pastorianus
  modified_base (849)..(849): a, c, g, t, unknown, or other
  modified_base (884)..(884): a, c, g, t, unknown, or other
acgagaatccagtatgatcaacgcctgctagacgaaatcgcggccaatgtggtatactacgtcccaagagtcaaatcccccgacactttgtatcgcttggtcggagcacttttccgatcgcagttcattgtccagttaccaccactacgccttttgcacatcgtcaaagatgttttcctttggaaactggaagtttctgagcccacgctcccaatttcgaagttttacttggtttggaatgctgttttcgaatctcaccgagccacgtggaacctttcacagttgatggttttggatggtgtactagtcacatacccgaggttcaaacaattgaacaacgcctattttattgatgaatccagcaacaaaactgcgctttattacagaaactggaaattacaactgttttccccaatatgggcgcagctatggaatactgccattgtcaaggctaatttatcgattcagcattgccttctgatagcattagctttactttttaatcagtcaaaccgaagcgcccttttgcacggagttgacgtatcatggaatttggtcacagagaaactattggaccttttggaagagtatgtacacggcattgtgcagccgatggaaaatttttcgactaattcagtcttatcaaccaacttgaatcatttggccagttgcttgaccggttcaatcacgaggtcaaatgaggcaactttggtaaattcagtacgcaaactagaaaggatatgtcgatacttgtccgatactgtggcttcgttgaaagaacaacaactagatttcaagttccaaaatgtatttatcctgataatcctcgcgttaaaagaattatccgcncatgaatatgacaatgacctgcaggcatgcaagcntgcactgccg

SEQ ID NO: 174392 - DNA, 285 bp, Saccharomyces pastorianus
agcaacgcctgctttaaagtcatgcttttttcctcgctgttagcttcatttgcttcatcagtagcgttcatctcattaatcatattctcgttatcttcgtcagaatctcctaactgggctgaattggtggtgaactctaagtggtctagctcaaaggcactatcctttttcccttcttcaaaattttcagtattgaaaacctcctgttggtttacatatctcttgaagactcagaaatgtttttatcctcattttttgaggcagccttcttcttgctaccaatga

SEQ ID NO: 174393 - DNA, 141 bp, Saccharomyces pastorianus
atgaacgcgtgcatgcaactcgtcctcagtgacttggtcgccaggcgggtacttttcaaaacagtgcacgtgcacccatggcatttggatggtatcagtggcgcctttggtgtgtgctgcaaagatgccacggaagtttcc

SEQ ID NO: 174394 - DNA, 537 bp, Saccharomyces pastorianus
gaatctattatcctcagcattgccatctttattggcgtcctccttggcactagcgttggtactttcagtggtaatggcattagtgctggagttggtgctagcagtggtagtggcattagtgctggagttggtgctagcagtggtagtagcactagtgttggagtcggtactttcggtggtagtagcactagtgttggagttggtactttcagtggtagtcgcactagtcctgacgttgatgctggcagtggtagtagcactagtcctgacgttggtgctggcagtagtagtagcattagtgctggagttggtactttcagtggtagtcgcactagtcctgacgttgatgctggcagtggtagtagcactagtcctgacgttgatgctggcagtggtagtagcactagtcctgacgttggtgctggcagtggtagtagcattagcactaccatgaatgcacgtgtcgctgtcctcatcactgctgcaatactttctgtacctgtcactgctattgctctcctggaagctagacggtaa

SEQ ID NO: 174395 - DNA, 396 bp, Saccharomyces pastorianus
atgtacgatttacaggaactaaaagaggcagaaacatataagaaatcaatcgaaaattatacaatatgtttagaaaacaaaatgccattaccatcgggcgctattccctttgagttcctgtttggaacagattttcaacgtaaagtttggaatgagcttttaaacgtggaacacggtcacgtcgcaacatatggtgatattgcaaagagaatagggaagccaactgccgcaagatctgtcggaagagcttgcggctcaaataacctggcattgttagtaccttgccatagaatcgttggtagcaatagaaaattaaccggatataaatggagctgtaaactgaaagaacagttattaaataatgaaaaggaaaatagcttaagccttagtagattg

SEQ ID NO: 174396 - DNA, 120 bp, Saccharomyces pastorianus
atggtcaggtcgttagctcagaaaattgtgagcatcaaacctttcatttatcaatactgtcaaccttctaaatataagcacgagaaaggtatttctatcgttgagagcaccttcattagt

SEQ ID NO: 174397 - DNA, 528 bp, Saccharomyces pastorianus
gatttccaaacatataacaaacgtgttcaaagggaatatgagctcagggaaaggatggaagaattcttccgtcaaaacaccaaaaatgatttacatattttaaacgaggattcattaaatcagcaatattccccgttagggcctgcagattatgttctgcccctcgatagatactccagaatgaaacacattgcctcaaactttttcagaaaaaaacttggtattcctggaaaactgaaaagaagaagccattataatcccaacgcagagggccacaccaaagggaattcttctatattgagttccactactgatgtaattgataaagccagctacaggaatattgcaatagatgaaaatgttgacataacacataaagaacacgccattgacgaaataaacgagcagggtgcatcaggtagtgaatctgttgtggaaggtggatcgttattgcatgacattgaaaaggttttccctgaggttaaaaataatccgacactaaagcaagccccgatagagagcatttga

SEQ ID NO: 174398 - DNA, 360 bp, Saccharomyces pastorianus
atggtcaaagtaacttcaatccccgctggtttcgctgccatcgctgctactgcttctgcaaccaccactcgagctcaatctgacgaaagagtcaacttggttgaattgggtgtctacgtctctgatatcagagctcacttggcccaatactacatgttccaagccgcccacccaacggaaacctacccagtcgaagttgctaaagccgttttcaactacggtgacttcaccaccatgttgactggtattgccccagaccaagtgaccagaatgatcaccggtgttccatggtactccagcagattaaagccagccatctccaaggctctatccaaggacggtatctacactatcgcaaac

SEQ ID NO: 174399 - DNA, 75 bp, Saccharomyces pastorianus
atgggtggtatttccatccaatcgatcaacgaggcagccaacaaaaacggcacaagactttctgaaatcggatgg

SEQ ID NO: 174400 - DNA, 216 bp, Saccharomyces pastorianus
ggctcctttgtactggtactcgatgctatactatttcactcggtcctagctgaagatgacttgaaacagttgttgagcataaataagacggaactggggccgctcattgctagactaagatcagacaggttaatatccatacacaaacaagagaataccctccaaactcaaaagtgtggaaagagtttactactatgtaaaatatcctcatgctag

SEQ ID NO: 174401 - DNA, 1119 bp, Saccharomyces pastorianus
ggaaccgattctagtacagaacagaattataagctagtttgcaagttaactttaaaagatgaccagaatatctcaacgtgttctttatcacctgatggacaagttttagtcgtagggaggccctctaccactaaagtttttcatttacagcccgtaggtaataaattgaaagtgactaaactagataatgacctattattgagaacttccacaaaattagtcaagttcatcgataattccaaaattgtcatatgctcttgcgaagatgatgtatttattgtggatctagaatctgaagaagatgaaaaaccgcaagaagttgaacttttggaggttacttcaactaagagcagtatcaaagttccctatattaacaggatcaaccatttggaagtagaccagaacattgcagtaatttctcgtggctgtggagtcgtagacatattagacttaaaagcaaggatttctaaaccacttgctcgtttgaataatttcatcaccgctgttcatatcaatacttctagaaaatctgtagtagtaattactgcagacaataagatttatgaattcaatatgaatttgaattcggaagccgagaatgaagatagcgaaagcgtattaactcaatggtcaaaaaacaatacggataacttaccaaaagaatggaagacattaaaagagaactgtgtagggatattttcagacatagaaaatagtagcagattatggttttggggggctacttggatatcaagaatagactttgatgttgacttccctataaataagagaagaaaacagaaaaaacgtacacacgaagggctaactatcacagatgaaagtaatttcatgaacgacgaggaagatgacgaagatgacgatattgatatggaaatcagcgaaaacttgaatgtattattaaaccaaggaaacaaaataaagtccacagatgtacaaagaaacgaagaaagctccggtcacttcttctttactgataaatataaacctttactgtttgttgacttaatttctagtaatgaattggcaataattgaaagaaatccattaacttttcactccaaacaaaaggcgtttattcaaccaaagttagtgttttga

SEQ ID NO: 174402 - DNA, 90 bp, Saccharomyces pastorianus
caaatagtgcaaaccaaaataaaccgggagtcattgatatttctacagcagaggagcaggaacaaagcgcttgtcagtgttaacacctaa

SEQ ID NO: 174403 - DNA, 189 bp, Saccharomyces pastorianus
atggcaaaagacggcttcgagttatatagatacactccggaattaggtgcaagtatactttttacggtactttttgcagtatcgggggtagcatttgtaattttactattccgttattctgtgaaaagtaaaaggagagttggctctcttatgaagtcccaacccgtattgcggtattacggtacggta

SEQ ID NO: 174404 - DNA, 1608 bp, Saccharomyces pastorianus
atgaggtcgtgtggcataagaagtaatatacccattgttacttatcgcttgagtcaatttgattattcgaaaggtagagcgcatggaaattatccaactattgtggatgcactagaattttcaaagcctgaaattgaatgcttattcgttgatttaagtagaattgaaagaatagtgttaattgaagataaaaacgaagccagaaatttcttgcaacgaaatcccgtgaacgtgaatatggctttatcgctaagagatagacgtagtgggttccagctctctggcggatatcgactagatacggttacttatcaagataaaattagattaaaggtcaactcttcatccgacaatgggactcaatatttaaaggacttgattgaacaagagaccaaagaattacaaaatatacgggaccgttacgaggaaaagctaagtgaagtgaggtcaagattaaaggaaatagatggcagactcaagagtaccaaaaatgaaatgagaaaaactaattttaggatgacagaattaaaaatgaatgttggcaaagtagttgatactggtatattaaattcgaaaataaatgagaggaaaaatcaagaacaagccatcgccagttacgaagccgctaaagaagaattagggctgaaaattgagcaaattgcacaggaagctcagccaattaaagagcaatacgattctacgaaattagcattggtggaagcacaagatgaactgcaacaattaaaagaggacatcaacagtcgtcaatctaaaattcaaaaatacaaagatgataccatttactacgaggataaaaaaaaagtctacttagaaaatataaagaaaattgaagttaacgtagcagctttaaaagaaggtatacagaggcaaattcaaaatgcttgtgcattttgttcaaaagagcgaattgagaatgttgatttaccagatacacaagaggagattaagcgtgaattggataaagtctcgagaatgattcaaaaagctgaaaaaagcctaggattatcgcaagaggaagtcatcgcattatttgagaagtgtaggaataaatataaagaaggtcaaaagaagtacatggagatagacgaagcactgaacaggttacataattccctcaaagctcgtgatcaaaactataaaaatgcggaaaaagggacttgttttgatgcagatatggattttcgcgcatcattgaaagtaaggaagttctcgggaaacctttcctttattaaggataccaaaagtttagaaatatacatcttgactactaacgatgagaaggcaagaaacgttgacaccttgtctggtggtgaaaaatcgttttcccaaatggcgctgttattggctacatggaagccgatgcggtcaaggattattgcgttggacgaattcgacgttttcatggaccaggttaacaggaagattggtactactctcatagtgaaaaaactaaaggatattgccagaactcaaactattatcattactcctcaagatatcgggaaaattgcagatatcgatagttctggtgttagtatccacagaatgagagaccctgagagacagaataattccaatttttataat

SEQ ID NO: 174405 - DNA, 561 bp, Saccharomyces pastorianus
aaacgaaagcacaaagtaattaccgcgtgcaaaaactgcaggaacaggaaagtaaaatgtgatggtagtctaccctgcttttcgtgcctgcaacggcatattacttgtacatatatgattaagggtgatgagggaaaactcagcttttacaagcaagatgatcatattctagagcagatcaagattcttaaaaagagcattgatattttggaaaaattaaagctcagcgtcgttacttcgtctgaatacgcaactaatgcaatcgcagatatcaatagacagcttgaaactctgctctcatttcaacatgttaatataaattcagaatcagttcgtacatacaaggataacggcgcactcgaaaatcagctgctaggcggtaattatgttgcgtttgatgcttttagtacttttgaaaatgttagcaaaggaaaggcagtggatgttatttttggcctctattcgcctatatcagtaatgtcaccaaaaggaatatgctggctaatacaacagcttatagtaagtccagagagaaggatacggaagagactgtatatattc

SEQ ID NO: 174406 - DNA, 252 bp, Saccharomyces pastorianus
tgcctcagcggtctataccctgtgccatttacccataaagtccatcattatccacattttaatatctatatctcattcggcgacaccaaatattgtataactgcccttaatacatacgttataccacttttgcaccatatactaaccactcaatttatacacacttatgtcaatattacagaaaaattaccactaaaatcacctaaacataaaaatattctatccttcaacaataatacacaaacatattga

SEQ ID NO: 174407 - DNA, 81 bp, Saccharomyces pastorianus
atgggtttacgtgggcatagatcacgcttcagccgctctgtgtcgactttcttttcgccaggtaaacttgcttggtatgca

SEQ ID NO: 174408 - DNA, 321 bp, Saccharomyces pastorianus
gcaatctatcgtgtgggaactatgtttttgctttgttacacagaatttgccttctttgtcaataatcagggttggagaaagaaagaatcgcatattattcattgggagggagagccccaaaaatttgcaatttggtacccgtacatcttggcattcgacagcaacttcattgagatcagaaagattgaaactggcgaattaattcgttgcgtccttgctgataagattcgacttctacaaacaagtactcaagaaatcctgtactgctacgaggattatcgcgggtatgatacagttgcgtcgttagatttctggggttaa

SEQ ID NO: 174409 - DNA, 375 bp, Saccharomyces pastorianus
gcggatcaagcttgtcgatcattggctagtgtgaaagccattttcaaccagagagctaaactggggtatcttttggtaattatagaaaatgatatgaaaaagaaacattcacagttagagaaaatgggccaaaatattcattcggaaaaattcaaagaaactaaaaaggaatttttaacttttgagaggcattataaccttacaaagacgaaatggcaagaagttggtgaaaggataaaggatgaatttcaaaacttttctattgacaagattcgggagtttcggaacggcatggaaatatcgctagaggcagccattgaatctcaaaaggagtgcattgaactttgggaaacattctaccaaactagtctttag

SEQ ID NO: 174410 - DNA, 1476 bp, Saccharomyces pastorianus
agccagaatccaggagatgatgtactgaaaacattttccctggattgtcattctcttactttaaccgatggtcgggacgtgtacatacacagtcatatgggcggaaataatgatctcaaaaaatgcttgaacaccgacctagtttcacaaagcaaatactacaccgcaattgcctttgataccaggtcctttatcgaaattggaggatttttgattgacttaaagtcccacaacttttgctctctctttgatattgaatttcaaaaggaaatatctgcgcctgtttggctaggtctacgaagtatatcgtttgctagcgtgtttgaaaagctgcaaattttagatttgaattaccgaattacggattgtaaatccctattttacgttatgcatgagaacgtatacgtcaattttcagaaaaacgaacaaggcagctacgtgtgcaaaatttgtgagagggaagtcgcctctaatatagcccttccagtatcgacagttgtgaatggcgccgaagttgttaagtatatcgtactatcggaaaaaatccaagattacggtccaagtttacatgatctcgaacgggccttggggaaagaatcattttcagtggacagtaaactatctcagcattatcccttaatggaatgtgattattttgattatgatgaagaggtggaaactcctaatattatgtatgttcccggttgggaaatatggcaactgcctaccaaaattatgcaagatgtcttagaacccaaaattttccatttcggaatgcccaagcatatacagaatcttcacaatacgttgttggaaagaatgctacaggggggccaatggaaaattaaaaagatcaaagaaataatggcgtatgaccccgagttagcgggcttactcgtccctgtcctccctgaatacgaaaaattgcataaagaagcagttctaatgagcttgaaaaccgggttaagtacattcaccaagcaaatccataatgaggtcagaaacaaagacggagaattgatacccaatatcaaaattatggaaagactactaattgatatcaaagagggggtcatggtgagcccgaaggaagccaaatacagattcgaggataacatcacgttcaagtataatctgttggattggagtgtattcattcttaaagagccaccaatcgaaattttctcaagcaatttgttcgatacagttcaaacaaaaaaagtgcatgatattgggacaaagcttaacggtagacgatatgttgttttgagttttggaaaatttggaaccatatatttatacgaaggaaaggatagcatgcaaacgtttaaaacaccattggttgttgataaagccggatctccaagaattcggttctacatttcggaactaaacggattattagatgtttctgaacacttgtcaaattttgaaatgctgtggaaagccatcaaagaggctggttctcaaaacaaa

SEQ ID NO: 174411 - DNA, 126 bp, Saccharomyces pastorianus
tgctgtgttggcacttgttggaatgaagctctaaaacatcatgatgattgtgtggattctgatgtaattgttgggattccatttttaataaggcaatatgttggaacgagagtaattaatagtgac

SEQ ID NO: 174412 - DNA, 429 bp, Saccharomyces pastorianus
ttccgtgtcaccacgtatggtgaatcgcattgcaggtccgtcggatgcattgtcgacggtgtgcccccaggaatgtcattgactgaagaggacatccagccgcagttaaccagaagaagaccgggtcagtctaagctgtcaactcccagggacgagaaggaccgagtggaaattcaggctggtaccgagttcggcaagacgttgggaacgcccatcgccatgatgatcaagaatgaggaccacagaccccacgactactctgatatggataagttccccagaccctctcatgcggacttcacctactccgagaagtacgggatcaaggcctcgtctggtggtggtagagcgtccgccagagagacgattggacgtgtcgcttctggtgcgattgctgatgaagatcttggctcaaaattcaaacgttga

SEQ ID NO: 174413 - DNA, 120 bp, Saccharomyces pastorianus
cgttcaagagcaaatatgaataattccactactacggggcctgctaacaatacaagctctaacagaccttttggatatttcgaagaacgcgcacagggatcctctagagtcgacctgcag

SEQ ID NO: 174414 - DNA, 213 bp, Saccharomyces pastorianus
agctcaagctcattctcaggcacaggctcaagcacaagctcaagcacaggcggcacaagcggcgcaagcgcaagcacaagcacaagcacaagcacaggcacaggcacaggcacaagcccaggcgcaggcccaagcccaagctcaagcacaagcacaagcacacgctcagcaccagccctcccaacaaccacaacaagctcagcaacaacctaa

SEQ ID NO: 174415 - DNA, 132 bp, Saccharomyces pastorianus
gctgccatcgctgctactgcttctgcaaccaccactctagctcaatctgacgaaagagtcaacttggtggaattgggtgtctacgtctctgatatcagacctgcagcatgcagcttgcactgccgtcgttta

SEQ ID NO: 174416 - DNA, 183 bp, Saccharomyces pastorianus
caatgtcagtcatcttcctccattaggggagagtactcatttttaaatgacttcattcccagagtacatcccgatttaactcaagagattattaaaattaaattattcaatgatcaattcgtggcaagtaaagtggattacgacttggacactttacaaactgcaagtcagtatcttccatag

SEQ ID NO: 174417 - DNA, 705 bp, Saccharomyces pastorianus
aagtttatagcattaatatcaggtgggaaggactcgttctacaatatttttcactgcctgaagaacaaccatgaattgattgccctgggaaatatatacccaaaagaatcagaagagcaagaattagactctttcatgttccaaacagtaggacatgacttaatagactattattctaaatgtattggtgttccactatttagacgctcaatattacggaacacttctaacaacgtcgagttgaattatactgctactcaggatgatgaaattgaagaactatttgaacttctaagaactgtcaaagataaaattccagatttagaagctgttagtgtaggtgccatcttatcgtcttaccagaggaccagagtggaaaatgtttgttccagattgggtctagtagtgctaagctatttatggcaaagggatcaagccgaactaatgggtgaaatgtgccttatgtccaaggatgttaacaatgttgaaaacgatactaattcaggaaataaatttgacgccaggataatcaaggtggcagcaattggattgaacgagaaacatttaggaatgtccttgcctatgatgcaaccggtgttacagaaacttaaccaactttatcaagttcatatctgtggagagggtggggagtttgagacaatggtcttggatgccccttttttccaacatggatacttggaataa

SEQ ID NO: 174418 - DNA, 531 bp, Saccharomyces pastorianus
atgcctgcaggtctgttggagttggtactttcagtggtagtcgcactagtcctgacgttgatgctggcagtggtagtagcattagtgctggagttggtactttcagtggtagtcgcactagtcctgacgttgatgctggcagtggtagtagcattagtgctggagttggtactttcagtggtagtcgcactagtcctgacgttgatgctggcagtggtagtagcattagtgctggagttggtactttcagtggtagtcgcactagtcctgacgttgatgctggcagtggtagtagcattagtgctggagttggtactttcggtggtagtcgcactagtcctgacgttgatgctggcagtggtagtcgcattagtgctggagttggtactttcagtggtagtcgcactagtcctgacgttgatgctggcagtggtagtcgcactagtcctgacgttgatgctggcagtggtagtagcattagtgctggagttggtactttcggtggtagtagcactagtgctggagttggta

SEQ ID NO: 174419 - DNA, 528 bp, Saccharomyces pastorianus
gagtggaagagtttaaaacagcaacttgaatcatcacaagatatttttttctccaagtgttgccagttggaatattctaaagtgcagttggaaaaaaccatttatgattattgtaaaaattactctaaaatggaggacggaatcaaacgagctctagaatcatcaaacaagatgtttcaacaaaaatgtgaaaaatttactgactcacctgtgtgttctctacaagaagcacaactgccacaggaaactgccaatgcggatgtaagagggtttttcctcagggataatggcataccctttcgcaggtggaatatcctagaggcgagtgatccagtcgacgcttgcaaagaaatctccataaaaagcgaaaagtttttctgtggtagtgaaataaataatgaactggctgctcttgagtcgttaggggcaataaagatcatattgcagcagatcgaaaaagaaccaaatgcaaacaaaatcgtacgaagttggcacgacgatatagattttgtaaggtctcgaacctga

SEQ ID NO: 174420 - DNA, 201 bp, Saccharomyces pastorianus
atggacgacgaagctggtgtgaagctgcttgaaaagcaaaacaaggaaagaattcaagatattgaagcccagttgggacaatgctacaatgacaaggattacgccgccgcagtgaagttgaccgtggagctaaagtactggtacaacttagccaaggcattcaaagactgggctccaggaaaacaattggaaatgaatcac

SEQ ID NO: 174421 - DNA, 1314 bp, Saccharomyces pastorianus
tcatggtctttaacttcttatgctgtcacatttgctggttttatagcatttatgggtcgacttggtgacatcgtgggaaactcgattctgtttactattagctgtttctttttcgctattctgtcacttctttgcgcggttatgcccaatttcccagcgtttgctgttttcagagctattcaaggcatttctgccgcgggtcttgtaccatgtgcttatgccttaattcctatgttagctccggaggaagaagtccaaaagtacttctcaattgtgtcctgtggattcagctccaccattggtctaggactgataattgggggtgcattcgctgctacaaagataggctacaaaggcattttttatctgacatttgcagtaatgtctttaattgcaatagttgctttcttttttacgtatggtgttgaaaatcttaacgaaaacctaccaaaggatcaagttgcaaacagggtcaggtcgcttgattttataggatcgcttatatttgtaaccgggagtatactgattgttgtgggtttaacagaaggaggtgaatcatggaacagacctgccacctacgtaacactcgtcattgggattattcttttttttggattttttttttggaactgctcatacgcaaggattgttcgaggtattaggcgttgtggaattgacacttctagatacttcgaaaaggttcagcttttaattcctgtagatgttcttttcatgaaaaactttatacccattattttggcttttgctctaaacaatgcttgcctattttcgtgtatttatatcattgatcaatattcccaatacgaagagaaaaacagtccactatatgccggtgtcaagctagttcccctaataatatgtatggttataggcaatggcttgtgtgcattcgagtctaccaaactaaatcctagagtgggagtggtgcttggcttttttctggcccttgctgggtcgattattctcacccaattgcatttgatcaaagaggatatgttttggaagattttctttagttcacaagcattagtgggttttggggttgctattttctatccttatgcgcttcagattgcagtgggtggggctcctgatcagtcaaaaggtattgcttctggtgtagcgcaaacttttggtcaacttggaatcgagataaccttttcggttatggcatcagttttgggaaatatagatggaatcagagggcattttggtgcatcccagaaattccgaaccggattccaaaactgcacatactttactgttgcggtgggtgcgcttggatttctggta

SEQ ID NO: 174422 - DNA, 1509 bp, Saccharomyces pastorianus
tttgatcccggaacctctaaagtcaacaaaatatgcgatgctgtgctaaatgttttattaagcaatcctgaatacaagaagaaatacttgcaaacgatcattacagcatatgcatcccaaaaccctcaaaacttatcggctgcactaaaactaattagtgaactagaaaattctgaagaaaaagactcttgtgtaacttacttgtgttttttgcaagacgtcaacgtggtttataaatctgccctatctttgtatgatgtcagtttagcattattagtcgcccaaaaatcacaaatggatcctcgtgaatatctgccatttttacaagaattacaagataatgagcctttacgccgtaagtttttgattgatgattacttagggaactatgaaaaagctttggaacacttgtccgaaattgataaagatggtaatgtttcagaggaagtcatagactatgttgaatctcatgatttgtataagcatggtttagcactttaccgttatgattctgagaagcagaatgttatttataacatttacgcaaagcatttgtcatcaaatcaaatgtatacggatgcggcggtggcgtacgagatgctaggaaagctcaaagaagcaatgggggcataccaatcagcgaaaagatggcgtgaggccatgtccatcgctgttcagaaattcccagaggaagttgagtcagtcgcagaagagttgatatcttctttgacttttgaacatagatatgttgatgctgctgatattcaattggaatatttggacaatgttaaagaagccgtagctttgtactgtaaggcctatagatatgatattgcttctcttgtggcgataaaggccaagaaagatgaactcttggaagaagttgtcgatcccggtttaggcgaaggttttggtataattgcagaattactcgccgattgtaaaggccagattaattcacagttaagaagattgagagagctacgcgcgaagaaggaggagaacccatacgccttttatggccaggaaactgagcaagcggatgacgtttctgttgctccttctgagacgtcaacacaagaatcattcttcaccagatacacaggcaaaactgggggtactgcaaagactggtgcttccagacgtacagctaaaaacaagcgtagggaagagcgtaagcgtgctcgtggtaagaagggaactatttatgaagaagaatatttggttcagtcagtcggaagattgattgagaggttaaaccaaacaaaaccagacgctgtgagagttgttgagggtctttgtagacgaaacatgagagagcaagctcaccaaattcaaaagaactttgttgaagtacttgatttattgaaggctaacgttaaagaaatttattctattagcgaaaaggatagagaaagggttaatgaaaatggggaagtatattatatcccagaaatacctgttccagagattcatgatttccctaagagtcatattgttgatttttga

SEQ ID NO: 174423 - DNA, 552 bp, Saccharomyces pastorianus
atggaggacttgatggaggggaatcatcatctattaagtgattcttcagaggctggcagtagctccgaaggtgagcacattagtagtataccaacccgaggagaaattgcaaaactgaaggcacagaagtcattatctagaaggaaaattagtgagagtgatgttacaacagaaagagattatgtaaaattgttggacagtgaggataaacgcgaaattatggagacaataagattaaatggtggtctgaaacgtaacaatgaaaaggagattacgaacttcagtgacgatgaaatgcaaggctttcaagacgaaatgctagccctcacggataatcaaattgctattcaaaaggattctaaaagaaagattatagagaaggccataaatgaagtgccctacagagctaatgaagaatgggaaacccagcttttaagcaaaggaaatataaacaaatcgaatgagaaaatcatcacgcccttaccggtacttttcccagacgatgatgaaagtgggaacagcattgagagaataaacgagatggactctaga

SEQ ID NO: 174424 - DNA, 87 bp, Saccharomyces pastorianus
atgcacttgaaacaacgtgtacaccatcacgtggtttgtttgaagggattggtccgccctggaaatctggttcgtcttcaacaaacc

SEQ ID NO: 174425 - DNA, 201 bp, Saccharomyces pastorianus
atgaccatcccacatatgaaatacgccgtatcaaagactagcgaaaataaggtttcaaatacagtaagccccacacaagataaagacgcgatcagaaaacaacccgatgacattataaataatgatgaaccttcacataagaagataaaagtagcacagccggattccttgagggaaaccaacacacagatccacttgggc

SEQ ID NO: 174426 - DNA, 129 bp, Saccharomyces pastorianus
gctgcgaaaaagaagtactccggagcaacttcgtccaaacaagtctctgccgagaaacatttgagttcagtatttaaattcaacacagatctaggtcagcatattttgaagaatcccttgggatcctct

SEQ ID NO: 174427 - DNA, 819 bp, Saccharomyces pastorianus
  modified_base (132)..(158): a, c, g, t, unknown, or other
gccgacgcctctcacaagtccatggtcaccaagaaaaggagcatatcgaggacacaatcctataatgctccgagacgtacaccttcaccggcacctgaaacatcaagccaagtgcgccaagatgacgagagnnnnnnnnnnnnnnnnnnnnnnnnnnngactccttcatcttccgttgacgaagaggtaagcttctacccacaagagtctttaaacttacagtttcaggcacacccgcctaagccagaccgccgtggcagcaatacgcaacatcccttaacaagaacgatgagcactaattatctttcctggcaacccacgtttggcagaaactctgtattcattggactcacaaagcaacaaaaggaggaactcggtggagtcgagtatcgtgctttgagattgctgtgctgcattctcatggtatactacatcggattcaacattttggcgtttgtgaccatcgttccatgggcctgtatgaggcaccactactcagagattattagacgaaatggagtttctccaacctggtgggggtttttcactgcaatgagtgcattcagcaacttgggtctgtctttgaccgctgattcaatggtttcctttgatactgcgccgtatccgctgattttcatgatgttcttcatcatcataggcaatacaggcttcccaattatgttacgatttatcatttggatcatgttcaagacctcgagagacctatctcagtttaaggaaagtcttgggtttctcttggatcatccgccaggtgttgtacgttgctgttccccagcgggggatcctctagagtcgacc

SEQ ID NO: 174428 - DNA, 204 bp, Saccharomyces pastorianus
atggttattaaagaggactgtatcaataatcttgccaggtggcaggcagacgaggaagctcacagctgttttcaatgcaagacgaacttttcgtttctcgtaagaagacaccattgtaggtgttgtggaaggatattttgttcgtcttgtaccgaaaattttgttaattataataaaaagagagtccatgccttgcagaaaaaa

SEQ ID NO: 174429 - DNA, 114 bp, Saccharomyces pastorianus
caggaactatatataagaacttcccaaatttctgtgaaccgatatcaagttgtattgcccgaacacctaattagtgggaaattttgtcctcattgtgaatgcgtttatgttccc

SEQ ID NO: 174430 - DNA, 168 bp, Saccharomyces pastorianus
atggcttggataagtttcaatcatgtggttgaagataaaaaaacggtgctctgtttgcaagttccaatgtttttattctgggtcgctgtgcttgtgaaaagatgggctcgaaatatcgaagatgaaatcgcagatctaagatgcttgaaatacaaatacaaaaatgct

SEQ ID NO: 174431 - DNA, 366 bp, Saccharomyces pastorianus
gatataaccattagagagtgttatgcaattttcgctcttgcggaaggtgtgaaaagtatagaattacaagcaagaaatccttcatcaagccttgttaacgcttctctggaagatgaaaacgatgtgtgcataattgcgaagtttgaattgttaaatctagcgattaataatgctgttattttgaattccaaagatgagctttttggacctagttttcctaataagactaccgtagagataatagacgagacaacaaaaaacttaatatcgttcccgtcatctaatattttcagcgaaaactctaaattgaataatccaaactcggccataaaaaggccaagtttatatcccaaaggtcaagatttt

SEQ ID NO: 174432 - DNA, 81 bp, Saccharomyces pastorianus; identical to SEQ ID NO: 174407

SEQ ID NO: 174433 - DNA, 441 bp, Saccharomyces pastorianus
atcacaacaactttggcattatctgtaccatccggccctcagattataccggtatctattgcggcgataattctgggtagagatgtgctactagccataagtgctttgtttatacgatatagcactttaaagttgaaatatcctggtcgtgtggcatggaattcctattgggatattgttcgctatcccagcgctgaggtcagaccttcccaactatcaaaatggaacacgtttttccaaatggtatatcttggatctggagtattattacttttatatgagaaagaagagggctgtgaaaaaaccgaggaggatttcgaagatagaaaacaggactttcaaaaggcctttagctatttagggtatgtaaccgccacgaccacaataatgagcggagtatcctacgcattaaagagaaacgcttttaaacttttaaaatag

SEQ ID NO: 174434 - DNA, 555 bp, Saccharomyces pastorianus
atgtcacagaatattcaaatcggcactagaaaacgttcaagagctaatatgaataattccactactacgggccctgcagacaatgtgagcgccaacaaggcctttctggacagcttcgaagacacacgcacaaacaacctgctggacgagatgtttgcccggcagaactccttcctgagcgacaacctcaggaacagtctggatctgaaccaggcggaaaactcgcacctcccccgccaacatcagcaccagctgtttctggacaacgaaaacgccatagatctggacgacgagccccgcaccacaaacactacgatcaataatattaacaacaatgacagcagccgcgttgacgaggacgccgacgacgacattatatttatcaaggagcagtccatacaattctcgtcgccgtggattctgcccagcagcagtagcaacaacaacaatgcggacaacacgtacatcacgacaccaaagaaattcaaaaaacagcgaaccatgttgctgccccaactgacactatcgaaactcacctaccagccaagctacttc

SEQ ID NO: 174435 - DNA, 195 bp, Saccharomyces pastorianus
tttatagaattgtgtagaattgcagattcccttttatggattcctaaatcctcgaggagaatttataatatagtctgtatacataatattatagcttctaacgacaatggaattctaacaattatcaaattgtccgccagttcctcaaaaagatccatgtataatcttcattattacagccctcttgacctctaa

SEQ ID NO: 174436 - DNA, 273 bp, Saccharomyces pastorianus
gcagtacatgacagtatcaagcgtgacggcgctgctgatatcaactttggggggtatactgcggagtatggaacccacgtcagcactagcagcgtgcattatgtaagcaggatcatcaatcaaatcgtagcagcggtaccagaggtctctgatacgagtggcaacgcttcggacataacgttccagagacacagtcaggagttcgctatctcatggatattaatgacgtatgaccaaagttatggtgatctggcacagaactggcaaaatgac

SEQ ID NO: 174437 - DNA, 822 bp, Saccharomyces pastorianus
attgagaaacatgcttcttttggtgggtcgcaagaagtgtatcgccatcagtcaatagcattaaactgttcaatgaaattctcaatatatctgccacctcatgacaaagatgagcggttgccagttttatattggttatcaggactgacttgcaacgaacagaactttattactaaagccggagcacaaaagtatgcggctgaacataaagtcattattgttgcaccagataccagcccacgtggagaagatgtaccagatcatgcagattatgatttaggccaaggcgcaggattctatgtgaatgcaacacaagcaccctggtcacagcatttcaaaatgtatgattatattgtggaagagctgagaaatctgattgacctgaattttccgaccaatcaagtccaaagcattatggggcatagcatgggtggtcatggtgcattagtaattgggttaaaaaatcctgagctgtataaaagtatttctgcttttgcaccaattgttgcacctagccaagtaccttgggggaaaaaggcttttacacactacctaggtgaaaccgaaactttatggaaaagctatgatgcgattgaattaatcaaaaacgctgaagttcatttacctattttagtcgatcagggaacagctgatgattttcttgaagaacagttaaggcctaagcttcttagtaatatttgtttggaacaagaatatcctcttacacttaacctaagagaagggtatgaccatagctattacttcattgcgagctttatagagaaacatatagagtttcacagcaaattcctagctaaataa

SEQ ID NO: 174438 - DNA, 579 bp, Saccharomyces pastorianus
gtcgtggatacaggtattatataccatcataaagctggcgatcctttcaagccaagtttaaaatacttgagcgaaacctttctgaataaaagcattcaaaacggagaacacgattctgtcgaagatgcaagggcttgtcttgaattgacgaaattaaaaatcttaaatgggttagcatttgggataggtatcaatacggagaacttgttcaccaaattacatcgttttgaagtgaaaaccgttcttctcaacgatatgattattaaaaatcatactgaggacgattctaagggccagttaatccgttgcgtcgaagatgatgagacatggacccatattcacgagaatctaaataaagatgtcaaacttattgtggggagaatcaagaacttagagaggtcacgcaactataataaaaagccacggaaggaaactccttcgttcgatgcgtccatggttcttcatgatatagggcaacatctaacacaattatacgagaatgctacaccaggtactatgattttgatcatgtcgggtacaggcgacacaagaccatggactatctttcaactgagttag

SEQ ID NO: 174439 - DNA, 765 bp, Saccharomyces pastorianus
atgcacgctttgttggcattcagtgccacccatctttcgaggactgaaactggactggagcaatacgtttcatctcaccgcctagacgctctgagattattaagagaagctgttttagaaatatctgagaataacaccgatgcgctagttgccagcgccctgatactaatcatggactcgttagcaaatgctagtggtaacggcactgtaggaaaccaaagtttgaatagcatgtcaccaagcgcttggatctttcatgtcaaaggtgctgcaacaattttaaccgctgtgtggcctttgagtgaaagatctaaatttcataacattatatctgttgatcttagcgatttaggcgatgtcattaaccctgatgttggaacaattactgaattggtatgttttgatgaaagtattgccgatttgtatcctgtcggcttagattcgccatatttgataacactagcttatttagataaattgcaccgtgaaaaaaaccagggtgattttattctgcgggtatttacatttccagcattgctagacaagacattcctggcattactgatgacaggtgatttaggtgcaatgagaattatgagatcatattataaactacttcgaggatttgccacagaggtcaaggataaagtctggtttctcgaaggagtcacgcaggtgctgcctcaagatgttgacgaatacagtggaggtggtggtatgcatatgatgctagatttcctcggtggcggattaccatcgatgaca

SEQ ID NO: 174440 - DNA, 132 bp, Saccharomyces pastorianus
ccatcatctcctatatttaatccgcagtatcccctcaagacaggtttgaaccggttttcaacgccatgtggaacgcttatgatgcattctccaaaagacattgatggtcttattattcctggattatgtact

SEQ ID NO: 174441 - DNA, 453 bp, Saccharomyces pastorianus
actagcgttggtactttcagtggtagtggcattagtgctggagttggtgctagcagtggtagtggcattagtgctggagttggtgctagcagtggtagtggcattagtgctggagttggtgctttcggtggtagtggcattagtgctggagttggtgctagcagtggtagtggcactagtgttggagttggtactttcggtggtagtggcactagtgttggagtcggtactttcggtggtagtagcactagtgttggagttggtactttcagtggtagtctgttactagtcctgacagtagatgtctggcagctggtagtagcattagtgctggagttggcagtcgcattggtactggcattaggcactaccatgaatgcgcgtgtcgctgtcctcatcacctgctgcgatactttctgcacctgtcactgctatagctctcctggcagttag

SEQ ID NO: 174442 - DNA, 81 bp, Saccharomyces pastorianus
aatcaagctaatcaaatccgatgtagtgtaacggctatcacatcacgttctcaccgtggagaccggggttcgactccccgc

SEQ ID NO: 174443 - DNA, 513 bp, Saccharomyces pastorianus
atggataggaaaaggtcttttgaaaaagttgtcatttccgtcatggtcgggaaaaatgtaaaaaagttcctgacgtttgttgaagacgaaccagatttccagggcggaccaatcccttcaaagtatcttattcccaagaaaatcaacttgatggtctacacgttgtttcaagtgcatactttgaaattcaatagaaaggattacgataccctttctcttttttacctcaacagaggatactataatgagttgagtttccgtgtcctggaacgttgtcacgaaatagcgagtgctaggccgaacgacagctctacgatgcgtactttcactgactttgtttccggcgcacctattgtaaggagtcttcagaaaagcaccataaggaaatatgggtacaatttggcaccctacatgtttttgttactacacgtagatgagctatcgattttttctgcataccaagcaagtttacctggcgaaaagaaagtcgacacagagcggctgaagcgtgat

SEQ ID NO: 174444 - DNA, 93 bp, Saccharomyces pastorianus
ataacactatgtagaactatcgattcccttttgtggattcctatatcctggaggagaacttctagtatattctatatacctaatattatagcc

SEQ ID NO: 174445 - DNA, 678 bp, Saccharomyces pastorianus
atcgttgcgttaccgtctagcttccaggagagcaatagcagtgacaggtgcagaaagtattgcagcagtgatgaggacagcgacacgtgcattcatggtagtgctaatgccagtaccaatgcgagtaccaactccagcactagtgctactaccaccgaaagtaccaactccagcactaatgctactaccactgccagcatcaacgtcaggactagtgcgactaccactgccagcatcaacgtcaggactagtgcgactaccactgaaagtaccaactccagcactaatgcgactaccactgccagcatcaacgtcaggactagtgcgactaccaccgaaagtaccaactccagcactaatgctactaccactgccagcatcaacgtcaggactagtgcgactaccactgaaagtaccaactccagcactaatgctactaccactgccagcatcaacgtcaggactagtgcgactaccactgaaagtaccaactccagcactaatgctactaccactgccagcatcaacgtcaggactagtgcgactaccactgaaagtaccaactccagcactaatgctactaccactgccagcatcaacgtcaggactagtgcgactaccactgaaagtaccaactccaacagacctgcaggcatgcaagcttgcactgccgtcttt

SEQ ID NO: 174446 - DNA, 801 bp, Saccharomyces pastorianus
ttagaataccagattgtttcgaacgatgagtacattgcattgaaaaatacgatggaaaagccggacgttgagttactaagatccaagttgaaaggttaccatataattgatacaacaacgtacaatgagctagtcagcaatttcaattctcctacgttgaagtttattgaagagaaagccaaaagcaaaggttatagattaatagaacctaatgaataccttgacttgaatagaatagccactacaccttctaaagaagagattgataacttctgcaaacaaattgggtgttacgctttggactctaaagaatatgaaagactaaaaaattctctgcagaatccctccaagaaatttatagaagaaaatgccgcattacttgatcttgtgctagtggacaaaacggagtaccaagcaatgaaagataatgcaagcaacaagaaatcacttattccttcaactaaggcacttgatttcgttgcaatgcctgccccacagcttgcttctgcagagaagtcatcactacaaaaaagaactttatctgatattgaaaatgagttaaaggccttaggctacgtcgcaattcgtaaagaaaacctgccaaacctagagaaaccaattgttgacaatgcctccaaaaatgatgtcttgaacctatgttcgaaattcagtttagtaccattgtctactgaagaatatgataatatgagaaaggaacacactaaaatcttaaatattctcggtgatccatctattgatttcctgaaggaaaatgtgaccatttcaaatgctcataattag

SEQ ID NO: 174447 - DNA, 357 bp, Saccharomyces pastorianus
tgcgacgacactgacaagcctttgaacttagatgctatgactacaaaggacactggagtttgggttgaaaatggcaagaagaaagttgctagtgttggaatacacgtcagacgttccataacatcgcacggggtagcaattaatgttaatacagatctatcgtatatgaatagttttgaaatgtgcggtttgaaaaatacactgactacttcaattatggaacaacgacccgatgctgttgtaaatgtgcaaagtgtagcaattagttttgtcaaagaaatgacaaagctgctaggaataaaaactttggaaagaatgcaaattgacgacgtcaatattttgaaaaagaatccgtga

SEQ ID NO: 174448 - DNA, 648 bp, Saccharomyces pastorianus
tggcttgcgattaccttacacggtaggtctaggctacaaaggtacactaagtctgcggattgggactacgtgagtcaagtggctgacaccttgagatccgccgaagcggatttcatcgaaaccgaacaaggcaaagaaggcagggattccaagaacagaattcaatttgtcggaaatggtgatgtcaacaattttgaagactggtaccgctatttggacggaaatgaaaatattgatagtgttatggttgctcgaggggccctgatcaaaccatggatttttgaagaggttgagtcgcagcagtatctagacaagacaagtacggaaagattagacattttaagggattatgcgcagttctctatggaacactggggcaccgacgaatacggcatttctcaatgtcgtagattcttctgcgagttcatgtccttttttcataggtatgtccccatgggtatttgtgaaagataccctgtgaagttgaatgagagaccgccaaattggtgtggaagagacgaacttgaaactctaatgggtagtacggatgttaatgattggatcaagctaagtgatctattcttcggtaaaaccgacgagaactttgtatttgtccccaaacataagagcagctcttatgcaaacaga

SEQ ID NO: 174449 - DNA, 708 bp, Saccharomyces pastorianus
cctgtttgcgagcatatttcttctgtgggagagtatgttacgatcggtgacaaaattttcaaaagaagtgattttgaaaattatttatcaagtaacccaagtagcgatgtgcgcctggagcagccaagaccaactaactttgcaaaccctcttccactaggattggcgtccttctcgttcatgtgtttaacactggggttagttaacgcgagagtgcgtggagttactgacctcaatcttttgaatgcttctttcatttttggtggcgcagttgttttgttgtcaggactgctatccttctgcgtcggtgatacattttgtatgacagtctttggaacatttggggggttttggattagttggggctgccttaacctggagcaatttggagtggctaaagcttacgcagataatccacaggcattgaacaatatacttgggttttacctggctggatggacagtatttaatttcatggtaatggtctgctcgatgaagagtacctggggtatattcctactactacttttcctagacttgacgtttttaatgctgtgcgtcggttcttttacatcaaacgttaacgcttcgatggcagggggttactttggtatattaagcagctgttgtggttggtattcattatattgttcaattgcaaacaaagaaagctcctattttcctttggttgcatatccgatgccaagt

SEQ ID NO: 174450 - DNA, 120 bp, Saccharomyces pastorianus
agcaacaacagcaacagcaacaacagcaacaacaacctcaatcacaatcacaacaacaacaatcacaacaacaacaacaaccacaaccccaatcccaacaaagtccacaaagtcaaaaac

SEQ ID NO: 174451 - DNA, 645 bp, Saccharomyces pastorianus
cattctaatcccaagcgtgtacttatcattggcggtggggacggaggtgtcttaagggaagtagccaagcacagctgtgtagaagatatcactatggtagaaattgactcatcagtgatcgaattatcccgtaagttcttgcccacattgagtaatggtgctttcgatgacgaaaggttggacttgaaactttgcgatggcctcaagttcttacaagatataggtgcttccgacgtccataagaaatttgacgtcattattacagatagttctgatcctgaaggtccagctgaagcgttttttcaagagaggtatttcgaactattgaaagatgctttaaatcctaatggcgttgttattatgcaaagctctgaaaatttttggttaaatttaaaatacttacatgatttgaaaaatacagccaagaaggtatttcctaatacagaatattgctataccatggttccaacctatacatctggccaattaggtttaattgtttgcagtaataacgccaatataccgttgaacattgcgcaaagaaagatatctgagcaagaacaagggaagctgaagtactataatcctcaaatacattctagtgcgtttgttttgcctacttgggcagacaaggtcattaatgaa

SEQ ID NO: 174452 - DNA, 381 bp, Saccharomyces pastorianus
atgttgaaagatattttggagcatatgaagcacaagacacctcaaatcagaatggagtgtacgcaattgtttaatgcaagcatgaaagaagaaaaggatggatactcgaccctgcaaagatacttgaaggatgaagtggtaccaattgtgattcagatcgtcaacgacacccaacctgctataagaactattggatttgagagtttcgccattctaattaaaatatttggcatgaatacctttgtgaaaacattagagcacttggataatttgaaaaggaaaaaaattgaagaaacggtcaaaactctacctaatttcagtattgcaagtggtagtacccatagcactattgaaacgaataaacaaactgggccaatggag

SEQ ID NO: 174453 - DNA, 726 bp, Saccharomyces pastorianus
caactgttatggatcactctaatcatggatactctagcagctttagctttagccactgataaacccgatccaaatatcatggacagaaaacctgggggccgctcaacttctttgatttctgtgtcaacttggaaaatgattctatcacaagctacattgcagttgatagttactttcactttgcatttttacgggccagagttattcttcaagaaacatgaagatgaaataacaagtcaccaacagcagcaactgaatgccatgacattcaacacttttgtttggttgcaattttttaccatgttagtatcgagaaaattagatgaaggtgatggtatatcaaactggagaggcaggatttctgccgccaatttgaatttcttccaagacttgggtagaaattattattttctcacgatcatggcgatcattggcagctgtcaagttttaatcatgttttttggtggcgcaccattttctattgccagacaaaccaaatcaatgtggataaccgcggtactgtgtggtatgttgtctctaatcatgggggtgctagtgagaatctgccccgatgaagtagcagtgaaggtatttccggctgctttcgttcaaagattcaagtacgtatttggactcgagttcctcagaaaaaaccatactggaaaacacgacgatgaagaagcgctgttggaggaatctgatagtccagggtccaccgccttttat

SEQ ID NO: 174454 - DNA, 2460 bp, Saccharomyces pastorianus
ttcagtcgcttaaacacgtttcaagctgctttagctttggcgctttactcgcaaagtgcattgggtcaattctacagcaacagcacttcactttcgagcaacacttcatcaactgctgttccatcaacttcatctagttcctattcgattagtagttctatctcttcgtctggttctgatgtctcgagctctataacccagtcaacctcatctggttctggtgtctcaagttctgttaacccatctgcctcttctggttctggtgtctcaagctctgttaacccatctgcctcttctggttctggtgtctcaagttctgttaacccatctgccccttctggttctggtgtctcaagttctgttaacccatctgcctcttctggttctggtgtctcaagttctgttaacccatctgcctcttctggttctggtgtctcaagttctgttaacccatctgcctcttctggttctggtgtctcaagttctgttaacccatctgcctcttctggttctggtgtctcaagctctgttgccccatcaacctcatctggttctggtgtctcaagctccaactctcaacaaacctcctctggttccgcttccggcgcctcgagcactattacttccttctctgcttctggaacaagtgctactgtctctggttctctttcttccagtgacggtactatttacttgccatccacaacaatttctggcgatatcacacttacaggtgatgtatttgcaacagatgcagttgaaatcgccgctggcggcaaactaacccttcttgacggtgacaaatacggattctcaggtgacttgagagtttacggtggtctgttcgtcgcaaagtcaaaggcatcttacttaggttccgctttcgacatctcaggtccacttttcgaagtctctggtgaattcgatgctcaagaacctgctgctacttccgcatccatctactcgttcacacctggctcttttgaaaacagtggtgatatttctttatctctatctgaagccaagaagggtgaggttactttctctccatactctaacactggtgccttctctttctccaatgctatcctaaacggtggtactgtctctggtttgcaacgtagagctgaagatgaaggatccacaaataacggtgaaataaacttagacaatggaagtacttacgttattgtcgaacctgtttccggaaagggtacaatcaacatcatctccggtaacctatacttgcactacccagacactttcactggtcaaactgttgacttcaagggcgaaggtgttcttgccgttgacccaaccgaaaccaacactacccctattcctgttgttggctacactggtaagaaccagattgccattaccgcagacgtcactgtctcgtatgacagcgccactggcgttttgactgcaaccaagggtaacgctgacttctctttcgctatcggtactggcttctccagttctggcttcagcgtctccgaaggaactttcgcaggtgcctatgcttacttcctaaactacggtggagctgttgcctctagttctgctccatcatctgtttcctctacatctggtgcttcatctgtttcctccatatctggtgcttcatctgtttcctccatatctggtgcttcatccgttacctccggtccagttactggttccactttagagaccgcatccgtttacaccactacattgacttccggtgaagttacaagcacagtcgtagtttcctgttcaaaaacaactgacgctagtggtcacatctatacagttacaacaaccgttccatgtactactaccactgctacaatcacttcttgtgatgacaatggatgccacgttgttccagctccaaccaccactaccgccacaatcacttcttgtgatgacaacggatgtcatgttgttccagccccaatcgctactgccaccactgaaactgtctcttcaaagtcgtacaccactttcactgttactcactgtgaggacaacgcctgtagtgtcaagactgtaacctctgaggctcctaaaaccacttcagccaccactgtcacgtctgaagctccagtatctcacaccaccctcacagttactaactgcgataataatggttgtgaagtcaagactgtcacctctgaagctcctaaaccaactaccgctaccactgtcgtcacctctgaggctcctaagggaactacagctaacactgtcgtcacctctgaggctcctaagggaactacagctaacactgtcgtcacctctgaggctcctaagggaactacagctaacactgtcgtcacctctgaggctcctaaagtaacttccgccactactactggttccgaagcatctagttcaatcatcaagtatggttcctctgcttctaaaaccctcactggtgttgttgtccaatctgaaggtatcgccgctggt

SEQ ID NO: 174455 - DNA, 192 bp, Saccharomyces pastorianus
aaaaggccgggagtcataaagtcggatgacgttatcgtgaataattctagtaataatctaccagtgaccaatcctagcggtttaagagagtctattattagaagacgtatgagtagtagtagttgtggcgattctatctcgagacaaggaagtatctcaagtggacctccaccaagatctccaaataaatga

SEQ ID NO: 174456 - DNA, 396 bp, Saccharomyces pastorianus
  modified_base (47)..(47): a, c, g, t, unknown, or other
gtgaacacaccgggtactaaagaatctcgcaagtttgttactggggntgctgacaatttggtaaagatttggaagtacaattcagatgcccaaacttatgttctggaaagcaccttagaaggtcacagcgattgggttagagacgtagcatggtcacctactgttcttctacgttcttatttggccagtgtttctcaagatcgcacctgtattatttggactcaagacaatgaacaaggcccatggaaaaaaactttattaaaagaagaaaaattcccagatgttttatggagagccagttggtctttgtcaggtaatgtactagctctttccggtggcgataataaagttactttatggaaggaaaatcttgagggtaaatgggaacccgctggt

SEQ ID NO: 174457 - DNA, 1083 bp, Saccharomyces pastorianus
cctgtttattcagttgatcccttggaaaagattaccgatgcatatcttgatcagtatttatggtacgaagctgaccaacgaaagcttttcccaaactggattaaaccaagtgattcagagataccacctcttctggtatacaagtggactcagggtataaacaacctatctgaaatttgggatgtatccagaggccaatctgcagttttgcttgagactactttgggtgaaatggccgaaaaaattgactttactttacttaatagattacttcgcctgattgtagatcctaatattgctgactatattactgcaaaaaataatgttgttatcaactttaaagatatgagtcacgtcaacaaatatggcttaatacgcgggttgaagttcgcttctttcatattccaatattacggactagttatagatcttttactattgggtcaggaaagggctacagatttggctggtccagctaacaatccaaatgaatttatgcaattcaagagcaaagaagtagaaaaggcacatccgatcagactttacaccagatatttagatcgtatatatatgctttttcactttgaagaagatgagggagaggaattgactgatgaatacttggcagagaatccagatccaaactttgaaaacagcatcggatacaataatagaaaatgttggcccaaagattcgcgcatgaggctaatacgtcaggacgttaacctagggcgagcagtgttttgggaaattcaaagtagggtgccaacttcgttaacgtcaattaaatgggaaaatgcttttgtttccgtatacagtaaaaacaatccgaacttactcttctctatgtgtggttttgaagtcagaatattaccaagacaaagaatggaagagctggtttctaacgatgaaggtgtttgggatttagttgacgaaagaaccaagcaaagaactgcaaaagcatatctaaaggtgtctgaagaagatgtcacacaattgacagccgaatacgaggctattgatgtcttccggttcaaccactttactaaagtggcgttaatggaacacttcgtgatatccttt

SEQ ID NO: 174458 - DNA, 993 bp, Saccharomyces pastorianus
atggatatgccaatgacagtcgcattacttagagtgagatacactttggaagctgctttggcaagaggtttcacaacagtgagggattgtggaggtgctgaaacctttcttaagtctgagatgctcaaaggcactttgaatggccccagattgataacttgtggtcacgccatttcgcaaactggtggtcatggtgacctgagatctggtgacttgcctgcaagtgcttttgagagctgttcgtgccactacggtcaagttggtgttgtagcagacggtgtttccgaatgctataaagcagccagagaggagtttagaagaggtgcggactttatcaaaataatgggtggaggaggtgtggcatcaccaactgacaagatatctaacaatcaattttgtgatgatgaaataagtgctttggtaaatgtagcaaactgctaccacacgtatgtaacggcccatgcctacactccggaggcgatacaaaagtgtatcaaattaggcgttaaaggtattgagcacggaaatttattagatgaacgtagtgctgaactaatggcagaacagaactgttatttgactccaactctggtgacctacaaagtgatggcttcagatcaattttctacattcttaggaccagaaaatagcagaaaaaatgcagaggtactgtacaaaggagttgaagcaataaaaattgcccagagcaaaaaagtcaaaatttgttacggctctgatttgttgggccctctatatggttaccaaacacaagagttccgcattagggggaaaattcagactgctcaggaggttttactttcggcgaccgttacacctgcagagatgaatggtctggacgacaaattaggacagattaaaccagggttctttgccgatttattgatgatgaactcaaatcccttagaaaatattgagattttggatgaaccagagaccaatctattgcttgtaatgaaagatggaagaatttac

SEQ ID NO: 174459 - DNA, 150 bp, Saccharomyces pastorianus
tctactaatacttgcaatcctttcaatttttctgttgatgaggctcgggaattaactgatgaagttgaaacattttggcgtaaatcaaacagatatggtgctttattgttcaagggcaagacttatgatttacaaaatttcatatgtttg

SEQ ID NO: 174460 - DNA, 96 bp, Saccharomyces pastorianus; identical to SEQ ID NO: 173737

SEQ ID NO: 174461 - DNA, 105 bp, Saccharomyces pastorianus
atgttagaagttctcctccaggatttaggaatccataaaagggaatctgcaattctacacaattctataaatattattatcatcattttatatgttaatattcat

SEQ ID NO: 174462 - DNA, 210 bp, Saccharomyces pastorianus
aactttgtttctggcacacctattgtaaggagtcttcagaaaagcaccataaggaaatatggatacaatttggcaccctacatgtttttgttactacacgtagatgagctatcgattttttctgcataccaagcaagtttacctggcgaaaagaaagtcgacacagagcggctgaagcgtgatctatgcccacgtggggatcctctagag

SEQ ID NO: 174463 - DNA, 96 bp, Saccharomyces pastorianus
ttacattatgggtggtatgttggaataaaaatcaactatcatctactaactagtatttacgttactagtatattatcatatacggtgttagaagat

SEQ ID NO: 174464 - DNA, 327 bp, Saccharomyces pastorianus
gctcgtcttttggggtccgcctctgcaggcataatggaaattgccgtcttccatcctgtggacaccatttccaaaagactgatgtccaaccacaccaaaataacctctggccaggaattgaatcgtgttatttttcgtgatcatttcagcgaacctttgggcaaacgtttgtttaccttgttcccgggtctcggttacgctgcatcatacaaagttcttcaaagagtgtataaatatggtggtcagccttttgctaacgagtttttgaataagcactacaaaaaggattttgatatcttttcggtgaaaagactggtaaggcaatga

SEQ ID NO: 174465 - DNA, 1533 bp, Saccharomyces pastorianus
atgataccggcacttacggcaaacgcaaatattactagagctcagcctagcgtagcaaataatctcttgaagttaaaggaaatgttaatccgacagtgccaaactgatgatgagaagagccgtgttaatgagtttaccgataggatattacagaatacgaattccaatagaaacttgaaaatcggtatgttgttgtcaatgctttacaattccgttggccaccaatacttagaagatcactgtcctcaaggtggcgagtattcagatttattgaaaaatttgatcgctgagtgtgatgccattttaccaccatatgaaattattgaacgctataagaatcatttcttcgaatacgtttatccgagtttaccgttcatcgagttggatctttttgaagagtctctcagtcaaacaatttttcccgatgaaaacgatccttccagggtgaaaatacggatggggagcactcatttgagatccaaagtagaaaatttaagtctacttttggttatcctgaaactatcatacatgtcaataagatttttagaccacaaaacagcagagtcaagtgtttatttatcaaaggaaataattgataaatacccaataccgaatgattttatcttgttaagtcaaagatgcttggcgtcagaaaattggtgcgcatgtgctaatgaaaatatcatatcgtgcttattatatatttggtcgttttttgccttttcgcctgaagagggtgatttctttcttgagcaccctactgatgttatcagtagtttaataatgatgctttccacttcgattggtctccatagagatccatcagatttccctcaattaatatcgccatccacctcagataaaagagtattgaaccataggaggatactgtggttgagtattgtcactgtttgttcgttcgaagcaagtctcaagggtagacattccgtctcaccaatatctttaatggcattatttttgaatattaaagatcccgattccttgacagtttatatgaacagggttaggaatgatctgagcgatctcaacgatactaaactgttgagaattcatgaattctcatttaagagagcgcaactggctttgctgttatcagatttggataatctaacaatgacttactacgggagctttcatttgcattcaattgaattcattagagaaaaactagacattttcgtagaagaaaactttcccatagtgcctttgaaaagtgtcacacaggataaatctgattttgatgataccgacgtaatatcagaaatgaacttgttgtcatcagagaattcttcttcatttcacagtcgaataatgaataaactattgatgctaagaacctcaatggctatacttttacattttgaatcattgatcactaaggataaaaacgttttcccattctacaagaagtattttatgctcagttgtatggatgcattgtcattgataaactattttaacaaattcttcaacggtgactatcgatacgcaatttcttctctgacaagtttt

SEQ ID NO: 174466 - DNA, 138 bp, Saccharomyces pastorianus
tcatcatctttattactgtcgccaaaggtggattgtccaagtaaaaccttttcccttttagaagcaaaatcatcaacttcgtttaaaccataccggattaatctcatccccaacttcagaggtcttagttctgtctga

SEQ ID NO: 174467 - DNA, 219 bp, Saccharomyces pastorianus
tcatacgcacacggatgctacagtatataccactctcaagttaccctactttcatattccacaccatggcccattctcactaaatcagtactaaatgcactcacatcattatgcacggcacttgcctcagcggtctataccctgtgccatttacccataaagtccatcattatccacattttaatatctatatctcattcggcgacaccaaatattgta

SEQ ID NO: 174468 - DNA, 138 bp, Saccharomyces pastorianus
atgatagggcatataggaccactgagaacatatctaggtcggttgggcacacgggtgcagtccaggatggttcatcacaaggtcacaattataggctctggtccagctgctcacacagcggccatctacttggcaaga

SEQ ID NO: 174469 - DNA, 561 bp, Saccharomyces pastorianus
atggaggatagcactttcctgaatgagctactacatctagtccatggtatattcagggatgatgaattgataaatggtaaggactctataccaggagcttatttgtcaaagcctatatgtaatttactcttgagcatagccaatgctaaatcagacgtattttccgagagtattgtccgtaaagccgactatttgttagagaagatgataatgaaaaaaccgaatgaactttttgagtcattaattgccagttttggcaaccaatacgttaatgattataagaataagaaactacgccaaggagttaacttacaagagacagagaaggaacgaaaaagaagattggccaagaagcatcaagcaaggcttctggccaagtttaacaatcaacaaacgaaattcatgaaagaacatgagtctgaatttgatgagcaggataacgatgttgacatggtcggtgaaaaagtatatcaatcggaggactttacctgcgcactatgtcaagatgccagttcgaccgatttttacgtgatacctgcgtaccatgatcattccccgata

SEQ ID NO: 174470 - DNA, 705 bp, Saccharomyces pastorianus
gactctgatgatgagctccaggaggaacttacgaggcagacaactcaagcatctcaaagttctaaaattaaaaatgaagatgaactcgacgactccaatcatcttaatgaggtggaaaatgaagatagcaaagttttagatgacgatgcagtgttataccctcttatacctaatgagccagatgacatagaaacgtctaagcccaatattaacgatattaggccagttgatattcaattgactttaccattgccgtttcagcaaaaagtggtagagaattcattgattactgaagatgcattgattgtaatggggaaaggactaggcttgcttgatattgtggccaatttattgcatgttttagctacaccaacatccattaacggacaactaaagcgagcgctcgtcctagtgttgaatgcaaaacctatagataatgtaagaatcagggaggccttagaagagctgtcgtggttctctaatactgggaaggacgaaggcgatgctgctgtcgagagcgatgatgaactttttgaaaggccttttaacgtagttaccgcggactcgctgagcattgaaaagagaagaaagctatatatttctggtggaatcttgagcattacttctagaattctcattgtggatctcttatccggcattgttcacccaaatagggtgacctgcaggcatgcaagctggcactgc

SEQ ID NO: 174471 - DNA, 606 bp, Saccharomyces pastorianus
gttgacaccgtgccgctcacgtggtcagacacgctggccacgtatgcgcaggcgtacgcggacgagtacgattgctcgggcacgctgacacattccgacggtccgtacggtgagaacctggcgttgggctataccgacacgggcgccgtggacgcttggtacggagagattagtaagtacaactactcgaatcccgggttttccgaatccacgggccacttcacccaggtcgtctggaagtctaccacccaggtcgggtgcggctacaagtactgtggtaccacgtggaacaactacgtgatatgttcttataaccctcctggaaactacctgggcgagtttgctgaggaagtggagccgctgataagcacggtgtcctcttcgtcctcgtcctcttcgtccacttcgtccacttctaccaccaccgcggtgtcgtccagtatggctgctccaaaagcacagggctcctcgacttcgacatcctctgcggcggctagttcttctgaagttaccaccataaatcctgccaagcctgccacctctgcagcatcatcctcatctgtcgtttcttccaccaccacaaaagcgtcctcatctgtcgtttcg

SEQ ID NO: 174472 - DNA, 930 bp, Saccharomyces pastorianus
atgtcttcgtcttctttaccatcttctgcttcttcagcgttttttagattgaagaaattgaagctcttggatattgacccatacacatatgccacacaattgactgtacttgaacatgacttatacctcaggatcactatgtttgaatgcttggatagggcatggggtaccaagtattgtaatatgggtggttctccgaacattacgaaatttatagctaatgctaatacgctaactaattttgtttctcataccattgtaaaacaggcagatgtcaagacacgttcaaaattaacgcaatattttgttaccgttgcccagcattgtaaagagttgaataatttttcttcaatgactgccatagtgtccgctttgtattcctccccaatctaccgactgaaaaagacatgggatttagtttccactgagtcgaaggaccttctgaagaacctaaacaaccttatggattccaagagaaattttgtgaagtatagagagctgttgcgatccgtgacggacgttgcatgtgttcccttttttggtgtatacctatctgatttaacatttacgtttgtcggaaacccagattttcttcacaattcaaccaacataataaacttcagcaagaggactaaaatcgcaaatatagtggaggaaattataagctttaaaagattccattacaagctgaaacgattggatgatattcagaccgttatagaagcgtctttggaaaatgtcccccacattgaaaagcagtatcaattatcactgcaagtggaaccgagatcaggaaacaccaaaggcagtacgcatgcttcttctgctagcggtacaaaaactgcaaaattcctaagtgaatttacagatgataaaaatggcaattttttgaagctaggtaagaaaaaacctccttctaggttatttcga

SEQ ID NO: 174473 - DNA, 306 bp, Saccharomyces pastorianus
cgtactttcactgactttgtttctggcacacctattgtaaggagtcttcagaaaagcaccataaggaaatatgggtacaatttggcaccccacatgtttttgttactacacgtagatgagctatcgattttttctgcataccaagcaagtttacctggcgaaaagaaagtcgacacagagcggctgaagcgtgatctatgcccacgtaaacccactgagataaagtacttttcacagatatgtaacgatatgatgaacaaaaaggaccgattgggtgatgttttgcatgtgtgctgcccaagttga

SEQ ID NO: 174474 - DNA, 231 bp, Saccharomyces pastorianus
aaacggaagcaccaagtaattaccgcgtgcagaaactgcaggaacaggaaagtaaaatgtgatggtagtctaccctgcttttcgtgcttgcaacggcatatcacttgtacatatatgattaagggtgatgagggaaatctcagcttttacaagcaagatgatcatattctagagcagatcaagattcttaagaaggttattgttttttttgatctgcagatgccaccctct

SEQ ID NO: 174475 - DNA, 471 bp, Saccharomyces pastorianus
gtcaatgatgaaacattttatgataacaacaataataaaaattatcatctcttcataactaccttcaaacaggggaagaaagaggaagaaaaacaaaacattgctgtcgttgtcgagccagctgccatcatcaaaaaaaatagtaataatccaccaaagaacgtaacctcaaagttaatttcttcgaatccaagtctttcaaaattttcttctcaatctagaaaattcagtgaagacacagattactataacacatctccattaaaacatctttatcacaatgatacaacaactttcatcaaacctaaaagactgaacgcagttttagaaaaattagacaacaccactccttctcctcctcctccttctccttctctagccggtactgccaaaattgaaaatgtagccaaaaatgagaacagcacatctactagcaccactgccagaaataatgttgcctaccaatattag

SEQ ID NO: 174476 - DNA, 2334 bp, Saccharomyces pastorianus
atgttgattgttcaacgtagaaaccatcctatggctattatcagaccatcttttgccaacagaggtgcatcttattctcaatatggtattcaaattagatccgtcagaccagaccaaacctctcaaactaatgttctacattatttgaatgacggtcaagtaacatttagattttcttggagaaaaaacgaatatttagtccctgctgttatgattttgaaagctttatgccatactagtgatagagaaatttttgatggtattatcggtgatgatgttaaggattcatttctaactgatcgtttagaattgttattgcgtggctttaagaaaagataccctcaattacaaaatcgtacacaagttttacaatatctaggggacaaattccgtgtcgtctttcaagcttcccctgaccaatctgatttagaggtcgggcaagaagtccttgaccgtattgtcttagcgcatttgggcaaggatggtaaccaagataaatttagaatgttgttgtttatgattagaaagttgtattctttggttgcgggtgaatgttctcctgataatccagatgccacacaacatcaagaagtcttattgggtggtttcttatatggtatgattttgaaagaaaagatcgacgagtacttgcaaaacattattgctcaagtcaggatggatatcagccgtggtatggccatcaatttcaaggacaaaagatatatgtcaagagtcttaatgagagtcaacgagaacattggttccaaaatgcagtactttttatcgacaggtaacctagtctctcaatctgggttggatttgcaacaagtctctggttacactgttgttgctgaaaaaattaatttctaccgtttcatttctcattttagaatggttcatagagggtcattttttgcgcaattgaagacaaccacagtcagaaaattgttaccagagtcatggggcttcttatgtcctgttcatacaccggatggttctccttgtggtttgctaaaccattttgcccacaagtgtcgtatatcaactcaacaatccgatgtttcaaaaatcccttccttattatactcactcggagttgctccagcttctcacacattcgctgctggtccttctctatgctgtgttcaaatcgatggtaaaatcattggttgggtctctcatgagcaaggtaagattattgctgatacgttgagatattggaaggtggaaggtaagacacctgggctgcctgtagatctagaaattggttacgtgcctccatcaaccagaggccaatacccaggtctttacttatttggtggccgctccagaatgctccgtcccgttcgttacctgcctttagataaggaagacattgttggtcctttcgaacaagtttacatgaacattgctgtcacatctcaagaacttcaaaatgatgttcatacacatgttgaatctacaccaacaaatattttgtctattttggctaatttgaccccattttctgactttaaccaatctccaagaaatatgtatcaatgtcaaatgggtaagcaaactatgggtactccaggtgttgctttgtgccaccgttctgacaataaactttatagattgcaaactggccaaacacctatcgttaaagctaacttatatgatgactatggtatggataattttccaaacggtttcaacgccgtcgttgctgtcatttcatacactggttacgatatggatgacgcgatgattatcaacaaatctgctgatgaaagaggtttcggttacggtactatgtataagactgaaaaagtggatttggctcttaacagaagtcgtggtgacccaattacacaacattttggtttcggaaatgatgaatggccaaaagaatggctagaaaaactagacgaggatggtttgccatatattggcacttatgttgaagagggtgatccaatctgtgcatactttgacgatactttgaacaagacaaaaatcaagacatatcattcctcagaaccagcatatatagaggaagtaaacttgattggtgacgaatcaaacaagtttcaagaactacaaactgttagcataaaataccggattagaagaacgcctcaaattggtgataaattttcttctagacacggtcaaaagggtgtctgttccagaaaatggcctaccattgacatgcccttcagtgaaactggtattcaaccagatatcatcattaaccctcacgcttttccttcacgtatgactatcggtatgttcgtcgaatctttggcaggtaaggcgggtgctttgcacggtatcgcgcaagattccacg

SEQ ID NO: 174477 - DNA, 501 bp, Saccharomyces pastorianus
atgtacattccaaaaaatttcgaagtccaagatttgccaagacaagtggagatcatccgcatttaccctctaggcactttgttcactgcaagccctccttcaaaaggtttacttaatatctggagcaatgacccggtaggtaggccggattctgagttatgtgtcactcatgttcccttttgctttgtgccaggtgccgaaggtagctgtgggaagctcgtcgcacatctagcggttcaaaatcagcagattgaacacttggaaaatcgatccaaatgcctcgtcgtttttcaaagtgttgattcgtacatttccccatcttggtatccactaaagaagaacactcacgagcgtgttcctacgtgggactttgcagctgttcatgtttatggtactcctaaaattattagaggcgataaagaatggctaatcaacctcttgaatctgctgaccgatcaagaagagtcgaagaggcccgagggtgaacaatatgagcaaaaa

SEQ ID NO: 174478 - DNA, 213 bp, Saccharomyces pastorianus
atgagcgggtccgaagacggcaagatttacatttgggatagaatcagaggtaatttgatctctgtgctctccggtcattccacactgatcaacaactcctcaaaacccgttgtgaaaaactgtaacgtggtcgcatcaaatcctgtcgataaagaaatgtttgtgtctggcggcgatgacggtaagataaaaatctggaaaatatcaagaaac

SEQ ID NO: 174479 - DNA, 153 bp, Saccharomyces pastorianus
ttttcctgcataccaagcaagttacctggcgaaaagaggccgacacagagcggcttgaagcgtgatctatgcccacgtaaacccactgagataaagtacttttcacagatatgtaacgatatgatgaacaacaaggaccgattgggtgatatt

SEQ ID NO: 174480 - DNA, 594 bp, Saccharomyces pastorianus
ggtagcaccgctaaggacgaagttcctccgccgttactcataagatttactaccaaggcgatgcgactgttttttattgtagatatgcttggacgcacaatggcaccaagtagtagacttacttgcttttcaaacaagggtcctttatattggtctatagcatattcagccattatttccgcctggggttttttagtatggatggaaagagcatatagaaagaagaggaacctgcaaccttcaaggtgcacgaaaataatctgctctcgttgtgatacaataaagaaacatcctcgatggttcaaatacaaatatggactatacttccttttaacatacgttgctcaaacttggctcgtctggatgattcaggtatctcctttttttatagaacacacgattgatgagggacgagaagaaccttcatttgtcccagttacagttagtatcatgatggcccatatgatgacagtatatctcttcaaagtgtattatttgcatattgatcttcttaagatgaattccagcagtgttgccgataaagaaagcggtaacagaaaaggacgtgatttagtattaaaccaacctcagtag

SEQ ID NO: 174481 - DNA, 1869 bp, Saccharomyces pastorianus
ttctttattcatctgccctctgattgtatagcgaaggacaagtttttcaccagctcggacgatcccaccaacttgacaatacccaatagggacatcaacgaaaggactcttttcttggacgccttccttttgtgtgcatctaacaacaatagcaacaacttcaagcagacctatgtttgtaatagatgtatcaacagggaaaagagaagagcgtcgagaagaaagtctgggttgaacgacaactccatctggcaaaataacgaaaacaaaagagcaatcatattcaatagtaaacaacttttcatcattagtaataacggtttgagtggtaactctaactgtatcaatttcgacttaccgacgagaatcgtctgttactgcagacaccacaaggcaactaacgggtttgtagttttgttccttctaagggaccataacggcgatatcttggcgaaaactataacagatcccataatgatcatggacaagaaaaatgccagcaataccacaactccaaccagcaccagcaatgcccaggtttcgccaatgacaaatgacactagatccttttcatcgccgcaaagtgacttaaacttcccatccgaattccccctgccttctaacagtaaaaattttgtcatttctacgaactgtatgcttgatagcaattgtaataacaacaacaatgataatgataacaaaaacaacattaagactaataccgcaatgatgaacaacaacagacactttccatcaccaaattcctccagtgaggacagcaaccattctttttcagatattcatttttctaataacaacgacaacaatttacatcgttcactagactcttggtcgtccacaggttttaatagttcatctaatcccgctcttactacattaactagtgatttcagtgcggcctctgcgagacacactggcaagaggcagcgttcggtaaacgagccttttatgtctacgcctaatacgttttcccgtcttccccagaaattcatcgattcttccaaagatatatcgaaccataatagtgtccccgtggcgctcaatgacaagccttctattcagcgtgtcatccccgcacaaggttccattaacggaggtatagaagtgactctacttggctcaaagtttaagcagggcttaatcatcaagtttggcgaaaatatagcattgtccagccaatgctggaatgaatctacgatggtgacttttttaccgccttcatctaaacctggaccggttttggtaaccataatcgacccaagtgaaacatctatgagaaataatagcaatagtagtgtttccaccagcaatagtaccaatgacattctgcacttaaacaagtataccggtgagaaagcaatctttacttatgttgatgatactgataggcaactaattgaattggctctgcaaattgtggggctgaaaatgaacggtaaactggaagatgcaagaaacattgctaaaaggattgttggcagtgattcatctccatctaataataacgcaggattacactcacagaatagctctttaaattcatacacgaatatgatgcgaaatataaacgatgaacaattgatcactgaagttattaagtcatttaagagaaataataatctttctaccgtcaatctttccatgtgtgacgttaggggtaggactctattacatctggcggcattcaataactggtatagtcttgtttcattactaatcaaatatgggtcgcatttgaacgaccaagatttgtttggttttactccgctacatatggcgtgtattaatggtgacttgagaattataagactattgttagaatgcaacgttaatattatgatagaaaac

SEQ ID NO: 174482 - DNA, 387 bp, Saccharomyces pastorianus
  modified_base (36)..(36): a, c, g, t, unknown, or other
atggataggaaaaggtcttttgaaaaaattgtcatntccgtcatggtcgggaaaaatgtacaaaagttcctgacgtttgttgaagacgaaccagatttccagggcggaccaatcccttcaaagtatcttattcccaagaaaatcaacttgatggtctacacgttgtttcaagtgcatactttgaaattcaatagaaaggattacgataccctttctcttttttacctcaacagaggatactataatgagttgagtttccgtgtcctggaacgttgtcacgaaatagcgagtgccaggccgaacgacagctctccgatgcgtactttcaccaactttgtttctggcacacctattgtaagaagtcttcagaaaagcaccataaggaag

SEQ ID NO: 174483 - DNA, 333 bp, Saccharomyces pastorianus
atgtcgacttcccctttatcgttgactatattatcaggtaagtttagcgctttgattagtgcacttgtagcttccttatcgatattcacgacgtcttcgttggcttcatcttcttcatccctttcttcatcatcattgctttcgctttcgctttcactttcgctttcgctttcgctttcacttttcgagtcgtcttcaatagcactttcttcttcatcaacttcttcaaactctccttcgccttcgaataactgggcaaacccttgtttgttctctctggctttcaaaacatccaataatatttgcaattctttcaatccaacatccccgata

SEQ ID NO: 174484 - DNA, 96 bp, Saccharomyces pastorianus; identical to SEQ ID NO: 173780

SEQ ID NO: 174485 - DNA, 114 bp, Saccharomyces pastorianus
atggcagcgacaccagcggcgattgaagttaatttgaccattgtattggtttggtatgttagtgctgatgtaatcttaacaagaaatagtgaaatgaaagcgcatacctcaaag

SEQ ID NO: 174486 - DNA, 108 bp, Saccharomyces pastorianus
atggtaggcaattcaaaagaattgcaagaaaaaagactggaaaaatcttggaatgatgaaaaagaaagcctgaaacttctgaaaacagatttggaaattttaacatta

SEQ ID NO: 174487 - DNA, 105 bp, Saccharomyces pastorianus
gtgtggtctagtggtatgattctcgctttgggcaaatatctgcttaacaacagaaatgcaaagcatgcgagaggccctgggttcaattcccagctcgccccgtta

SEQ ID NO: 174488 - DNA, 198 bp, Saccharomyces pastorianus
tgggccaccgggatgccacccaacatctactacgtcgacaacaacagcagcatcagcaacaacaacaacagcaacaacaacagcaggaggtacaacaacaacctcagcagctacaacaacaacctcagcagctacaacaacaacctcagcagctacagcaacaacctcagcagccacagcaacaaccagacgcacaga

SEQ ID NO: 174489 - DNA, 270 bp, Saccharomyces pastorianus
ggaaggaataatcgtataggacaagatgaagaaacttttgtgtggaatttcatgatcagaaataccgttgaagaaaacatcctcagatataaatgtatactcgaagagcgcaaaagaaaggagaagtcaaaaaaaggcgataaatacgacgaagcacaagatgaaacggataatgaggaaagcgatgatgcgaagtttgagataagcgtggtagaccaagaagtcagtaatgaacacttatggaactgcttttttcacggtagtgattag

SEQ ID NO: 174490 - DNA, 384 bp, Saccharomyces pastorianus
ttcagtataatggcacaccttttgtttatggaaaggtatatggtatttcctgcaaaatacaatacactgttctttcttgtgggtgatatgactgggcgtgttctacaagctgcgggtggtgggttgctctcttcattggataacttgaatactgcgcgtatcttgattatcgtgggtcttttcattcagattttctgttacagtgttttgatgttgaatcaaatattcttccattacaaaatgaggacggattccaacgggatcgtccaaagcaataaagtctggttccgatttaattacatccttttgggcgggaacattcttattattgccagatctattgtcagagcaatagaattcattatggcctacaaagctatataa

SEQ ID NO: 174491 - DNA, 81 bp, Saccharomyces pastorianus
atggtctctagcgggatcgaaccgctgatccccgcgttattagcacggtgccttaaccaactgggccaagagaccttgatt

SEQ ID NO: 174492 - DNA, 618 bp, Saccharomyces pastorianus
gtagtcaccagaaaatcgacccaagccaaattgtcatttagcagtccccatgtttttccgcaattttccgtactcgatccgaataaaacttttagcttgccgacgcgccagttagcaaatggcgtggtcgatgcatttattcatgtcatggaacagtacttaacttaccctgtcaatgcacaagtacaagatcgttttgccgaaggtctattgcaaactctgattgagattggaccgaaaatcttggacgattcagcagattatgacacgcgtgcgaatttgatgtgggctgctagcatggcactgaatgggctaattggagctggtgtaccacaagattggtcaacccatttgattggacatgagctcacggctttacatggtattgatcatgctcgtaccttggccattgtgtttccggccaatctacaagtgcgtcgtcaagagaagcgagaaaaattactacagtatgcagctcgtgtctggcagattgtcgaaggtgatgaagaacaacgtattgatactgttattgctcgtactcgagccttctttgagcaacttggattgccgactcgtcttagcgattatggactggtggagacagatattgagatcatc

SEQ ID NO: 174493 - DNA, 804 bp, Saccharomyces pastorianus
tcttctggatcctcacttcaaagcaatatgagagaaacagtacaatctcaaaatgcggaaatacccccacaaatgtcgaatgaaaacaaaaataaacctagctgcgaacactttgagtctgtaggtgaatatatcatggttgggggcagactttttaaaaagagtgacacgaatacatatttggaagacctaggacctggaacgcctgtagagcaaccaggacaagttggtttcgccaatccactcccactagggttagcttctttctcatttatgtgcttaacattagggttggtcaatgcaagagtgcgcggggtcaccaacctttatttattgaacgcatcctttatctttggtggggctgttgttttgctttcgggacttctctccttctgcgtcggagacaccttttgtatgacagtttttggctcatttgggggtttttggattagttgggggtgcctcaacctcgaacaattcggtgtgactaaagcatatgccgatgatcctcaagcactgcaaaatgtgctgggattttacctagcaggatggacagtattcaatttcttggtcatggtctgttccatgaagagcacttgggggatatttctattgctactttttctggacttgacgttcttaatgttatgcatcggttctttcacacaaagcactaatgtatcaatggcaggaggatactttggtatattgagcagctgttgcggttggtattccttatattgttcattcgcgaataaagatagttcctacgttcctttgatcgcatatccaatgccaggttct

SEQ ID NO: 174494 - DNA, 96 bp, Saccharomyces pastorianus; identical to SEQ ID NO: 173641

SEQ ID NO: 174495 - DNA, 93 bp, Saccharomyces pastorianus
atgtctgcattacctccagtatactcattccctccactatatacccgtcaacccaattctttaacaaggagacaacagataagtacgtggatt

SEQ ID NO: 174496 - DNA, 930 bp, Saccharomyces pastorianus
  modified_base (29)..(29): a, c, g, t, unknown, or other
  modified_base (110)..(110): a, c, g, t, unknown, or other
  modified_base (169)..(169): a, c, g, t, unknown, or other
tataccaatttgcgcccatcttggccatnttattatcaacaacttggattgcctggtaacgtcactttccagggcgtaatcctattcgaaatattggtctttgggatatnaggtaatgtgggcttttcatctgtcccttctattcatgtagttccatattgtctctgtngtatgttacactatgcatatgggttcgccagaaagacgtttccagaatggcatgctttgaaagatgaaaagtcttactaccaagaacacggtttcgccaagattttggtacaattgttctggaagttagatgtcataggtgtcatcctgatgggttgctccttgggttgcatcttggttccattgactttggctggtggtgtcaagaccacttggaatgactcaagattgatcggtccatttgtacttggttttgttttgattcctattctgtgggtttgggaatatagggttgctagggacccaattatcccgtacaaattggttaaagatagaggtgtatggtcttccatgggtatctctttcttaatcgattttatctactacatggccgctgactatctgtacaccgtgatgcttgttgctgttaatgaatctgtcaagtctgctactagaatctctacattatcatcatttgtttcagttgtggcctctccatttttcggtttgataatgacaaggtgcactagattgaagcctttcatcatgtttggttgctgtttgtggatgttagcaatgggtctattataccgcttcagaggtggcagaaaatctcattcaggtatcattggtgcgttatgtgtttggggtcttggtactaccttgtttacttacccagttaccgtctctgtgcaatctgctgtttcccacgaaaacttggctaccgtcactgctttgaactatatcttatataaaatcggt

SEQ ID NO: 174497 - DNA, 210 bp, Saccharomyces pastorianus
atgtccgacgaaattgtttggcaagtgattaatctaagtttctgctctcatagaattaaggcaccgaatggtcaaaatttgtgcagaaatgagtataacgtcactgggttgtgtacaaggcaatcatgcccacttgccaactccaagtatgcaacagtgaagtgtgacaatgggaaactgtacttgtatatgaagacgcctgataagagc

SEQ ID NO: 174498 - DNA, 96 bp, Saccharomyces pastorianus
aatcctaatataaacagtcttagggaagtaaccagttgtcaaacggtgtatcaggttaattcacggaatgttactgttggaataaaaatcaactat

SEQ ID NO: 174499 - DNA, 381 bp, Saccharomyces pastorianus
atggtggcaggaattaagaaatttgccggcttggactttgttcccacaatcagtgacagtgaagacgatgtcccagtgctagattcctctgatgacgaaaaggtcgaggtaaagaagaccgctaagaagaccaagagcaagaaaaacaagaacaaggccaccggtgcggatgggctggatgaagacgtccatgaagacttaaacgcagggttcaagttcgatttggatgcggacgacactacttcgaactttcaaggttggaacttcttggccgaggccaacaaggatgatccagaggctcctgtaaagaaggacgtggacttggacccaaatacctcagaacgaaagggtgggctggtgaaaatggcccatatcgacacc

SEQ ID NO: 174500 - DNA, 75 bp, Saccharomyces pastorianus
catctactaactagtatttacgttactagtatattatcatatacggtgttagaagatgacgcaaatgatgagaaa

SEQ ID NO: 174501 - DNA, 876 bp, Saccharomyces pastorianus
atgttcaaaaactcagcgctgggaatgtatgacgtagaggacattgaagaagacgacgatgacgacacatcattaattggagacgatgatgctatggcatttgttgatagtgataacggatttgaagtagtatttagtgacgaagatgatgatatgggagaagaagatgcagatgatgctcgttcagattcggaagaaaatgaattatcttctgaaatgcaatcaagtacagcggacggcacggatgtggactatgaggttgatgatgcagatggactaattatcaatattgaccagccctcaggagatgatgaagaaatggcagactatgatgctaacattagccattcttctcacagtgaaaatgaagatgacgcttcaatggacgtcatagaagtttacgacgacgagctaagttctggatatgatgttgatttaagcgattatgacgtagatgaatctgattgggactccgggttatccagcctatctatttctgatgaagatagtgaaagtagcgaagatgagcctattaactccaccagaatgggagattcaagaaggagatggctgatagctgaaggcgtggagctaactgacgactcgcaaggtgagagtgaagaagatgatagaggtgttttccgtggtattgaacatatattttcaaatgagaatgagcctttgtttagagttcatgacgaaatgcgtcatagaaaccatcatcgctcaatcaatcgtacacattttcactctgctatgagtgccccctctttaagcttattaaatcgtggaagaagaaaccaaagcaacctaataaatccactagggcctacaggattggaacaagtggagaacgatatttcagatcaagtgact

SEQ ID NO: 174502 - DNA, 1305 bp, Saccharomyces pastorianus
atggagcaaaacgctgaaaaacgctctattgttggcgacgacaactcaaccgtgaagagacaagacacttccccgtccaaaggtattgcacatatcaaaccagaatatattgttccattgaagcagaatgaaaaccagaaggtcgccatctatgatgaagagatgtcttccgacagaatgacaaacgagtttgcaggtgggacgaataagaaaaataagaacggaagaggtaagaagcgtgggcaaaacaagaatagagataacaggcaggtcaaggaacagaatgtcttgtgcccacgcttgatccatggcgatatatccaaatgctcctttggtgataactgtaggtttgttcacgatatcaatctgtacctttcaacaaaaaagcctgaagttgaaagtaatatatttccttcctgtccggtcttcaactcgttgggattttgccccatgggattcaaatgcagatttttatcgtctcatctgaataaagaagataatatcctaatatcgaagaaggagattgatccagatgcgcaaacaatatggtccgttaaaggtgaagtaaaccatatctcaccggaaagaaaactcgatcttataaaaagaagatttcctttcacaaaaagtaatgaaatattggaaatcatcgactctttccaacaagaatgtagagattccatgaagccagaagaagaagttgagtcaacgccacagctgaagaaacaggacccagatgtggaacaaccagttgccccccaagtcgaacagaggaacaaagaattgtcacaacatagaatgaaacagcgtgaagtatacttgaagtacaaggacactcgttattttgctcaagaaaaaaagccactggatttgtaccataaaaaaatcgtgtcgccattgacaaccgtaggcaatttaccataccgtcgtctaatgagaaagttaggtgcagatgtgacatattcggaaatggccttggcagttcccttaattcaaggaactaattctgagtgggcgttacctaaagctcacacatcagagttccccgggttcggggttcaagtggcctgttctaaagcctggcaggcggcaaaggctgcagaagcactcgcaaactccgtcagtgaaataagtgaaatcaacttaaactctggctgccccatcgatttgctatacagacaaggttctggtagcgccctgttggataaccctgccagaatgattcgttgtttaaacgcgatgaactacgtatcgaaagatattcctatcacggtgaagatcagaacaggtacaaaggaaggtcat

SEQ ID NO: 174503 - DNA, 114 bp, Saccharomyces pastorianus
atggtcaaattaacttcaatcgctgctggtgtcgctgccatcgctgctactgcttctgcaaccaccactctagctcaatctgacgaaagagtcaacttggttgaattgggtgtg

SEQ ID NO: 174504 - DNA, 480 bp, Saccharomyces pastorianus
ctcgaggtagaagattttagtgatatgagcacccacgaagatgtcaacggagcaagtccgtcgccaaatctgggccggtcgaagaagaatgagaagcgaaggaaaaacgccaaggagctgtcatacgatgaactaaaagacaaactagaagttaccgctcgcaaatcacgtcttgagtgcaaagacttgaaaaagaaagttcatgggctcgaaagaaggaaccttgaacttgaacagcgtttagaagagctgaagattgagaaccagactttgatagagattaacaataaactgttgaaaaacactaatgaggatgagattaacaagagccagaggaacaaggagaaggaccgaaagcggagggaaagaagaacggcaaggagaaaagatgaaagaaagcaggaaaaaaagcaggataataaaacatctcaatcttttccttcctcaactgacatgaatggacagcctatagaattttga

SEQ ID NO: 174505 - DNA, 288 bp, Saccharomyces pastorianus
atggtcgggaaaaatgtacaaaagttcctgacgtttgttgaagacgaaccagatttccagggcggaccaatcccttcaaagtatcttattcccaagaaaatcaacttgatggtctacacgttgtttcaagtgcatactttgaaattcaatagaaaggattacgataccctttctcttttttacctcaacagaggatactataatgagttgagttttccgtgtcctggaacgttgtcacgaaatagcgagtgccaggccgaacgacagctctacgatgcgtactttcac

SEQ ID NO: 174506 - DNA, 66 bp, Saccharomyces pastorianus
tgtattaaagctctcgatgggggtcgaacccataatcttctgattagaagtcagacgcgttgccat

SEQ ID NO: 174507 - DNA, 1353 bp, Saccharomyces pastorianus
atgaattcaactccggatctaatatctccacaaaaatccaattcatccaattcatatgagttggaatctagtcgttcgagagcaatgaacaccccagaaggtaaaaatgaaagctttcacgacaacttgagtgaaagcgaagcacaacctgctgtcccacctccaaacactggtaagggcgcctatgtcactgtttctatttgttgtgttatggttgctttcggtggtttcattttcggttgggatactggtaccatttctggttttgttgctcaaactgatttcttaaaaagattcggtatgaagcatcacgacggttctcactacttgtctaaggttagaactggtttaattgtctctattttcaacatcggttgtgccgttggtggtattcttttggccagactgggtgatatgtacggtcgtagaatcgggcttattgtcgttgttgttatttatactattggtatcattattcaaattgcctccattgacaagtggtaccaatatttcattggtagaattatctctggtttaggtgttggtggtattaccgttttgtcacccatgttaatttcagaggttgcccctagtgaaatgagaggtacattagtttcatgttaccaagttatgattaccttaggtattttcctgggttactgtactaatttcggtaccaagaattactctaactctgtgcaatggagagtccccttggggttgtgtttcgcctgggctttgtttatgatcggtggtatgatgtttgttccagaatctccacgttacttagttgaagttggaaaaatcgacgaagccagagcttctcttgccaaggttaacaaatgtccaccagaccatccatttatccaacatgagctggaatctattgaagctagcgttgaagaaatgaaatctgctggtactgcatcttggggtgaattgtttactggtaaacctgccatgctccaacgtactatgatgggtattatgattcaatctctacaacaattgactggtgacaactacttcttctactacggtactattgttttcaaggctgtcggtttacaggattctttcgaaacttctattgtctttggtgttgttaatttcttttccacctgttgttccctatacacagtcgaccgttttggccgtcgtaactgtttgatgtggggtgctgttggtatggtctgctgttacgttgtctacgcttctgtcggtgtcactaaattatggccagaaggtcaaaatggtccttcatctaagggtgctggtaactgtatgatttgtttcgcctgtttctatattttctgtttcgccaccacttgggctccaattgcttacgttgta

SEQ ID NO: 174508 - DNA, 156 bp, Saccharomyces pastorianus
atgaaagtttccgataggcgtaagtttgaaaaagcaaactttgacgagtttgagtcggctctaaataacaaaaacgacttggtacattgtccctcaataactttatttgaatcgatccccacggaagtgcggtcattctacgaagacgaaaagtcg

SEQ ID NO: 174509 - DNA, 645 bp, Saccharomyces pastorianus
atggcaaacaaatcacgacccaagaaaatcaaggctccttacaggaagtacgtggcgggagagggtttctcctctacaagaaatgataataaagctaaagaattcactatcactataccggaggatgcagaactcattgagactccacaggggtcttattactatgatgaaaccaatgatactatagtgaaattgacacgactgagtaatgaaaaaaaggataaaaaaggacgtaagcagtcgctatcgtcatcatcgacatcgtcctccaaagaagaaaagaatggcaaagccatagagagtgaggaagcgaggatgcattcagtatcggtaaagatggttttgccatgggagatacagcatagaataattcattatcttgatataccagagaacgaagaaaaattaaataaaactactaatggaaaaaaaaccacgactggtataaatatgaactacttactagtttgcaggaactggtacgccatgtgtctaccaaagctttattatgcaccagcgttaacaagtaagaacttcaacgagtttgttgatacaataatcataaataaaaagaagaatttaggacactatgtttttgagttgaacttgtctacaattttacaaagtggtagaaattcatttgtc

SEQ ID NO: 174510 - DNA, 291 bp, Saccharomyces pastorianus
atgaatgacaacctgccgaaggagtacttcgaactaatacggaaagttcttaaagagaaggaaaccgataatgcgcctttgcaaagacgaaggggactaagaaggagaaaccaggccctaccggatgccaaaaagtttaaaaaaggtttgaatgaaccaccgggagaaagcgtcgttagtgtaaacttggactcttcggataatgatattataacagtgacatcggatgacagtatagaggaaatccactcatcggaacaagacgacggagaagatgactatgattctgaa

SEQ ID NO: 174511 - DNA, 480 bp, Saccharomyces pastorianus
cagcccaatcgaatgctttcagaatcaaatatgagggttataaacaataatgaacatacgatcggccagtcggcccagcagcaacaacaacaaccgcagcagcagcagcagcaatatctcagccagggtgttcaacctctggtgcctgtatcataccaatatgtagttcctgaacaatggccgtatccacaatactaccagcaatcacaaccgcaaccgcaatctcaacagcaacagcaaccacaaatgtgtcaagttcaagaaccttaccagaggaatagttctgattcgaacggctctaacccgtcgtccacatcagtagctatttcctccgccgtcagtggtgctgctttgtccaacgcttctggtcctgccatcggtggcaatagcaacagcaataacagtaacagtaacagcagtagcaacgtgccatactattattacgacctgcaggcatgcaagcttgcactgccgtcgttt

SEQ ID NO: 174512 - DNA, 168 bp, Saccharomyces pastorianus
aacaagtgtgaccatcctcatggtggtgttcgtggtaaatctaagtctaacaaattgtcaatgtctccttggggacaattggcaaaaggctacaagactagaagaggtaagaatcaaaatacaatgaaagtgaaagacagaccaagaggaaaagacaagagattataa

SEQ ID NO: 174513 - DNA, 159 bp, Saccharomyces pastorianus
ctggtaatgatgactgtatcgatgatggtgccgatggtgccgataatgatgattgtgttgatggtggtgccagaggtgcagacggaacagacggcggcgctagaggagctggttgtgttggttgtgttggttgtgttggttgtgttggttgtgttggtt

SEQ ID NO: 174514 - DNA, 417 bp, Saccharomyces pastorianus
tacattattatttgggcaagtttcagcccattctgcggtatactcggatttttcgttgatgcgtttggtttgaaacataagttcgaaatgttcctattggccatttggtacggattatcattaggtggctgttccgccgtttcaagatcagtctttagtttgattgtgcctcccggaaaagaatctacatttttcagtatgttcagcattacagataaaggttcatccattctggggccctttatcgttggtctactcactgacagaacgcataatattcgatattcgttttatttcttcttttttcttttaattctatcattgcccgtattgaactgtttggacgttaaaagaggcaggagagaggctgagcaattgagccaaatttctccagagactgaaagaagattggattga

SEQ ID NO: 174515 - DNA, 114 bp, Saccharomyces pastorianus
atggcagcgacaccagcggcgattgaagttaatttgaccattgtatttgttttatttttcagtgttgatgtgagcttaactaaagataaagaaatgaaggattattctcaaagg

SEQ ID NO: 174516 - DNA, 324 bp, Saccharomyces pastorianus
caacctcagtttaaagaaccagcattaaagattaccggtgatgctgatttctgggacttccgcgaagatgacaatgactacttcagccagccccgtgccctgttcaatttgatgaatgatgagcagaaacaagcattgtttaataacacggccgcagcgatgggtgatgcgctagatttcatcaaataccgtcatatccgcaactgttatgcttgcgatccagcttatgggcaaggcgttgctaatgccttaggtatgactgtagcagatgctcaagcggcacgtgaaacagatcctgctaaaggtttaccaagttttctttaa

SEQ ID NO: 174517 - DNA, 150 bp, Saccharomyces pastorianus
ctctccgccttgaattctgacaatatgatctattccatattccattatacgaaaatggcggtagaacagcgcgttcagcaatcttatcgaactgttgggatgaccgatatccttttatacgatccgaatctggttctgaacgagacgaga

SEQ ID NO: 174518 - DNA, 414 bp, Saccharomyces pastorianus
atgtggaaatggatcaaaattctgtaccacgaagtagcgcaggaaaccacgctgaaggactcttatagaataactttggtaccttcttctgatggtatatcagtatgtggaaaactttttaatcgcgagtatgtccgcggcttttactttgcatgcaaggctcagtttgataacctttggggagagttgaacaactgcttttatatgcctacagtggttgatattgccaacctcattttgcgtaatcgagaagttttgttcagagaaccgaagcgaggaattgacgagtatctggaaaacgattcttttcttcaaatgatacctgttaaatatcgtgaaattgtgctgcccaagttgagaagagatactaacaaaatgaccgcggcgggatcctctagagtcacctgcagcatg

SEQ ID NO: 174519 - DNA, 210 bp, Saccharomyces pastorianus
atgtttttgttactacacgtagatgagctatcgattttttctgcataccaagcaagtttacctggcgaaaagaaagtcgacacagagcggctgaagcgtgatctatgcccacgtaaacccactgagataaagtacttttcacagatatgtaacgatatgatgaacaaaaaggaccgattgggtgatgttttgcatgtgtgctgcccaagt

SEQ ID NO: 174520 - DNA, 1212 bp, Saccharomyces pastorianus
atggttacagaaaatcctcaacgtcttactgttttaagacttgccaccaataagggtccattagcacaaatatggcttgcttcaaatatgtcgaatataccaagaggatcggttatccaaacacatattgctgaatcagcaaaggaaattgcaaaagcttctggctgtgatgacgaatcaggggacaatgaatacataactttacgaacatctggcgaattacttcaaggcattgttcgtgtatattccaaacaggccacttttctccttacagatataaaggacacattaacgaagataagtatgttatttaaaacaagccagaagatgacttctacagtaaacagactgaacactgtaacaagggttcatcaattgatgttagaagatgccgttacagaaagagaagttttggtcaccccagggttagagttcttagatgatactactataccagtgggcttaatggcgcaggagaattcgatggaaagaaaagtccaaggtgctgctccctgggatacttcacttgaggtcggtagacgattcagtccagatgaagatttcgagcataataatttgtctagtatgaaccttgattttgacatcgaggaaggtccgataacttcaaaatcttgggaagaaggaacaagacaaagctcacgcaactttgatacgcacgaaaattacatacaagatgacgatttccctcttgatgatgctggaactattggttgggatctagggattaccgaaaaaaatgaccagaacaacgatgatgacgataactctgttgagcaaggaagaaggctaggtgaatcaatcatgtctgaggagcctacggattttggatttgatctggatatagaaaaagaagcacccgcaggcaatatagatacgacaaccgatgccatgacagaatcacagccaaaacaaactggcacaagaaggaactcaaaattactgaataccaaaagtattcaaatcgatgaagaaacagaaaattcagaaagcatagcttcatccaatacatacaaagaggagagatcgaataatttattgactccacagcccaccaattttacgactaaaagattatggagtgaaataactgaaagtatgtcctatttaccagattcaatccttaagaacttcttatcctacgatctcgaaaaaaaagaaaaatacataatgggcgagaagggtcaattgaag

SEQ ID NO: 174521 - DNA, 138 bp, Saccharomyces pastorianus
gaaaatggattccatattccagcaccagctgctagcgatgcaactacaaccgctttcaaggctgttaccgttactcactgtgatgacaagggctgttacactaagaccgtcgattccgaggcttctaaacaaacatca

SEQ ID NO: 174522 - DNA, 456 bp, Saccharomyces pastorianus
ccaataattagaaactgggggctggctcaagctgctggagtttcatatggtacctttggttactgtaaaactttgaattctttttcctgctctcgagtacgtttaatatataacacctcgaaagaaaaactacctggcccttctcttgaacgttggtggctgagtcctaaggcaagacatacaataggaggacttttgatttcgataccggttgctacatgtttgaccttcatttcttttgcacttcccttggttattatttttctctttcagactggaggaactaatgtctcacttattacttccaacgctatattacacatattgacacttttatcaactatttttgcatgcaccgtggtcctgttacaatttcatccttatacgacttggtgtggctggctaactcttccctgttccctttgctcgttattggcgggatctctagagtcgact

SEQ ID NO: 174523 - DNA, 213 bp, Saccharomyces pastorianus
cagtatataccactctcaaacttaccctactctcacattccactccatcacccatctctcaccatcagtaccaaatgcactcgcatcattatgcacggcacttgcctcagcggtctataccctgtgccatttacgcataacgcccatcattatccacattttaatatctatatctcattcggcgacaccaaatattgtataactgctccttaa

SEQ ID NO: 174524 - DNA, 612 bp, Saccharomyces pastorianus
gtggtagtggcattagtgctggagttggtgctagcagtggtagtggcattagtgctggagttggtgctagcagtggtagtggcattagtgctggagttggtgctagcagtggtagtggcactagtgttggagttggtactttcggtggtagtagcactagtgttggagttggtactttcagtggtagtagcattagtgctggagttggtacttccagtggtagtggcattagtgctggagttggtgctagcagtggtagtggcactagtgttggagttggtactttcagtggtagtagcattagtgctggagttggtactttcagtggtagtggcattagtgctggagttggtgctggcagtggtagtggcactagtgctggagttggtactttcggtggtagtagcactagtcctgacgttgatgctggcagtggtagtcgcattagtgctggagttggtactttcagtggtagtcgcactagtcctgacgttgatgctggcagtggtagtcgcactagtcctgacgttgatgctggcagtggtagtagcattagtgctggagttggtactttcggtggtagtagcactagtgctggagttggtacttacg

SEQ ID NO: 174525 - DNA, 315 bp, Saccharomyces pastorianus
atgagcgctgaacaggttggtagaaagaagtcgtatagatgggtgagtgcatcacaagccagttatgacggtgctggttgggatagtagtgacgaatacgattactcctccgaggatgataccaaaggtgatggaagtcataagaaaaaggtttcaaacttgccggctctgcccaagctcaattataccgatgagaatgatcaacctattaataatgaaaatgataatgaaaagaatgatgatgatgatgatgatgatgatgatgaggatgaggatgatgatgaggatgatgaggatgatgaggatgaggatgat

SEQ ID NO: 174526 - DNA, 126 bp, Saccharomyces pastorianus
atgcagtattatgacacacatctaaaagttaataaaacacacatgcaacttgttggaataaaaatcaactatcatctactaactagtatttacgttactagtatatcatcatatacggtgttagaa

SEQ ID NO: 174527 - DNA, 654 bp, Saccharomyces pastorianus
atggccaccgacaaggcgtttactttttctgtaattcagtactgtcttgggttagcgggtacactttgctcctgggtaatatctggccgtgttggtagatggacaatactgacctatggtcttgcatttcaaatggtctgcttatttgttattggtggaatgggttttggttctggaagcggcgctagtaatggtgccggtggtttattgctggctttatcattcttttacaatgctggtatcggtgcagttgtttactgtatcgtagctgaaattccatcagcggagttgagaactaagactatagtgctggcccgtatttgctacaatctcatggccgttatcaacgctatattaacgccctatatgctaaacgtgagcgattggaactggggtgccaaaactggtctatactggggtggtttcacagcagtcactttagcttgggtcatcatcgatctgcctgagacaactggtagaaccttcagtgaaattaatgaacttttcaaccaaggggttcctgccagaaaatttgcatctactgtggttgatccattcggaaagggaaaaactcaacatgattcgctagctgatgagagtatcagtcagtcctcaagcataaaacagcgagaattaaatgcagctgataaatgt

SEQ ID NO: 174528 - DNA, 177 bp, Saccharomyces pastorianus
cctttttctccagcgggaacaccttttggctttactgacaggcgttatttgacaatgaatgaggtgggctacgtatctactgtcaagaatagtgagcaatacagcataactgtctctttttttgatgttggacgttttagagaataccatttcgaggacttatttggctacaattga

SEQ ID NO: 174529 - DNA, 789 bp, Saccharomyces pastorianus
atccaggcaggtgacattgtctttgggacacaaaaggattcctcttcatcgtctgttggaaaaggtggatgttcaatgtacgctgataaagaggaagtgaaaaccgatgatgaatctttctgttacgggaattttgaagacgaaaacttgggagagtttgtagaaccctttaccttaggtatggccaatttaggttctccaaatacgaacaattcccagtttttcataactacatacgccgcacctcatttgaacggcaagcattctatttttgggcaggtggttcatggaaaatcagtggttcgcactatagaaaactgcagggtagattctgatggagtccctgaatcagacgttagaatcagcgactgtggagtgtgggaaaaaactatgggtgtcccgctttacaacgcttctaatgaccaaattggcggtgacgtatacgaagaatatccagacgatgatacacatttcggtgacgatgattttggtaaggcttttgaggctgctaatataatcaaagaatctgggacgctcttatttaagaaaaaggattactctaatgcctttttcaaatacagaaaatctttaaattatatcaatgaatacatgcctgaacccgacgtagacaaagaaagaaacatccaatttattaacctaaagatgaaaatttacctaaatttatctttggtgctctttaatctggaaagatacgatgatgctatcatgtatgctacgtatttattggagatggataacgttcctaacagagatcaagcaaaggcttag

SEQ ID NO: 174530 - DNA, 837 bp, Saccharomyces pastorianus
atgtcgctaatctcttcgttgggaaccactagtgtagagcctattcggacatcttctgaattgactacggaaagtgagacggtcaaagtgtctactttgcgcaagtccctgcattcttctgaaatgcatcgctcagcttcaaaaacacctcgcacgcttccagaccatgtgcaaaagttaaaaagtatatactcggcttatcagcaagatgggcaacctttgagtaaagaggctgtattccacgcgaaacaaaagtacggtatcttaaatactccagcctaccataagacactcggcttaggagatactggtagtgaatctgcagacttgactgctcgtttggcgaataggagcaagagatcaactaatgaacctgtcgggcccacaatcgaacaaaaggctctggatgaggcctccaaaataacattttctaaaattcccctaacgcaacccgaagagattcccatgaaggttaatttgggtctgaagggtaaaagggactttttaaccaggtcagccgcacaaaaggcattagcttccaatttttcgtcagatagttccacgattggtgtctctgaaagaggcaagcgtgcgtcctctgctgcgacagttattgcaaatgactttaatgcaaacagtgtgaatccccaccatccggcaggatttgaatcactagatttgtccaaggtcttagatggggctgaaagaaaagcaattaaaagaattaacggtaggttatatccagaaaaggtgaattttcaaaatggactactgactggtagggagagcggtgtgtctaaagccaacaaggaagtttccaaaaagggaaccttaaaa

SEQ ID NO: 174531 - DNA, 117 bp, Saccharomyces pastorianus
ggcgtgtggtctagtggtatgattctcgctttgggcaattacctgtttaactgcaggtatgcaaagcatgcgagaggccctgggttcaattcccagctcgccccatttttttgtatt

SEQ ID NO: 174532 - DNA, 1986 bp, Saccharomyces pastorianus
atggacagtaagggtaagatcactattggcattcaaagaacaacagaaagtcttatcttgaaatgggacaaccagagtgcatcaagggccaaaaatatgcctgtaatttataacaatattgtatctaatatcgaagggattttggatgaaattatgttcaatcatgctagaatcatcagatcggagctgttggcaagggatatattccaagaagacgaagaaaattcggatgttctattatttcaactccctaccacatgtgtttccatggcgcctattcaattaaaaattgatttattgagcgggcagttttattttaggaatcctactccactattatcaaattacgcgtcaaagataaatagagctgaaggtccagaggaattggcaagaatactacagcagctgaaactggacaagattattcatgttttaaccaccatgtttgaaaacacgggatggtcatgcagcaggattattaagattgataaaccaatcaggactcaagtgaatactggcggcgaaagcgttgttaaaaaagaagataataaatatgctattgctggtaacagcactactaatagtgatgtttccttgttattacaaagagacctatttatcagactaccacattggccgctcaactggtatttgattttatcgataatatcctctaaaacatcatgtgtggtggaaaaaagaatcggtaaaattgtctctcaacgtgggaaatggaatctcaaatatttagacaattccaacgtgatgactgtcaaattggagtcaataacatatcaaaaaattatgatattgcaaagaactattttaaacagaattataaaccatatgttgatcgattctttgaaccaactagaaattcgcaataagatttgttcttctgaaatgatcaacgagcaaaaactacctcaatatattatccaaggaagtaatactaatgataacatatcaataataactctagaattggagtcatttttggaaggttcaaaagcgctgaactccatattagaaagttccatgtttctgaggatagattactccaattcccaaatacgattgtatgctaaatttaaaagaaacacaatgatgattcaatgccagattgataaactatacattcattttgtacaagaagaaccgttagccttttatttggaggagagttttacaaatcttggtataatagtgcaatatctaaccaaatttaggcaaaaattgatgcaattggttgtactaacggatgtcgtggaaagattgcacaagaattttgagtccgaaaacttcaagataattgcattacaaccgaatgaaatttccttcaagtatctctccaataatgacgaagatgataaagactgcacaataaagatatcaacgaatgacgactctattaaaaatctgacagttcaactatcaccttcaaacccacaacatataattcaacctttcttagataattcgaaaatggattatcattttatttttagctacctacaattcacgtcatccttgtttaaagctctaaaagtaattctcaatgaaagagggggcaaattccatgagagtggaagtcagtactccactatggtgaacattgggttgcataatctaaacgagtatcagatagtatattataaccctcaggcaggcactaagattacaatatgtatagaattgaaaactgttttgcataacggccgtgataaaattcaatttcacattcattttgcagacgtagcacacataaccacgaaatctcccgcctatccaatgatgcatcaagtgagaaatcaagtatttatgctggatactaagagattaggtaccccagaatctgtcaaacccgcaaacgcatcacatgccattcgtttgggcaatggcgtggcttgcgatcccagtgagatagagcctatcctaatggaaatccataatatcctcaaagtggactcgaactcaagttcatct

SEQ ID NO: 174533 - DNA, 435 bp, Saccharomyces pastorianus
cattattatgactatttagatgagttgtcagataccttcaaggaccttattgatgaaatagttcatgatgtcgtcctgcccaagtttcctgataaaagtttcgttcttgacgtttatattccaagacctttcaataaaatcttcattgttgatataaatccgtttgccaggaagacagattctttgctattttcatggaacgagattgctgcgatagcacctccgaagaatgatgttgaagattatgaattaaggttagtgacgaggcataacacggggagattcgcttcgaaagagcattccgaaaatcatgttccacaggatctcgtagaagctagtttaaatcctgaagcaatccgagagctcactcaaaaatggaaagaactactctctcaacaggcaaaggaagaaagcagtgatagtgagagtgaaact

SEQ ID NO: 174534 - DNA, 1368 bp, Saccharomyces pastorianus
caacaaaccggatcgggccaaaactatgcgacgatcaatcaacaacaattttccgagttttacaactcctttttaagtcatttaactcaaaaacagacaaacccttctgtcacgggtacaggcgcgtctagtaacaacaacagtaacaacaacaatgttagtagcggcaataacagcactagcagtaatcctgcccagctggcagcctcccaattaaaccctgccacggctgctgcggccgccgcaaacaatgctgctggcccggcttcgtacttgtctcagctcccacaggtgcagagatactacccgaacaacatgaacgctctgtctagtcttttggacccttcctctgcaggaaatgctgcaggaaatgctaacaccgctactcatcctggtttgttaccacccaatctgcaacctcaattgactcaccaccagcagcagatgcagcaacagctgcaattacaacaacaacagcagttgcagcaacagcagcagctacaacagcaacaccagttgcaacaacaacaacaacttcaacaacaacatcatcatctacaacagcaacagcagcaacaacagcatccagtggtgaagaaattatcttccactcaaagcagaattgagagaagaaaacaactgaaaaagcaaggcccaaagagaccttcttccgcttatttcctgttttctatgtccataagaaatgagttgcttcaacaattcccggaagcaaaggtccccgaattgtctaaattggcttctgcaaggtggaaagagttaacggatgatcaaaaaaaaccattctacgaagaattcagaaccaactgggaaaagtacagagttgtgagagatgcttacgaaaagactttgcccccaaagagaccctctggtccctttattcagttcacccaggagattagacctaccgtcgtcaaggaaaatcctgataaaggtttaatcgaaattaccaagataatcggtgaaagatggcgcgagttagaccctgccaaaaaggcggaatacactgaaacttacaagaaaagattaaaggaatgggaaagttgttatcccgacgaaaatgatccaaacggtaacccaaccggtcactcacataaggccatgaacatgaatttgaatatggacactaaaatcatggagaaccaagacagtatcgagcacataaccgcaaatgccatcgactcagttaccggaagcaacagtaacagtaccaacccaaatacgcccgtttctcctccgattacattacagcagcagccgctccaacagcaacaacaacagcagcaacaacaacaacacatgttattggctgaccccactacaaatggttcgatcataaaaaatgaataa

SEQ ID NO: 174535 - DNA, 279 bp, Saccharomyces pastorianus
gatgtcactatcgatgaagatcttgtggaccagaataagcccggtgacagagtcaacgtcatgggtgcattccagtcgctgagtgctgggggtatgaaccaatccaactctaacacgctgattgggttgaagacgctgatcctaggtaacacggtatatcccatgcatgcaagatctacacgtgtctttgcaaggcaagtcttgacagatttagacataagaaacatcaacaaactgtcaaaaaagttaacgtttttgttgttttggcccagtccctga

SEQ ID NO: 174536 - DNA, 792 bp, Saccharomyces pastorianus
aatggaaaggctcctttgcacacgtccatcaataattctagtacatcttcaaatgatgtcctgttagaagccttcacaaacactcaaagaatatgttcaaatttaaagcaagagctacaaaagcagcaacaggataatgcaaagttgaaagttcgactacagtcgtatgcttccaattctgataagatcaatgaaaaagtcggaaaatataaatcttgtttagaaactcttcaagaaaggattgcaacgttgacgagccataaaaataatcaagaaactaaattgaaagatttaagacaaaaccaccaactatatcagagaaggataagcggatttaagacaagtattgaaaacttgaacaaaacaataaatgatttagggaagcacaaaaaggaggcggatgcagaattaatgaaaaaaggtaaagagattgaatacctgaaaagagaactagatgattgttcaggtcagttgagcgaagaaaaaatcaaaaacagttccttaatacaggaaatgggaaagaatagagaagaaatgattaaatcaattgagaatttcttttcagaagataaagcacaccatttactgcaatttaacaaattcgaagaaagagttcatgatttgtttgaaaacaaattacaaaagcacttcgatgttgcaaaagatacccttaacgtgggcttgaggaacaccactgtagagttgagtagtaatacagagaccatgctaaagcagcaatatgaagatatcaagaaaatcttgaacaaaaaatgtcatccagtaaggatgtaa

SEQ ID NO: 174537 - DNA, 138 bp, Saccharomyces pastorianus
ttactacaagtccttctcgagcacataggaatcctcaaaatggaatcgatatttctacataataatattacgattatttctgctttcgttttatatgtttcattatcctattatattatcaatccttgcatttcagct

SEQ ID NO: 174538 - DNA, 114 bp, Saccharomyces pastorianus
atgaatctcagaacaatagatgctaatatgagttctggaataggaaatgaaatggtaaagcttcccgatgacttcgagaattatatctcacatatatacctaataagaaaaaag

SEQ ID NO: 174539 - DNA, 141 bp, Saccharomyces pastorianus
atgaccattatgggaacaaatggtgtgcaaacctgggattgtgcgtttgccattcaatactttttcgtcgcaggcctcgcagaaagacctgaattctataacacaattgtctctgcctataaattcttgtgtcatgctcaa

SEQ ID NO: 174540 - DNA, 483 bp, Saccharomyces pastorianus
atgccacaagtacagtcgtggtttcctgttcagaaacaaccgacgctagcggtaacatttacaccattaccacaactgtcccatgctcatctaccactgccaccatcacatcttgtgacgaaaacggatgccatgttccagcaccaactgctaccgacgcaactgcaaccgtttcctccaagtcatacaccactgttactgttactcactgtgacaacaatggctgtaacaccaagactgtcacttctgaatgttctaaagaaactgcagcaaccaccatttctccaaaatcatacactactgttaccgttactcactgtgacgacaacggctgtaacaccaagactgtcacttccgaggcttccaaacaaacatcattggccactagcacagtcaccaagtctgctgctccaacttctcatactgctgcttccagcaccttcactggtattgtcgttcaatccgaaggtatggctgctggtt

SEQ ID NO: 174541 - DNA, 843 bp, Saccharomyces pastorianus
cctacttacacacctgatgattatcctaatttgaaaggtaggacggctattgtgactggtgcaaataccggcattggccttcacgtcgccaagatattatacgagaaaaattgtgacgttattatagtagtgcggactgcagctaaaggcgaaaaagctcgtgacgagatactggcaggcgccccagactctaagggctccgttatcattgcagatggttgtgacttccttgatctcaacacagtcaaacctactgcgaataagatcaaaactgcgctgggtgacaagccattaaacgtcattattcacaatgcggggttaatgtcacctattaataccggtatctccaaacaaggtatcgaagccatgtttcaagtcaatgacatgggtccacagttgttgcaacacttcttagatcctctgtttttgaagaaggatagtgatctaaaaagaatcgtatgggtcagttctgcatcccatttaatagctttcagagaatatggtattaactgggaaaacccagggtttgaaggtatagatgctggaaaaaggccagcagcagcggcactctacggacaatccaaagcagccaatataatgcaggccaaggcatggagtacaaaaaacaaaacgatcgtagatgagattggatgtgtctcagtgtcctgttatccgggcaatttgaataccgatcttacgagagattggaatcccttattaagaaagataggtggctatctattttgggatgggaaatacggcgcttatactgaattatacggtgcgttatcccctgcgctgacgacaaaagaccaaggtgcttacgttgttccctttggtgaa

SEQ ID NO: 174542 - DNA, 1428 bp, Saccharomyces pastorianus
atgaaacatatgtccatgtgcttactaatgtctttgagtagttcccagtttatagaattcccgctggttcaggggatgggctttgtcacggctatttaccacgatttgggttttgaattaagaagcgccgttggtttcaggagcttagagcgcataagcgtgaatgaaagatatggtaaatataatatacaacttgagaataataggaattggatactttatttgacctcacctgattactcttttccacaagattttcaaatttcattactcgacagcaatacaataatatcatctcataaaatcaatggtcttatctgtcaattatctgcagactccgtccccagtattgacatggcagcgggctgttatccagtatactgtgacctatcagggcaaactgttgatgaacatttcacaaattacagatttaactatacggttgcaggctactcgcagtctggaactactctaatgtatgctttaccacatcataaagcggcattcacaccagaaatgcaggaacgtgaaattgcctcaagcctggattccacagttaaaggcttaatgactggttatctcacaaacagttttgatatgcaggttcaagtacctcaagaattgggctttgaacctgtcgcgttatctttgaataagaaggcagattacagtcaagaaaagctatctaaaattcgggaagctgctgttcaagaagttcaattgagtgaccctcaacaagaatcaaacatagattctatgtatttctctggtaagatacttgcaaagtatgcgtggattctttatgtgacacattacatccttcatgatgaaaatttaacaaaagaattattatctaaactgactattgcaatggagagattcatcagcaatcagcaagtcttacctttaaattacgacgttagttggaaaggcataatttcatcaggctcttctagccaagactttggtaactcttattataatgatcatcattttcattactcttatcatgtcataacggctgccattatctctttagtcgattctgatttaagtggagttactaacaactcctggttagaaaataatagagattgggttgagtgcttaattagagattactctggtgttgacaacgatgatccgtacttccctcaatttaggtcatttgattggtttaatggccattcatgggccaaaggactatttccaagtggtgacggtaaagatgaagaatctacttcagaagatgtcaattcttgctatgcgataaaattgtgggggttggtaactggaagttctaagttaactgacatagcgaacttacaactcggcatcatgagaaatgttttccagagctacttcctatacgaaagtaataatactgtccaaccgaaaggatttatcggtaataaagtaagtggtatt

SEQ ID NO: 174543 - DNA, 96 bp, Saccharomyces pastorianus
gcacggtgccttaaccaactgggccaagagaccaggaatttatgggatatcctgcgtctaaatcaacttgtgtgtacaaaaagccacgaggtgtaa

SEQ ID NO: 174544 - DNA, 282 bp, Saccharomyces pastorianus
tcatcgctgacctccagtatacttttttggtcgttgctttgcaaagacgtcaaccggacaatgtactcgagtagcgtgatcgatgaagttttgtcttccaatagtttttcttcctcgctttccccctcttccccactttcgcccccttcctcattatcttcttcttcttcttcttcttcttctttttcttcttcttcgtcgtcgtctttttctacttcttcatatccacttaccgcataccaagtaatgtcttcgataggcggcttctctgctccagtagtc

SEQ ID NO: 174545 - DNA, 96 bp, Saccharomyces pastorianus; identical to SEQ ID NO: 173737

SEQ ID NO: 174546 - DNA, 114 bp, Saccharomyces pastorianus
aatacttccgagaatatgaatgtcttacagtttcttggatttcggtctgacgaaattaaacatcttttcctcggggatcctctagagtcgacctgcagcatgcaagctgccgtt

SEQ ID NO: 174547 - DNA, 90 bp, Saccharomyces pastorianus
catgagaggttggtgaattttgagataattgttgggattccaatgttgataaaggctgttatattatgtatacagaatatactggaagtg

SEQ ID NO: 174548 - DNA, 120 bp, Saccharomyces pastorianus
ctttctcaccctttgactgagaagactatagaatacaatgaatacaaaaacaaccaggcttcgactggcgtcgtcccgcgattctacaattgtgtggggtctatgcaggatatcgtttga

SEQ ID NO: 174549 - DNA, 219 bp, Saccharomyces pastorianus
aaatgtacttatttacaacctttgagaaaaagagggcccaaaaatattagatcgagaagtttaaagaaaattgccgaaacgcaaacgttcagtgagaacaacaactgtatgacagctttagaaatatctataggaatcattatatcttacatgttattctgttctgttgtagtaactaatttcagagatcttttcggatgctactacccctgtttataa

SEQ ID NO: 174550 - DNA, 633 bp, Saccharomyces pastorianus
agttctacttcaattgccaacacattttcttcatcatcttcttcagttaattcgctccgtactaaaactgaaataaatggtgtttttgtcccattgacacattgttattcctctacatgctctctggaaaaactttgctactctatttcttgccccaatcgtttacaacaacaggctaatttacatttaaaattaggtggtggtcttaagagaaatatttcgttagctctcgataaggaggatgatgaacgaatttcctggacaaattctgtaccaaagagcgtatgggaatcattatccaaacaacaaatcaaaaggcaagaggcaatatatgagttgtttactacagaaaagaagtttgtaaaatctttggaaatcatccgagatactttcatgaagaaattattagaaacgaatattattccatctgatgtaaggataaattttgtaaagcacgttttcgcacatatcaatgaaatatattctgtcaatagagaatttttgaaggctttagcacaaaggcaatcattaagcccaatttgtcctggaattgcagatatatttttgcagtatcttcctttctttgatccttttctgtcatacatagcatcaagacgacctgcaggcatgaca

SEQ ID NO: 174551 - DNA, 198 bp, Saccharomyces pastorianus
atggacttgaatcaaagtaaggaaaaaaagggccagcatgttggatgctgtggctccaggacagacctgtctgctgacacagtggaactgatagaaagaatggacagattggctgaaaaacaggcgacagcttccatgtcgatcgttgcgttaccgtctagcttccaggagagcaatagcagtgacaggtgcagaaag

SEQ ID NO: 174552 - DNA, 966 bp, Saccharomyces pastorianus
ctgtctcgaccttcaagccgattcctatccactaaaaggggccctggacctgcagtgaaaaaattaattgcaattggggagaaatggaaacagaagacaacccgtggcttgcctaagcaggatactctgaatagcgggtcgaaatatattctgtgccagtttccatatccttctggggcgcttcacataggacatctccgagtttatgtcattagcgactctttgaatagattttacaaacaaaaagggtacaacgtgatacatccgatgggatgggatgcttttgggttacctgccgagaacgctgctatagaaagaagcattaatccggccatatggactagggacaatattgcaaaaatgaaacaacaaatgcaaagtatgctggcaaattttgattgggacagagaaataactacatgtgatcccgaatactataaattcacccaatggattttcttaaaactttttgaaaatggcttagcttatcgtaaagaagcagaaattaattgggatcccgttgatatgacagttttggctaatgaacaagtggatgcccagggccgttcttggagatcaggggctattgtggaaaagaagcagctaaaacagtggtttttgggaataacgaaattcgctcctaaattgaaaaagcacttgaaccaactgaaggactggccttccaacgtgaagcaaatgcaaaaaaattggataggcgaatctgtgggtgcagaattagtgttcaaagttgcggaccccaaatttgaaaacttgattgtctttacaacaagaccggaaactctttttgctgtacagtatgttgctctcgcattagaccacccaattgtacaaaaatactgcgaggaaatgccggatttaaaagagtttatacagaaaagtgatcaattaccaaacgatacgaaggaaggatttcagttacctaacataaaggccgtaaatccttaa

SEQ ID NO: 174553 - DNA, 312 bp, Saccharomyces pastorianus
atgaagttattgcatttatatgaagcgagcttaaaaagaaggcccaaaactacgaatgcgataatgacaggtgcgctatttggaattggtgatgtttctgctcaattgttgtttccaacatccaaagtgaacaagggttatgactataaaaggacagctagggctgtcatctatggttctttaattttctcctttataggtgacaagtggtataagatcttgaacaataagatttatatgcgtaatagacctcagtaccactggtctaatatggttttacgggtagctgtcgatcaattggcgtttgcgccg

SEQ ID NO: 174554 - DNA, 138 bp, Saccharomyces pastorianus
atgcaatttaagaagctaactcatgctcaaagaactggtttaagccaaatcccaaatcgtagatataccttatggtggtcaccaactattaacagagcaaatgtctatgtcggttccttggtgcacttggatctgact

SEQ ID NO: 174555 - DNA, 579 bp, Saccharomyces pastorianus
gatgcaacgctcgcgcacagacttttgatagacctaccgaccgtcaatgctacgccatctgaggatgatgacgatacaaaaattccgttaatttggtatgatacgcaaggtgatgaatttcaagagactgcagatgaagctactatccttggatctaagtataatgagggcgaaattgctattgtaaaagaacacattgagaatttaaggtcattcaacgtcccggagaactctataggtgttatttctccataccatgcacaagtttctcatctgaaaaaattgatccatgatgaattagaattaactgataatgaaatatcaactgtagatgggttccagggccgtgaaaaagatgttattatattgagtttagttcgtagcaatgaaaaatttgaagttggtttcctgaaggaagaacgaagactgaacgttgccattacaagacccagaaggcaactagttgttgttggccatatagaagttctgcaaaggtgcggtaacaagtacctaaaaagttggtcagaatggtgtgaagagtacgctgacgtaaggtacccctacattgacgattatttg

SEQ ID NO: 174556 - DNA, 96 bp, Saccharomyces pastorianus
tgttgctgttgctgctgttgctgctgctgctgttgttgttgttgttgctgctgcttcgctcgtcctgccggtggcttgtcccatactactctttgc

SEQ ID NO: 174557 - DNA, 264 bp, Saccharomyces pastorianus
ttttgccagtatgttcatggtgcaagagcagttcatcgtccaaaggagaaaatgactacttccgaggaagttaaaccttgggtccgtacaatttacggatccctaaatgaaattgtcacaccaacggttattgctggcgttactttttctgctaagccagatccaactccgaatctattacaaccttgggtatctttgaagaaagatggtactccacaggactctagaggatccccggtacgagctcgaattgtatatgtcata

SEQ ID NO: 174558 - DNA, 135 bp, Saccharomyces pastorianus
atggagagaatagataagaagtttcttggagcatcaaagaaaatcaaaccagacaaggcaattggcagcttgttcaaagcccctaccatcgaatatgtagtagacgaagtaacacgaacacaccaaccggaacag

SEQ ID NO: 174559 - DNA, 600 bp, Saccharomyces pastorianus
atgcatgaccttcaaagagcatttgaaggctgcgtagacggcgatgacgtaaggaacttgaagtttgacttggtactcagacaatggtgtgacatcaaccctgcgctcgaatttagagtcttcgttagagatgcccatgtcgtcggagcctctcaacgcgatttgaattactatgaatacttggatgaactgtcggacacctttaaggaccttattgacgaattggtacacgatgtcatcctaccaaaattctctgacaaaagttttgtgctagatgtatatattccaagacccttcaacaaaattttcatcattgatataaatccatttgccaggaagacagactccctgttgttttcatggaacgaaattgctacaatagtgccttcgacagatggcagaaatgacgaggattatgaattgagattggtaacgaggcataacactggtaggtttgcttccaaggaacactccgaaaatcacgtcccgcaagatctcgtggaggccggtctataccccgaagcaatcccgagagcttacgcagaaatggagagagttactcaatctacaactcagaagaaagtatggagcgaggataag

SEQ ID NO: 174560 - DNA, 1410 bp, Saccharomyces pastorianus
  modified_base (286)..(286): a, c, g, t, unknown, or other
catgttaacgcgtcgtatgcgcattcgcaaggatcctcgacaagcgtttctcgtgtagagatggagaagccagcaacaaaggaagtctttgaagatcctaccccaaaaaagtttgaattggacgatgatgaggccggtaagacatcatctgtattcaatccagacctaaatctagaagaagaagtgagagccttggatgaattaggtgattcattcaaaagagatcgctccttttggggcaaaatgaaagctttggaattcgaagttgaatttgaaaataaaaaanatatggttttaatgctgggaacttttgcagcatttgctggtattctatctggtatagatcaatctattatctctggtgcttccattggtatgaacaaaatgttgcacctttctacacatgaagcatcactagtttcttctttaatgcctctaggtgctgtcgctggttctatattgctaactccctttagtgaatattttggtcgtaaaaagtctttggctatttcttgtgtcttttacacaattggtgctattgtttgtgcagctgcttctaaccatcacgaaatgtatgctggtagatttttgatcggtgtcggtgttggtttagaaggtggtggtattggtgtatacattgcagaatctgttccgtcttcagttagaggtagtctggtgtccctgtatcaatttaatattgcgctgggcgaattgtttggttatattgttggtgtgattttctttgatgttaagggaggctggagatacatggtcggttcgtcgcttgtgttctcgaccacattgtttattggtttattattcctgcctgaatctccacgttggttgatgcataagggccgtgtcggtgaatcctggaacgtctggaaaagactaagagatgtgaaagaagaaggcaataaaatcgaatttttggaactcagagacgttgcttcgcacgacagagagttacatgcaaacgaatcaagatttcaatcattgtttgatttggtccgtgttccacgtaaccgccgtgctttggtatattcttgtatgatgattggtctgggtcaattaactggtattaatgccatcatgtattacatgtccacgctaatgaagaatattgggttcgatgataaacaatctgtagcaatgtcaatggttggtggtgcagcactattaattggtaccgttcctgctattttatggatggatagatttggtagacgtacatgggcaatgacaatcattatatttatcgttggtttggtgctcgtcggtgtcggctatcaaataaacttgaaaacacacatggcagcagcagaaggtgtgtatttgactggtcaaatcatatataacatggcttttggatcatatgcagcattaacatgggtcctaccttcagagtca

SEQ ID NO: 174561 - DNA, 690 bp, Saccharomyces pastorianus
catttgatgctggttcctgagatgctgagagtcaagatccaggaaaagcgtctgcaaaatgtcaaggtcgggtggtttttgcacacgcccttcccatccagtgaaatctacagaatcttgcccgtcagacaagagatactgaagggggtcttgagttgtgacttggtcgggttccacacgtacgattacgcaagacatttcctctcctccgtgcagagggttctcaacgtgaacacgttgcccaacggggtagagtaccagggccggttcgttaacgtgggggccttccccatcggtatcgacgtggacaagttcaccgacgggttgaagaaggactctgttcaaaagagaatccagcaactgaaagagaccttcaagggctgcaagatcatagtcggtgtcgacagactagattacatcaagggtgttccgcaaaagctgcacgccatggaggtgtttctgagtgagcacccggagtggaggggcaaggtcgtcctcgtacaggtcgcagtgcccagtcgtggggacgtggaagagtaccagtacctgaggtctgtggtcaacgaattggtcggcagaatcaacggccaattcggtaccgtggagttcgtccccattcatttcatgcacaagtccatcccctttgaagagctgagacctgcaggcatgcaagctggcactgccgtcgtt

SEQ ID NO: 174562 - DNA, 630 bp, Saccharomyces pastorianus
atgcccgtgggtccaaacgcgtcgtctactgtatctgcatcagctccagcttcaacaacaacgactcttcctgcctcttctgcagcactctctgccggtaccagttctgcgtcaacaaatactccaacagctatacaacaagagattgcttcatcaaacgcttctgatgttgccaagacattggcatctatctcgttagaggctggtgagtttaatgtcattcccggtatatcgtcagtgatccctaccgtgttagaacaatcatttgacaactccagcttgatatcgtctgttaaggaacttttattgaataaagaccttatccatccgtcgatattattattaacttctcatctagcacactataaaatcgtgggatccatcccacgttgcatagccatgctagaggttttccaaattgttatcaaagactatcaaacacctaagggaactaccttgtcacgtaacttaacaagttatttgtcacaccagattgatcttttgaaaaaagctagacctttaagtgttactatgggtaatgctatcagatggttaaagcaagaaatttcattaattgacccatctacccccgacaaagccgccaaaaaagactttgtgagaaaattgggc

SEQ ID NO: 174563 - DNA, 681 bp, Saccharomyces pastorianus
tcgactggagccaatgatttagtgacactactaatgggttccgaagatgacatcacagtgctggtggtctcgacttcagatgatgtagcagtgctggtggtctcgacttcagatgatgtagcagcgctggtggtctcaacttcagatgatgtagcagcgctggtggtctcaacttcagatgatgtagcagcgctggtggtctcgacttcagatgatgtagcagcgctggtggtctcgacttcagatgatgtagcagtgctggtggtctcgacttcagatgatgtagcagcgctggtggtctcaacttcagatgatgtagcagcgctggtggtctcaacttcagatgatgtagcagcgctggtggtctcgacttcagatgatgtagcagtgctggtggtctcaacttcagatgatgtagcagcgctcgtagttaaattggaagagattgtagaagaaccggtgatctcggctggagccaatgatttagtaacactactaatgggttccgaagatgacatcacagtgctggtggtctcgacttcagatgatgtagcagcgctggtggtctcgacttcagatgatgtagcagtgctggtggtctcaacttcagatgatgtagcagcgctggtggtctcgacttcagatgatgtagcagtgctggtggtctcaacttcagatgat

SEQ ID NO: 174564 - DNA, 99 bp, Saccharomyces pastorianus
atgtcttggaggtactctatcttgaccgtagatggaagctttaaaattttcatcccttgggaaatattcctcacgtggaattttttgagcgctgcatgg

SEQ ID NO: 174565 - DNA, 1392 bp, Saccharomyces pastorianus
gattcccttcgcgctgcgcaagctatcttccagaaccattccaatgaggtcagcagtccatgccctccagtaacggtgagcaggaatcctcaaactaggttatcagagccatcgctacaaaagtcagggcggaaacaagaacaaaagaaggcacgcatacgaacaaaacaggtacctaagattaaaacaacggcgcctaatgatgttgagttgtctaagaaacacaggtcaagccctgcaggtaaagataatgttagtagtactgctcaaatggcagctgctttagcgcattcccaatcgaaacttagttctgacaataactcctcccattcttcggcattggatacactaaaagttctagaaactccgaacttgaatggcttgctgggcattcattcacgctcaagctcaagaaacggctccaatgaatcactgacgcctggccaaagaactcccgacaatagatctcaagagaatttacttacttcctttagtagcggtagaaggctatcctcgagctctatggagcctgcaactaataaagacagcaacaaagctctgcccaaacgcaggccgtctcctcccttgcaatcatcacttgtcggcagtggtcagcttcatgaaaatgaaaacctatcatcaattagcatcgattccagacatagtctcaatccggacacttcagacgttatttctaataggtcacaaacaagtctatctcaaacaattaatcaactctcgttatgtgtatcagagccatctattgcaagctcaaacactactactacgacgagcaaccagggaagtggtttgcccaacttggttccgaactattcatccgatatgaggaagaagaagcttgttaacaagttcaaaaggaaagtatttggtagtaagcccaagcatttatcttcacaatatgaaatggatgcaagcagcgaagaattgggacaacatgaacaacaaccgagtatgagatttaaaacaacattacgtaaaacctctgtaagtacaaacgcagaaaatgatcatgcatcctctctacatgagggaaatctgaggtataagtacaatccgtccaacgacacgtatgatgtgtatgacgatactgattcagattctgaatctgatcagaaccaggacgccttgaccaagccacgcaaaagagatagaattaagagaaagatcaggaattctgccaataaaactgcacatcataggcctatccaccgcacgagagatcggaaattcaatgaggataaaccctggaaatcacataccagatataactttcgtaacagacaacgaaaggaagcgttacgaaagcatgtgggtaagcaacagacaccgtcatttgaacctgttgagctggtggccctctataacgggtga

SEQ ID NO: 174566 - DNA, 99 bp, Saccharomyces pastorianus
cacttcatgaccaccggtaacgctctaggatctgtgaacatgaccactggtgtcgataatttgttctacattgacaagttccaagtaagggaagtaaaa

SEQ ID NO: 174567 - DNA, 648 bp, Saccharomyces pastorianus
gcgcttaaaaaggcgtgttccgttgaggagaccgcacctaagagaaagcacgtacgcgcatgcatagtgtacacatgggaccatcagtcttccaaagctgtttttacaacccttaagacgctgcctctggccaatgacgaagtgcaactgttcaagatgcttattgtactgcataagatcatacaagagggacatccgtcagcgctagctgaggccatccgggatagggactggatcagatctctgggtagggtacattctggcggttcgtcgtacagcaaactgattcgggagtatgtgcggtacctggttttgaagctggactttcatgcgcaccatagagggtttaacaacgggacgtttgagtacgaggagtatgtgtcactggtttcagtttccgacccggacgaagggtacgagacgatcttagatttgatgtcgttacaggattctcttgacgagttctcgcagatcatctttgcgtcgattcagtccgagaggagaaatactgagtgcaaaatttcggcgctgatcccgttgattgcggagtcatatggtatttataaattcatcacctcgatgctgagagctatgcacaggcaattgaatgatgcggaggacctgcagcatgcagctgcacttgccgtc

SEQ ID NO: 174568 - DNA, 552 bp, Saccharomyces pastorianus
aagaactggaaaagaacggtgaatttactgtcaagtaatggcgagatcgtaaaactagatagcagtttggttactatcaaaatgaagacaactttgcaacatatacgagagtacattcctaatgtcattgagccctcgttcggtttaggtcgtatcatatactgcatcttcgaccattgtttccaagttcgagtggatagtgagtcaagaggttttttctcttttccattacagatagcgccgatcaaagtatttgttacgacaatatcgaataacgatagcttccccgctatacttaagaagatctcgcaggctttacgtaaaagagagatatactttaaaattgacgattccaatacttcaattggtaaaaaatacgcccgtaacgatgaattgggaacaccatttggtatcaccatagatttcgaaactataaaagaccaaacggtgacgttaagagaaagaaattctatgaggcaagtaagaggcactattactgatgtgatttcgaccattgacaaaatgcttcacaaccctgatgaatcggactgg

SEQ ID NO: 174569 - DNA, 180 bp, Saccharomyces pastorianus
atgagcggtgttacagacgatatgaaacaagcaagaagggaacaactcttagacgtatctctcctggacgttcatagagtcgccgaaaaatatctactaaacaaagaaggggtgagtacggtcattggacctggaatcgaggggaagactgtttcaccaaattgggaggtgaaggaactg

SEQ ID NO: 174570 - DNA, 717 bp, Saccharomyces pastorianus
atgcctagcccccaatcgtctattgaaagcaccatagacattcgaaatgctcccggtacagagactcatgtagctccacctgtagaaaaggagtggtcagatgagtttgataatgaagtcataaacggggatgcaattgaaccaccaaagagaggactcctaggttatcttatcatatacttactctgttacccaatatcctttggcggtttcctgccaggttgggatagtggtatcacagcaggtttcattaacatggacaactttaaaatgaattttggttcttacaagcacagcactggtgaatattatttgagcaacgtgcgtatgggtcttcttgtggctatgttcagtattggatgtgccataggtggtcttattttcgcccgtcttgctgatactttaggtagaaggctggcaattgtgatcgtggtgttggtatatatggttggtgcaattattcagatcagttcaaatcacaaatggtaccaatactttgtcggtaagatcatctacggtcttggtgctggtggctgttcggtgttgtgtccaatgcttttgtctgaaatagcccccacagatttgagaggtggactggtctcgttgtaccaattgaacatgacgtacggtattttcttgggttattgtagcgtttatggaacgagaacatacgataacactgcacaatggagagtggccctcgggctttgcttttta

SEQ ID NO: 174571 - DNA, 393 bp, Saccharomyces pastorianus
atgcctaaaactagttatttaaacaaaaattttgaatctgctcactataataacgtacgtccctcttaccctttatctttagtcaatgagataatgaaatttcacaaaggcacacgcaaaagtttggttgatattggatgtggcacaggaaaagcaacttttgtcgttgaaccctattttaaggaagtgattgggattgatccttcttctgctatgctttcgattgctgagaaagaaacaaatgaacgtagattagataaaaagattagatttattaatgcgcctggtgaagatttatccagcattcgaccagaaagtgtagatatggttatttcagcagaagccatccattggtgcaatttagaaaggctgtttcagcaggtttcctctata

SEQ ID NO: 174572 - DNA, 1179 bp, Saccharomyces pastorianus
  modified_base (1121)..(1121): a, c, g, t, unknown, or other
catgatatatctcgttatgtgagggcaaaattcctcgattatacaacagataatgtcagcatgtatccctccccaacaggtgttatgatcggtatcgatttggcttataacatgtatgatgcctatggtaattggttcaacggattaaaacctttgatacaaaatagtatgagaacaattatgaaagctaacccagcattatatgtccttcgtgaacgtattagaaaaggtcttcaaatatatcaatctagtgtacaggaaccatttttaaactcctcaaactatgccgagttattcaataacgacattaaactcttcgttgacgacactaatgtgtatagagttactgtccacaagacttttgaagggaacgttgctacaaaagcaattaatggttgcattttcactttaaatccaaagactgggcatctgtttctgaaaattatccatacctctgtatgggccggtcaaaaacgtttaagccaattggccaaatggaaaacagctgaggaagttagtgctcttgtgagatctttgcccaaagaagagcagccaaaacaaattatcgtcacaagaaaggcaatgcttgatcctttagaggttcacatgcttgactttcctaacatagcaatcaggccaacagagctgcgactaccattttctgctgcaatgtcaatagataaactttctgatgttgtgatgaaagctactgaacctcagatggttctgtttaacatttatgatgattggttagaccgtatttcatcgtacactgcattttctagacttacactacttttaagagctttaaaaacgaacgaggaaagtgccaaaatgattctactcagtgaccccacgatcactatcaaatcgtaccatttatggccttcattcactgatgaacaatggatcactatcgaatctcaaatgagagatttgattttgactgagtacggcagaaaatacaatgtcaatatatctgccttaactcaaacggaaattaaagatattatattgggtcagaatatcaaggcaccatctgtgaagagacaaaaaatggttgaattagaagctgccaggtcagaaaagcagaaagacgaagaaactgcaggttcttcaantgttatgaagattaaactatcaatggccagtacgaaatatgtgtataatttcggtaat

SEQ ID NO: 174573 - DNA, 1101 bp, Saccharomyces pastorianus
ttgaaattgactatctgtgaaccagtattaggagcgtgcgggcatgggtctcataccaactgttatcgtggccatatgaagtcgattcgcggaatacaaaaccaaactacagaaaatattccattatcgtatggttcagggttgatatattgtcccgtatgcaattccttaagtaattcatttctaccaaaaacaaatgatatagataagagaacttcgagccagttttttatgtgtattgaaaagcgaagtgaagcggaagaaaaccttgacccaatgagctctatttgtattaaagcagcgatgattctaggtgatcttcagggtaaaaaagtcacgactatcgaagatgcatataaagttgttaatagtgtttttattaatactatttcaaatactgagctcagattaagatcgcacaaaaaggaaggaaaaatagtgaatatggaaagaatatccagtcagtgcattttaaccttacatttagtttgtgagctaaagtcgtttatttataaaaaattggtaaattcaaaaacattcagcagcgaaatctctcgtaaaatatggaattggaatgagtttctaataaagggtaataatgtgaatctacttttgtatatgagtcaaaattttgataatattgatggaggaaaaaccccgcaaccgcctaacctatgtatctatgaaatgttcaaaataaggttccatcaactactactgttgcttgcaagagatatgatgagagtaaacttttacaaagactgtcgaaataaaatcaaaatatcatcaaacggatctgaggaaccatcgacaagcttttcatatctattcaatacttttaaaaagtatgttgatctctttaaaccagacgacgttcggtttgattttacaagtttagagaaaattaaagactttatatgctctctattactagagtcattgtccattttttgtagaagaaccttcttattattcaacattcagtatgatgatgatggtgatgatgataataataataaccgcagcaataatttcatggacgtcaaacagcgtgaaatagagcttattttccggtattttaaattacccaatttaactcac

SEQ ID NO: 174574 - DNA, 159 bp, Saccharomyces pastorianus
gctaagaaaattggtgcattgcgttatttggagtgtagtgcaaaattaaataaaggtgttaatgaagcattcacggaagcagcaagagttgctttaacctcagggccagtagcaactgaagcgaagagcgacgatggatccggctgtaccattatgtag

SEQ ID NO: 174575 - DNA, 1113 bp, Saccharomyces pastorianus
gactgtttacaaaaggtcgacgatgcattgcttttaaataattatctatatcaaaatttccaattcaaattttctgaaaatcttggtagtcaacgaacgatagaatttaatataatgatcaaatttttcaagctaaaagtgtttgaggagcttaatggccagttagaggactactttgaagatttagagtttttgttacaagttttccccaatttcacttttttaaaggcttacaatgctaccattagttacaacaatttggattatgttaccgcagaaagccgatttgatgacatcgttaaacaagacccgtaccgtctcaacgatttggaaacctactccaatattctatacgtcatgcagaagaattcaaaattagcctatttggcgcaattcgtctcccaaatagatagatttagaccggaaacatgttgtatcatagcgaactattacagtgcccgacaggaacatgaaaaatctatcatgtatttccgtcgagcactaactttggataaaaaaacaacaaacgcatggactttgatgggtcacgaatttgttgaactaagcaattcacatgctgcaatagaatgctatcgtcgggctgtagatatatgccctcgagacttcaaagcatggtttggtttgggccaggcttatgctctcctggacatgcatttatattctctttactacttccagaaagcttgcactttgaaaccttgggatcgtcggatttggcaagtattgggagaatgttatagtaagacgggaaataaggtagaagctataaaatgctacaaaagatccataaaagcttcacaaacggtcgatcaaaatacttcaatatattaccggttagcgcaactatatgaagaacttgaagacttgcaagaatgtaagaagttcatgatgaaatgtgtagatgtggaagaacttctggaaggtatagtaacagatgaaaccgtgaaggctaggctttggctggcaatatttgagattaaggcaggaaactaccaattggcttatgattatgccatgggggtatctagtggaacgtctcaagagattgaagaggctcgtatgctggctcgggagtgcagaaggcatatgtag

SEQ ID NO: 174576 - DNA, 108 bp, Saccharomyces pastorianus
tcaatcgctgctggtgtcgctgccatcgctgctactgcttctgcaaccaccactctagctcaatctgacgaaagagtcaacttggtgggattgatcaaccatacctaa

SEQ ID NO: 174577 - DNA, 294 bp, Saccharomyces pastorianus
aacgaacgtataagaatcctgccaaatttaagggtcttagcaaggtcttcgcctgaggataaaaggttattagtagaaacattgaaggggatgggagatgttgttgcggtcactggcgatggtacgaacgatgctccagctttaaagctagctgatgttggtttctcaatgggtatttccggtacggaggttgccagagaggcttctgacattattttgatgactgatgatttctcagctattgtcaacgctattaagtgggaagatgtgtttcagtctcggggatcctctaga

SEQ ID NO: 174578 - DNA, 714 bp, Saccharomyces pastorianus
tgtatgtctcatcatcctagtatgaacacaccaccggccgtgttgcctactcagctgtgggattctattcgtttagaacctgttgttgttaatcaaccaaacaggactactcctttgagtgctaactccactggcgtatcttcactaacaagacactctactatatcacgtctatctactggtgcattcagtaatgctgcttcagattggtctttaagttttgaaaaaaaacaacagtttgatgcaatttttgattcattagataagcaacatgctggttcgctaagctctgctgtgttggttccattcttcttatcctctagattaaaccaagagacgttagccaccatctgggacttagctgacatccacaacaatgctgaatttaccaaattggaatttgctattgccatgttcctaattcaaaaaaagaatgctggtgtcgaattgccggatgttatccccaatgaattattacagtcccccgctttaggactttatccgccaaacccacttcctcaacaacaaagtgcacctcaaattgccatcccctcaagagcaagtaagccttctttacaggatatgccacaccaagtttctgccccagcagttaatactcaaccaacagttccacaagttcttcctcaaaactcaaataacggttctttaaatgatttactggctttggacctgcaggcatgcaagcttgcactg

SEQ ID NO: 174579 - DNA, 216 bp, Saccharomyces pastorianus
gcatacgcacacggatgctacagtatataccactctcaagttaccctactttcatattccacaccatggcccattctcactaaatcagtactaaatgcactcacatcattatgcacggcacttgcctcagcggtctataccctgtgccatttacgcataacgcccatcattatccacattttaatatctatatctcattcggcgaccccaaatatt

SEQ ID NO: 174580 - DNA, 372 bp, Saccharomyces pastorianus
ctgctattgtcatttttggctttagcatttccagaatcagagtcggtatcggatgatatggtgcaatgcttttcgatgtctttttcaagattatcgtgttcaaaactgttgtttttcgtgctatcgtttgaatctccacccttctctaacccattgacctcgttactatcgtcttcatcttgctgttgctcttcttctttttcttcttcttcttctttttcttcttcttcttcgtcttcatcttctttttcttcttcttcttcttcttcttcctcttcttcttcttcttcttcttcttcttcgtcatcatcaccattatcctcatttccactggttttcactttccataaaaatccaaaacccatcacaagt

SEQ ID NO: 174581 - DNA, 456 bp, Saccharomyces pastorianus
  modified_base (369)..(370): a, c, g, t, unknown, or other
  modified_base (378)..(378): a, c, g, t, unknown, or other
  modified_base (400)..(400): a, c, g, t, unknown, or other
  modified_base (403)..(403): a, c, g, t, unknown, or other
  modified_base (447)..(447): a, c, g, t, unknown, or other
gcaaatagcattgacaattcattaagccaggaaagcgtctcaacgaacggcgtaacaaggatggctaacttaaaggctgatgaatgcggcagtggtggtgaaggagataaaacaaagcggttttcgatttcgagtattttgagtaaaagagagacaaaagacgtgcttccggaatttgcaggcagtagttcccacaatggagtactcacggcgaattcatcaaaggatatgaactttactttggaactaagcgagaatttgttggttgagtgtaggaaattgcaatcctctaatgaagctaaaaatgagcaaatcaagtctctcaagcaaattacagagtcattaagtgacaagattgaggagctccannctaacccnaaaaaaaaggtttccttcatgnaanaagaaagttggattttcaaccttaaaagaattttaaaacttggngaattttag

SEQ ID NO: 174582 - DNA, 84 bp, Saccharomyces pastorianus
atgaatgcacgtgtcgctgtcctcatcactgctgcaatactttctgcggctgtcactgctattgctctcctggaagctagacgg

SEQ ID NO: 174583 - DNA, 219 bp, Saccharomyces pastorianus
ttactacaagttcttctcgaggatatggaaatcctcaaaaaggaatcggtatttctacataataatattacgattatttctccttccgttcattatgtttcattatcctattacattaccaatccttgcatttcagcttccattatatttgatgactgtttctcaatttttatgtcatcttcttacaccgcatgtgataatatactactaacacgaatg

SEQ ID NO: 174584 - DNA, 513 bp, Saccharomyces pastorianus
attgccaacctcattttgcgtaatcgagaagttttgttcagagaaccgaagcgaggaattgacgagtatctggaaaacgattcttttcttcaaatgatacctgttaaatatcgtgaaattgtgctgcccaagttgagaagagatactaacaaaatgaccgcggctcttaaaaataaagtcgctgttgcaattgacgagcttacggtgccacttatgtggatgatccattttgccgtaggatacccttaccgttatccagagcttcagctactcgcttttgccggtcctcagcgcaacgtatacgtcgatgatacaacaagacgcatccaactgtacactgattacaacaagaacggttcatcggagcctcgactaaagacgcttgacggactcacctcagattacgtgttttattttgtcactgtgctaaggcaaatgcaaatatgtgcgcttggtaacagttatgacgcttttaatcatgatccctatagtgagtcgtattatgcgagccgc

SEQ ID NO: 174585 - DNA, 252 bp, Saccharomyces pastorianus
atgcacggcgcttgcctcagcggtctataccctgtgccatttacccataaagcccatcattatccacattttaatatctatatctcattcggcggccccaaatattgtataactgctcttaatacatacgttataccacttttacaccatatactaaccactcaatttatatacacttatgccaatataaccaaaaaattaccactaaaatcacctaaacataaaaatattctactcttcaacaataataca

SEQ ID NO: 174586 - DNA, 999 bp, Saccharomyces pastorianus
ggtgctctgatattaccagaaacgatttacagttatgatccatgcattgcactacattttgccgaacttgtcgtggatttcagaagttgtaattataatatggacataatggcggttctcaacgggacttcaataaagcggcacgtttcgaaacaaataaatgaagtatttgattttatacgtcgtaataacggtgctgatgagcaggagcacggattgctttcggacctcaccattcatggacatagaatgtatggattaccacccacagaacctacctacttttgtcaatgggatatcaatctcggagatttatgcattgattcagatattgaatttataaagggattctttaattccttttataagataggttttggctacaatgacttggaaaatatattattatatgacactgagaccattaatgatatgacctcgctaactgtgcacgttgaaaaaataagaataggccttaaagatccggtgatgaaatctcaatcagttattagtgctgaatcgatattgtttactttgatcgactttgaaaacgaaaaatattcacaaagaatagacgtgaaaattccaaaattgacaatttcgttgaattgcgtgatgggcgatggcgtagacacatcatttctcaaattcgaaacaaaattaagatttacaaactttgagcaatacaaggatatcgataaaaaaagatcagaacaacgcagatatataacaatacacgattcaccctatcatagatgtccttttcttcttccgctgttttatcaggattcggatacataccaaaacctgtacggggctatagcaccatcttcgtctatcccaactttacctcttcccactttgcctgatactatagattatatcattgaagatattgtgggcgagtatgctacccttctggagaccacaaatccattcaagaacatattcgcagaaactccatcaactatggagccttcagagccagcttcagtgaag

SEQ ID NO: 174587 - DNA, 126 bp, Saccharomyces pastorianus
atgatttatgatacatgtacacttgattttctatttaggaatctctgtttgcataagagctgctcttatgtttggggacaaatacaaagttctcgtcggttttaccgaagaatagatcacttagct

SEQ ID NO: 174588 - DNA, 783 bp, Saccharomyces pastorianus
cataaagggattatcttgaaaaagcgtgccaagaagagaaatatggtcttgaaaaaattcaccagagaggaccaaaaggcgttcatcaaaaccaccgtcaccaccacaattctaagaccattgaaaatgcttgtagtcgagccaattgtttttgttttcagcatttacgtcgctttcatttttgccattttatttggatttttcgaagcatatgctgtcatctaccgtggtgtttaccacatgggtgctggtgtatctgggttaccattcatcggcattggtgtcggtttatgggtgggtgctttcttctatctatataccgataggaaataccttttccccaaaccacctgcaggcacaccacctctaagtgaaaatcaaagaacttccaagagaactgaaccattcagaggcgcaagaaaccctgataccaatgaactgttaccaattgttcctgaaaagtttttgattgcttgtaaatttggttctgtagcattgcccatcggtctattttggcaagcatggacggccagaccagatgttcactggatggccccagtggctgccggtgtgccatttggctttggtttgattttgatttttttcagtgttttgatgtatttctctacatgttatccacccttaaccgttgcttcctgtttggccgctaacaatctattaaggtatgtcatgagtagtgtcttcccacttttcaccatccaaatgtatacgaaaatgaaaatcgacctgcaggcatgcaagcttgcactgccgtcgtttaca

SEQ ID NO: 174589 - DNA, 378 bp, Saccharomyces pastorianus
aactctacagtcagaatttcaacacttcaaccccaatctagttctctacataaagtaaaggacgtcttcattgagggtgttgattcgaaaaacagcatcataagttcttgctgggatggagatgacatattttatttggccgtatactctgaaggtaaaattttcatatgggataccagcccaaataaacttatatcttctcgactagattattcctttatagtctttgacatattggtaaaaggatctcagtttgatagtaacgccaaaaatgaatctaattttgtcatcgcatcatcatacgtaggttgtgtgagagtctacaaatcaaattcgaatttcctagaagtaagcattagaaatatattcctctcatag

SEQ ID NO: 174590 - DNA, 234 bp, Saccharomyces pastorianus
acaatagtacaggaaacaacaacaatgctgctgccgccaataacaacaacgccacttcaaacgccaatacggtattctacgaaagagccgccatgtttgcagctttacaacaaaagcaacagcaacgttctcaagctttgcaacaacaacaacaacaacaacaacaacaacaacaacaacaacaacaacagcagcagcagcaacaacaacaacaacaacagcaacagaatcaac

SEQ ID NO: 174591 - DNA, 180 bp, Saccharomyces pastorianus
atgcgctctaagcatgaaaatggtgaattgaatgacggtatctctgttagacgatctggtactacgaacacctatgaagaacacatcttacaacccgtacttgttagtacaagtgcaattaccttagcgtctgaatgtgttaaatccatcttacgtattgatgatattgcattcagccgt

SEQ ID NO: 174592 - DNA, 129 bp, Saccharomyces pastorianus
atctatcaaaagatcgtagccccattgaccgacagatatatcctaagagatgttagcaagacagaaaaggatgaaattagagcttccgtcaatgagggttccaaggctacaggtgcttctgttcattaa

SEQ ID NO: 174593 - DNA, 135 bp, Saccharomyces pastorianus
aaaaaaaaaacaacaaaacaccggacattaacgattgcagcacctgagtttcgcgtatggtcacccattacattactcggccaggctcttaccagcttaactacagtcgatcggacgggaaacggtgcttcctgg

SEQ ID NO: 174594 - DNA, 96 bp, Saccharomyces pastorianus; identical to SEQ ID NO: 173426

SEQ ID NO: 174595 - DNA, 1389 bp, Saccharomyces pastorianus
gtatcttattggcagcagaagtatggtcagaactatcgacttcggggatctcagggctcactcgcactaaagtcatttttaataggggtattcactcatcagatagttgatgtttcctggcattcgttagttaccgattatagaatgcacgggctactccgagttctcagcgaaacagaatttgatggagatattgaaactgctcatacgtttttagacgttatgggtgaattcctcaccttaaataatataatccgtgacaataataataacgaaaattgggattttttaactcgctctgattggaaattgcccagagaagaggatttaatggaaattataaggaaagctggactttcaaaggaaaagttgtcctacgcagaactggaattttgcgttaaaagaggaatggcagcggctattagtgaagggtacctattccgctctcaaagaaaccaattgttaactaatatttactcaacatcccccagggctaatgatctaatactgaatcattggctaggagggcagtccaatttggttgcaatgctccaaagatgcgtgcctttcttcgagactttgtttcatgaagaaaatactaatgaagctcaagcagaagaactgagattatgtgctaatttaccgccggtatcacagcaacggataaatgcacgacctttggtctcttcattaaaagcacgtaagggaaatagccacattgtcgtatctcccatgaaatcattttccaattttggcacaagcttgactatgggaaaatttcgagaagacaacaaggattatctcgctgtaagtgcaccacttgaagacacagttggtgcaatctatatagttccatgggatattctaactgtagcaagaaaagaggattttagcattttacaacccatcactgccatgtacggttcaaaggtcgggacatacaaggcaagtgatgttgactacctactcgtttcacagcctggtacctgtacaatcgacttttacttcaaaggagtaaaaatactgacaatcaaggatgagaccaccgaagaagcacatcagttacaatttcctgtaacaggtaatttttatgatgatatgattcctgatttggtggtgtcaagcccaagttatggtgccaacgaaactggaattgcaacatttatcccaggatcttccataataagctatttgatcaattcagacaaatatcaagtagttgatatctcaacttttaagggcattatcaaccttgacgggtaccctatgaatataccatttcagcatttcggcgcaacaattcagatatctgacacgactgacaaacaaaagctaatatgtattacatgtcaaagtcttggtgctgtttttgtttattcgaggctttaa

SEQ ID NO: 174596 - DNA, 666 bp, Saccharomyces pastorianus
atgagtgatatcttgaacgtaagtcaacaacgtgaagcaattaccaaggccgctgcgtatatttctgctattttagaaccacatttcaaaaatacaacaaatttcgagcctccgagaactttgattatatgtggttcagggcttggtggaatatctaccaagctgtctagagacaatccacccccggtaacagtcccataccaagacatcccaggattcaagaaaagtacggttccaggtcattccggtacactaatgttcggatctatgaatggttcaccagtagtattaatgaatggtcgtcttcatggatatgaaggcaacacattgtttgagactacttttcctattagagtgcttaaccacatgggtcatgttcgtaatttaattgtcactaatgccgctggtggtataaacgcgaaatatcaagcctgcgatttgatgtgcatttatgatcatttaaatatccctggccttgctggccagcacccattgagaggtcctaacttggatgaagatggacctcgttttttagccttgagtgatgcatatgatctggagttgaggaagcttttatttaagaaatggaaagagctcaagattcaaaggccactgcatgaaggtacttatacttttgtatctggacccactttcgaaacaagagca

SEQ ID NO: 174597 - DNA, 363 bp, Saccharomyces pastorianus
atgcaagctccagtggtatttatgaatgcttctcaagagagaactaccggtcgtcaggctcaaatctccaatatcactgctgcaaaggcagttgccgatgtcattcgaacttgcttaggtccaaaagctatgttaaagatgttattggatcctatgggcggtcttgtgttgactaacgatggccacgctattttaagggaaattgatgttgcacatccagcagctaaatcaatgttggagttatcccgtactcaagacgaagaggttggtgacgggactacaacagttattattctagctggtgagattttagctcagtgtgcaccttatttgattgaaaaaaatattcacctgttattatta

SEQ ID NO: 174598 - DNA, 297 bp, Saccharomyces pastorianus
tataaaataactactatatatttgtggctgaaatcatacctttcatttttcatcggcttagataatcttgattttctcaccttaatacgcttttttcaatgtcgtttacaaaacaagctaggtttgcaagatatcctggactttttttgtaatctatgtagccacagtatggttcgcacttgcaacatggtagaggctgcccaaaaacaaaaccgcatcacctttggcagtatttacgtgaaactccatcctcttgtcaaactttgcacaggaatcgtgtgggccccacgagtgtga

SEQ ID NO: 174599 - DNA, 114 bp, Saccharomyces pastorianus; identical to SEQ ID NO: 173138

SEQ ID NO: 174600 - DNA, 1206 bp, Saccharomyces pastorianus
attgctgtgggacaagcattgtgcgggatgccatggggttgttttcagtgtttgacggtgtcttacgcttctgaaatatgcccattggctctgagatattaccttacaacctattcaaacttgtgctggttatttggacaactttttgcagctggaatcatgaaaaattctcaaaaaaaatatgcggattcagaattaggatataaactaccatttgccctacagtggattttgccagttcctttagcactgggaattttttttgcacctgaatctccatggtggctagttaaaaaaggaaggtttgatgaggcaaggagatcacttagaagaactttaagcggcaagggacctgaaaaagaaatactagtaactctggaggtggacaaaataaaagtgactatagataaggaaaagagactcacaagtaaagaaggctcctatagtgatagttttgaagacaagattaatcgaagaagaacgagaattacttgtctctgctgggctggtcaagccacttgtggttcaatactaataggttattcaacttacttttacgaaaaggctggcgttagtactgaaatgtccttcacttttagtattattcaatactgtctcggtatttgtgctacatttctatcttggtgggcgtcaaagtattttggtagatatgacctttacgcttttggactagccttccaaaccattgtttttttcattattggcggtttgaggtgctcaagtacgcacggttccaaaatgggaagtggttctcttttaatggctgtagcatttttttacaatttaggaattgccccggtcgttttttgcctagtctctgaaatgccatcttcaagactaagaacgaaaacaatcattctagcacgtaacacttataatgtggtcagtatcatatgtagcgttctcatcttataccaactgaactctaagaagtggaactggggcgctaagtcaggctttttctggggtgtcttatgcttttgtactttaatctgggctgtggttgacctaccagaaactgccggaaagactttcgtggaaataaatgagttatttaaacttggagtttctgcaagaaagttcaaatcgacgaaagtagatccgtctgttgtcaaaaacccccctaaagacgtctctcataacgaccccaagggagatatcgaagcttccattgcagaggaatag

SEQ ID NO: 174601 - DNA, 96 bp, Saccharomyces pastorianus
atgactgttggaataaaaatcaactatcatctactaactagtatttacgttactagtatattatcatatacggtgttagaagatgacgcaaatgat

SEQ ID NO: 174602 - DNA, 75 bp, Saccharomyces pastorianus
ctgatcattaccgctggtaagagtaccgttagatttgttcccgcattgacgattgaagacgaactaatcgaagaa

SEQ ID NO: 174603 - DNA, 528 bp, Saccharomyces pastorianus
ccagcatcaactccagcactaatgctactaccactgccagcatcaacgtcaggactagtgggactaccactgccagcatcaacgtcaggactagtgcgactaccactgccagcatcaacgtcaggactagtgcgactaccactgaaagtaccaactccaacactaatgctactaccactgaaagtaccaactccaacactaatgctactaccactgaaagtaccaactccagcactaatgctactaccactgccagcatcaacgtcaggactagtgcgactaccactgaaagtaccaactccagcactaatgctactaccactgccagcatcaacgtcaggactagtgggactaccactgccagcatcaacgtcaggactaatgctactaccactgccagcatcaactccagcactaatgctactaccactgccagcatcaacgtcaggactagtgggactaccactgccagcatcaacgtcaggactagtgcgactaccactgccagcatcaacgtcaggactagtg

SEQ ID NO: 174604 - DNA, 25 bp, Saccharomyces pastorianus
gactctacagatgcttcttgcactg

SEQ ID NO: 174605 - DNA, 25 bp, Saccharomyces pastorianus
gatatgctgaagagattttccacca

SEQ ID NO: 174606 - DNA, 25 bp, Saccharomyces pastorianus
aacttcctcggaaatagagccatgg

SEQ ID NO: 174607 - DNA, 25 bp, Saccharomyces pastorianus
caccaaatgccagaatgccctaatt

SEQ ID NO: 174608 - DNA, 25 bp, Saccharomyces pastorianus
gatcctcagctttctatggacagtt

SEQ ID NO: 174609 - DNA, 25 bp, Saccharomyces pastorianus
tagctactgctttggtggacattgt

SEQ ID NO: 174610 - DNA, 25 bp, Saccharomyces pastorianus
gaatctttacgatgtccatggtccc

SEQ ID NO: 174611 - DNA, 25 bp, Saccharomyces pastorianus
aaatgtttcttcgatgctttagccg

SEQ ID NO: 174612 - DNA, 25 bp, Saccharomyces pastorianus
gggtagcaacttttcattgaacgct

SEQ ID NO: 174613 - DNA, 25 bp, Saccharomyces pastorianus
atgctttagccgctgactctacaga

SEQ ID NO: 174614 - DNA, 25 bp, Saccharomyces pastorianus
agagccatggtctaacggttacata

SEQ ID NO: 174615 - DNA, 25 bp, Saccharomyces pastorianus
attatggcgctgatagtaactttag

SEQ ID NO: 174616 - DNA, 25 bp, Saccharomyces pastorianus
acggccgagcctgctactaagaaga

SEQ ID NO: 174617 - DNA, 25 bp, Saccharomyces pastorianus
agaattaagcgatcctagtgaaccg

SEQ ID NO: 174618 - DNA, 25 bp, Saccharomyces pastorianus
gacgttgatagttcagcgcagtgat

SEQ ID NO: 174619 - DNA, 25 bp, Saccharomyces pastorianus
gaaacattctgcacagacgccaacg

SEQ ID NO: 174620 - DNA, 25 bp, Saccharomyces pastorianus
gacgccaacgagaagcaactatgta

SEQ ID NO: 174621 - DNA, 25 bp, Saccharomyces pastorianus
ggagtgcatagatgtttcccgcaag

SEQ ID NO: 174622 - DNA, 25 bp, Saccharomyces pastorianus
gagtcgactttgaagccttgcgaaa

SEQ ID NO: 174623 - DNA, 25 bp, Saccharomyces pastorianus
tagcccaaggcgatgagacgttgat

SEQ ID NO: 174624 - DNA, 25 bp, Saccharomyces pastorianus
gatgtttcccgcaagttggcaaata

SEQ ID NO: 174625 - DNA, 25 bp, Saccharomyces pastorianus
gtgaaccgcttactcaatctgatgt

SEQ ID NO: 174626 - DNA, 25 bp, Saccharomyces pastorianus
gggaccattcctgacctgggtcgtg

SEQ ID NO: 174627 - DNA, 25 bp, Saccharomyces pastorianus
agatgggaccattcctgacctgggt

SEQ ID NO: 174628 - DNA, 25 bp, Saccharomyces pastorianus
atgcaagcgatgatgatgatacaga

SEQ ID NO: 174629 - DNA, 25 bp, Saccharomyces pastorianus
tggcgtaaccaaaggctcaatgagc

SEQ ID NO: 174630 - DNA, 25 bp, Saccharomyces pastorianus
tgacctgggtcgtgctgacgctgac

SEQ ID NO: 174631 - DNA, 25 bp, Saccharomyces pastorianus
tgacgcgtcttatccatcaattgaa

SEQ ID NO: 174632 - DNA, 25 bp, Saccharomyces pastorianus
cggcggtttaactcatgcaagcgat

SEQ ID NO: 174633 - DNA, 25 bp, Saccharomyces pastorianus
aaggctcaatgagcggcggtttaac

SEQ ID NO: 174634 - DNA, 25 bp, Saccharomyces pastorianus
atgatgatacagatgggaccattcc

SEQ ID NO: 174635 - DNA, 25 bp, Saccharomyces pastorianus
gtcgtgctgacgctgacgcgtctta

SEQ ID NO: 174636 - DNA, 25 bp, Saccharomyces pastorianus
gcgttcatggcgtaaccaaaggctc

SEQ ID NO: 174637 - DNA, 25 bp, Saccharomyces pastorianus
cacccaatcttcatggtagcgccta

SEQ ID NO: 174638 - DNA, 25 bp, Saccharomyces pastorianus
tttcagcttccaatttaccggaatc

SEQ ID NO: 174639 - DNA, 25 bp, Saccharomyces pastorianus
attcacccaatcttcatggtagcgc

SEQ ID NO: 174640 - DNA, 25 bp, Saccharomyces pastorianus
aattcacccaatcttcatggtagcg

SEQ ID NO: 174641 - DNA, 25 bp, Saccharomyces pastorianus
ccaatttaccggaatctgatagaga

SEQ ID NO: 174642 - DNA, 25 bp, Saccharomyces pastorianus
tcacccaatcttcatggtagcgcct

SEQ ID NO: 174643 - DNA, 25 bp, Saccharomyces pastorianus
aaaattcacccaatcttcatggtag

SEQ ID NO: 174644 - DNA, 25 bp, Saccharomyces pastorianus
caatttaccggaatctgatagagat

SEQ ID NO: 174645 - DNA, 25 bp, Saccharomyces pastorianus
acccaatcttcatggtagcgcctat

SEQ ID NO: 174646 - DNA, 25 bp, Saccharomyces pastorianus
caaaattcacccaatcttcatggta

SEQ ID NO: 174647 - DNA, 25 bp, Saccharomyces pastorianus
aaattcacccaatcttcatggtagc

SEQ ID NO: 174648 - DNA, 25 bp, Saccharomyces pastorianus
tagtttgtaccacttataccttcat

SEQ ID NO: 174649 - DNA, 25 bp, Saccharomyces pastorianus
gatgccattagtttgtaccacttat

SEQ ID NO: 174650 - DNA, 25 bp, Saccharomyces pastorianus
gcaaagcaccatagaaaatactgag

SEQ ID NO: 174651 - DNA, 25 bp, Saccharomyces pastorianus
gtttgtaccacttataccttcatta

SEQ ID NO: 174652 - DNA, 25 bp, Saccharomyces pastorianus
agatgccattagtttgtaccactta

SEQ ID NO: 174653 - DNA, 25 bp, Saccharomyces pastorianus
gccattagtttgtaccacttatacc

SEQ ID NO: 174654 - DNA, 25 bp, Saccharomyces pastorianus
tttgtaccacttataccttcattat

SEQ ID NO: 174655 - DNA, 25 bp, Saccharomyces pastorianus
atctgcaaagcaccatagaaaatac

SEQ ID NO: 174656 - DNA, 25 bp, Saccharomyces pastorianus
tttttgagcaaagtttgccgaactt

SEQ ID NO: 174657 - DNA, 25 bp, Saccharomyces pastorianus
tgagcaaagtttgccgaacttagaa

SEQ ID NO: 174658 - DNA, 25 bp, Saccharomyces pastorianus
aagtttgccgaacttagaatatcta

SEQ ID NO: 174659 - DNA, 25 bp, Saccharomyces pastorianus
gacactcgtctaccttcactgcacg

SEQ ID NO: 174660 - DNA, 25 bp, Saccharomyces pastorianus
actcgtctaccttcactgcacgaaa

SEQ ID NO: 174661 - DNA, 25 bp, Saccharomyces pastorianus
acactcgtctaccttcactgcacga

SEQ ID NO: 174662 - DNA, 25 bp, Saccharomyces pastorianus
tcgtctaccttcactgcacgaaacc

SEQ ID NO: 174663 - DNA, 25 bp, Saccharomyces pastorianus
ctcgtctaccttcactgcacgaaac

SEQ ID NO: 174664 - DNA, 25 bp, Saccharomyces pastorianus
agacactcgtctaccttcactgcac

SEQ ID NO: 174665 - DNA, 25 bp, Saccharomyces pastorianus
tctaccttcactgcacgaaaccaaa

SEQ ID NO: 174666 - DNA, 25 bp, Saccharomyces pastorianus
tagacactcgtctaccttcactgca

SEQ ID NO: 174667 - DNA, 25 bp, Saccharomyces pastorianus
ctaccttcactgcacgaaaccaaaa

SEQ ID NO: 174668 - DNA, 25 bp, Saccharomyces pastorianus
gtctaccttcactgcacgaaaccaa

SEQ ID NO: 174669 - DNA, 25 bp, Saccharomyces pastorianus
gattctgatgatgattctaccggaa

SEQ ID NO: 174670 - DNA, 25 bp, Saccharomyces pastorianus
aatcaagcctattcatctattcaaa

SEQ ID NO: 174671 - DNA, 25 bp, Saccharomyces pastorianus
ccatctttatcttcctttatttcca

SEQ ID NO: 174672 - DNA, 25 bp, Saccharomyces pastorianus
acaggccccagtgatactactagtc

SEQ ID NO: 174673 - DNA, 25 bp, Saccharomyces pastorianus
ttcgtcagcttaataacccctatac

SEQ ID NO: 174674 - DNA, 25 bp, Saccharomyces pastorianus
gaaacttatcgaaccagacacacgg

SEQ ID NO: 174675 - DNA, 25 bp, Saccharomyces pastorianus
agacacacggttctgcacaaaatgt

SEQ ID NO: 174676 - DNA, 25 bp, Saccharomyces pastorianus
gacaacattgctgcgaataaaccca

SEQ ID NO: 174677 - DNA, 25 bp, Saccharomyces pastorianus
tcaccatctttttccgcgtatcaga

SEQ ID NO: 174678 - DNA, 25 bp, Saccharomyces pastorianus
gaaccgatccaaatatcagcgacaa

SEQ ID NO: 174679 - DNA, 25 bp, Saccharomyces pastorianus
tggatttttaagtggttcgtcagct

SEQ ID NO: 174680 - DNA, 25 bp, Saccharomyces pastorianus
aataaactctgatcgacaagcttgg

SEQ ID NO: 174681 - DNA, 25 bp, Saccharomyces pastorianus
aaccaatccaaattggaccaattca

SEQ ID NO: 174682 - DNA, 25 bp, Saccharomyces pastorianus
cagagcagtcatatgatcagaatac

SEQ ID NO: 174683 - DNA, 25 bp, Saccharomyces pastorianus
agagcagtcatatgatcagaataca

SEQ ID NO: 174684 - DNA, 25 bp, Saccharomyces pastorianus
cagaatacagaatctgatcatgact

SEQ ID NO: 174685 - DNA, 25 bp, Saccharomyces pastorianus
gaatacagaatctgatcatgactat

SEQ ID NO: 174686 - DNA, 25 bp, Saccharomyces pastorianus
aaataaactctgatcgacaagcttg

SEQ ID NO: 174687 - DNA, 25 bp, Saccharomyces pastorianus
gagcagtcatatgatcagaatacag

SEQ ID NO: 174688 - DNA, 25 bp, Saccharomyces pastorianus
agcagtcatatgatcagaatacaga

SEQ ID NO: 174689 - DNA, 25 bp, Saccharomyces pastorianus
gttatattacaagacaaccaatcca

SEQ ID NO: 174690 - DNA, 25 bp, Saccharomyces pastorianus
aacagcccataaccaatctttcatt

SEQ ID NO: 174691 - DNA, 25 bp, Saccharomyces pastorianus
ttgagtttcagacccatcatcttac

SEQ ID NO: 174692 - DNA, 25 bp, Saccharomyces pastorianus
ggctcattaatgaccgttgcgcagg

SEQ ID NO: 174693 - DNA, 25 bp, Saccharomyces pastorianus
aatttatcgtagacaccgccctgaa

SEQ ID NO: 174694 - DNA, 25 bp, Saccharomyces pastorianus
tccacggcctattctttgagtgcag

SEQ ID NO: 174695 - DNA, 25 bp, Saccharomyces pastorianus
aagtcctttcctatccatgttagaa

SEQ ID NO: 174696 - DNA, 25 bp, Saccharomyces pastorianus
aggcggacggactgattgctgctac

SEQ ID NO: 174697 - DNA, 25 bp, Saccharomyces pastorianus
cacccatttgtccacatgcattgag

SEQ ID NO: 174698 - DNA, 25 bp, Saccharomyces pastorianus
attttataaccatatgcgccagccc

SEQ ID NO: 174699 - DNA, 25 bp, Saccharomyces pastorianus
atgcaatcgctttaacacccatttg

SEQ ID NO: 174700 - DNA, 25 bp, Saccharomyces pastorianus
aagcctcgcccgatgagtctattaa

SEQ ID NO: 174701 - DNA, 25 bp, Saccharomyces pastorianus
ttggtatgcccaaccgtcaatgcaa

SEQ ID NO: 174702 - DNA, 25 bp, Saccharomyces pastorianus
accaattcaatgctcgcgttctagt

SEQ ID NO: 174703 - DNA, 25 bp, Saccharomyces pastorianus
agttatccagatggatcgtggctcc

SEQ ID NO: 174704 - DNA, 25 bp, Saccharomyces pastorianus
taagaaccaattcaatgctcgcgtt

SEQ ID NO: 174705 - DNA, 25 bp, Saccharomyces pastorianus
ttaagaaccaattcaatgctcgcgt

SEQ ID NO: 174706 - DNA, 25 bp, Saccharomyces pastorianus
ctcgcgttctagttatccagatgga

SEQ ID NO: 174707 - DNA, 25 bp, Saccharomyces pastorianus
attagcatttattaagaaccaattc

SEQ ID NO: 174708 - DNA, 25 bp, Saccharomyces pastorianus
cgcgttctagttatccagatggatc

SEQ ID NO: 174709 - DNA, 25 bp, Saccharomyces pastorianus
ccaattcaatgctcgcgttctagtt

SEQ ID NO: 174710 - DNA, 25 bp, Saccharomyces pastorianus
ttcaatgctcgcgttctagttatcc

SEQ ID NO: 174711 - DNA, 25 bp, Saccharomyces pastorianus
aaccaattcaatgctcgcgttctag

SEQ ID NO: 174712 - DNA, 25 bp, Saccharomyces pastorianus
caattcaatgctcgcgttctagtta

SEQ ID NO: 174713 - DNA, 25 bp, Saccharomyces pastorianus
aaccaagctgctcaatgtgcgggcg

SEQ ID NO: 174714 - DNA, 25 bp, Saccharomyces pastorianus
gacaccttcatacaaggtctgtata

SEQ ID NO: 174715 - DNA, 25 bp, Saccharomyces pastorianus
acaacatgatgtacttgatgtaaca

SEQ ID NO: 174716 - DNA, 25 bp, Saccharomyces pastorianus
gggcgactttatcttacaacatgat

SEQ ID NO: 174717 - DNA, 25 bp, Saccharomyces pastorianus
cacctggcgtcaaaaaattcttcaa

SEQ ID NO: 174718 - DNA, 25 bp, Saccharomyces pastorianus
tgatgtaacatttgacaccttcata

SEQ ID NO: 174719 - DNA, 25 bp, Saccharomyces pastorianus
gagccacctggcgtcaaaaaattct

SEQ ID NO: 174720 - DNA, 25 bp, Saccharomyces pastorianus
tataattatttttacgagccacctg

SEQ ID NO: 174721 - DNA, 25 bp, Saccharomyces pastorianus
aatgtgcgggcgactttatcttaca

SEQ ID NO: 174722 - DNA, 25 bp, Saccharomyces pastorianus
tgcgggcgactttatcttacaacat

SEQ ID NO: 174723 - DNA, 25 bp, Saccharomyces pastorianus
agctgctcaatgtgcgggcgacttt

SEQ ID NO: 174724 - DNA, 25 bp, Saccharomyces pastorianus
tataccaatattacgattattcctc

SEQ ID NO: 174725 - DNA, 25 bp, Saccharomyces pastorianus
accaatattacgattattcctcatt

SEQ ID NO: 174726 - DNA, 25 bp, Saccharomyces pastorianus
ccaatattacgattattcctcattc

SEQ ID NO: 174727 - DNA, 25 bp, Saccharomyces pastorianus
ataccaatattacgattattcctca

SEQ ID NO: 174728 - DNA, 25 bp, Saccharomyces pastorianus
tatataccaatattacgattattcc

SEQ ID NO: 174729 - DNA, 25 bp, Saccharomyces pastorianus
tctatataccaatattacgattatt

SEQ ID NO: 174730 - DNA, 25 bp, Saccharomyces pastorianus
tggaatctatatttctatataccaa

SEQ ID NO: 174731 - DNA, 25 bp, Saccharomyces pastorianus
atggaatctatatttctatatacca

SEQ ID NO: 174732 - DNA, 25 bp, Saccharomyces pastorianus
ctatataccaatattacgattattc

SEQ ID NO: 174733 - DNA, 25 bp, Saccharomyces pastorianus
atataccaatattacgattattcct

SEQ ID NO: 174734 - DNA, 25 bp, Saccharomyces pastorianus
taccaatattacgattattcctcat

SEQ ID NO: 174735 - DNA, 25 bp, Saccharomyces pastorianus
aagaagttgatgccgacatatctga

SEQ ID NO: 174736 - DNA, 25 bp, Saccharomyces pastorianus
aaagaagttgatgccgacatatctg

SEQ ID NO: 174737 - DNA, 25 bp, Saccharomyces pastorianus
agttgatgccgacatatctgaatac

SEQ ID NO: 174738 - DNA, 25 bp, Saccharomyces pastorianus
aaaagaagttgatgccgacatatct

SEQ ID NO: 174739 - DNA, 25 bp, Saccharomyces pastorianus
ttgatgccgacatatctgaatacaa

SEQ ID NO: 174740 - DNA, 25 bp, Saccharomyces pastorianus
tgatgccgacatatctgaatacaat

SEQ ID NO: 174741 - DNA, 25 bp, Saccharomyces pastorianus
aagttgatgccgacatatctgaata

SEQ ID NO: 174742 - DNA, 25 bp, Saccharomyces pastorianus
gttgatgccgacatatctgaataca

SEQ ID NO: 174743 - DNA, 25 bp, Saccharomyces pastorianus
agaagttgatgccgacatatctgaa

SEQ ID NO: 174744 - DNA, 25 bp, Saccharomyces pastorianus
gatgccgacatatctgaatacaata

SEQ ID NO: 174745 - DNA, 25 bp, Saccharomyces pastorianus
cagcgattgaagttaatttgaccat

SEQ ID NO: 174746 - DNA, 25 bp, Saccharomyces pastorianus
gctgatgtaatcttaacaagaaata

SEQ ID NO: 174747 - DNA, 25 bp, Saccharomyces pastorianus
gatgtaatcttaacaagaaatagtg

SEQ ID NO: 174748 - DNA, 25 bp, Saccharomyces pastorianus
tagtgctgatgtaatcttaacaaga

SEQ ID NO: 174749 - DNA, 25 bp, Saccharomyces pastorianus
tgctgatgtaatcttaacaagaaat

SEQ ID NO: 174750 - DNA, 25 bp, Saccharomyces pastorianus
ctgatgtaatcttaacaagaaatag

SEQ ID NO: 174751 - DNA, 25 bp, Saccharomyces pastorianus
ttagtgctgatgtaatcttaacaag

SEQ ID NO: 174752 - DNA, 25 bp, Saccharomyces pastorianus
ccagcagcgattgaagttaatttga

SEQ ID NO: 174753 - DNA, 25 bp, Saccharomyces pastorianus
agtgctgatgtaatcttaacaagaa

SEQ ID NO: 174754 - DNA, 25 bp, Saccharomyces pastorianus
gtgctgatgtaatcttaacaagaaa

SEQ ID NO: 174755 - DNA, 25 bp, Saccharomyces pastorianus
gttagtgctgatgtaatcttaacaa

SEQ ID NO: 174756 - DNA, 25 bp, Saccharomyces pastorianus
gtgtccaccgaggacgtagagtttt

SEQ ID NO: 174757 - DNA, 25 bp, Saccharomyces pastorianus
atcgacgaggccatagagttgttaa

SEQ ID NO: 174758 - DNA, 25 bp, Saccharomyces pastorianus
gaacagtctttaacggtgtccaccg

SEQ ID NO: 174759 - DNA, 25 bp, Saccharomyces pastorianus
tcgcggactccgaacagtctttaac

SEQ ID NO: 174760 - DNA, 25 bp, Saccharomyces pastorianus
aaaggctcaggttgatataccggaa

SEQ ID NO: 174761 - DNA, 25 bp, Saccharomyces pastorianus
acaatggaggtcaattgcgcgcgat

SEQ ID NO: 174762 - DNA, 25 bp, Saccharomyces pastorianus
cttggcgcagacgtgatgctggaat

SEQ ID NO: 174763 - DNA, 25 bp, Saccharomyces pastorianus
atgctggaatatcccatcgacgagg

SEQ ID NO: 174764 - DNA, 25 bp, Saccharomyces pastorianus
ttgcgcgcgattgtataactgggac

SEQ ID NO: 174765 - DNA, 25 bp, Saccharomyces pastorianus
ttaaagaagaaactcgcggactccg

SEQ ID NO: 174766 - DNA, 25 bp, Saccharomyces pastorianus
gacacgctctacacaaaggctcagg

SEQ ID NO: 174767 - DNA, 25 bp, Saccharomyces pastorianus
atggactttaccctcaacaaagact

SEQ ID NO: 174768 - DNA, 25 bp, Saccharomyces pastorianus
cgaatggactttaccctcaacaaag

SEQ ID NO: 174769 - DNA, 25 bp, Saccharomyces pastorianus
ctcaacaaagactatgctgtcattc

SEQ ID NO: 174770 - DNA, 25 bp, Saccharomyces pastorianus
tttaccctcaacaaagactatgctg

SEQ ID NO: 174771 - DNA, 25 bp, Saccharomyces pastorianus
ccctcaacaaagactatgctgtcat

SEQ ID NO: 174772 - DNA, 25 bp, Saccharomyces pastorianus
taccctcaacaaagactatgctgtc

SEQ ID NO: 174773 - DNA, 25 bp, Saccharomyces pastorianus
gactttaccctcaacaaagactatg

SEQ ID NO: 174774 - DNA, 25 bp, Saccharomyces pastorianus
ggactttaccctcaacaaagactat

SEQ ID NO: 174775 - DNA, 25 bp, Saccharomyces pastorianus
ttaccctcaacaaagactatgctgt

SEQ ID NO: 174776 - DNA, 25 bp, Saccharomyces pastorianus
gaatggactttaccctcaacaaaga

SEQ ID NO: 174777 - DNA, 25 bp, Saccharomyces pastorianus
tggactttaccctcaacaaagacta

SEQ ID NO: 174778 - DNA, 25 bp, Saccharomyces pastorianus
gcttacatctgatgatctccttttg

SEQ ID NO: 174779 - DNA, 25 bp, Saccharomyces pastorianus
agttggacatatcgttttcctgcca

SEQ ID NO: 174780 - DNA, 25 bp, Saccharomyces pastorianus
aataccaagatttccagatgctcag

SEQ ID NO: 174781 - DNA, 25 bp, Saccharomyces pastorianus
aattttctagtctttgctgctcaaa

SEQ ID NO: 174782 - DNA, 25 bp, Saccharomyces pastorianus
gaggcgaagcgtatatccccgagtt

SEQ ID NO: 174783 - DNA, 25 bp, Saccharomyces pastorianus
atggcacgatgctccgtttttaaga

SEQ ID NO: 174784 - DNA, 25 bp, Saccharomyces pastorianus
ttaatcaccgctcttgccaatatta

SEQ ID NO: 174785 - DNA, 25 bp, Saccharomyces pastorianus
agtagatcttttcggtgcagacgct

SEQ ID NO: 174786 - DNA, 25 bp, Saccharomyces pastorianus
agatgctcagtcttcatcctttaac

SEQ ID NO: 174787 - DNA, 25 bp, Saccharomyces pastorianus
aatgaatttagcctcccaatccgtc

SEQ ID NO: 174788 - DNA, 25 bp, Saccharomyces pastorianus
gtcttcctaaatctttcgttaatcg

SEQ ID NO: 174789 - DNA, 25 bp, Saccharomyces pastorianus
cacccactcttcatggtagcgccta

SEQ ID NO: 174790 - DNA, 25 bp, Saccharomyces pastorianus
gattccactaaggtaatctcaacaa

SEQ ID NO: 174791 - DNA, 25 bp, Saccharomyces pastorianus
cactcttcatggtagcgcctatgct

SEQ ID NO: 174792 - DNA, 25 bp, Saccharomyces pastorianus
aattcacccactcttcatggtagcg

SEQ ID NO: 174793 - DNA, 25 bp, Saccharomyces pastorianus
actcttcatggtagcgcctatgctt

SEQ ID NO: 174794 - DNA, 25 bp, Saccharomyces pastorianus
agattccactaaggtaatctcaaca

SEQ ID NO: 174795 - DNA, 25 bp, Saccharomyces pastorianus
tcacccactcttcatggtagcgcct

SEQ ID NO: 174796 - DNA, 25 bp, Saccharomyces pastorianus
attccactaaggtaatctcaacaag

SEQ ID NO: 174797 - DNA, 25 bp, Saccharomyces pastorianus
acccactcttcatggtagcgcctat

SEQ ID NO: 174798 - DNA, 25 bp, Saccharomyces pastorianus
ttccactaaggtaatctcaacaagg

SEQ ID NO: 174799 - DNA, 25 bp, Saccharomyces pastorianus
aaattcacccactcttcatggtagc

SEQ ID NO: 174800 - DNA, 25 bp, Saccharomyces pastorianus
tacgcataacgcccatcattatcca

SEQ ID NO: 174801 - DNA, 25 bp, Saccharomyces pastorianus
tacagaaaaattaccactaaaatca

SEQ ID NO: 174802 - DNA, 25 bp, Saccharomyces pastorianus
tcaatattacagaaaaattaccact

SEQ ID NO: 174803 - DNA, 25 bp, Saccharomyces pastorianus
acgcataacgcccatcattatccac

SEQ ID NO: 174804 - DNA, 25 bp, Saccharomyces pastorianus
caatattacagaaaaattaccacta

SEQ ID NO: 174805 - DNA, 25 bp, Saccharomyces pastorianus
atacgttataccacttttgcaccat

SEQ ID NO: 174806 - DNA, 25 bp, Saccharomyces pastorianus
gtcaatattacagaaaaattaccac

SEQ ID NO: 174807 - DNA, 25 bp, Saccharomyces pastorianus
catacgttataccacttttgcacca

SEQ ID NO: 174808 - DNA, 25 bp, Saccharomyces pastorianus
acgttataccacttttgcaccatat

SEQ ID NO: 174809 - DNA, 25 bp, Saccharomyces pastorianus
ttacgcataacgcccatcattatcc

SEQ ID NO: 174810 - DNA, 25 bp, Saccharomyces pastorianus
cgcataacgcccatcattatccaca

SEQ ID NO: 174811 - DNA, 25 bp, Saccharomyces pastorianus
ggtccagtatcaaactcgaactcgg

SEQ ID NO: 174812 - DNA, 25 bp, Saccharomyces pastorianus
gatatctttggtccagtatcaaact

SEQ ID NO: 174813 - DNA, 25 bp, Saccharomyces pastorianus
tccagtatcaaactcgaactcggat

SEQ ID NO: 174814 - DNA, 25 bp, Saccharomyces pastorianus
aactcgaactcggatacgaaaagat

SEQ ID NO: 174815 - DNA, 25 bp, Saccharomyces pastorianus
atacatgtttattatggttgataac

SEQ ID NO: 174816 - DNA, 25 bp, Saccharomyces pastorianus
tttggtccagtatcaaactcgaact

SEQ ID NO: 174817 - DNA, 25 bp, Saccharomyces pastorianus
atctttggtccagtatcaaactcga

SEQ ID NO: 174818 - DNA, 25 bp, Saccharomyces pastorianus
ctcggatacgaaaagatacatgttt

SEQ ID NO: 174819 - DNA, 25 bp, Saccharomyces pastorianus
tcaaactcgaactcggatacgaaaa

SEQ ID NO: 174820 - DNA, 25 bp, Saccharomyces pastorianus
tatcaaactcgaactcggatacgaa

SEQ ID NO: 174821 - DNA, 25 bp, Saccharomyces pastorianus
tggatatctttggtccagtatcaaa

SEQ ID NO: 174822 - DNA, 25 bp, Saccharomyces pastorianus
gtttatgaagacgagctgtcaataa

SEQ ID NO: 174823 - DNA, 25 bp, Saccharomyces pastorianus
attgcccacgaaatcggcctacatt

SEQ ID NO: 174824 - DNA, 25 bp, Saccharomyces pastorianus
agacgagctgtcaataatggatttt

SEQ ID NO: 174825 - DNA, 25 bp, Saccharomyces pastorianus
ggattgcccacgaaatcggcctaca

SEQ ID NO: 174826 - DNA, 25 bp, Saccharomyces pastorianus
gtaatgtttatgaagacgagctgtc

SEQ ID NO: 174827 - DNA, 25 bp, Saccharomyces pastorianus
ccacgaaatcggcctacatttgaat

SEQ ID NO: 174828 - DNA, 25 bp, Saccharomyces pastorianus
ggcatttaggattgcccacgaaatc

SEQ ID NO: 174829 - DNA, 25 bp, Saccharomyces pastorianus
gggctggcatttaggattgcccacg

SEQ ID NO: 174830 - DNA, 25 bp, Saccharomyces pastorianus
taggattgcccacgaaatcggccta

SEQ ID NO: 174831 - DNA, 25 bp, Saccharomyces pastorianus
tgcccacgaaatcggcctacatttg

SEQ ID NO: 174832 - DNA, 25 bp, Saccharomyces pastorianus
tggcatttaggattgcccacgaaat

SEQ ID NO: 174833 - DNA, 25 bp, Saccharomyces pastorianus
ctattatatcacacagctggacata

SEQ ID NO: 174834 - DNA, 25 bp, Saccharomyces pastorianus
tatcctctgcttacttatatgctga

SEQ ID NO: 174835 - DNA, 25 bp, Saccharomyces pastorianus
ctctgcttacttatatgctgatatc

SEQ ID NO: 174836 - DNA, 25 bp, Saccharomyces pastorianus
acagctggacatatcctctgcttac

SEQ ID NO: 174837 - DNA, 25 bp, Saccharomyces pastorianus
acacagctggacatatcctctgctt

SEQ ID NO: 174838 - DNA, 25 bp, Saccharomyces pastorianus
acatcactatgcactgatgacgtca

SEQ ID NO: 174839 - DNA, 25 bp, Saccharomyces pastorianus
gactattatatcacacagctggaca

SEQ ID NO: 174840 - DNA, 25 bp, Saccharomyces pastorianus
ggacatatcctctgcttacttatat

SEQ ID NO: 174841 - DNA, 25 bp, Saccharomyces pastorianus
tggacatatcctctgcttacttata

SEQ ID NO: 174842 - DNA, 25 bp, Saccharomyces pastorianus
agctggacatatcctctgcttactt

SEQ ID NO: 174843 - DNA, 25 bp, Saccharomyces pastorianus
tatcacacagctggacatatcctct

SEQ ID NO: 174844 - DNA, 25 bp, Saccharomyces pastorianus
aaaagcaccaacaagtgcgtatcct

SEQ ID NO: 174845 - DNA, 25 bp, Saccharomyces pastorianus
tgcgtatcctcaaccgaagcggaac

SEQ ID NO: 174846 - DNA, 25 bp, Saccharomyces pastorianus
gtgcgtatcctcaaccgaagcggaa

SEQ ID NO: 174847 - DNA, 25 bp, Saccharomyces pastorianus
gcgtatcctcaaccgaagcggaact

SEQ ID NO: 174848 - DNA, 25 bp, Saccharomyces pastorianus
aagtgcgtatcctcaaccgaagcgg

SEQ ID NO: 174849 - DNA, 25 bp, Saccharomyces pastorianus
acaagtgcgtatcctcaaccgaagc

SEQ ID NO: 174850 - DNA, 25 bp, Saccharomyces pastorianus
aacaagtgcgtatcctcaaccgaag

SEQ ID NO: 174851 - DNA, 25 bp, Saccharomyces pastorianus
agcaccaacaagtgcgtatcctcaa

SEQ ID NO: 174852 - DNA, 25 bp, Saccharomyces pastorianus
gtatcctcaaccgaagcggaacttc

SEQ ID NO: 174853 - DNA, 25 bp, Saccharomyces pastorianus
caacaagtgcgtatcctcaaccgaa

SEQ ID NO: 174854 - DNA, 25 bp, Saccharomyces pastorianus
agtgcgtatcctcaaccgaagcgga

SEQ ID NO: 174855 - DNA, 25 bp, Saccharomyces pastorianus
agtcagtgataaatttcataccgag

SEQ ID NO: 174856 - DNA, 25 bp, Saccharomyces pastorianus
aacagtgattgatgaccaagtcagt

SEQ ID NO: 174857 - DNA, 25 bp, Saccharomyces pastorianus
taccgagcttatgtgtcttttcgat

SEQ ID NO: 174858 - DNA, 25 bp, Saccharomyces pastorianus
gtcagtgataaatttcataccgagc

SEQ ID NO: 174859 - DNA, 25 bp, Saccharomyces pastorianus
tgttcgctggaacagtgattgatga

SEQ ID NO: 174860 - DNA, 25 bp, Saccharomyces pastorianus
tcagtgataaatttcataccgagct

SEQ ID NO: 174861 - DNA, 25 bp, Saccharomyces pastorianus
ggaacagtgattgatgaccaagtca

SEQ ID NO: 174862 - DNA, 25 bp, Saccharomyces pastorianus
caagtcagtgataaatttcataccg

SEQ ID NO: 174863 - DNA, 25 bp, Saccharomyces pastorianus
cagtgataaatttcataccgagctt

SEQ ID NO: 174864 - DNA, 25 bp, Saccharomyces pastorianus
aagtcagtgataaatttcataccga

SEQ ID NO: 174865 - DNA, 25 bp, Saccharomyces pastorianus
agtgataaatttcataccgagctta

SEQ ID NO: 174866 - DNA, 25 bp, Saccharomyces pastorianus
tcacattaatgaatcaaccgtttca

SEQ ID NO: 174867 - DNA, 25 bp, Saccharomyces pastorianus
acaatacttaagcgatgacaacgaa

SEQ ID NO: 174868 - DNA, 25 bp, Saccharomyces pastorianus
tgaatcaaccgtttcatcacaatac

SEQ ID NO: 174869 - DNA, 25 bp, Saccharomyces pastorianus
atcacaatacttaagcgatgacaac

SEQ ID NO: 174870 - DNA, 25 bp, Saccharomyces pastorianus
gatcacattaatgaatcaaccgttt

SEQ ID NO: 174871 - DNA, 25 bp, Saccharomyces pastorianus
attaatgaatcaaccgtttcatcac

SEQ ID NO: 174872 - DNA, 25 bp, Saccharomyces pastorianus
atgatcacattaatgaatcaaccgt

SEQ ID NO: 174873 - DNA, 25 bp, Saccharomyces pastorianus
atcacattaatgaatcaaccgtttc

SEQ ID NO: 174874 - DNA, 25 bp, Saccharomyces pastorianus
cacaatacttaagcgatgacaacga

SEQ ID NO: 174875 - DNA, 25 bp, Saccharomyces pastorianus
aatgaatcaaccgtttcatcacaat

SEQ ID NO: 174876 - DNA, 25 bp, Saccharomyces pastorianus
tcacaatacttaagcgatgacaacg

SEQ ID NO: 174877 - DNA, 25 bp, Saccharomyces pastorianus
gcagagaaactagccatatcactat

SEQ ID NO: 174878 - DNA, 25 bp, Saccharomyces pastorianus
catacagagactagcccctttacaa

SEQ ID NO: 174879 - DNA, 25 bp, Saccharomyces pastorianus
atgtaacgcgtgtgcccaaccatga

SEQ ID NO: 174880 - DNA, 25 bp, Saccharomyces pastorianus
ccaattagtggctgagatttatctc

SEQ ID NO: 174881 - DNA, 25 bp, Saccharomyces pastorianus
gagatttatctcaataatggtgatc

SEQ ID NO: 174882 - DNA, 25 bp, Saccharomyces pastorianus
gtgtgcccaaccatgatgctagttt

SEQ ID NO: 174883 - DNA, 25 bp, Saccharomyces pastorianus
gatcacatgtaacgcgtgtgcccaa

SEQ ID NO: 174884 - DNA, 25 bp, Saccharomyces pastorianus
agtaccatacagagactagcccctt

SEQ ID NO: 174885 - DNA, 25 bp, Saccharomyces pastorianus
gaaactagccatatcactattgatt

SEQ ID NO: 174886 - DNA, 25 bp, Saccharomyces pastorianus
ggtgatcagtaccatacagagacta

SEQ ID NO: 174887 - DNA, 25 bp, Saccharomyces pastorianus
ccatgatgctagtttatctataccg

SEQ ID NO: 174888 - DNA, 25 bp, Saccharomyces pastorianus
agatgaagtatcaggtaataattta

SEQ ID NO: 174889 - DNA, 25 bp, Saccharomyces pastorianus
acgtatactacatcgagaccaagaa

SEQ ID NO: 174890 - DNA, 25 bp, Saccharomyces pastorianus
catcgagaccaagaagaacattgct

SEQ ID NO: 174891 - DNA, 25 bp, Saccharomyces pastorianus
gtatactacatcgagaccaagaaga

SEQ ID NO: 174892 - DNA, 25 bp, Saccharomyces pastorianus
ctacatcgagaccaagaagaacatt

SEQ ID NO: 174893 - DNA, 25 bp, Saccharomyces pastorianus
atactacatcgagaccaagaagaac

SEQ ID NO: 174894 - DNA, 25 bp, Saccharomyces pastorianus
caggtaataatttatacgtatacta

SEQ ID NO: 174895 - DNA, 25 bp, Saccharomyces pastorianus
cgtatactacatcgagaccaagaag

SEQ ID NO: 174896 - DNA, 25 bp, Saccharomyces pastorianus
gaccaagaagaacattgctgatgtg

SEQ ID NO: 174897 - DNA, 25 bp, Saccharomyces pastorianus
atcaggtaataatttatacgtatac

SEQ ID NO: 174898 - DNA, 25 bp, Saccharomyces pastorianus
tactacatcgagaccaagaagaaca

SEQ ID NO: 174899 - DNA, 25 bp, Saccharomyces pastorianus
ttacagcggacctgagccctatgat

SEQ ID NO: 174900 - DNA, 25 bp, Saccharomyces pastorianus
gattttcagagacatcctggtcgaa

SEQ ID NO: 174901 - DNA, 25 bp, Saccharomyces pastorianus
tctgctgctacaaactcaacagttc

SEQ ID NO: 174902 - DNA, 25 bp, Saccharomyces pastorianus
gagccctatgatccagagtctgatt

SEQ ID NO: 174903 - DNA, 25 bp, Saccharomyces pastorianus
aacagttcaacgtagatcttccgat

SEQ ID NO: 174904 - DNA, 25 bp, Saccharomyces pastorianus
gatctgaagttgattctgctgctac

SEQ ID NO: 174905 - DNA, 25 bp, Saccharomyces pastorianus
actggtaagacactgagatccggaa

SEQ ID NO: 174906 - DNA, 25 bp, Saccharomyces pastorianus
gatcttccgattctgacattgacga

SEQ ID NO: 174907 - DNA, 25 bp, Saccharomyces pastorianus
gaatgcgttgacgagccaatgacgt

SEQ ID NO: 174908 - DNA, 25 bp, Saccharomyces pastorianus
ggatctatcaacttacagcggacct

SEQ ID NO: 174909 - DNA, 25 bp, Saccharomyces pastorianus
atgctggttagttcaggcgtcatat

SEQ ID NO: 174910 - DNA, 25 bp, Saccharomyces pastorianus
tggtcataattgatacaggttcagg

SEQ ID NO: 174911 - DNA, 25 bp, Saccharomyces pastorianus
ataattgatacaggttcaggcgtca

SEQ ID NO: 174912 - DNA, 25 bp, Saccharomyces pastorianus
ggtcataattgatacaggttcaggc

SEQ ID NO: 174913 - DNA, 25 bp, Saccharomyces pastorianus
ctggtcataattgatacaggttcag

SEQ ID NO: 174914 - DNA, 25 bp, Saccharomyces pastorianus
cctggtcataattgatacaggttca

SEQ ID NO: 174915 - DNA, 25 bp, Saccharomyces pastorianus
tcataattgatacaggttcaggcgt

SEQ ID NO: 174916 - DNA, 25 bp, Saccharomyces pastorianus
gtcataattgatacaggttcaggcg

SEQ ID NO: 174917 - DNA, 25 bp, Saccharomyces pastorianus
cataattgatacaggttcaggcgtc

SEQ ID NO: 174918 - DNA, 25 bp, Saccharomyces pastorianus
tatactgaaagttctcctcgaggac

SEQ ID NO: 174919 - DNA, 25 bp, Saccharomyces pastorianus
tatacagaatatactgaaagttctc

SEQ ID NO: 174920 - DNA, 25 bp, Saccharomyces pastorianus
tggaatttatatttttacatactaa

SEQ ID NO: 174921 - DNA, 25 bp, Saccharomyces pastorianus
cgttttatatgtttcgttatcctat

SEQ ID NO: 174922 - DNA, 25 bp, Saccharomyces pastorianus
atggaatttatatttttacatacta

SEQ ID NO: 174923 - DNA, 25 bp, Saccharomyces pastorianus
ttacattatcaatttttgtatttca

SEQ ID NO: 174924 - DNA, 25 bp, Saccharomyces pastorianus
ctgaaagttctcctcgaggacatag

SEQ ID NO: 174925 - DNA, 25 bp, Saccharomyces pastorianus
ggaatttatatttttacatactaat

SEQ ID NO: 174926 - DNA, 25 bp, Saccharomyces pastorianus
aatggaatttatatttttacatact

SEQ ID NO: 174927 - DNA, 25 bp, Saccharomyces pastorianus
gaaagttctcctcgaggacatagga

SEQ ID NO: 174928 - DNA, 25 bp, Saccharomyces pastorianus
tactgaaagttctcctcgaggacat

SEQ ID NO: 174929 - DNA, 25 bp, Saccharomyces pastorianus
acaaacaacacagcgaatacaaaaa

SEQ ID NO: 174930 - DNA, 25 bp, Saccharomyces pastorianus
aaaaatgtttctcgcacatctccaa

SEQ ID NO: 174931 - DNA, 25 bp, Saccharomyces pastorianus
tgaatctaaataaaccgtcccaata

SEQ ID NO: 174932 - DNA, 25 bp, Saccharomyces pastorianus
aatgtttctcgcacatctccaaaca

SEQ ID NO: 174933 - DNA, 25 bp, Saccharomyces pastorianus
atgaatctaaataaaccgtcccaat

SEQ ID NO: 174934 - DNA, 25 bp, Saccharomyces pastorianus
aaatgtttctcgcacatctccaaac

SEQ ID NO: 174935 - DNA, 25 bp, Saccharomyces pastorianus
cgaatacaaaaatgtttctcgcaca

SEQ ID NO: 174936 - DNA, 25 bp, Saccharomyces pastorianus
caaaaatgtttctcgcacatctcca

SEQ ID NO: 174937 - DNA, 25 bp, Saccharomyces pastorianus
gtttctcgcacatctccaaacacga

SEQ ID NO: 174938 - DNA, 25 bp, Saccharomyces pastorianus
tcgcacatctccaaacacgactaac

SEQ ID NO: 174939 - DNA, 25 bp, Saccharomyces pastorianus
atgtttctcgcacatctccaaacac

SEQ ID NO: 174940 - DNA, 25 bp, Saccharomyces pastorianus
gacagcagtaataccacctcaaaca

SEQ ID NO: 174941 - DNA, 25 bp, Saccharomyces pastorianus
atcatcagtagcagcagtggtggcg

SEQ ID NO: 174942 - DNA, 25 bp, Saccharomyces pastorianus
taataccacctcaaacaacaacagt

SEQ ID NO: 174943 - DNA, 25 bp, Saccharomyces pastorianus
gctcgcaacaaaacagcactggcaa

SEQ ID NO: 174944 - DNA, 25 bp, Saccharomyces pastorianus
cggtgatggtattgatgacagcagt

SEQ ID NO: 174945 - DNA, 25 bp, Saccharomyces pastorianus
acatcatcatcagtagcagcagtgg

SEQ ID NO: 174946 - DNA, 25 bp, Saccharomyces pastorianus
ataacgttatcaatctcaacagcaa

SEQ ID NO: 174947 - DNA, 25 bp, Saccharomyces pastorianus
agcactggcaacaacagcaacgaga

SEQ ID NO: 174948 - DNA, 25 bp, Saccharomyces pastorianus
attcaactacaacgccaaggaccgc

SEQ ID NO: 174949 - DNA, 25 bp, Saccharomyces pastorianus
tggcaacaacagcaacgagaacaat

SEQ ID NO: 174950 - DNA, 25 bp, Saccharomyces pastorianus
aaggaccgctcgcaacaaaacagca

SEQ ID NO: 174951 - DNA, 25 bp, Saccharomyces pastorianus
caccaaatcttcatggtagcgccta

SEQ ID NO: 174952 - DNA, 25 bp, Saccharomyces pastorianus
attcaccaaatcttcatggtagcgc

SEQ ID NO: 174953 - DNA, 25 bp, Saccharomyces pastorianus
aaatcttcatggtagcgcctatgct

SEQ ID NO: 174954 - DNA, 25 bp, Saccharomyces pastorianus
tcaccaaatcttcatggtagcgcct

SEQ ID NO: 174955 - DNA, 25 bp, Saccharomyces pastorianus
aaaattcaccaaatcttcatggtag

SEQ ID NO: 174956 - DNA, 25 bp, Saccharomyces pastorianus
caaatcttcatggtagcgcctatgc

SEQ ID NO: 174957 - DNA, 25 bp, Saccharomyces pastorianus
attacatcaaaattcaccaaatctt

SEQ ID NO: 174958 - DNA, 25 bp, Saccharomyces pastorianus
ttacatcaaaattcaccaaatcttc

SEQ ID NO: 174959 - DNA, 25 bp, Saccharomyces pastorianus
ccaaatcttcatggtagcgcctatg

SEQ ID NO: 174960 - DNA, 25 bp, Saccharomyces pastorianus
accaaatcttcatggtagcgcctat

SEQ ID NO: 174961 - DNA, 25 bp, Saccharomyces pastorianus
aaattcaccaaatcttcatggtagc

SEQ ID NO: 174962 - DNA, 25 bp, Saccharomyces pastorianus
gaaaacacgttgtctttggtgaggt

SEQ ID NO: 174963 - DNA, 25 bp, Saccharomyces pastorianus
cactgtgccttgtccatggttggat

SEQ ID NO: 174964 - DNA, 25 bp, Saccharomyces pastorianus
attcttcattaccactgtgccttgt

SEQ ID NO: 174965 - DNA, 25 bp, Saccharomyces pastorianus
tgctggaccaaacactaacggttct

SEQ ID NO: 174966 - DNA, 25 bp, Saccharomyces pastorianus
atggcaaatgctggaccaaacacta

SEQ ID NO: 174967 - DNA, 25 bp, Saccharomyces pastorianus
gaccaaacactaacggttctcaatt

SEQ ID NO: 174968 - DNA, 25 bp, Saccharomyces pastorianus
aatcgaatcatacggtactgcttct

SEQ ID NO: 174969 - DNA, 25 bp, Saccharomyces pastorianus
ggacattgtcaaagcaatcgaatca

SEQ ID NO: 174970 - DNA, 25 bp, Saccharomyces pastorianus
cacgttgtctttggtgaggtaacca

SEQ ID NO: 174971 - DNA, 25 bp, Saccharomyces pastorianus
ttctcaattcttcattaccactgtg

SEQ ID NO: 174972 - DNA, 25 bp, Saccharomyces pastorianus
ggtaaccaaaggtatggacattgtc

SEQ ID NO: 174973 - DNA, 25 bp, Saccharomyces pastorianus
agaagtctcttaagaagaatgcagt

SEQ ID NO: 174974 - DNA, 25 bp, Saccharomyces pastorianus
gtctcttaagaagaatgcagttaca

SEQ ID NO: 174975 - DNA, 25 bp, Saccharomyces pastorianus
aagtctcttaagaagaatgcagtta

SEQ ID NO: 174976 - DNA, 25 bp, Saccharomyces pastorianus
ctcttaagaagaatgcagttacata

SEQ ID NO: 174977 - DNA, 25 bp, Saccharomyces pastorianus
gaagtctcttaagaagaatgcagtt

SEQ ID NO: 174978 - DNA, 25 bp, Saccharomyces pastorianus
agtctcttaagaagaatgcagttac

SEQ ID NO: 174979 - DNA, 25 bp, Saccharomyces pastorianus
tcttaagaagaatgcagttacatat

SEQ ID NO: 174980 - DNA, 25 bp, Saccharomyces pastorianus
cagaagtctcttaagaagaatgcag

SEQ ID NO: 174981 - DNA, 25 bp, Saccharomyces pastorianus
tcagaagtctcttaagaagaatgca

SEQ ID NO: 174982 - DNA, 25 bp, Saccharomyces pastorianus
tctcttaagaagaatgcagttacat

SEQ ID NO: 174983 - DNA, 25 bp, Saccharomyces pastorianus
ttcagaagtctcttaagaagaatgc

SEQ ID NO: 174984 - DNA, 25 bp, Saccharomyces pastorianus
atagagaggcccacaatgcacgtca

SEQ ID NO: 174985 - DNA, 25 bp, Saccharomyces pastorianus
gaagaagaaacctgccgtcatctcc

SEQ ID NO: 174986 - DNA, 25 bp, Saccharomyces pastorianus
acatatcggctctgtttcatcaact

SEQ ID NO: 174987 - DNA, 25 bp, Saccharomyces pastorianus
ttccaatccgtcatcttcattacga

SEQ ID NO: 174988 - DNA, 25 bp, Saccharomyces pastorianus
ttgttggtagcttctaaccctgcgt

SEQ ID NO: 174989 - DNA, 25 bp, Saccharomyces pastorianus
gtcaacgagtgatatcccaacagat

SEQ ID NO: 174990 - DNA, 25 bp, Saccharomyces pastorianus
gtaacaatgccctaatcaaccacaa

SEQ ID NO: 174991 - DNA, 25 bp, Saccharomyces pastorianus
ggattccgatgccacgtcacataat

SEQ ID NO: 174992 - DNA, 25 bp, Saccharomyces pastorianus
aaccctgcgtttgcttcagatgttg

SEQ ID NO: 174993 - DNA, 25 bp, Saccharomyces pastorianus
acggcacccagcactagtaataaca

SEQ ID NO: 174994 - DNA, 25 bp, Saccharomyces pastorianus
gatcggcgaatattcatggtccatc

SEQ ID NO: 174995 - DNA, 25 bp, Saccharomyces pastorianus
cgtcacctgcgtattatcaaccgga

SEQ ID NO: 174996 - DNA, 25 bp, Saccharomyces pastorianus
aacgtcacctgcgtattatcaaccg

SEQ ID NO: 174997 - DNA, 25 bp, Saccharomyces pastorianus
acattatcaaacgtcacctgcgtat

SEQ ID NO: 174998 - DNA, 25 bp, Saccharomyces pastorianus
ttcacattatcaaacgtcacctgcg

SEQ ID NO: 174999 - DNA, 25 bp, Saccharomyces pastorianus
gtcacctgcgtattatcaaccggac

SEQ ID NO: 175000 - DNA, 25 bp, Saccharomyces pastorianus
gatgacgtgttcacattatcaaacg

SEQ ID NO: 175001 - DNA, 25 bp, Saccharomyces pastorianus
tcaaacgtcacctgcgtattatcaa

SEQ ID NO: 175002 - DNA, 25 bp, Saccharomyces pastorianus
tctatgatgacgtgttcacattatc

SEQ ID NO: 175003 - DNA, 25 bp, Saccharomyces pastorianus
tatgatgacgtgttcacattatcaa

SEQ ID NO: 175004 - DNA, 25 bp, Saccharomyces pastorianus
tatcaaacgtcacctgcgtattatc

SEQ ID NO: 175005 - DNA, 25 bp, Saccharomyces pastorianus
attatcaaacgtcacctgcgtatta

SEQ ID NO: 175006 - DNA, 25 bp, Saccharomyces pastorianus
cttgcttggtatgcagaaaaaatcg

SEQ ID NO: 175007 - DNA, 25 bp, Saccharomyces pastorianus
cttttcgccaggtaaacttgcttgg

SEQ ID NO: 175008 - DNA, 25 bp, Saccharomyces pastorianus
ttttcgccaggtaaacttgcttggt

SEQ ID NO: 175009 - DNA, 25 bp, Saccharomyces pastorianus
gcttggtatgcagaaaaaatcgata

SEQ ID NO: 175010 - DNA, 25 bp, Saccharomyces pastorianus
ttgcttggtatgcagaaaaaatcga

SEQ ID NO: 175011 - DNA, 25 bp, Saccharomyces pastorianus
tttcttttcgccaggtaaacttgct

SEQ ID NO: 175012 - DNA, 25 bp, Saccharomyces pastorianus
cttggtatgcagaaaaaatcgatag

SEQ ID NO: 175013 - DNA, 25 bp, Saccharomyces pastorianus
tgcttggtatgcagaaaaaatcgat

SEQ ID NO: 175014 - DNA, 25 bp, Saccharomyces pastorianus
ttcttttcgccaggtaaacttgctt

SEQ ID NO: 175015 - DNA, 25 bp, Saccharomyces pastorianus
ttggtatgcagaaaaaatcgatagc

SEQ ID NO: 175016 - DNA, 25 bp, Saccharomyces pastorianus
aatcatacatctttcataggtttcg

SEQ ID NO: 175017 - DNA, 25 bp, Saccharomyces pastorianus
gagatgctcttgtatctgaacgaat

SEQ ID NO: 175018 - DNA, 25 bp, Saccharomyces pastorianus
tcatacatctttcataggtttcgta

SEQ ID NO: 175019 - DNA, 25 bp, Saccharomyces pastorianus
tacatctttcataggtttcgtatgt

SEQ ID NO: 175020 - DNA, 25 bp, Saccharomyces pastorianus
atggagatgctcttgtatctgaacg

SEQ ID NO: 175021 - DNA, 25 bp, Saccharomyces pastorianus
catacatctttcataggtttcgtat

SEQ ID NO: 175022 - DNA, 25 bp, Saccharomyces pastorianus
tggagatgctcttgtatctgaacga

SEQ ID NO: 175023 - DNA, 25 bp, Saccharomyces pastorianus
ggagatgctcttgtatctgaacgaa

SEQ ID NO: 175024 - DNA, 25 bp, Saccharomyces pastorianus
catctttcataggtttcgtatgtgg

SEQ ID NO: 175025 - DNA, 25 bp, Saccharomyces pastorianus
atcatacatctttcataggtttcgt

SEQ ID NO: 175026 - DNA, 25 bp, Saccharomyces pastorianus
gaatcatacatctttcataggtttc

SEQ ID NO: 175027 - DNA, 25 bp, Saccharomyces pastorianus
tgaaactatcttagcacaaatcaag

SEQ ID NO: 175028 - DNA, 25 bp, Saccharomyces pastorianus
tgacctccacacattttaacaaaag

SEQ ID NO: 175029 - DNA, 25 bp, Saccharomyces pastorianus
acaaaagtgctgaaactatcttagc

SEQ ID NO: 175030 - DNA, 25 bp, Saccharomyces pastorianus
aacaaaagtgctgaaactatcttag

SEQ ID NO: 175031 - DNA, 25 bp, Saccharomyces pastorianus
agtgctgaaactatcttagcacaaa

SEQ ID NO: 175032 - DNA, 25 bp, Saccharomyces pastorianus
caaaagtgctgaaactatcttagca

SEQ ID NO: 175033 - DNA, 25 bp, Saccharomyces pastorianus
aaaagtcagggaaatcaattcagat

SEQ ID NO: 175034 - DNA, 25 bp, Saccharomyces pastorianus
gacctccacacattttaacaaaagt

SEQ ID NO: 175035 - DNA, 25 bp, Saccharomyces pastorianus
gtgctgaaactatcttagcacaaat

SEQ ID NO: 175036 - DNA, 25 bp, Saccharomyces pastorianus
aagtgctgaaactatcttagcacaa

SEQ ID NO: 175037 - DNA, 25 bp, Saccharomyces pastorianus
taacaaaagtgctgaaactatctta

SEQ ID NO: 175038 - DNA, 25 bp, Saccharomyces pastorianus
gtaatgatacggtttgcgattctac

SEQ ID NO: 175039 - DNA, 25 bp, Saccharomyces pastorianus
aagacaaagcaactgtttcctgtat

SEQ ID NO: 175040 - DNA, 25 bp, Saccharomyces pastorianus
gtaatgctaacacatctctactgtc

SEQ ID NO: 175041 - DNA, 25 bp, Saccharomyces pastorianus
gccacatcaacagcaacagacgaag

SEQ ID NO: 175042 - DNA, 25 bp, Saccharomyces pastorianus
cagagtcgaaaaggcatgtccatga

SEQ ID NO: 175043 - DNA, 25 bp, Saccharomyces pastorianus
gtatatgcttatttacccaggcgcc

SEQ ID NO: 175044 - DNA, 25 bp, Saccharomyces pastorianus
ggtttgcgattctacgtaatgctaa

SEQ ID NO: 175045 - DNA, 25 bp, Saccharomyces pastorianus
ggcatgtccatgatggcaagcattt

SEQ ID NO: 175046 - DNA, 25 bp, Saccharomyces pastorianus
aggcgcctacctattgtcatgtaag

SEQ ID NO: 175047 - DNA, 25 bp, Saccharomyces pastorianus
agagtggcagcgaacataagacaaa

SEQ ID NO: 175048 - DNA, 25 bp, Saccharomyces pastorianus
actgtttcctgtattcaattgcaag

SEQ ID NO: 175049 - DNA, 25 bp, Saccharomyces pastorianus
caagagacaacacctgggacatcag

SEQ ID NO: 175050 - DNA, 25 bp, Saccharomyces pastorianus
agagacaacacctgggacatcagct

SEQ ID NO: 175051 - DNA, 25 bp, Saccharomyces pastorianus
aacaagagacaacacctgggacatc

SEQ ID NO: 175052 - DNA, 25 bp, Saccharomyces pastorianus
gagaaccatcatcatgtctctcctc

SEQ ID NO: 175053 - DNA, 25 bp, Saccharomyces pastorianus
aagagacaacacctgggacatcagc

SEQ ID NO: 175054 - DNA, 25 bp, Saccharomyces pastorianus
ccagagaaccatcatcatgtctctc

SEQ ID NO: 175055 - DNA, 25 bp, Saccharomyces pastorianus
acctgctgcagtaccacctgacctg

SEQ ID NO: 175056 - DNA, 25 bp, Saccharomyces pastorianus
aacctgctgcagtaccacctgacct

SEQ ID NO: 175057 - DNA, 25 bp, Saccharomyces pastorianus
cagagaaccatcatcatgtctctcc

SEQ ID NO: 175058 - DNA, 25 bp, Saccharomyces pastorianus
agagaaccatcatcatgtctctcct

SEQ ID NO: 175059 - DNA, 25 bp, Saccharomyces pastorianus
acaagagacaacacctgggacatca

SEQ ID NO: 175060 - DNA, 25 bp, Saccharomyces pastorianus
agcgaactcatttttcgtctgtcct

SEQ ID NO: 175061 - DNA, 25 bp, Saccharomyces pastorianus
catcgacaccagtaactgtggttta

SEQ ID NO: 175062 - DNA, 25 bp, Saccharomyces pastorianus
ttacaaccatttagacccggctgag

SEQ ID NO: 175063 - DNA, 25 bp, Saccharomyces pastorianus
cacaaagagcatggaggtcttttac

SEQ ID NO: 175064 - DNA, 25 bp, Saccharomyces pastorianus
tcatttttcgtctgtcctttcgacc

SEQ ID NO: 175065 - DNA, 25 bp, Saccharomyces pastorianus
gaagctttgttttcatcgacaccag

SEQ ID NO: 175066 - DNA, 25 bp, Saccharomyces pastorianus
tagacccggctgagtttagagaaac

SEQ ID NO: 175067 - DNA, 25 bp, Saccharomyces pastorianus
actgtggtttaatgaagcgaactca

SEQ ID NO: 175068 - DNA, 25 bp, Saccharomyces pastorianus
tttcgacctacccaaaatctgtcag

SEQ ID NO: 175069 - DNA, 25 bp, Saccharomyces pastorianus
ttatacagagacacaaagagcatgg

SEQ ID NO: 175070 - DNA, 25 bp, Saccharomyces pastorianus
gagaaaccatgctgagaagctttgt

SEQ ID NO: 175071 - DNA, 25 bp, Saccharomyces pastorianus
gacagtaccaacagaacggcatgat

SEQ ID NO: 175072 - DNA, 25 bp, Saccharomyces pastorianus
aattcacccaatcttcatggtagcg

SEQ ID NO: 175073 - DNA, 25 bp, Saccharomyces pastorianus
ggacagtaccaacagaacggcatga

SEQ ID NO: 175074 - DNA, 25 bp, Saccharomyces pastorianus
acagaacggcatgatgaccccaaac

SEQ ID NO: 175075 - DNA, 25 bp, Saccharomyces pastorianus
aaaattcacccaatcttcatggtag

SEQ ID NO: 175076 - DNA, 25 bp, Saccharomyces pastorianus
ccaacagaacggcatgatgacccca

SEQ ID NO: 175077 - DNA, 25 bp, Saccharomyces pastorianus
gtaccaacagaacggcatgatgacc

SEQ ID NO: 175078 - DNA, 25 bp, Saccharomyces pastorianus
caaaattcacccaatcttcatggta

SEQ ID NO: 175079 - DNA, 25 bp, Saccharomyces pastorianus
acagtaccaacagaacggcatgatg

SEQ ID NO: 175080 - DNA, 25 bp, Saccharomyces pastorianus
agtaccaacagaacggcatgatgac

SEQ ID NO: 175081 - DNA, 25 bp, Saccharomyces pastorianus
aaattcacccaatcttcatggtagc

SEQ ID NO: 175082 - DNA, 25 bp, Saccharomyces pastorianus
ttgcatttcagcttccacttttttt

SEQ ID NO: 175083 - DNA, 25 bp, Saccharomyces pastorianus
ttgttcctcattccgttttatacgt

SEQ ID NO: 175084 - DNA, 25 bp, Saccharomyces pastorianus
cattccgttttatacgtttcattat

SEQ ID NO: 175085 - DNA, 25 bp, Saccharomyces pastorianus
cattatcctattacattatcaatcc

SEQ ID NO: 175086 - DNA, 25 bp, Saccharomyces pastorianus
cgttttatacgtttcattatcctat

SEQ ID NO: 175087 - DNA, 25 bp, Saccharomyces pastorianus
tgttcctcattccgttttatacgtt

SEQ ID NO: 175088 - DNA, 25 bp, Saccharomyces pastorianus
tccgttttatacgtttcattatcct

SEQ ID NO: 175089 - DNA, 25 bp, Saccharomyces pastorianus
tcattccgttttatacgtttcatta

SEQ ID NO: 175090 - DNA, 25 bp, Saccharomyces pastorianus
gttttatacgtttcattatcctatt

SEQ ID NO: 175091 - DNA, 25 bp, Saccharomyces pastorianus
attgttcctcattccgttttatacg

SEQ ID NO: 175092 - DNA, 25 bp, Saccharomyces pastorianus
ttttatacgtttcattatcctatta

SEQ ID NO: 175093 - DNA, 25 bp, Saccharomyces pastorianus
atcacgagaagaaaccattatgctg

SEQ ID NO: 175094 - DNA, 25 bp, Saccharomyces pastorianus
gacctaattgatcatcctgcgtatg

SEQ ID NO: 175095 - DNA, 25 bp, Saccharomyces pastorianus
gctggatctatgaacgaacacggta

SEQ ID NO: 175096 - DNA, 25 bp, Saccharomyces pastorianus
aactccattaaacacagtcaatacg

SEQ ID NO: 175097 - DNA, 25 bp, Saccharomyces pastorianus
gaaaccattatgctggatctatgaa

SEQ ID NO: 175098 - DNA, 25 bp, Saccharomyces pastorianus
ttccccaaaaactagattgatgccc

SEQ ID NO: 175099 - DNA, 25 bp, Saccharomyces pastorianus
ataagcttagaagatgctcataaac

SEQ ID NO: 175100 - DNA, 25 bp, Saccharomyces pastorianus
tcatcctgcgtatgatttcaaaagg

SEQ ID NO: 175101 - DNA, 25 bp, Saccharomyces pastorianus
gtgcaacagattgaaaactccatta

SEQ ID NO: 175102 - DNA, 25 bp, Saccharomyces pastorianus
gaacacggtatcgatcatgaacctg

SEQ ID NO: 175103 - DNA, 25 bp, Saccharomyces pastorianus
gatgcccaaaattataagcttagaa

SEQ ID NO: 175104 - DNA, 25 bp, Saccharomyces pastorianus
cattatcaatccttgcacttcagct

SEQ ID NO: 175105 - DNA, 25 bp, Saccharomyces pastorianus
tcattccgttttatatgtttcatta

SEQ ID NO: 175106 - DNA, 25 bp, Saccharomyces pastorianus
cataacttatgtcatcatcttaaca

SEQ ID NO: 175107 - DNA, 25 bp, Saccharomyces pastorianus
tcctctaacttcgatgacagcttct

SEQ ID NO: 175108 - DNA, 25 bp, Saccharomyces pastorianus
cattccgttttatatgtttcattat

SEQ ID NO: 175109 - DNA, 25 bp, Saccharomyces pastorianus
ttttatatgtttcattatcctatta

SEQ ID NO: 175110 - DNA, 25 bp, Saccharomyces pastorianus
ataacttatgtcatcatcttaacac

SEQ ID NO: 175111 - DNA, 25 bp, Saccharomyces pastorianus
attccgttttatatgtttcattatc

SEQ ID NO: 175112 - DNA, 25 bp, Saccharomyces pastorianus
taacttatgtcatcatcttaacacc

SEQ ID NO: 175113 - DNA, 25 bp, Saccharomyces pastorianus
ctcattccgttttatatgtttcatt

SEQ ID NO: 175114 - DNA, 25 bp, Saccharomyces pastorianus
ttccgttttatatgtttcattatcc

SEQ ID NO: 175115 - DNA, 25 bp, Saccharomyces pastorianus
caactaatacttaaaggtctatccg

SEQ ID NO: 175116 - DNA, 25 bp, Saccharomyces pastorianus
agattggcctgtcaactaatactta

SEQ ID NO: 175117 - DNA, 25 bp, Saccharomyces pastorianus
tacctacgtaatcaatatcgtacca

SEQ ID NO: 175118 - DNA, 25 bp, Saccharomyces pastorianus
cagattggcctgtcaactaatactt

SEQ ID NO: 175119 - DNA, 25 bp, Saccharomyces pastorianus
ttagcgacagattggcctgtcaact

SEQ ID NO: 175120 - DNA, 25 bp, Saccharomyces pastorianus
ttggcctgtcaactaatacttaaag

SEQ ID NO: 175121 - DNA, 25 bp, Saccharomyces pastorianus
ggcctgtcaactaatacttaaaggt

SEQ ID NO: 175122 - DNA, 25 bp, Saccharomyces pastorianus
tcaaatacctacgtaatcaatatcg

SEQ ID NO: 175123 - DNA, 25 bp, Saccharomyces pastorianus
gattggcctgtcaactaatacttaa

SEQ ID NO: 175124 - DNA, 25 bp, Saccharomyces pastorianus
tagcgacagattggcctgtcaacta

SEQ ID NO: 175125 - DNA, 25 bp, Saccharomyces pastorianus
ctgtcaactaatacttaaaggtcta

SEQ ID NO: 175126 - DNA, 25 bp, Saccharomyces pastorianus
tgacaccgtgcagcttgaggaacag

SEQ ID NO: 175127 - DNA, 25 bp, Saccharomyces pastorianus
tcagggacatcggtcttgtgacacc

SEQ ID NO: 175128 - DNA, 25 bp, Saccharomyces pastorianus
tgtgacaccgtgcagcttgaggaac

SEQ ID NO: 175129 - DNA, 25 bp, Saccharomyces pastorianus
gggacatcggtcttgtgacaccgtg

SEQ ID NO: 175130 - DNA, 25 bp, Saccharomyces pastorianus
acatcggtcttgtgacaccgtgcag

SEQ ID NO: 175131 - DNA, 25 bp, Saccharomyces pastorianus
ctgttttcagggacatcggtcttgt

SEQ ID NO: 175132 - DNA, 25 bp, Saccharomyces pastorianus
gcttgaggaacaggccacaggcgtt

SEQ ID NO: 175133 - DNA, 25 bp, Saccharomyces pastorianus
accgtgcagcttgaggaacaggcca

SEQ ID NO: 175134 - DNA, 25 bp, Saccharomyces pastorianus
ggtcttgtgacaccgtgcagcttga

SEQ ID NO: 175135 - DNA, 25 bp, Saccharomyces pastorianus
gaacaggccacaggcgttgcagagg

SEQ ID NO: 175136 - DNA, 25 bp, Saccharomyces pastorianus
tgtctgttttcagggacatcggtct

SEQ ID NO: 175137 - DNA, 25 bp, Saccharomyces pastorianus
gagaattaaaaccatctactacaat

SEQ ID NO: 175138 - DNA, 25 bp, Saccharomyces pastorianus
ccgagaattaaaaccatctactaca

SEQ ID NO: 175139 - DNA, 25 bp, Saccharomyces pastorianus
taaaaccatctactacaatgaagct

SEQ ID NO: 175140 - DNA, 25 bp, Saccharomyces pastorianus
aaaaccatctactacaatgaagcta

SEQ ID NO: 175141 - DNA, 25 bp, Saccharomyces pastorianus
aattaaaaccatctactacaatgaa

SEQ ID NO: 175142 - DNA, 25 bp, Saccharomyces pastorianus
aaaccatctactacaatgaagctat

SEQ ID NO: 175143 - DNA, 25 bp, Saccharomyces pastorianus
cgagaattaaaaccatctactacaa

SEQ ID NO: 175144 - DNA, 25 bp, Saccharomyces pastorianus
attaaaaccatctactacaatgaag

SEQ ID NO: 175145 - DNA, 25 bp, Saccharomyces pastorianus
gaattaaaaccatctactacaatga

SEQ ID NO: 175146 - DNA, 25 bp, Saccharomyces pastorianus
ctaggcgaaagtgatgaggaaattc

SEQ ID NO: 175147 - DNA, 25 bp, Saccharomyces pastorianus
gtgacaatttgtttattcgtagatg

SEQ ID NO: 175148 - DNA, 25 bp, Saccharomyces pastorianus
taaatctaggcgaaagtgatgagga

SEQ ID NO: 175149 - DNA, 25 bp, Saccharomyces pastorianus
gacaatttgtttattcgtagatgat

SEQ ID NO: 175150 - DNA, 25 bp, Saccharomyces pastorianus
cagtcaagtgacaatttgtttattc

SEQ ID NO: 175151 - DNA, 25 bp, Saccharomyces pastorianus
ttgtttattcgtagatgatatggta

SEQ ID NO: 175152 - DNA, 25 bp, Saccharomyces pastorianus
gcttaagatgcaatacgacaccaag

SEQ ID NO: 175153 - DNA, 25 bp, Saccharomyces pastorianus
agtgacaatttgtttattcgtagat

SEQ ID NO: 175154 - DNA, 25 bp, Saccharomyces pastorianus
aaaacagtcaagtgacaatttgttt

SEQ ID NO: 175155 - DNA, 25 bp, Saccharomyces pastorianus
aagcttaagatgcaatacgacacca

SEQ ID NO: 175156 - DNA, 25 bp, Saccharomyces pastorianus
gtgatgaggaaattcaatatgacat

SEQ ID NO: 175157 - DNA, 25 bp, Saccharomyces pastorianus
ataggtttcgtatgtggagtattgt

SEQ ID NO: 175158 - DNA, 25 bp, Saccharomyces pastorianus
ggtttcgtatgtggagtattgtttt

SEQ ID NO: 175159 - DNA, 25 bp, Saccharomyces pastorianus
ttgttttatggcactcatgtgtatt

SEQ ID NO: 175160 - DNA, 25 bp, Saccharomyces pastorianus
gtattgttttatggcactcatgtgt

SEQ ID NO: 175161 - DNA, 25 bp, Saccharomyces pastorianus
gtttcgtatgtggagtattgtttta

SEQ ID NO: 175162 - DNA, 25 bp, Saccharomyces pastorianus
attgttttatggcactcatgtgtat

SEQ ID NO: 175163 - DNA, 25 bp, Saccharomyces pastorianus
cataggtttcgtatgtggagtattg

SEQ ID NO: 175164 - DNA, 25 bp, Saccharomyces pastorianus
ggagtattgttttatggcactcatg

SEQ ID NO: 175165 - DNA, 25 bp, Saccharomyces pastorianus
agtattgttttatggcactcatgtg

SEQ ID NO: 175166 - DNA, 25 bp, Saccharomyces pastorianus
gtggagtattgttttatggcactca

SEQ ID NO: 175167 - DNA, 25 bp, Saccharomyces pastorianus
ttcataggtttcgtatgtggagtat

SEQ ID NO: 175168 - DNA, 25 bp, Saccharomyces pastorianus
catgatcacaccctatttggagaac

SEQ ID NO: 175169 - DNA, 25 bp, Saccharomyces pastorianus
gaacatttttgtgttacagtaacat

SEQ ID NO: 175170 - DNA, 25 bp, Saccharomyces pastorianus
taacattcgggaaaattgtcccaat

SEQ ID NO: 175171 - DNA, 25 bp, Saccharomyces pastorianus
tcacaccctatttggagaacatttt

SEQ ID NO: 175172 - DNA, 25 bp, Saccharomyces pastorianus
ggaaaattgtcccaatatactattg

SEQ ID NO: 175173 - DNA, 25 bp, Saccharomyces pastorianus
tgtcccaatatactattggccaaaa

SEQ ID NO: 175174 - DNA, 25 bp, Saccharomyces pastorianus
gatcacaccctatttggagaacatt

SEQ ID NO: 175175 - DNA, 25 bp, Saccharomyces pastorianus
aattgtcccaatatactattggcca

SEQ ID NO: 175176 - DNA, 25 bp, Saccharomyces pastorianus
tcccatgatcacaccctatttggag

SEQ ID NO: 175177 - DNA, 25 bp, Saccharomyces pastorianus
caccctatttggagaacatttttgt

SEQ ID NO: 175178 - DNA, 25 bp, Saccharomyces pastorianus
gtgttacagtaacattcgggaaaat

SEQ ID NO: 175179 - DNA, 25 bp, Saccharomyces pastorianus
tatgatgatctttgggattccattg

SEQ ID NO: 175180 - DNA, 25 bp, Saccharomyces pastorianus
taaccatttaaattgtatgatgatc

SEQ ID NO: 175181 - DNA, 25 bp, Saccharomyces pastorianus
aataaccatttaaattgtatgatga

SEQ ID NO: 175182 - DNA, 25 bp, Saccharomyces pastorianus
taataaccatttaaattgtatgatg

SEQ ID NO: 175183 - DNA, 25 bp, Saccharomyces pastorianus
aaccatttaaattgtatgatgatct

SEQ ID NO: 175184 - DNA, 25 bp, Saccharomyces pastorianus
atatattatactagagattctcctc

SEQ ID NO: 175185 - DNA, 25 bp, Saccharomyces pastorianus
atatatattatactagagattctcc

SEQ ID NO: 175186 - DNA, 25 bp, Saccharomyces pastorianus
ataaccatttaaattgtatgatgat

SEQ ID NO: 175187 - DNA, 25 bp, Saccharomyces pastorianus
ttaataaccatttaaattgtatgat

SEQ ID NO: 175188 - DNA, 25 bp, Saccharomyces pastorianus
tatatattatactagagattctcct

SEQ ID NO: 175189 - DNA, 25 bp, Saccharomyces pastorianus
tcacctttaataaccatttaaattg

SEQ ID NO: 175190 - DNA, 25 bp, Saccharomyces pastorianus
gcttgttattacgttaggaccccag

SEQ ID NO: 175191 - DNA, 25 bp, Saccharomyces pastorianus
tctttcttcccattagcgctaaaca

SEQ ID NO: 175192 - DNA, 25 bp, Saccharomyces pastorianus
tttgcgtctttgttcttctgcacaa

SEQ ID NO: 175193 - DNA, 25 bp, Saccharomyces pastorianus
ctttggtagaggtggcttcgtcgta

SEQ ID NO: 175194 - DNA, 25 bp, Saccharomyces pastorianus
atgggtacatgatgcccgttcacaa

SEQ ID NO: 175195 - DNA, 25 bp, Saccharomyces pastorianus
aaccgccatctttcaagtcgatttt

SEQ ID NO: 175196 - DNA, 25 bp, Saccharomyces pastorianus
ggatcctatcatttgtcattctcaa

SEQ ID NO: 175197 - DNA, 25 bp, Saccharomyces pastorianus
agtatctcgggttctggatcctatc

SEQ ID NO: 175198 - DNA, 25 bp, Saccharomyces pastorianus
attttagtcgcactcattgccttga

SEQ ID NO: 175199 - DNA, 25 bp, Saccharomyces pastorianus
ttctcaatattgcaccttctttctt

SEQ ID NO: 175200 - DNA, 25 bp, Saccharomyces pastorianus
gtatcgctatgtcatggttcacctt

SEQ ID NO: 175201 - DNA, 25 bp, Saccharomyces pastorianus
ttcctcatgaacaggtattttacat

SEQ ID NO: 175202 - DNA, 25 bp, Saccharomyces pastorianus
ctttcctcatgaacaggtattttac

SEQ ID NO: 175203 - DNA, 25 bp, Saccharomyces pastorianus
tttgcggttaagaaagtagctaggc

SEQ ID NO: 175204 - DNA, 25 bp, Saccharomyces pastorianus
gatgttgaatttgcggttaagaaag

SEQ ID NO: 175205 - DNA, 25 bp, Saccharomyces pastorianus
actttcctcatgaacaggtatttta

SEQ ID NO: 175206 - DNA, 25 bp, Saccharomyces pastorianus
cggttaagaaagtagctaggctagt

SEQ ID NO: 175207 - DNA, 25 bp, Saccharomyces pastorianus
aactttcctcatgaacaggtatttt

SEQ ID NO: 175208 - DNA, 25 bp, Saccharomyces pastorianus
tgcggttaagaaagtagctaggcta

SEQ ID NO: 175209 - DNA, 25 bp, Saccharomyces pastorianus
ttgcggttaagaaagtagctaggct

SEQ ID NO: 175210 - DNA, 25 bp, Saccharomyces pastorianus
gcggttaagaaagtagctaggctag

SEQ ID NO: 175211 - DNA, 25 bp, Saccharomyces pastorianus
cgatgttgaatttgcggttaagaaa

SEQ ID NO: 175212 - DNA, 25 bp, Saccharomyces pastorianus
aagtctggaaccaccaagatcgaag

SEQ ID NO: 175213 - DNA, 25 bp, Saccharomyces pastorianus
gaatatgagaagtctggaaccacca

SEQ ID NO: 175214 - DNA, 25 bp, Saccharomyces pastorianus
agaagtctggaaccaccaagatcga

SEQ ID NO: 175215 - DNA, 25 bp, Saccharomyces pastorianus
atgagaagtctggaaccaccaagat

SEQ ID NO: 175216 - DNA, 25 bp, Saccharomyces pastorianus
atatgagaagtctggaaccaccaag

SEQ ID NO: 175217 - DNA, 25 bp, Saccharomyces pastorianus
gaagtctggaaccaccaagatcgaa

SEQ ID NO: 175218 - DNA, 25 bp, Saccharomyces pastorianus
gagaagtctggaaccaccaagatcg

SEQ ID NO: 175219 - DNA, 25 bp, Saccharomyces pastorianus
tggaaccaccaagatcgaagaaacg

SEQ ID NO: 175220 - DNA, 25 bp, Saccharomyces pastorianus
gtctggaaccaccaagatcgaagaa

SEQ ID NO: 175221 - DNA, 25 bp, Saccharomyces pastorianus
gttcgaacgaccttaagatatgatg

SEQ ID NO: 175222 - DNA, 25 bp, Saccharomyces pastorianus
tcaaaccagttcgaacgaccttaag

SEQ ID NO: 175223 - DNA, 25 bp, Saccharomyces pastorianus
ttcaatgggcaaccagcttttctat

SEQ ID NO: 175224 - DNA, 25 bp, Saccharomyces pastorianus
ctccttcttttcaattctgtggcaa

SEQ ID NO: 175225 - DNA, 25 bp, Saccharomyces pastorianus
ttgtgaactggccttggtatcccaa

SEQ ID NO: 175226 - DNA, 25 bp, Saccharomyces pastorianus
ggtatcccaatctagcgatagggtt

SEQ ID NO: 175227 - DNA, 25 bp, Saccharomyces pastorianus
aggctctgtacttgaatctcctttt

SEQ ID NO: 175228 - DNA, 25 bp, Saccharomyces pastorianus
gatctatgcatttttgagccaatta

SEQ ID NO: 175229 - DNA, 25 bp, Saccharomyces pastorianus
gccgtctttttcctattgattggta

SEQ ID NO: 175230 - DNA, 25 bp, Saccharomyces pastorianus
aacagtcgacatctaacgcatttga

SEQ ID NO: 175231 - DNA, 25 bp, Saccharomyces pastorianus
aattcttctacagctcttcttgata

SEQ ID NO: 175232 - DNA, 25 bp, Saccharomyces pastorianus
ccccgttcatgtactatcctatatt

SEQ ID NO: 175233 - DNA, 25 bp, Saccharomyces pastorianus
atttgggtatttctctccctactca

SEQ ID NO: 175234 - DNA, 25 bp, Saccharomyces pastorianus
ggacaaacacttcaacccatagagc

SEQ ID NO: 175235 - DNA, 25 bp, Saccharomyces pastorianus
aacacttcaacccatagagcatctg

SEQ ID NO: 175236 - DNA, 25 bp, Saccharomyces pastorianus
ggctgctattcatggacaaacactt

SEQ ID NO: 175237 - DNA, 25 bp, Saccharomyces pastorianus
gctggacaagttagtaatcaacatg

SEQ ID NO: 175238 - DNA, 25 bp, Saccharomyces pastorianus
agagcatctgctagtagctggacaa

SEQ ID NO: 175239 - DNA, 25 bp, Saccharomyces pastorianus
atcaacatgtagttattttcgttaa

SEQ ID NO: 175240 - DNA, 25 bp, Saccharomyces pastorianus
tctattgtcgttgtggctgctattc

SEQ ID NO: 175241 - DNA, 25 bp, Saccharomyces pastorianus
tcgttgtggctgctattcatggaca

SEQ ID NO: 175242 - DNA, 25 bp, Saccharomyces pastorianus
cttcaacccatagagcatctgctag

SEQ ID NO: 175243 - DNA, 25 bp, Saccharomyces pastorianus
gaatggttctattgtcgttgtggct

SEQ ID NO: 175244 - DNA, 25 bp, Saccharomyces pastorianus
atctgctagtagctggacaagttag

SEQ ID NO: 175245 - DNA, 25 bp, Saccharomyces pastorianus
aagaagttgatgccgacatatctga

SEQ ID NO: 175246 - DNA, 25 bp, Saccharomyces pastorianus
aaagaagttgatgccgacatatctg

SEQ ID NO: 175247 - DNA, 25 bp, Saccharomyces pastorianus
agttgatgccgacatatctgaatac

SEQ ID NO: 175248 - DNA, 25 bp, Saccharomyces pastorianus
aaaagaagttgatgccgacatatct

SEQ ID NO: 175249 - DNA, 25 bp, Saccharomyces pastorianus
ttgatgccgacatatctgaatacaa

SEQ ID NO: 175250 - DNA, 25 bp, Saccharomyces pastorianus
tgatgccgacatatctgaatacaat

SEQ ID NO: 175251 - DNA, 25 bp, Saccharomyces pastorianus
aagttgatgccgacatatctgaata

SEQ ID NO: 175252 - DNA, 25 bp, Saccharomyces pastorianus
gttgatgccgacatatctgaataca

SEQ ID NO: 175253 - DNA, 25 bp, Saccharomyces pastorianus
agaagttgatgccgacatatctgaa

SEQ ID NO: 175254 - DNA, 25 bp, Saccharomyces pastorianus
gatgccgacatatctgaatacaata

SEQ ID NO: 175255 - DNA, 25 bp, Saccharomyces pastorianus
ttcttttcttctatactttgccatt

SEQ ID NO: 175256 - DNA, 25 bp, Saccharomyces pastorianus
cattcattaccctatcacgttatca

SEQ ID NO: 175257 - DNA, 25 bp, Saccharomyces pastorianus
tcttttcttctatactttgccattc

SEQ ID NO: 175258 - DNA, 25 bp, Saccharomyces pastorianus
cttctatactttgccattcattacc

SEQ ID NO: 175259 - DNA, 25 bp, Saccharomyces pastorianus
taccctatcacgttatcaatccttg

SEQ ID NO: 175260 - DNA, 25 bp, Saccharomyces pastorianus
cttcttttcttctatactttgccat

SEQ ID NO: 175261 - DNA, 25 bp, Saccharomyces pastorianus
cttttcttctatactttgccattca

SEQ ID NO: 175262 - DNA, 25 bp, Saccharomyces pastorianus
gataatattactctaacttcttttc

SEQ ID NO: 175263 - DNA, 25 bp, Saccharomyces pastorianus
ttttcttctatactttgccattcat

SEQ ID NO: 175264 - DNA, 25 bp, Saccharomyces pastorianus
tattactctaacttcttttcttcta

SEQ ID NO: 175265 - DNA, 25 bp, Saccharomyces pastorianus
atattactctaacttcttttcttct

SEQ ID NO: 175266 - DNA, 25 bp, Saccharomyces pastorianus
tcaggaactcgataagaagccaatt

SEQ ID NO: 175267 - DNA, 25 bp, Saccharomyces pastorianus
gacaataagcgatgcctcatacggc

SEQ ID NO: 175268 - DNA, 25 bp, Saccharomyces pastorianus
atgtacctcaactacagaatctgaa

SEQ ID NO: 175269 - DNA, 25 bp, Saccharomyces pastorianus
aagcttccttaacatgtacctcaac

SEQ ID NO: 175270 - DNA, 25 bp, Saccharomyces pastorianus
gcctcatacggcaatcaactatatt

SEQ ID NO: 175271 - DNA, 25 bp, Saccharomyces pastorianus
ctaagttacctagttcaggaactcg

SEQ ID NO: 175272 - DNA, 25 bp, Saccharomyces pastorianus
tgaaatacatgcagttagtgaagct

SEQ ID NO: 175273 - DNA, 25 bp, Saccharomyces pastorianus
aattggtgacaataagcgatgcctc

SEQ ID NO: 175274 - DNA, 25 bp, Saccharomyces pastorianus
gctataccgctattaaacaacctaa

SEQ ID NO: 175275 - DNA, 25 bp, Saccharomyces pastorianus
gccaattatcaaaggcttatttact

SEQ ID NO: 175276 - DNA, 25 bp, Saccharomyces pastorianus
attatagaccccaaattggtaacat

SEQ ID NO: 175277 - DNA, 25 bp, Saccharomyces pastorianus
gacgattccgaatcagacgagtcgg

SEQ ID NO: 175278 - DNA, 25 bp, Saccharomyces pastorianus
tcatcgttcttaattccatccgcat

SEQ ID NO: 175279 - DNA, 25 bp, Saccharomyces pastorianus
ttccacagcctcatcgttcttaatt

SEQ ID NO: 175280 - DNA, 25 bp, Saccharomyces pastorianus
gttcttaattccatccgcatcgtca

SEQ ID NO: 175281 - DNA, 25 bp, Saccharomyces pastorianus
gcatcgtcacccaagagctccaaat

SEQ ID NO: 175282 - DNA, 25 bp, Saccharomyces pastorianus
tgaaggatcctcgtcttcatcctca

SEQ ID NO: 175283 - DNA, 25 bp, Saccharomyces pastorianus
ttcaccgcctgacgattccgaatca

SEQ ID NO: 175284 - DNA, 25 bp, Saccharomyces pastorianus
agacgcatcttcaccgcctgacgat

SEQ ID NO: 175285 - DNA, 25 bp, Saccharomyces pastorianus
acagcctcatcgttcttaattccat

SEQ ID NO: 175286 - DNA, 25 bp, Saccharomyces pastorianus
agtcggagaaactgccttccacagc

SEQ ID NO: 175287 - DNA, 25 bp, Saccharomyces pastorianus
gacgagtcggagaaactgccttcca

SEQ ID NO: 175288 - DNA, 25 bp, Saccharomyces pastorianus
aatccacattctcttcatggtagcg

SEQ ID NO: 175289 - DNA, 25 bp, Saccharomyces pastorianus
cacattctcttcatggtagcgccta

SEQ ID NO: 175290 - DNA, 25 bp, Saccharomyces pastorianus
tctcttcatggtagcgcctatgctt

SEQ ID NO: 175291 - DNA, 25 bp, Saccharomyces pastorianus
atcatcatgtctctcctcaacctgc

SEQ ID NO: 175292 - DNA, 25 bp, Saccharomyces pastorianus
catcatcatgtctctcctcaacctg

SEQ ID NO: 175293 - DNA, 25 bp, Saccharomyces pastorianus
attctcttcatggtagcgcctatgc

SEQ ID NO: 175294 - DNA, 25 bp, Saccharomyces pastorianus
aacaagagacaacacctgggacatc

SEQ ID NO: 175295 - DNA, 25 bp, Saccharomyces pastorianus
atccacattctcttcatggtagcgc

SEQ ID NO: 175296 - DNA, 25 bp, Saccharomyces pastorianus
ccacattctcttcatggtagcgcct

SEQ ID NO: 175297 - DNA, 25 bp, Saccharomyces pastorianus
acattctcttcatggtagcgcctat

SEQ ID NO: 175298 - DNA, 25 bp, Saccharomyces pastorianus
gaaccatcatcatgtctctcctcaa

SEQ ID NO: 175299 - DNA, 25 bp, Saccharomyces pastorianus
caccacctaagccttcacatttaaa

SEQ ID NO: 175300 - DNA, 25 bp, Saccharomyces pastorianus
atgctgaaatcaagtggcccgattt

SEQ ID NO: 175301 - DNA, 25 bp, Saccharomyces pastorianus
acctaagccttcacatttaaagcct

SEQ ID NO: 175302 - DNA, 25 bp, Saccharomyces pastorianus
gatagataagccaacaatgctgaaa

SEQ ID NO: 175303 - DNA, 25 bp, Saccharomyces pastorianus
aatcaagtggcccgatttcaaaaga

SEQ ID NO: 175304 - DNA, 25 bp, Saccharomyces pastorianus
taagccttcacatttaaagcctaaa

SEQ ID NO: 175305 - DNA, 25 bp, Saccharomyces pastorianus
gccttcacatttaaagcctaaacct

SEQ ID NO: 175306 - DNA, 25 bp, Saccharomyces pastorianus
caatgctgaaatcaagtggcccgat

SEQ ID NO: 175307 - DNA, 25 bp, Saccharomyces pastorianus
gggagatagataagccaacaatgct

SEQ ID NO: 175308 - DNA, 25 bp, Saccharomyces pastorianus
ttcacatttaaagcctaaacctcct

SEQ ID NO: 175309 - DNA, 25 bp, Saccharomyces pastorianus
taaacctcctccaaaaccactgctc

SEQ ID NO: 175310 - DNA, 25 bp, Saccharomyces pastorianus
gaatgcaaaggaagactagtggaaa

SEQ ID NO: 175311 - DNA, 25 bp, Saccharomyces pastorianus
tctcatgaccccacaaatgacttac

SEQ ID NO: 175312 - DNA, 25 bp, Saccharomyces pastorianus
aatattgctagcagaatgcaaagga

SEQ ID NO: 175313 - DNA, 25 bp, Saccharomyces pastorianus
acaaatgacttacttacagttgtaa

SEQ ID NO: 175314 - DNA, 25 bp, Saccharomyces pastorianus
actacaatgagttgtcggatgacga

SEQ ID NO: 175315 - DNA, 25 bp, Saccharomyces pastorianus
gtttatagaattccaacggcaatac

SEQ ID NO: 175316 - DNA, 25 bp, Saccharomyces pastorianus
agcgattacagctctcatgacccca

SEQ ID NO: 175317 - DNA, 25 bp, Saccharomyces pastorianus
aaatgtttatagaattccaacggca

SEQ ID NO: 175318 - DNA, 25 bp, Saccharomyces pastorianus
tcggatgacgagagcgattacagct

SEQ ID NO: 175319 - DNA, 25 bp, Saccharomyces pastorianus
gaccccacaaatgacttacttacag

SEQ ID NO: 175320 - DNA, 25 bp, Saccharomyces pastorianus
atagaattccaacggcaatacaaga

SEQ ID NO: 175321 - DNA, 25 bp, Saccharomyces pastorianus
gctgatgtaatcttaacaagaaata

SEQ ID NO: 175322 - DNA, 25 bp, Saccharomyces pastorianus
tagtgctgatgtaatcttaacaaga

SEQ ID NO: 175323 - DNA, 25 bp, Saccharomyces pastorianus
tgctgatgtaatcttaacaagaaat

SEQ ID NO: 175324 - DNA, 25 bp, Saccharomyces pastorianus
ttagtgctgatgtaatcttaacaag

SEQ ID NO: 175325 - DNA, 25 bp, Saccharomyces pastorianus
gcgcatacctcaaaggcatatagtt

SEQ ID NO: 175326 - DNA, 25 bp, Saccharomyces pastorianus
catatagttgtagcagctctgacct

SEQ ID NO: 175327 - DNA, 25 bp, Saccharomyces pastorianus
agtgctgatgtaatcttaacaagaa

SEQ ID NO: 175328 - DNA, 25 bp, Saccharomyces pastorianus
gcatatagttgtagcagctctgacc

SEQ ID NO: 175329 - DNA, 25 bp, Saccharomyces pastorianus
gtgctgatgtaatcttaacaagaaa

SEQ ID NO: 175330 - DNA, 25 bp, Saccharomyces pastorianus
atatagttgtagcagctctgacctg

SEQ ID NO: 175331 - DNA, 25 bp, Saccharomyces pastorianus
gttagtgctgatgtaatcttaacaa

SEQ ID NO: 175332 - DNA, 25 bp, Saccharomyces pastorianus
agtttggcaggcatcatcaacagct

SEQ ID NO: 175333 - DNA, 25 bp, Saccharomyces pastorianus
tcatcaacagctgaggagcaggtat

SEQ ID NO: 175334 - DNA, 25 bp, Saccharomyces pastorianus
gagaaactggaagtttttcagcgtt

SEQ ID NO: 175335 - DNA, 25 bp, Saccharomyces pastorianus
gaggcgctcgagaaactggaagttt

SEQ ID NO: 175336 - DNA, 25 bp, Saccharomyces pastorianus
gtatgaattgagtttaggaatgcac

SEQ ID NO: 175337 - DNA, 25 bp, Saccharomyces pastorianus
atacggtcgttgtagaggcgctcga

SEQ ID NO: 175338 - DNA, 25 bp, Saccharomyces pastorianus
taaactgccgcattggacgcctttc

SEQ ID NO: 175339 - DNA, 25 bp, Saccharomyces pastorianus
tgatgttccagacggcaaaattgat

SEQ ID NO: 175340 - DNA, 25 bp, Saccharomyces pastorianus
gttccagacggcaaaattgatataa

SEQ ID NO: 175341 - DNA, 25 bp, Saccharomyces pastorianus
ggcaggcatcatcaacagctgagga

SEQ ID NO: 175342 - DNA, 25 bp, Saccharomyces pastorianus
cgatacggtcgttgtagaggcgctc

SEQ ID NO: 175343 - DNA, 25 bp, Saccharomyces pastorianus
tccattgatacggatccgccagaat

SEQ ID NO: 175344 - DNA, 25 bp, Saccharomyces pastorianus
ttgggtggtacggaggaaccatata

SEQ ID NO: 175345 - DNA, 25 bp, Saccharomyces pastorianus
gataatacaccctccattgatacgg

SEQ ID NO: 175346 - DNA, 25 bp, Saccharomyces pastorianus
cgactcctaatataatgcctgacaa

SEQ ID NO: 175347 - DNA, 25 bp, Saccharomyces pastorianus
tacgccctcaatagatgaccgttcg

SEQ ID NO: 175348 - DNA, 25 bp, Saccharomyces pastorianus
aatacaccctccattgatacggatc

SEQ ID NO: 175349 - DNA, 25 bp, Saccharomyces pastorianus
agtacgccctcaatagatgaccgtt

SEQ ID NO: 175350 - DNA, 25 bp, Saccharomyces pastorianus
actactcccatcatctccatagaaa

SEQ ID NO: 175351 - DNA, 25 bp, Saccharomyces pastorianus
attgatacggatccgccagaatatc

SEQ ID NO: 175352 - DNA, 25 bp, Saccharomyces pastorianus
ggaggaaccatatattcaacgaaat

SEQ ID NO: 175353 - DNA, 25 bp, Saccharomyces pastorianus
gatacaaatatcaaatacaggacta

SEQ ID NO: 175354 - DNA, 25 bp, Saccharomyces pastorianus
cgtgccatccagcaaatctcatttg

SEQ ID NO: 175355 - DNA, 25 bp, Saccharomyces pastorianus
gatttgtttgtcatggacgctcaga

SEQ ID NO: 175356 - DNA, 25 bp, Saccharomyces pastorianus
gcacgctatgcaagcagttttttca

SEQ ID NO: 175357 - DNA, 25 bp, Saccharomyces pastorianus
tactccattgttcttagcgtgctac

SEQ ID NO: 175358 - DNA, 25 bp, Saccharomyces pastorianus
gaattattattatctcgccccatct

SEQ ID NO: 175359 - DNA, 25 bp, Saccharomyces pastorianus
gatacattcagatgatccgtgccat

SEQ ID NO: 175360 - DNA, 25 bp, Saccharomyces pastorianus
attagagtatttgcgctctcccaag

SEQ ID NO: 175361 - DNA, 25 bp, Saccharomyces pastorianus
ccggaactggaggtgggatttcaat

SEQ ID NO: 175362 - DNA, 25 bp, Saccharomyces pastorianus
taataattggtgcaccggaactgga

SEQ ID NO: 175363 - DNA, 25 bp, Saccharomyces pastorianus
aagccaagcgcatgtactccattgt

SEQ ID NO: 175364 - DNA, 25 bp, Saccharomyces pastorianus
tgtcttcacaagatgttctgataca

SEQ ID NO: 175365 - DNA, 25 bp, Saccharomyces pastorianus
aactccatcaaacataatcactacg

SEQ ID NO: 175366 - DNA, 25 bp, Saccharomyces pastorianus
gaaaactccatcaaacataatcact

SEQ ID NO: 175367 - DNA, 25 bp, Saccharomyces pastorianus
actccatcaaacataatcactacga

SEQ ID NO: 175368 - DNA, 25 bp, Saccharomyces pastorianus
aaacataatcactacgaagaaagta

SEQ ID NO: 175369 - DNA, 25 bp, Saccharomyces pastorianus
aacataatcactacgaagaaagtat

SEQ ID NO: 175370 - DNA, 25 bp, Saccharomyces pastorianus
tcaaacataatcactacgaagaaag

SEQ ID NO: 175371 - DNA, 25 bp, Saccharomyces pastorianus
aaaactccatcaaacataatcacta

SEQ ID NO: 175372 - DNA, 25 bp, Saccharomyces pastorianus
ctccatcaaacataatcactacgaa

SEQ ID NO: 175373 - DNA, 25 bp, Saccharomyces pastorianus
caaacataatcactacgaagaaagt

SEQ ID NO: 175374 - DNA, 25 bp, Saccharomyces pastorianus
aaactccatcaaacataatcactac

SEQ ID NO: 175375 - DNA, 25 bp, Saccharomyces pastorianus
acataatcactacgaagaaagtatt

SEQ ID NO: 175376 - DNA, 25 bp, Saccharomyces pastorianus
aactccatcaaacataatcactacg

SEQ ID NO: 175377 - DNA, 25 bp, Saccharomyces pastorianus
gaaaactccatcaaacataatcact

SEQ ID NO: 175378 - DNA, 25 bp, Saccharomyces pastorianus
actccatcaaacataatcactacga

SEQ ID NO: 175379 - DNA, 25 bp, Saccharomyces pastorianus
aaacataatcactacgaagaaagta

SEQ ID NO: 175380 - DNA, 25 bp, Saccharomyces pastorianus
aacataatcactacgaagaaagtat

SEQ ID NO: 175381 - DNA, 25 bp, Saccharomyces pastorianus
tcaaacataatcactacgaagaaag

SEQ ID NO: 175382 - DNA, 25 bp, Saccharomyces pastorianus
aaaactccatcaaacataatcacta

SEQ ID NO: 175383 - DNA, 25 bp, Saccharomyces pastorianus
ctccatcaaacataatcactacgaa

SEQ ID NO: 175384 - DNA, 25 bp, Saccharomyces pastorianus
caaacataatcactacgaagaaagt

SEQ ID NO: 175385 - DNA, 25 bp, Saccharomyces pastorianus
aaactccatcaaacataatcactac

SEQ ID NO: 175386 - DNA, 25 bp, Saccharomyces pastorianus
acataatcactacgaagaaagtatt

SEQ ID NO: 175387 - DNA, 25 bp, Saccharomyces pastorianus
agtccatcattttcaatcattccaa

SEQ ID NO: 175388 - DNA, 25 bp, Saccharomyces pastorianus
gataaaagtctaaaactgcccacag

SEQ ID NO: 175389 - DNA, 25 bp, Saccharomyces pastorianus
ggatcctttctatagaacttttgaa

SEQ ID NO: 175390 - DNA, 25 bp, Saccharomyces pastorianus
tacacggttatttcttggtatagat

SEQ ID NO: 175391 - DNA, 25 bp, Saccharomyces pastorianus
agctgataacaatatgggtgtcgat

SEQ ID NO: 175392 - DNA, 25 bp, Saccharomyces pastorianus
actgcccacagttacacggttattt

SEQ ID NO: 175393 - DNA, 25 bp, Saccharomyces pastorianus
acagctgcatacatgacggaagtta

SEQ ID NO: 175394 - DNA, 25 bp, Saccharomyces pastorianus
gaaggttttatgatcctagtggaaa

SEQ ID NO: 175395 - DNA, 25 bp, Saccharomyces pastorianus
aaatttgtttggatcctttctatag

SEQ ID NO: 175396 - DNA, 25 bp, Saccharomyces pastorianus
atacatgacggaagttatctgccaa

SEQ ID NO: 175397 - DNA, 25 bp, Saccharomyces pastorianus
atccgttgatatgcttttaaagtcc

SEQ ID NO: 175398 - DNA, 25 bp, Saccharomyces pastorianus
ttaccaccacacactttaacatcag

SEQ ID NO: 175399 - DNA, 25 bp, Saccharomyces pastorianus
ccacacactttaacatcagaagaaa

SEQ ID NO: 175400 - DNA, 25 bp, Saccharomyces pastorianus
cacacactttaacatcagaagaaaa

SEQ ID NO: 175401 - DNA, 25 bp, Saccharomyces pastorianus
accaccacacactttaacatcagaa

SEQ ID NO: 175402 - DNA, 25 bp, Saccharomyces pastorianus
gtcttaccaccacacactttaacat

SEQ ID NO: 175403 - DNA, 25 bp, Saccharomyces pastorianus
ccaccacacactttaacatcagaag

SEQ ID NO: 175404 - DNA, 25 bp, Saccharomyces pastorianus
taccaccacacactttaacatcaga

SEQ ID NO: 175405 - DNA, 25 bp, Saccharomyces pastorianus
acacactttaacatcagaagaaaac

SEQ ID NO: 175406 - DNA, 25 bp, Saccharomyces pastorianus
tcttaccaccacacactttaacatc

SEQ ID NO: 175407 - DNA, 25 bp, Saccharomyces pastorianus
caccacacactttaacatcagaaga

SEQ ID NO: 175408 - DNA, 25 bp, Saccharomyces pastorianus
accacacactttaacatcagaagaa

SEQ ID NO: 175409 - DNA, 25 bp, Saccharomyces pastorianus
gcggcagaatccatacgtccaaatc

SEQ ID NO: 175410 - DNA, 25 bp, Saccharomyces pastorianus
gaaacctacatgacacgtgaggagc

SEQ ID NO: 175411 - DNA, 25 bp, Saccharomyces pastorianus
gaagattcatcgatctctgattttg

SEQ ID NO: 175412 - DNA, 25 bp, Saccharomyces pastorianus
ttatcaggtgaatctgtcgcggcag

SEQ ID NO: 175413 - DNA, 25 bp, Saccharomyces pastorianus
aaggaatgcgttattgatctctcat

SEQ ID NO: 175414 - DNA, 25 bp, Saccharomyces pastorianus
attgaatggttcgtcgtcatcgtcc

SEQ ID NO: 175415 - DNA, 25 bp, Saccharomyces pastorianus
gatgttgggacaattcgtggcagaa

SEQ ID NO: 175416 - DNA, 25 bp, Saccharomyces pastorianus
gagaaacacaaatcccttcaagcaa

SEQ ID NO: 175417 - DNA, 25 bp, Saccharomyces pastorianus
tatgcacgggcaaagtactggcgaa

SEQ ID NO: 175418 - DNA, 25 bp, Saccharomyces pastorianus
aataacgatgttctcaacccagcat

SEQ ID NO: 175419 - DNA, 25 bp, Saccharomyces pastorianus
ggcatactggacgtggaagattcat

SEQ ID NO: 175420 - DNA, 25 bp, Saccharomyces pastorianus
cacccaatcttcatggtagcgccta

SEQ ID NO: 175421 - DNA, 25 bp, Saccharomyces pastorianus
attcacccaatcttcatggtagcgc

SEQ ID NO: 175422 - DNA, 25 bp, Saccharomyces pastorianus
aattcacccaatcttcatggtagcg

SEQ ID NO: 175423 - DNA, 25 bp, Saccharomyces pastorianus
tcacccaatcttcatggtagcgcct

SEQ ID NO: 175424 - DNA, 25 bp, Saccharomyces pastorianus
aaaattcacccaatcttcatggtag

SEQ ID NO: 175425 - DNA, 25 bp, Saccharomyces pastorianus
cccaatcttcatggtagcgcctatg

SEQ ID NO: 175426 - DNA, 25 bp, Saccharomyces pastorianus
acccaatcttcatggtagcgcctat

SEQ ID NO: 175427 - DNA, 25 bp, Saccharomyces pastorianus
caaaattcacccaatcttcatggta

SEQ ID NO: 175428 - DNA, 25 bp, Saccharomyces pastorianus
caatcttcatggtagcgcctatgct

SEQ ID NO: 175429 - DNA, 25 bp, Saccharomyces pastorianus
atcttcatggtagcgcctatgcttc

SEQ ID NO: 175430 - DNA, 25 bp, Saccharomyces pastorianus
aaattcacccaatcttcatggtagc

SEQ ID NO: 175431 - DNA, 25 bp, Saccharomyces pastorianus
atggccattttgacggattttgatc

SEQ ID NO: 175432 - DNA, 25 bp, Saccharomyces pastorianus
ggaaatgttgccactaaagaccttg

SEQ ID NO: 175433 - DNA, 25 bp, Saccharomyces pastorianus
ttcatttttgttcgcgtgtgctgtt

SEQ ID NO: 175434 - DNA, 25 bp, Saccharomyces pastorianus
gagtagcgagtttgttcgaccgcat

SEQ ID NO: 175435 - DNA, 25 bp, Saccharomyces pastorianus
ttgcgctactttctcaaccttgata

SEQ ID NO: 175436 - DNA, 25 bp, Saccharomyces pastorianus
aaagaccttgattatttgcgctact

SEQ ID NO: 175437 - DNA, 25 bp, Saccharomyces pastorianus
aaggaacacgttcggcccataagcg

SEQ ID NO: 175438 - DNA, 25 bp, Saccharomyces pastorianus
ttcgaccgcattacgtgctcagaaa

SEQ ID NO: 175439 - DNA, 25 bp, Saccharomyces pastorianus
ataaggtccgatttgtttcagcaca

SEQ ID NO: 175440 - DNA, 25 bp, Saccharomyces pastorianus
gggttgaacattttactcgaagcag

SEQ ID NO: 175441 - DNA, 25 bp, Saccharomyces pastorianus
cccgccggaatcgatgtttaccata

SEQ ID NO: 175442 - DNA, 25 bp, Saccharomyces pastorianus
gccattagttggcattttgtgctta

SEQ ID NO: 175443 - DNA, 25 bp, Saccharomyces pastorianus
ttggtgggtgcctcatattggcaat

SEQ ID NO: 175444 - DNA, 25 bp, Saccharomyces pastorianus
cttattggtgggtgcctcatattgg

SEQ ID NO: 175445 - DNA, 25 bp, Saccharomyces pastorianus
attggcaatattacagagcagcttc

SEQ ID NO: 175446 - DNA, 25 bp, Saccharomyces pastorianus
gtgcttattggtgggtgcctcatat

SEQ ID NO: 175447 - DNA, 25 bp, Saccharomyces pastorianus
gagcagcttctgtttaagtaaaatc

SEQ ID NO: 175448 - DNA, 25 bp, Saccharomyces pastorianus
tgggtgcctcatattggcaatatta

SEQ ID NO: 175449 - DNA, 25 bp, Saccharomyces pastorianus
ggcaatattacagagcagcttctgt

SEQ ID NO: 175450 - DNA, 25 bp, Saccharomyces pastorianus
cattttgtgcttattggtgggtgcc

SEQ ID NO: 175451 - DNA, 25 bp, Saccharomyces pastorianus
tttgtgcttattggtgggtgcctca

SEQ ID NO: 175452 - DNA, 25 bp, Saccharomyces pastorianus
cagcttctgtttaagtaaaatccag

SEQ ID NO: 175453 - DNA, 25 bp, Saccharomyces pastorianus
atgatataggaatcctcgaaatgga

SEQ ID NO: 175454 - DNA, 25 bp, Saccharomyces pastorianus
gaatcctcgaaatggaatctatatt

SEQ ID NO: 175455 - DNA, 25 bp, Saccharomyces pastorianus
tcctcgatgatataggaatcctcga

SEQ ID NO: 175456 - DNA, 25 bp, Saccharomyces pastorianus
cctcgatgatataggaatcctcgaa

SEQ ID NO: 175457 - DNA, 25 bp, Saccharomyces pastorianus
aatcctcgaaatggaatctatattt

SEQ ID NO: 175458 - DNA, 25 bp, Saccharomyces pastorianus
cgatgatataggaatcctcgaaatg

SEQ ID NO: 175459 - DNA, 25 bp, Saccharomyces pastorianus
tgatataggaatcctcgaaatggaa

SEQ ID NO: 175460 - DNA, 25 bp, Saccharomyces pastorianus
tcgatgatataggaatcctcgaaat

SEQ ID NO: 175461 - DNA, 25 bp, Saccharomyces pastorianus
tataggaatcctcgaaatggaatct

SEQ ID NO: 175462 - DNA, 25 bp, Saccharomyces pastorianus
gatgatataggaatcctcgaaatgg

SEQ ID NO: 175463 - DNA, 25 bp, Saccharomyces pastorianus
ggaatcctcgaaatggaatctatat

SEQ ID NO: 175464 - DNA, 25 bp, Saccharomyces pastorianus
ctgaacgtgtcagcaatcaatggca

SEQ ID NO: 175465 - DNA, 25 bp, Saccharomyces pastorianus
gaacgtgtcagcaatcaatggcatc

SEQ ID NO: 175466 - DNA, 25 bp, Saccharomyces pastorianus
aactatatcctgaacgtgtcagcaa

SEQ ID NO: 175467 - DNA, 25 bp, Saccharomyces pastorianus
taagcaactatatcctgaacgtgtc

SEQ ID NO: 175468 - DNA, 25 bp, Saccharomyces pastorianus
ctgcattaagcaactatatcctgaa

SEQ ID NO: 175469 - DNA, 25 bp, Saccharomyces pastorianus
attaagcaactatatcctgaacgtg

SEQ ID NO: 175470 - DNA, 25 bp, Saccharomyces pastorianus
tatcctgaacgtgtcagcaatcaat

SEQ ID NO: 175471 - DNA, 25 bp, Saccharomyces pastorianus
gcattaagcaactatatcctgaacg

SEQ ID NO: 175472 - DNA, 25 bp, Saccharomyces pastorianus
aagcaactatatcctgaacgtgtca

SEQ ID NO: 175473 - DNA, 25 bp, Saccharomyces pastorianus
agcaactatatcctgaacgtgtcag

SEQ ID NO: 175474 - DNA, 25 bp, Saccharomyces pastorianus
tatatcctgaacgtgtcagcaatca

SEQ ID NO: 175475 - DNA, 25 bp, Saccharomyces pastorianus
cacctttatctcatggtagcgcctg

SEQ ID NO: 175476 - DNA, 25 bp, Saccharomyces pastorianus
tatctaattacccacctttatctca

SEQ ID NO: 175477 - DNA, 25 bp, Saccharomyces pastorianus
tttatctcatggtagcgcctgtgct

SEQ ID NO: 175478 - DNA, 25 bp, Saccharomyces pastorianus
aattacccacctttatctcatggta

SEQ ID NO: 175479 - DNA, 25 bp, Saccharomyces pastorianus
tacccacctttatctcatggtagcg

SEQ ID NO: 175480 - DNA, 25 bp, Saccharomyces pastorianus
atctaattacccacctttatctcat

SEQ ID NO: 175481 - DNA, 25 bp, Saccharomyces pastorianus
ccacctttatctcatggtagcgcct

SEQ ID NO: 175482 - DNA, 25 bp, Saccharomyces pastorianus
cccacctttatctcatggtagcgcc

SEQ ID NO: 175483 - DNA, 25 bp, Saccharomyces pastorianus
acccacctttatctcatggtagcgc

SEQ ID NO: 175484 - DNA, 25 bp, Saccharomyces pastorianus
tcatggtagcgcctgtgcttgtact

SEQ ID NO: 175485 - DNA, 25 bp, Saccharomyces pastorianus
taattacccacctttatctcatggt

SEQ ID NO: 175486 - DNA, 25 bp, Saccharomyces pastorianus
agttcggctaatgaccgggaatcat

SEQ ID NO: 175487 - DNA, 25 bp, Saccharomyces pastorianus
tatccaaaatcgtcgcagaaagcgt

SEQ ID NO: 175488 - DNA, 25 bp, Saccharomyces pastorianus
aagagctcaggtttcctacgatgcc

SEQ ID NO: 175489 - DNA, 25 bp, Saccharomyces pastorianus
agagcagctgacctattggatagac

SEQ ID NO: 175490 - DNA, 25 bp, Saccharomyces pastorianus
gatgatagctttactgccgagatat

SEQ ID NO: 175491 - DNA, 25 bp, Saccharomyces pastorianus
atgtatcgcagtagaaaccgaccaa

SEQ ID NO: 175492 - DNA, 25 bp, Saccharomyces pastorianus
agggaccaaattctgccttgactca

SEQ ID NO: 175493 - DNA, 25 bp, Saccharomyces pastorianus
gacacgccagtcagtttaagttcgg

SEQ ID NO: 175494 - DNA, 25 bp, Saccharomyces pastorianus
gaaattagtccctgctgatagtgat

SEQ ID NO: 175495 - DNA, 25 bp, Saccharomyces pastorianus
gaaactagccacatttctgacacgc

SEQ ID NO: 175496 - DNA, 25 bp, Saccharomyces pastorianus
attctgccttgactcaatttttaag

SEQ ID NO: 175497 - DNA, 25 bp, Saccharomyces pastorianus
gataaagcgttatatggtctcaagc

SEQ ID NO: 175498 - DNA, 25 bp, Saccharomyces pastorianus
atatggtctcaagcagagtcctaag

SEQ ID NO: 175499 - DNA, 25 bp, Saccharomyces pastorianus
caggactataccaatccaaggataa

SEQ ID NO: 175500 - DNA, 25 bp, Saccharomyces pastorianus
gataacacttatactccaggactat

SEQ ID NO: 175501 - DNA, 25 bp, Saccharomyces pastorianus
ggaacgaccatcttagacgatattt

SEQ ID NO: 175502 - DNA, 25 bp, Saccharomyces pastorianus
gagtcctaaggaatggaacgaccat

SEQ ID NO: 175503 - DNA, 25 bp, Saccharomyces pastorianus
gacgatatttaaacagtattggact

SEQ ID NO: 175504 - DNA, 25 bp, Saccharomyces pastorianus
agacattaaccatgcattcctatat

SEQ ID NO: 175505 - DNA, 25 bp, Saccharomyces pastorianus
atccacatgacaggagatgcgttgt

SEQ ID NO: 175506 - DNA, 25 bp, Saccharomyces pastorianus
gaaaacattagacattaaccatgca

SEQ ID NO: 175507 - DNA, 25 bp, Saccharomyces pastorianus
acaggagatgcgttgttaaactaga

SEQ ID NO: 175508 - DNA, 25 bp, Saccharomyces pastorianus
aagctatgtgcagccacctaatgct

SEQ ID NO: 175509 - DNA, 25 bp, Saccharomyces pastorianus
gaatgtctacgaggacggttgttct

SEQ ID NO: 175510 - DNA, 25 bp, Saccharomyces pastorianus
cagcaacttatgtgccagtacggtt

SEQ ID NO: 175511 - DNA, 25 bp, Saccharomyces pastorianus
ggacggttgttctaataagaccata

SEQ ID NO: 175512 - DNA, 25 bp, Saccharomyces pastorianus
caaggtggtagctctatttcggcca

SEQ ID NO: 175513 - DNA, 25 bp, Saccharomyces pastorianus
agtcctcgtcatcatctgggcgcat

SEQ ID NO: 175514 - DNA, 25 bp, Saccharomyces pastorianus
gtggtagtactgagtcctcgtcatc

SEQ ID NO: 175515 - DNA, 25 bp, Saccharomyces pastorianus
taatgctccttcataccaatccgta

SEQ ID NO: 175516 - DNA, 25 bp, Saccharomyces pastorianus
ttttgcaacaaagcggtggtagtac

SEQ ID NO: 175517 - DNA, 25 bp, Saccharomyces pastorianus
ggcgcatccccgtagcacaaacaag

SEQ ID NO: 175518 - DNA, 25 bp, Saccharomyces pastorianus
taagaccatagcaaacgccacccaa

SEQ ID NO: 175519 - DNA, 25 bp, Saccharomyces pastorianus
accaaattttcatggtagcgcctat

SEQ ID NO: 175520 - DNA, 25 bp, Saccharomyces pastorianus
attcaccaaattttcatggtagcgc

SEQ ID NO: 175521 - DNA, 25 bp, Saccharomyces pastorianus
tcaccaaattttcatggtagcgcct

SEQ ID NO: 175522 - DNA, 25 bp, Saccharomyces pastorianus
aaaattcaccaaattttcatggtag

SEQ ID NO: 175523 - DNA, 25 bp, Saccharomyces pastorianus
aaattttcatggtagcgcctatgct

SEQ ID NO: 175524 - DNA, 25 bp, Saccharomyces pastorianus
attttcatggtagcgcctatgcttc

SEQ ID NO: 175525 - DNA, 25 bp, Saccharomyces pastorianus
caccaaattttcatggtagcgccta

SEQ ID NO: 175526 - DNA, 25 bp, Saccharomyces pastorianus
caaaattcaccaaattttcatggta

SEQ ID NO: 175527 - DNA, 25 bp, Saccharomyces pastorianus
ttcaccaaattttcatggtagcgcc

SEQ ID NO: 175528 - DNA, 25 bp, Saccharomyces pastorianus
caaattttcatggtagcgcctatgc

SEQ ID NO: 175529 - DNA, 25 bp, Saccharomyces pastorianus
aaattcaccaaattttcatggtagc

SEQ ID NO: 175530 - DNA, 25 bp, Saccharomyces pastorianus
taatatgcatcttaccagtcggctc

SEQ ID NO: 175531 - DNA, 25 bp, Saccharomyces pastorianus
aaaactggtcaccaagggtcctgct

SEQ ID NO: 175532 - DNA, 25 bp, Saccharomyces pastorianus
atcctcatcagaacctattatctcc

SEQ ID NO: 175533 - DNA, 25 bp, Saccharomyces pastorianus
ttctaccattaccaaacttaccatc

SEQ ID NO: 175534 - DNA, 25 bp, Saccharomyces pastorianus
attatctcctctattgttgactttg

SEQ ID NO: 175535 - DNA, 25 bp, Saccharomyces pastorianus
attaagatggacttccttatgccgc

SEQ ID NO: 175536 - DNA, 25 bp, Saccharomyces pastorianus
ttaccagtcggctccggattaagat

SEQ ID NO: 175537 - DNA, 25 bp, Saccharomyces pastorianus
accatcaagtgctagtacatctgtt

SEQ ID NO: 175538 - DNA, 25 bp, Saccharomyces pastorianus
gatggctctattacacattgttgtg

SEQ ID NO: 175539 - DNA, 25 bp, Saccharomyces pastorianus
ggaaaccacttcaactttgatttct

SEQ ID NO: 175540 - DNA, 25 bp, Saccharomyces pastorianus
acgatgtctactgaagctgctgtct

SEQ ID NO: 175541 - DNA, 25 bp, Saccharomyces pastorianus
gtgaagcggcgagtccaattctcct

SEQ ID NO: 175542 - DNA, 25 bp, Saccharomyces pastorianus
gtccaattctcctcaaaaattccag

SEQ ID NO: 175543 - DNA, 25 bp, Saccharomyces pastorianus
aagcggcgagtccaattctcctcaa

SEQ ID NO: 175544 - DNA, 25 bp, Saccharomyces pastorianus
aagcgaactacattgttcattctcc

SEQ ID NO: 175545 - DNA, 25 bp, Saccharomyces pastorianus
ggccttgaaagcgaactacattgtt

SEQ ID NO: 175546 - DNA, 25 bp, Saccharomyces pastorianus
ggcgagtccaattctcctcaaaaat

SEQ ID NO: 175547 - DNA, 25 bp, Saccharomyces pastorianus
aattctcctcaaaaattccagataa

SEQ ID NO: 175548 - DNA, 25 bp, Saccharomyces pastorianus
gcgagtccaattctcctcaaaaatt

SEQ ID NO: 175549 - DNA, 25 bp, Saccharomyces pastorianus
ctccgaatgcggaaaacgtagtgga

SEQ ID NO: 175550 - DNA, 25 bp, Saccharomyces pastorianus
tcctcaaaaattccagataacgcaa

SEQ ID NO: 175551 - DNA, 25 bp, Saccharomyces pastorianus
aggtgaagcggcgagtccaattctc

SEQ ID NO: 175552 - DNA, 25 bp, Saccharomyces pastorianus
caagcacctttttggcagggtcaca

SEQ ID NO: 175553 - DNA, 25 bp, Saccharomyces pastorianus
atgatcttctagtgcgtctttttga

SEQ ID NO: 175554 - DNA, 25 bp, Saccharomyces pastorianus
aggtcgctgtctaacgttgcatgca

SEQ ID NO: 175555 - DNA, 25 bp, Saccharomyces pastorianus
aagaacgttatcacactcgtccact

SEQ ID NO: 175556 - DNA, 25 bp, Saccharomyces pastorianus
gttgcatgcagaactactaccatca

SEQ ID NO: 175557 - DNA, 25 bp, Saccharomyces pastorianus
gaagggatcatcacacctcagggtc

SEQ ID NO: 175558 - DNA, 25 bp, Saccharomyces pastorianus
gcatatcacagtacaaggccttttt

SEQ ID NO: 175559 - DNA, 25 bp, Saccharomyces pastorianus
ctcagggtccaatcatagccaattt

SEQ ID NO: 175560 - DNA, 25 bp, Saccharomyces pastorianus
tatagtcgtactctcagtgaggcca

SEQ ID NO: 175561 - DNA, 25 bp, Saccharomyces pastorianus
gaacatagcgactcatttggcccaa

SEQ ID NO: 175562 - DNA, 25 bp, Saccharomyces pastorianus
agtggaattgtttccggcacttcaa

SEQ ID NO: 175563 - DNA, 25 bp, Saccharomyces pastorianus
agcatccaaggacaacgccatttat

SEQ ID NO: 175564 - DNA, 25 bp, Saccharomyces pastorianus
gacagttaccttcttgattttagct

SEQ ID NO: 175565 - DNA, 25 bp, Saccharomyces pastorianus
gagcctgccgctattaatcacagta

SEQ ID NO: 175566 - DNA, 25 bp, Saccharomyces pastorianus
attcgctcaaatgctgtcttaggac

SEQ ID NO: 175567 - DNA, 25 bp, Saccharomyces pastorianus
gaagacgtcactgcattattggagc

SEQ ID NO: 175568 - DNA, 25 bp, Saccharomyces pastorianus
atttttcaccgagttagcatccaag

SEQ ID NO: 175569 - DNA, 25 bp, Saccharomyces pastorianus
tttatcgataaggaacggcaccaaa

SEQ ID NO: 175570 - DNA, 25 bp, Saccharomyces pastorianus
atattgtgaaaagagcctgccgcta

SEQ ID NO: 175571 - DNA, 25 bp, Saccharomyces pastorianus
gattatttgtatcgccgtttgcatg

SEQ ID NO: 175572 - DNA, 25 bp, Saccharomyces pastorianus
ggccaaatgcctagacaatccagac

SEQ ID NO: 175573 - DNA, 25 bp, Saccharomyces pastorianus
gggatgatattgcattcgtactaaa

SEQ ID NO: 175574 - DNA, 25 bp, Saccharomyces pastorianus
atttggacggtgtgaccatggacga

SEQ ID NO: 175575 - DNA, 25 bp, Saccharomyces pastorianus
aaacgacgaccaggtggacgacata

SEQ ID NO: 175576 - DNA, 25 bp, Saccharomyces pastorianus
ggacgacatactgcagtctgccaag

SEQ ID NO: 175577 - DNA, 25 bp, Saccharomyces pastorianus
gaggaaagttgcgaaggactccaag

SEQ ID NO: 175578 - DNA, 25 bp, Saccharomyces pastorianus
gtcaacttgaagaaacaactgcgcc

SEQ ID NO: 175579 - DNA, 25 bp, Saccharomyces pastorianus
aaggagctcatgaaaagacgtggga

SEQ ID NO: 175580 - DNA, 25 bp, Saccharomyces pastorianus
acaactgcgccagcgcttgaaggga

SEQ ID NO: 175581 - DNA, 25 bp, Saccharomyces pastorianus
ggagtctgccaagagtttcattcta

SEQ ID NO: 175582 - DNA, 25 bp, Saccharomyces pastorianus
gaagtactaccttgtgttgagcagt

SEQ ID NO: 175583 - DNA, 25 bp, Saccharomyces pastorianus
gagggaaatttgtggcccagttcta

SEQ ID NO: 175584 - DNA, 25 bp, Saccharomyces pastorianus
ttgtggtggacgacccagagtctaa

SEQ ID NO: 175585 - DNA, 25 bp, Saccharomyces pastorianus
cctgtgcttcggttacttctaagga

SEQ ID NO: 175586 - DNA, 25 bp, Saccharomyces pastorianus
gcctgtgcttcggttacttctaagg

SEQ ID NO: 175587 - DNA, 25 bp, Saccharomyces pastorianus
agtccacacaaatcagatcgttaga

SEQ ID NO: 175588 - DNA, 25 bp, Saccharomyces pastorianus
tgcttcggttacttctaaggaagtc

SEQ ID NO: 175589 - DNA, 25 bp, Saccharomyces pastorianus
agcgcctgtgcttcggttacttcta

SEQ ID NO: 175590 - DNA, 25 bp, Saccharomyces pastorianus
gcgcctgtgcttcggttacttctaa

SEQ ID NO: 175591 - DNA, 25 bp, Saccharomyces pastorianus
cacacaaatcagatcgttagacgtt

SEQ ID NO: 175592 - DNA, 25 bp, Saccharomyces pastorianus
ctgtgcttcggttacttctaaggaa

SEQ ID NO: 175593 - DNA, 25 bp, Saccharomyces pastorianus
cgcctgtgcttcggttacttctaag

SEQ ID NO: 175594 - DNA, 25 bp, Saccharomyces pastorianus
gtgcttcggttacttctaaggaagt

SEQ ID NO: 175595 - DNA, 25 bp, Saccharomyces pastorianus
tgtgcttcggttacttctaaggaag

SEQ ID NO: 175596 - DNA, 25 bp, Saccharomyces pastorianus
gagctttcaatgaggaaccgcccgc

SEQ ID NO: 175597 - DNA, 25 bp, Saccharomyces pastorianus
atggctctcaattgaaccgtctatt

SEQ ID NO: 175598 - DNA, 25 bp, Saccharomyces pastorianus
agttcacgtcttctgaaaccactgt

SEQ ID NO: 175599 - DNA, 25 bp, Saccharomyces pastorianus
ggacatattcagacagacttttgga

SEQ ID NO: 175600 - DNA, 25 bp, Saccharomyces pastorianus
ggaaccgcccgcaaatgtgaatgga

SEQ ID NO: 175601 - DNA, 25 bp, Saccharomyces pastorianus
gtttcggttccttatacaatcctga

SEQ ID NO: 175602 - DNA, 25 bp, Saccharomyces pastorianus
atcgtttgttggatcatggctctca

SEQ ID NO: 175603 - DNA, 25 bp, Saccharomyces pastorianus
gccaagttcagttcagtttcggttc

SEQ ID NO: 175604 - DNA, 25 bp, Saccharomyces pastorianus
gagtctcaggttgtaatgccttctg

SEQ ID NO: 175605 - DNA, 25 bp, Saccharomyces pastorianus
tattcgaatcccaggagctttcaat

SEQ ID NO: 175606 - DNA, 25 bp, Saccharomyces pastorianus
aaagtacgcgttcgaggtcagtcct

SEQ ID NO: 175607 - DNA, 25 bp, Saccharomyces pastorianus
acacttgcacaaactctagaggatc

SEQ ID NO: 175608 - DNA, 25 bp, Saccharomyces pastorianus
acttgcacaaactctagaggatccc

SEQ ID NO: 175609 - DNA, 25 bp, Saccharomyces pastorianus
aggaaggaagcttagcgcaccaggt

SEQ ID NO: 175610 - DNA, 25 bp, Saccharomyces pastorianus
cacttgcacaaactctagaggatcc

SEQ ID NO: 175611 - DNA, 25 bp, Saccharomyces pastorianus
gaaggaagcttagcgcaccaggtca

SEQ ID NO: 175612 - DNA, 25 bp, Saccharomyces pastorianus
aacacacttgcacaaactctagagg

SEQ ID NO: 175613 - DNA, 25 bp, Saccharomyces pastorianus
acacacttgcacaaactctagagga

SEQ ID NO: 175614 - DNA, 25 bp, Saccharomyces pastorianus
attcttggcttggaaatcaaatacc

SEQ ID NO: 175615 - DNA, 25 bp, Saccharomyces pastorianus
cacacttgcacaaactctagaggat

SEQ ID NO: 175616 - DNA, 25 bp, Saccharomyces pastorianus
ggaagcttagcgcaccaggtcaacc

SEQ ID NO: 175617 - DNA, 25 bp, Saccharomyces pastorianus
caaaaggaaggaagcttagcgcacc

SEQ ID NO: 175618 - DNA, 25 bp, Saccharomyces pastorianus
ttctaaagtctcactactggccgca

SEQ ID NO: 175619 - DNA, 25 bp, Saccharomyces pastorianus
aaagtctcactactggccgcatctg

SEQ ID NO: 175620 - DNA, 25 bp, Saccharomyces pastorianus
actggccgcatctgcatctgtcgct

SEQ ID NO: 175621 - DNA, 25 bp, Saccharomyces pastorianus
gaaattttctaaagtctcactactg

SEQ ID NO: 175622 - DNA, 25 bp, Saccharomyces pastorianus
atctgtcgctttatctgccccagtt

SEQ ID NO: 175623 - DNA, 25 bp, Saccharomyces pastorianus
ctgccccagttgctgtgactgtcac

SEQ ID NO: 175624 - DNA, 25 bp, Saccharomyces pastorianus
ttttctaaagtctcactactggccg

SEQ ID NO: 175625 - DNA, 25 bp, Saccharomyces pastorianus
tttatctgccccagttgctgtgact

SEQ ID NO: 175626 - DNA, 25 bp, Saccharomyces pastorianus
actactggccgcatctgcatctgtc

SEQ ID NO: 175627 - DNA, 25 bp, Saccharomyces pastorianus
taaagtctcactactggccgcatct

SEQ ID NO: 175628 - DNA, 25 bp, Saccharomyces pastorianus
tatctgccccagttgctgtgactgt

SEQ ID NO: 175629 - DNA, 25 bp, Saccharomyces pastorianus
gaaggcgattcatatgtagtgccag

SEQ ID NO: 175630 - DNA, 25 bp, Saccharomyces pastorianus
catatgtagtgccaggtaatgttcc

SEQ ID NO: 175631 - DNA, 25 bp, Saccharomyces pastorianus
tagtgccaggtaatgttcctcacag

SEQ ID NO: 175632 - DNA, 25 bp, Saccharomyces pastorianus
tgttcctcacagtcctggtcggtgt

SEQ ID NO: 175633 - DNA, 25 bp, Saccharomyces pastorianus
cgattcatatgtagtgccaggtaat

SEQ ID NO: 175634 - DNA, 25 bp, Saccharomyces pastorianus
atcattatctatgaaggcgattcat

SEQ ID NO: 175635 - DNA, 25 bp, Saccharomyces pastorianus
agtgccaggtaatgttcctcacagt

SEQ ID NO: 175636 - DNA, 25 bp, Saccharomyces pastorianus
tatgtagtgccaggtaatgttcctc

SEQ ID NO: 175637 - DNA, 25 bp, Saccharomyces pastorianus
gcgattcatatgtagtgccaggtaa

SEQ ID NO: 175638 - DNA, 25 bp, Saccharomyces pastorianus
tgtagtgccaggtaatgttcctcac

SEQ ID NO: 175639 - DNA, 25 bp, Saccharomyces pastorianus
gtagtgccaggtaatgttcctcaca

SEQ ID NO: 175640 - DNA, 25 bp, Saccharomyces pastorianus
agccaacagcattatctgatgttac

SEQ ID NO: 175641 - DNA, 25 bp, Saccharomyces pastorianus
gggtgagaattcttcatctgtacac

SEQ ID NO: 175642 - DNA, 25 bp, Saccharomyces pastorianus
gcagaaattccagccaaatgagact

SEQ ID NO: 175643 - DNA, 25 bp, Saccharomyces pastorianus
gcaatttttatctactgcttggcta

SEQ ID NO: 175644 - DNA, 25 bp, Saccharomyces pastorianus
agagtaccgttgatgaagctcccaa

SEQ ID NO: 175645 - DNA, 25 bp, Saccharomyces pastorianus
gatgttacattggacgcaattgcaa

SEQ ID NO: 175646 - DNA, 25 bp, Saccharomyces pastorianus
gaggaaacttctactaacgatacag

SEQ ID NO: 175647 - DNA, 25 bp, Saccharomyces pastorianus
cgatggcgacgtgaattctttgggt

SEQ ID NO: 175648 - DNA, 25 bp, Saccharomyces pastorianus
aatctcggaaaacaggacgcatcag

SEQ ID NO: 175649 - DNA, 25 bp, Saccharomyces pastorianus
gaatcgagtccagatgcagcggtga

SEQ ID NO: 175650 - DNA, 25 bp, Saccharomyces pastorianus
ctgcttggctaatgacgccagcgat

SEQ ID NO: 175651 - DNA, 25 bp, Saccharomyces pastorianus
acgtatactacatcgagaccaagat

SEQ ID NO: 175652 - DNA, 25 bp, Saccharomyces pastorianus
tatactacatcgagaccaagatgaa

SEQ ID NO: 175653 - DNA, 25 bp, Saccharomyces pastorianus
gtatactacatcgagaccaagatga

SEQ ID NO: 175654 - DNA, 25 bp, Saccharomyces pastorianus
ctacatcgagaccaagatgaacatt

SEQ ID NO: 175655 - DNA, 25 bp, Saccharomyces pastorianus
atactacatcgagaccaagatgaac

SEQ ID NO: 175656 - DNA, 25 bp, Saccharomyces pastorianus
acatcgagaccaagatgaacattgc

SEQ ID NO: 175657 - DNA, 25 bp, Saccharomyces pastorianus
tacatcgagaccaagatgaacattg

SEQ ID NO: 175658 - DNA, 25 bp, Saccharomyces pastorianus
cgtatactacatcgagaccaagatg

SEQ ID NO: 175659 - DNA, 25 bp, Saccharomyces pastorianus
agaccaagatgaacattgctgatgt

SEQ ID NO: 175660 - DNA, 25 bp, Saccharomyces pastorianus
atcgagaccaagatgaacattgctg

SEQ ID NO: 175661 - DNA, 25 bp, Saccharomyces pastorianus
tactacatcgagaccaagatgaaca

SEQ ID NO: 175662 - DNA, 25 bp, Saccharomyces pastorianus
tcatcgatgaccgtatattcagaaa

SEQ ID NO: 175663 - DNA, 25 bp, Saccharomyces pastorianus
cctttctcttcaactgatcatcgat

SEQ ID NO: 175664 - DNA, 25 bp, Saccharomyces pastorianus
aaacgacttcaacggtgtgatatcg

SEQ ID NO: 175665 - DNA, 25 bp, Saccharomyces pastorianus
ttcaactgatcatcgatgaccgtat

SEQ ID NO: 175666 - DNA, 25 bp, Saccharomyces pastorianus
tttctcttcaactgatcatcgatga

SEQ ID NO: 175667 - DNA, 25 bp, Saccharomyces pastorianus
ggcctttctcttcaactgatcatcg

SEQ ID NO: 175668 - DNA, 25 bp, Saccharomyces pastorianus
gaccgtatattcagaaacgacttca

SEQ ID NO: 175669 - DNA, 25 bp, Saccharomyces pastorianus
gatgaccgtatattcagaaacgact

SEQ ID NO: 175670 - DNA, 25 bp, Saccharomyces pastorianus
actgatcatcgatgaccgtatattc

SEQ ID NO: 175671 - DNA, 25 bp, Saccharomyces pastorianus
cagaaacgacttcaacggtgtgata

SEQ ID NO: 175672 - DNA, 25 bp, Saccharomyces pastorianus
ctcttcaactgatcatcgatgaccg

SEQ ID NO: 175673 - DNA, 25 bp, Saccharomyces pastorianus
agagttttattcaatcaccgacgga

SEQ ID NO: 175674 - DNA, 25 bp, Saccharomyces pastorianus
tgtaatacaattccgctcaagcata

SEQ ID NO: 175675 - DNA, 25 bp, Saccharomyces pastorianus
tcatccaggtaatccggaagcgatt

SEQ ID NO: 175676 - DNA, 25 bp, Saccharomyces pastorianus
tacagccccaagacagtacgagaaa

SEQ ID NO: 175677 - DNA, 25 bp, Saccharomyces pastorianus
tcaagcatatcgactccgggcagga

SEQ ID NO: 175678 - DNA, 25 bp, Saccharomyces pastorianus
gaaatatcaatcttgacctacagcc

SEQ ID NO: 175679 - DNA, 25 bp, Saccharomyces pastorianus
gaaacaggctaccaacgaggacgaa

SEQ ID NO: 175680 - DNA, 25 bp, Saccharomyces pastorianus
ttttcaggttcaggatcctcgggat

SEQ ID NO: 175681 - DNA, 25 bp, Saccharomyces pastorianus
ttctcatcgaaattgtatccaggtg

SEQ ID NO: 175682 - DNA, 25 bp, Saccharomyces pastorianus
ggctgctgcaagacgacgggttact

SEQ ID NO: 175683 - DNA, 25 bp, Saccharomyces pastorianus
gacgctgactttggtctcatatctg

SEQ ID NO: 175684 - DNA, 25 bp, Saccharomyces pastorianus
ttaaaccggagctatctgcaaccca

SEQ ID NO: 175685 - DNA, 25 bp, Saccharomyces pastorianus
ttgaaggcttaaaccggagctatct

SEQ ID NO: 175686 - DNA, 25 bp, Saccharomyces pastorianus
attgaaggcttaaaccggagctatc

SEQ ID NO: 175687 - DNA, 25 bp, Saccharomyces pastorianus
cttaaaccggagctatctgcaaccc

SEQ ID NO: 175688 - DNA, 25 bp, Saccharomyces pastorianus
ccagctattgaaggcttaaaccgga

SEQ ID NO: 175689 - DNA, 25 bp, Saccharomyces pastorianus
tgaaggcttaaaccggagctatctg

SEQ ID NO: 175690 - DNA, 25 bp, Saccharomyces pastorianus
ggcttaaaccggagctatctgcaac

SEQ ID NO: 175691 - DNA, 25 bp, Saccharomyces pastorianus
aggcttaaaccggagctatctgcaa

SEQ ID NO: 175692 - DNA, 25 bp, Saccharomyces pastorianus
tattgaaggcttaaaccggagctat

SEQ ID NO: 175693 - DNA, 25 bp, Saccharomyces pastorianus
gctattgaaggcttaaaccggagct

SEQ ID NO: 175694 - DNA, 25 bp, Saccharomyces pastorianus
gcttaaaccggagctatctgcaacc

SEQ ID NO: 175695 - DNA, 25 bp, Saccharomyces pastorianus
tatgtcagaagttccagcgtctcac

SEQ ID NO: 175696 - DNA, 25 bp, Saccharomyces pastorianus
gctattgacttctacacgcaggtgg

SEQ ID NO: 175697 - DNA, 25 bp, Saccharomyces pastorianus
aattccccgcgttcaaatcaacaga

SEQ ID NO: 175698 - DNA, 25 bp, Saccharomyces pastorianus
gtcccttacgttgccttgaagactg

SEQ ID NO: 175699 - DNA, 25 bp, Saccharomyces pastorianus
aattcatccattttgtcagcgtccc

SEQ ID NO: 175700 - DNA, 25 bp, Saccharomyces pastorianus
gtaacttatcttcttcccatgatgg

SEQ ID NO: 175701 - DNA, 25 bp, Saccharomyces pastorianus
agctgtgcagcattcgacatcggaa

SEQ ID NO: 175702 - DNA, 25 bp, Saccharomyces pastorianus
gacatcggaatctgagctggactat

SEQ ID NO: 175703 - DNA, 25 bp, Saccharomyces pastorianus
aacttcactgccacggtcttgaatg

SEQ ID NO: 175704 - DNA, 25 bp, Saccharomyces pastorianus
ggatttgctcaggacgaatgcgttt

SEQ ID NO: 175705 - DNA, 25 bp, Saccharomyces pastorianus
gatcgtgtttgtttggtaattccca

SEQ ID NO: 175706 - DNA, 25 bp, Saccharomyces pastorianus
acgtctgatgaacccgtacctgaat

SEQ ID NO: 175707 - DNA, 25 bp, Saccharomyces pastorianus
ttcaccaacgtctgatgaacccgta

SEQ ID NO: 175708 - DNA, 25 bp, Saccharomyces pastorianus
gaaaagcagatactagtattcgact

SEQ ID NO: 175709 - DNA, 25 bp, Saccharomyces pastorianus
tctagtcagtaatccacacgaaatt

SEQ ID NO: 175710 - DNA, 25 bp, Saccharomyces pastorianus
gttctaatccaaactctagccttca

SEQ ID NO: 175711 - DNA, 25 bp, Saccharomyces pastorianus
tagccttcattcaccaacgtctgat

SEQ ID NO: 175712 - DNA, 25 bp, Saccharomyces pastorianus
taatccaaactctagccttcattca

SEQ ID NO: 175713 - DNA, 25 bp, Saccharomyces pastorianus
cattggcactaagttctaatccaaa

SEQ ID NO: 175714 - DNA, 25 bp, Saccharomyces pastorianus
tattcgactagaaggtgatgagtta

SEQ ID NO: 175715 - DNA, 25 bp, Saccharomyces pastorianus
aaagattctctagtcagtaatccac

SEQ ID NO: 175716 - DNA, 25 bp, Saccharomyces pastorianus
attctctagtcagtaatccacacga

SEQ ID NO: 175717 - DNA, 25 bp, Saccharomyces pastorianus
ttaccctcaaatatctggctggacc

SEQ ID NO: 175718 - DNA, 25 bp, Saccharomyces pastorianus
tagctacttacgactttaccctcaa

SEQ ID NO: 175719 - DNA, 25 bp, Saccharomyces pastorianus
acgactttaccctcaaatatctggc

SEQ ID NO: 175720 - DNA, 25 bp, Saccharomyces pastorianus
tcaaatatctggctggacccaagaa

SEQ ID NO: 175721 - DNA, 25 bp, Saccharomyces pastorianus
agaacacctagctacttacgacttt

SEQ ID NO: 175722 - DNA, 25 bp, Saccharomyces pastorianus
actttaccctcaaatatctggctgg

SEQ ID NO: 175723 - DNA, 25 bp, Saccharomyces pastorianus
gaatgtcgcagatgcaatataccgt

SEQ ID NO: 175724 - DNA, 25 bp, Saccharomyces pastorianus
gctacttacgactttaccctcaaat

SEQ ID NO: 175725 - DNA, 25 bp, Saccharomyces pastorianus
gaacacctagctacttacgacttta

SEQ ID NO: 175726 - DNA, 25 bp, Saccharomyces pastorianus
gcccagtgctggctagaacacctag

SEQ ID NO: 175727 - DNA, 25 bp, Saccharomyces pastorianus
tctggctggacccaagaatgtcgca

SEQ ID NO: 175728 - DNA, 25 bp, Saccharomyces pastorianus
tcaagtgcatactttgaaattcaat

SEQ ID NO: 175729 - DNA, 25 bp, Saccharomyces pastorianus
cacgttgtttcaagtgcatactttg

SEQ ID NO: 175730 - DNA, 25 bp, Saccharomyces pastorianus
gtctacacgttgtttcaagtgcata

SEQ ID NO: 175731 - DNA, 25 bp, Saccharomyces pastorianus
caagtgcatactttgaaattcaata

SEQ ID NO: 175732 - DNA, 25 bp, Saccharomyces pastorianus
tggtctacacgttgtttcaagtgca

SEQ ID NO: 175733 - DNA, 25 bp, Saccharomyces pastorianus
atggtctacacgttgtttcaagtgc

SEQ ID NO: 175734 - DNA, 25 bp, Saccharomyces pastorianus
ctacacgttgtttcaagtgcatact

SEQ ID NO: 175735 - DNA, 25 bp, Saccharomyces pastorianus
acacgttgtttcaagtgcatacttt

SEQ ID NO: 175736 - DNA, 25 bp, Saccharomyces pastorianus
gtttcaagtgcatactttgaaattc

SEQ ID NO: 175737 - DNA, 25 bp, Saccharomyces pastorianus
agtgcatactttgaaattcaataga

SEQ ID NO: 175738 - DNA, 25 bp, Saccharomyces pastorianus
ggtctacacgttgtttcaagtgcat

SEQ ID NO: 175739 - DNA, 25 bp, Saccharomyces pastorianus
aaccaaccatattacaagtcacaaa

SEQ ID NO: 175740 - DNA, 25 bp, Saccharomyces pastorianus
gtaaccaaccatattacaagtcaca

SEQ ID NO: 175741 - DNA, 25 bp, Saccharomyces pastorianus
tggtaaccaaccatattacaagtca

SEQ ID NO: 175742 - DNA, 25 bp, Saccharomyces pastorianus
atggtaaccaaccatattacaagtc

SEQ ID NO: 175743 - DNA, 25 bp, Saccharomyces pastorianus
tatggtaaccaaccatattacaagt

SEQ ID NO: 175744 - DNA, 25 bp, Saccharomyces pastorianus
accaaccatattacaagtcacaaat

SEQ ID NO: 175745 - DNA, 25 bp, Saccharomyces pastorianus
ggtaaccaaccatattacaagtcac

SEQ ID NO: 175746 - DNA, 25 bp, Saccharomyces pastorianus
taaccaaccatattacaagtcacaa

SEQ ID NO: 175747 - DNA, 25 bp, Saccharomyces pastorianus
taagccttctggatccacagctacg

SEQ ID NO: 175748 - DNA, 25 bp, Saccharomyces pastorianus
aattacaggctcgaaggatctaaca

SEQ ID NO: 175749 - DNA, 25 bp, Saccharomyces pastorianus
tctggctcccctaagccttctggat

SEQ ID NO: 175750 - DNA, 25 bp, Saccharomyces pastorianus
aggctcgaaggatctaacatctata

SEQ ID NO: 175751 - DNA, 25 bp, Saccharomyces pastorianus
aggatctaacatctatagtttcttc

SEQ ID NO: 175752 - DNA, 25 bp, Saccharomyces pastorianus
tacaggctcgaaggatctaacatct

SEQ ID NO: 175753 - DNA, 25 bp, Saccharomyces pastorianus
agccttctggatccacagctacggt

SEQ ID NO: 175754 - DNA, 25 bp, Saccharomyces pastorianus
tcctctaacgtgactagctctgccg

SEQ ID NO: 175755 - DNA, 25 bp, Saccharomyces pastorianus
gcatcctctaacgtgactagctctg

SEQ ID NO: 175756 - DNA, 25 bp, Saccharomyces pastorianus
gccgcatcctctaacgtgactagct

SEQ ID NO: 175757 - DNA, 25 bp, Saccharomyces pastorianus
aacgtgactagctctgccgccacat

SEQ ID NO: 175758 - DNA, 25 bp, Saccharomyces pastorianus
gaggtagaccaggatgatgagtttc

SEQ ID NO: 175759 - DNA, 25 bp, Saccharomyces pastorianus
ggatgatgagtttctaaatgactac

SEQ ID NO: 175760 - DNA, 25 bp, Saccharomyces pastorianus
agaccaggatgatgagtttctaaat

SEQ ID NO: 175761 - DNA, 25 bp, Saccharomyces pastorianus
ccaggatgatgagtttctaaatgac

SEQ ID NO: 175762 - DNA, 25 bp, Saccharomyces pastorianus
gatgatgagtttctaaatgactacc

SEQ ID NO: 175763 - DNA, 25 bp, Saccharomyces pastorianus
tgatgagtttctaaatgactaccag

SEQ ID NO: 175764 - DNA, 25 bp, Saccharomyces pastorianus
gaccaggatgatgagtttctaaatg

SEQ ID NO: 175765 - DNA, 25 bp, Saccharomyces pastorianus
tagaccaggatgatgagtttctaaa

SEQ ID NO: 175766 - DNA, 25 bp, Saccharomyces pastorianus
gtagaccaggatgatgagtttctaa

SEQ ID NO: 175767 - DNA, 25 bp, Saccharomyces pastorianus
ggtagaccaggatgatgagtttcta

SEQ ID NO: 175768 - DNA, 25 bp, Saccharomyces pastorianus
aggtagaccaggatgatgagtttct

SEQ ID NO: 175769 - DNA, 25 bp, Saccharomyces pastorianus
cgaatgctacaccagaatcatcaat

SEQ ID NO: 175770 - DNA, 25 bp, Saccharomyces pastorianus
acaattggtaggaagtagcgaagcg

SEQ ID NO: 175771 - DNA, 25 bp, Saccharomyces pastorianus
ggaaaaaccgaatgctacaccagaa

SEQ ID NO: 175772 - DNA, 25 bp, Saccharomyces pastorianus
aatgctacaccagaatcatcaatta

SEQ ID NO: 175773 - DNA, 25 bp, Saccharomyces pastorianus
aatgaagagttagtacaattggtag

SEQ ID NO: 175774 - DNA, 25 bp, Saccharomyces pastorianus
gtagcgaagcggaaaaaccgaatgc

SEQ ID NO: 175775 - DNA, 25 bp, Saccharomyces pastorianus
ccgaatgctacaccagaatcatcaa

SEQ ID NO: 175776 - DNA, 25 bp, Saccharomyces pastorianus
gcggaaaaaccgaatgctacaccag

SEQ ID NO: 175777 - DNA, 25 bp, Saccharomyces pastorianus
gaatgctacaccagaatcatcaatt

SEQ ID NO: 175778 - DNA, 25 bp, Saccharomyces pastorianus
gcgaagcggaaaaaccgaatgctac

SEQ ID NO: 175779 - DNA, 25 bp, Saccharomyces pastorianus
atgctacaccagaatcatcaattat

SEQ ID NO: 175780 - DNA, 25 bp, Saccharomyces pastorianus
ggatcatccacgtaagtggcaccgt

SEQ ID NO: 175781 - DNA, 25 bp, Saccharomyces pastorianus
agagccgcggtcattttgttagcat

SEQ ID NO: 175782 - DNA, 25 bp, Saccharomyces pastorianus
tgcaacagccactttatttttaaga

SEQ ID NO: 175783 - DNA, 25 bp, Saccharomyces pastorianus
ttgttagcatctcttctcaactttg

SEQ ID NO: 175784 - DNA, 25 bp, Saccharomyces pastorianus
ttgcaacagccactttatttttaag

SEQ ID NO: 175785 - DNA, 25 bp, Saccharomyces pastorianus
gtaagtggcaccgtaagctcgtcaa

SEQ ID NO: 175786 - DNA, 25 bp, Saccharomyces pastorianus
gcacaatttcgcgatatttaacagg

SEQ ID NO: 175787 - DNA, 25 bp, Saccharomyces pastorianus
attgcaacagccactttatttttaa

SEQ ID NO: 175788 - DNA, 25 bp, Saccharomyces pastorianus
cgtaagctcgtcaattgcaacagcc

SEQ ID NO: 175789 - DNA, 25 bp, Saccharomyces pastorianus
aactttggcagcacaatttcgcgat

SEQ ID NO: 175790 - DNA, 25 bp, Saccharomyces pastorianus
gccactttatttttaagagccgcgg

SEQ ID NO: 175791 - DNA, 25 bp, Saccharomyces pastorianus
cttttgcaagaacttaacagacctg

SEQ ID NO: 175792 - DNA, 25 bp, Saccharomyces pastorianus
ccttttgcaagaacttaacagacct

SEQ ID NO: 175793 - DNA, 25 bp, Saccharomyces pastorianus
aatacacgcagtcagtgaagctata

SEQ ID NO: 175794 - DNA, 25 bp, Saccharomyces pastorianus
tcctactcaacggaaaagtgattgg

SEQ ID NO: 175795 - DNA, 25 bp, Saccharomyces pastorianus
accgctattgaataacctcagtcac

SEQ ID NO: 175796 - DNA, 25 bp, Saccharomyces pastorianus
ttggtaacattttcctactcaacgg

SEQ ID NO: 175797 - DNA, 25 bp, Saccharomyces pastorianus
gcagtcagtgaagctataccgctat

SEQ ID NO: 175798 - DNA, 25 bp, Saccharomyces pastorianus
gctataccgctattgaataacctca

SEQ ID NO: 175799 - DNA, 25 bp, Saccharomyces pastorianus
gaaagaaacttagagctccaggtca

SEQ ID NO: 175800 - DNA, 25 bp, Saccharomyces pastorianus
ttttgcaagaacttaacagacctgc

SEQ ID NO: 175801 - DNA, 25 bp, Saccharomyces pastorianus
tttgcaagaacttaacagacctgca

SEQ ID NO: 175802 - DNA, 25 bp, Saccharomyces pastorianus
cgaaaccacagaattactaaacatt

SEQ ID NO: 175803 - DNA, 25 bp, Saccharomyces pastorianus
tttgatggatgacatgtctgatatc

SEQ ID NO: 175804 - DNA, 25 bp, Saccharomyces pastorianus
taatcacgaggatggctttatcgaa

SEQ ID NO: 175805 - DNA, 25 bp, Saccharomyces pastorianus
gatgatgatacgctagatggtgatt

SEQ ID NO: 175806 - DNA, 25 bp, Saccharomyces pastorianus
acgctagatggtgatttgatggatg

SEQ ID NO: 175807 - DNA, 25 bp, Saccharomyces pastorianus
gagatggtgttattgaagccaagat

SEQ ID NO: 175808 - DNA, 25 bp, Saccharomyces pastorianus
gatcctcagcaagtatttgatgaaa

SEQ ID NO: 175809 - DNA, 25 bp, Saccharomyces pastorianus
gaaagaatcaaatttgccaaccaat

SEQ ID NO: 175810 - DNA, 25 bp, Saccharomyces pastorianus
atgatagtgaagatcctcagcaagt

SEQ ID NO: 175811 - DNA, 25 bp, Saccharomyces pastorianus
tgaagccaagattaatcacgaggat

SEQ ID NO: 175812 - DNA, 25 bp, Saccharomyces pastorianus
aagggctattagagatggtgttatt

SEQ ID NO: 175813 - DNA, 25 bp, Saccharomyces pastorianus
caaacagaagttcacatggataaca

SEQ ID NO: 175814 - DNA, 25 bp, Saccharomyces pastorianus
cacatggataacaaacgaaataatt

SEQ ID NO: 175815 - DNA, 25 bp, Saccharomyces pastorianus
agaagttcacatggataacaaacga

SEQ ID NO: 175816 - DNA, 25 bp, Saccharomyces pastorianus
agttcacatggataacaaacgaaat

SEQ ID NO: 175817 - DNA, 25 bp, Saccharomyces pastorianus
cagaagttcacatggataacaaacg

SEQ ID NO: 175818 - DNA, 25 bp, Saccharomyces pastorianus
aagttcacatggataacaaacgaaa

SEQ ID NO: 175819 - DNA, 25 bp, Saccharomyces pastorianus
gttcacatggataacaaacgaaata

SEQ ID NO: 175820 - DNA, 25 bp, Saccharomyces pastorianus
aaacagaagttcacatggataacaa

SEQ ID NO: 175821 - DNA, 25 bp, Saccharomyces pastorianus
gaagttcacatggataacaaacgaa

SEQ ID NO: 175822 - DNA, 25 bp, Saccharomyces pastorianus
aacagaagttcacatggataacaaa

SEQ ID NO: 175823 - DNA, 25 bp, Saccharomyces pastorianus
acagaagttcacatggataacaaac

SEQ ID NO: 175824 - DNA, 25 bp, Saccharomyces pastorianus
gctcaaatcgaagctaatgctaaat

SEQ ID NO: 175825 - DNA, 25 bp, Saccharomyces pastorianus
acagaagaactagctcaaatcgaag

SEQ ID NO: 175826 - DNA, 25 bp, Saccharomyces pastorianus
gaagctaatgctaaatatccatcac

SEQ ID NO: 175827 - DNA, 25 bp, Saccharomyces pastorianus
ttagactacgtcttcgctaacacag

SEQ ID NO: 175828 - DNA, 25 bp, Saccharomyces pastorianus
ttgttcaccacagaagaactagctc

SEQ ID NO: 175829 - DNA, 25 bp, Saccharomyces pastorianus
ccagtgataatctagaaggtaattt

SEQ ID NO: 175830 - DNA, 25 bp, Saccharomyces pastorianus
tgctaaatatccatcacccagtgat

SEQ ID NO: 175831 - DNA, 25 bp, Saccharomyces pastorianus
ggtaatttagactacgtcttcgcta

SEQ ID NO: 175832 - DNA, 25 bp, Saccharomyces pastorianus
gtcttcgctaacacagaagaatctg

SEQ ID NO: 175833 - DNA, 25 bp, Saccharomyces pastorianus
catcacccagtgataatctagaagg

SEQ ID NO: 175834 - DNA, 25 bp, Saccharomyces pastorianus
agactacgtcttcgctaacacagaa

SEQ ID NO: 175835 - DNA, 25 bp, Saccharomyces pastorianus
gattgttcttatttggatacctgtc

SEQ ID NO: 175836 - DNA, 25 bp, Saccharomyces pastorianus
gtgactattcgcatgcatctctatt

SEQ ID NO: 175837 - DNA, 25 bp, Saccharomyces pastorianus
gggacgttaacgtcagcaaccaggg

SEQ ID NO: 175838 - DNA, 25 bp, Saccharomyces pastorianus
tagactgcttggagttctgaactgg

SEQ ID NO: 175839 - DNA, 25 bp, Saccharomyces pastorianus
atggtccaaaatatccgcatgtcag

SEQ ID NO: 175840 - DNA, 25 bp, Saccharomyces pastorianus
taccacgtgaacaactgagcaatcg

SEQ ID NO: 175841 - DNA, 25 bp, Saccharomyces pastorianus
atatattccgtcatgcttgcaagag

SEQ ID NO: 175842 - DNA, 25 bp, Saccharomyces pastorianus
acctcggtgtacattgtcaataaca

SEQ ID NO: 175843 - DNA, 25 bp, Saccharomyces pastorianus
gcatgtcaggaaaaccacccaggat

SEQ ID NO: 175844 - DNA, 25 bp, Saccharomyces pastorianus
aaaccatcatcttttcagcttgcta

SEQ ID NO: 175845 - DNA, 25 bp, Saccharomyces pastorianus
agaccaactgctgggtagactgctt

SEQ ID NO: 175846 - DNA, 25 bp, Saccharomyces pastorianus
gaatttcttactataatcagaagtt

SEQ ID NO: 175847 - DNA, 25 bp, Saccharomyces pastorianus
atttcttactataatcagaagttca

SEQ ID NO: 175848 - DNA, 25 bp, Saccharomyces pastorianus
tcagaagttcattagtctcaccaaa

SEQ ID NO: 175849 - DNA, 25 bp, Saccharomyces pastorianus
cagaagttcattagtctcaccaaaa

SEQ ID NO: 175850 - DNA, 25 bp, Saccharomyces pastorianus
atcagaagttcattagtctcaccaa

SEQ ID NO: 175851 - DNA, 25 bp, Saccharomyces pastorianus
aatttcttactataatcagaagttc

SEQ ID NO: 175852 - DNA, 25 bp, Saccharomyces pastorianus
tcttactataatcagaagttcatta

SEQ ID NO: 175853 - DNA, 25 bp, Saccharomyces pastorianus
cgaatttcttactataatcagaagt

SEQ ID NO: 175854 - DNA, 25 bp, Saccharomyces pastorianus
gaagttcattagtctcaccaaaaaa

SEQ ID NO: 175855 - DNA, 25 bp, Saccharomyces pastorianus
tttcttactataatcagaagttcat

SEQ ID NO: 175856 - DNA, 25 bp, Saccharomyces pastorianus
ttcttactataatcagaagttcatt

SEQ ID NO: 175857 - DNA, 25 bp, Saccharomyces pastorianus
tacgaattttactttacaaactgca

SEQ ID NO: 175858 - DNA, 25 bp, Saccharomyces pastorianus
aaactggtgtccagtgggccctgcg

SEQ ID NO: 175859 - DNA, 25 bp, Saccharomyces pastorianus
gatacccatgtaaactggtgtccag

SEQ ID NO: 175860 - DNA, 25 bp, Saccharomyces pastorianus
tcaaataatggtgccttttttacga

SEQ ID NO: 175861 - DNA, 25 bp, Saccharomyces pastorianus
tggcaacggcaacggatacccatgt

SEQ ID NO: 175862 - DNA, 25 bp, Saccharomyces pastorianus
gccgaccaccgctattagtcaggac

SEQ ID NO: 175863 - DNA, 25 bp, Saccharomyces pastorianus
aaatcgtcgaatcaggatactggat

SEQ ID NO: 175864 - DNA, 25 bp, Saccharomyces pastorianus
ataatagcagcaccgctggcaacgg

SEQ ID NO: 175865 - DNA, 25 bp, Saccharomyces pastorianus
ggccctgcgcttcatcaaataatgg

SEQ ID NO: 175866 - DNA, 25 bp, Saccharomyces pastorianus
gatactggatttagctctcaacacc

SEQ ID NO: 175867 - DNA, 25 bp, Saccharomyces pastorianus
agctctcaacaccaacatccaaatg

SEQ ID NO: 175868 - DNA, 25 bp, Saccharomyces pastorianus
aaaggctctgattttggattcgaag

SEQ ID NO: 175869 - DNA, 25 bp, Saccharomyces pastorianus
ccatgctgtggtgaaactactgatt

SEQ ID NO: 175870 - DNA, 25 bp, Saccharomyces pastorianus
gaatgttctttctcttgactgtgaa

SEQ ID NO: 175871 - DNA, 25 bp, Saccharomyces pastorianus
aagaaccatcagtatccatgctgtg

SEQ ID NO: 175872 - DNA, 25 bp, Saccharomyces pastorianus
gcaagacgttttttcaccatgtgtt

SEQ ID NO: 175873 - DNA, 25 bp, Saccharomyces pastorianus
gactctatgtaggtatcaccctttg

SEQ ID NO: 175874 - DNA, 25 bp, Saccharomyces pastorianus
agtacgcaactgtatgcaccttgtt

SEQ ID NO: 175875 - DNA, 25 bp, Saccharomyces pastorianus
ctactgattccgtttcttttctaag

SEQ ID NO: 175876 - DNA, 25 bp, Saccharomyces pastorianus
gtatgcaccttgtttgcgttgcagc

SEQ ID NO: 175877 - DNA, 25 bp, Saccharomyces pastorianus
tggattttttcaccggcaagacact

SEQ ID NO: 175878 - DNA, 25 bp, Saccharomyces pastorianus
ggtaatgcaaactctatcactacaa

SEQ ID NO: 175879 - DNA, 25 bp, Saccharomyces pastorianus
gaaagtcctgatataatgaacatta

SEQ ID NO: 175880 - DNA, 25 bp, Saccharomyces pastorianus
gtaagattatcagagacggtttcga

SEQ ID NO: 175881 - DNA, 25 bp, Saccharomyces pastorianus
ggacacaacttgtaagaatactgat

SEQ ID NO: 175882 - DNA, 25 bp, Saccharomyces pastorianus
gagacggtttcgatgaaagtcctga

SEQ ID NO: 175883 - DNA, 25 bp, Saccharomyces pastorianus
gaacattaacacagttgacatcttt

SEQ ID NO: 175884 - DNA, 25 bp, Saccharomyces pastorianus
gttgacatctttagaatcattcgtg

SEQ ID NO: 175885 - DNA, 25 bp, Saccharomyces pastorianus
aaggtgttggtggacacaacttgta

SEQ ID NO: 175886 - DNA, 25 bp, Saccharomyces pastorianus
gcttttttggcagagatgtgagatt

SEQ ID NO: 175887 - DNA, 25 bp, Saccharomyces pastorianus
actgatctattaatgaaggaacttc

SEQ ID NO: 175888 - DNA, 25 bp, Saccharomyces pastorianus
aatacacaagcttttttggcagaga

SEQ ID NO: 175889 - DNA, 25 bp, Saccharomyces pastorianus
ggtttcgatgaaagtcctgatataa

SEQ ID NO: 175890 - DNA, 25 bp, Saccharomyces pastorianus
ctccatggcccatctctcactaaat

SEQ ID NO: 175891 - DNA, 25 bp, Saccharomyces pastorianus
actccactccatggcccatctctca

SEQ ID NO: 175892 - DNA, 25 bp, Saccharomyces pastorianus
actctcacactccactccatggccc

SEQ ID NO: 175893 - DNA, 25 bp, Saccharomyces pastorianus
tctcacactccactccatggcccat

SEQ ID NO: 175894 - DNA, 25 bp, Saccharomyces pastorianus
atggcatatgcacacggatgctaca

SEQ ID NO: 175895 - DNA, 25 bp, Saccharomyces pastorianus
cactccactccatggcccatctctc

SEQ ID NO: 175896 - DNA, 25 bp, Saccharomyces pastorianus
cacactccactccatggcccatctc

SEQ ID NO: 175897 - DNA, 25 bp, Saccharomyces pastorianus
ctactctcacactccactccatggc

SEQ ID NO: 175898 - DNA, 25 bp, Saccharomyces pastorianus
ctctcacactccactccatggccca

SEQ ID NO: 175899 - DNA, 25 bp, Saccharomyces pastorianus
acactccactccatggcccatctct

SEQ ID NO: 175900 - DNA, 25 bp, Saccharomyces pastorianus
tcacactccactccatggcccatct

SEQ ID NO: 175901 - DNA, 25 bp, Saccharomyces pastorianus
aaaatcataacaacactcaagaaac

SEQ ID NO: 175902 - DNA, 25 bp, Saccharomyces pastorianus
agaaaatcataacaacactcaagaa

SEQ ID NO: 175903 - DNA, 25 bp, Saccharomyces pastorianus
aaatcataacaacactcaagaaaca

SEQ ID NO: 175904 - DNA, 25 bp, Saccharomyces pastorianus
gaaaatcataacaacactcaagaaa

SEQ ID NO: 175905 - DNA, 25 bp, Saccharomyces pastorianus
acaacactcaagaaacaatacgata

SEQ ID NO: 175906 - DNA, 25 bp, Saccharomyces pastorianus
ataacaacactcaagaaacaatacg

SEQ ID NO: 175907 - DNA, 25 bp, Saccharomyces pastorianus
aacaacactcaagaaacaatacgat

SEQ ID NO: 175908 - DNA, 25 bp, Saccharomyces pastorianus
atcataacaacactcaagaaacaat

SEQ ID NO: 175909 - DNA, 25 bp, Saccharomyces pastorianus
aacactcaagaaacaatacgataca

SEQ ID NO: 175910 - DNA, 25 bp, Saccharomyces pastorianus
aatcataacaacactcaagaaacaa

SEQ ID NO: 175911 - DNA, 25 bp, Saccharomyces pastorianus
acactcaagaaacaatacgatacaa

SEQ ID NO: 175912 - DNA, 25 bp, Saccharomyces pastorianus
ctcgatgtcttccaagtattctttg

SEQ ID NO: 175913 - DNA, 25 bp, Saccharomyces pastorianus
tatggctcgatgtcttccaagtatt

SEQ ID NO: 175914 - DNA, 25 bp, Saccharomyces pastorianus
tgtcttccaagtattctttgtattc

SEQ ID NO: 175915 - DNA, 25 bp, Saccharomyces pastorianus
tggctcgatgtcttccaagtattct

SEQ ID NO: 175916 - DNA, 25 bp, Saccharomyces pastorianus
cgatgtcttccaagtattctttgta

SEQ ID NO: 175917 - DNA, 25 bp, Saccharomyces pastorianus
gatgtcttccaagtattctttgtat

SEQ ID NO: 175918 - DNA, 25 bp, Saccharomyces pastorianus
atatggctcgatgtcttccaagtat

SEQ ID NO: 175919 - DNA, 25 bp, Saccharomyces pastorianus
gatatggctcgatgtcttccaagta

SEQ ID NO: 175920 - DNA, 25 bp, Saccharomyces pastorianus
tgatatggctcgatgtcttccaagt

SEQ ID NO: 175921 - DNA, 25 bp, Saccharomyces pastorianus
atgatatggctcgatgtcttccaag

SEQ ID NO: 175922 - DNA, 25 bp, Saccharomyces pastorianus
atggctcgatgtcttccaagtattc

SEQ ID NO: 175923 - DNA, 25 bp, Saccharomyces pastorianus
gacactcgtctaccttcactgcacg

SEQ ID NO: 175924 - DNA, 25 bp, Saccharomyces pastorianus
actcgtctaccttcactgcacgaaa

SEQ ID NO: 175925 - DNA, 25 bp, Saccharomyces pastorianus
acactcgtctaccttcactgcacga

SEQ ID NO: 175926 - DNA, 25 bp, Saccharomyces pastorianus
tcgtctaccttcactgcacgaaacc

SEQ ID NO: 175927 - DNA, 25 bp, Saccharomyces pastorianus
ctcgtctaccttcactgcacgaaac

SEQ ID NO: 175928 - DNA, 25 bp, Saccharomyces pastorianus
agacactcgtctaccttcactgcac

SEQ ID NO: 175929 - DNA, 25 bp, Saccharomyces pastorianus
tctaccttcactgcacgaaaccaaa

SEQ ID NO: 175930 - DNA, 25 bp, Saccharomyces pastorianus
tagacactcgtctaccttcactgca

SEQ ID NO: 175931 - DNA, 25 bp, Saccharomyces pastorianus
ctaccttcactgcacgaaaccaaaa

SEQ ID NO: 175932 - DNA, 25 bp, Saccharomyces pastorianus
gtctaccttcactgcacgaaaccaa

SEQ ID NO: 175933 - DNA, 25 bp, Saccharomyces pastorianus
cctccttggcactagcgttggtact

SEQ ID NO: 175934 - DNA, 25 bp, Saccharomyces pastorianus
tgctggagttggtgcttgcagtggt

SEQ ID NO: 175935 - DNA, 25 bp, Saccharomyces pastorianus
attagtgctggagttggtgcttgca

SEQ ID NO: 175936 - DNA, 25 bp, Saccharomyces pastorianus
atctttattggcgtcctccttggca

SEQ ID NO: 175937 - DNA, 25 bp, Saccharomyces pastorianus
tggcactagcgttggtactttcagt

SEQ ID NO: 175938 - DNA, 25 bp, Saccharomyces pastorianus
cattagtgctggagttggtgcttgc

SEQ ID NO: 175939 - DNA, 25 bp, Saccharomyces pastorianus
gtcctccttggcactagcgttggta

SEQ ID NO: 175940 - DNA, 25 bp, Saccharomyces pastorianus
ttgccatctttattggcgtcctcct

SEQ ID NO: 175941 - DNA, 25 bp, Saccharomyces pastorianus
tctttattggcgtcctccttggcac

SEQ ID NO: 175942 - DNA, 25 bp, Saccharomyces pastorianus
gccatctttattggcgtcctccttg

SEQ ID NO: 175943 - DNA, 25 bp, Saccharomyces pastorianus
attgccatctttattggcgtcctcc

SEQ ID NO: 175944 - DNA, 25 bp, Saccharomyces pastorianus
gatttgatctactatactacattaa

SEQ ID NO: 175945 - DNA, 25 bp, Saccharomyces pastorianus
gcaaatgttaataggactagcatca

SEQ ID NO: 175946 - DNA, 25 bp, Saccharomyces pastorianus
aagttacctaaagtgaatgtgccct

SEQ ID NO: 175947 - DNA, 25 bp, Saccharomyces pastorianus
aaccaggactctatataaacaaaga

SEQ ID NO: 175948 - DNA, 25 bp, Saccharomyces pastorianus
gatgactacaattcgaaggtacaca

SEQ ID NO: 175949 - DNA, 25 bp, Saccharomyces pastorianus
agaaaattagtgcaccaggtcaacc

SEQ ID NO: 175950 - DNA, 25 bp, Saccharomyces pastorianus
ttcgaaggtacacaaaatgcaaatg

SEQ ID NO: 175951 - DNA, 25 bp, Saccharomyces pastorianus
gtgaatgtgcccttaaatccaaaag

SEQ ID NO: 175952 - DNA, 25 bp, Saccharomyces pastorianus
gaactgaaactagacgaagatgact

SEQ ID NO: 175953 - DNA, 25 bp, Saccharomyces pastorianus
gtcgggtacaagtttagatttgatc

SEQ ID NO: 175954 - DNA, 25 bp, Saccharomyces pastorianus
ggactagcatcatatgtcgggtaca

SEQ ID NO: 175955 - DNA, 25 bp, Saccharomyces pastorianus
gtcaggctcttaccagcttaactac

SEQ ID NO: 175956 - DNA, 25 bp, Saccharomyces pastorianus
ctcggtcaggctcttaccagcttaa

SEQ ID NO: 175957 - DNA, 25 bp, Saccharomyces pastorianus
atggtcacccactacactactcggt

SEQ ID NO: 175958 - DNA, 25 bp, Saccharomyces pastorianus
tcaggctcttaccagcttaactaca

SEQ ID NO: 175959 - DNA, 25 bp, Saccharomyces pastorianus
tcggtcaggctcttaccagcttaac

SEQ ID NO: 175960 - DNA, 25 bp, Saccharomyces pastorianus
tactcggtcaggctcttaccagctt

SEQ ID NO: 175961 - DNA, 25 bp, Saccharomyces pastorianus
cactacactactcggtcaggctctt

SEQ ID NO: 175962 - DNA, 25 bp, Saccharomyces pastorianus
ggctcttaccagcttaactacagtt

SEQ ID NO: 175963 - DNA, 25 bp, Saccharomyces pastorianus
ggtcaggctcttaccagcttaacta

SEQ ID NO: 175964 - DNA, 25 bp, Saccharomyces pastorianus
actcggtcaggctcttaccagctta

SEQ ID NO: 175965 - DNA, 25 bp, Saccharomyces pastorianus
acactactcggtcaggctcttacca

SEQ ID NO: 175966 - DNA, 25 bp, Saccharomyces pastorianus
atttgcggttaagaaagtagctagg

SEQ ID NO: 175967 - DNA, 25 bp, Saccharomyces pastorianus
ggttaagaaagtagctaggctagta

SEQ ID NO: 175968 - DNA, 25 bp, Saccharomyces pastorianus
tttgcggttaagaaagtagctaggc

SEQ ID NO: 175969 - DNA, 25 bp, Saccharomyces pastorianus
gttgaatttgcggttaagaaagtag

SEQ ID NO: 175970 - DNA, 25 bp, Saccharomyces pastorianus
gatgttgaatttgcggttaagaaag

SEQ ID NO: 175971 - DNA, 25 bp, Saccharomyces pastorianus
cggttaagaaagtagctaggctagt

SEQ ID NO: 175972 - DNA, 25 bp, Saccharomyces pastorianus
tgcggttaagaaagtagctaggcta

SEQ ID NO: 175973 - DNA, 25 bp, Saccharomyces pastorianus
tgttgaatttgcggttaagaaagta

SEQ ID NO: 175974 - DNA, 25 bp, Saccharomyces pastorianus
ttgcggttaagaaagtagctaggct

SEQ ID NO: 175975 - DNA, 25 bp, Saccharomyces pastorianus
gcggttaagaaagtagctaggctag

SEQ ID NO: 175976 - DNA, 25 bp, Saccharomyces pastorianus
cgatgttgaatttgcggttaagaaa

SEQ ID NO: 175977 - DNA, 25 bp, Saccharomyces pastorianus
tgatgctttagctagtaactctgcg

SEQ ID NO: 175978 - DNA, 25 bp, Saccharomyces pastorianus
atcagttctctgtatgtcatcgcgc

SEQ ID NO: 175979 - DNA, 25 bp, Saccharomyces pastorianus
aattcgatgactgccacgtttactg

SEQ ID NO: 175980 - DNA, 25 bp, Saccharomyces pastorianus
atcagggttttcactctaccaggaa

SEQ ID NO: 175981 - DNA, 25 bp, Saccharomyces pastorianus
actggtttttggtagctctttcagc

SEQ ID NO: 175982 - DNA, 25 bp, Saccharomyces pastorianus
actgcttgcttcgttgttttgctca

SEQ ID NO: 175983 - DNA, 25 bp, Saccharomyces pastorianus
tcgacgatcttagtaccagcggcat

SEQ ID NO: 175984 - DNA, 25 bp, Saccharomyces pastorianus
gctttccctggatagttttctcgag

SEQ ID NO: 175985 - DNA, 25 bp, Saccharomyces pastorianus
ttagcgatttgcataccgggataga

SEQ ID NO: 175986 - DNA, 25 bp, Saccharomyces pastorianus
tattcgttgtgcgacaagcctggat

SEQ ID NO: 175987 - DNA, 25 bp, Saccharomyces pastorianus
gaagctgtaactgatcctcggcttt

SEQ ID NO: 175988 - DNA, 25 bp, Saccharomyces pastorianus
gcttcgcaaacgcttgtcagatcag

SEQ ID NO: 175989 - DNA, 25 bp, Saccharomyces pastorianus
ccatgcaacacccaattctgaaata

SEQ ID NO: 175990 - DNA, 25 bp, Saccharomyces pastorianus
tacaccatgcaacacccaattctga

SEQ ID NO: 175991 - DNA, 25 bp, Saccharomyces pastorianus
aaacgcttgtcagatcagcccatta

SEQ ID NO: 175992 - DNA, 25 bp, Saccharomyces pastorianus
aggagcttcgcaaacgcttgtcaga

SEQ ID NO: 175993 - DNA, 25 bp, Saccharomyces pastorianus
gtcagatcagcccattatttacacc

SEQ ID NO: 175994 - DNA, 25 bp, Saccharomyces pastorianus
cagcccattatttacaccatgcaac

SEQ ID NO: 175995 - DNA, 25 bp, Saccharomyces pastorianus
acgcttgtcagatcagcccattatt

SEQ ID NO: 175996 - DNA, 25 bp, Saccharomyces pastorianus
ttatttacaccatgcaacacccaat

SEQ ID NO: 175997 - DNA, 25 bp, Saccharomyces pastorianus
tgattcaggagcttcgcaaacgctt

SEQ ID NO: 175998 - DNA, 25 bp, Saccharomyces pastorianus
gatcagcccattatttacaccatgc

SEQ ID NO: 175999 - DNA, 25 bp, Saccharomyces pastorianus
gtcttttcgagagcgcaggcgcaag

SEQ ID NO: 176000 - DNA, 25 bp, Saccharomyces pastorianus
tcaaacaaaccacgtgatggtgtac

SEQ ID NO: 176001 - DNA, 25 bp, Saccharomyces pastorianus
gaatatgcatcaagaggaaaaggtt

SEQ ID NO: 176002 - DNA, 25 bp, Saccharomyces pastorianus
attatgttggtcttttcgagagcgc

SEQ ID NO: 176003 - DNA, 25 bp, Saccharomyces pastorianus
atcccttcaaacaaaccacgtgatg

SEQ ID NO: 176004 - DNA, 25 bp, Saccharomyces pastorianus
ccacgtgatggtgtacacgttgttt

SEQ ID NO: 176005 - DNA, 25 bp, Saccharomyces pastorianus
aagagaatatgcatcaagaggaaaa

SEQ ID NO: 176006 - DNA, 25 bp, Saccharomyces pastorianus
gagaatatgcatcaagaggaaaagg

SEQ ID NO: 176007 - DNA, 25 bp, Saccharomyces pastorianus
atgcatcaagaggaaaaggtttgtt

SEQ ID NO: 176008 - DNA, 25 bp, Saccharomyces pastorianus
caatcccttcaaacaaaccacgtga

SEQ ID NO: 176009 - DNA, 25 bp, Saccharomyces pastorianus
cttcaaacaaaccacgtgatggtgt

SEQ ID NO: 176010 - DNA, 25 bp, Saccharomyces pastorianus
tggcacaaaggcaatgagacttaga

SEQ ID NO: 176011 - DNA, 25 bp, Saccharomyces pastorianus
aacagattttttggcacaaaggcaa

SEQ ID NO: 176012 - DNA, 25 bp, Saccharomyces pastorianus
attttttggcacaaaggcaatgaga

SEQ ID NO: 176013 - DNA, 25 bp, Saccharomyces pastorianus
ttggcacaaaggcaatgagacttag

SEQ ID NO: 176014 - DNA, 25 bp, Saccharomyces pastorianus
cagattttttggcacaaaggcaatg

SEQ ID NO: 176015 - DNA, 25 bp, Saccharomyces pastorianus
ttttggcacaaaggcaatgagactt

SEQ ID NO: 176016 - DNA, 25 bp, Saccharomyces pastorianus
gattttttggcacaaaggcaatgag

SEQ ID NO: 176017 - DNA, 25 bp, Saccharomyces pastorianus
tttttggcacaaaggcaatgagact

SEQ ID NO: 176018 - DNA, 25 bp, Saccharomyces pastorianus
ggcacaaaggcaatgagacttagag

SEQ ID NO: 176019 - DNA, 25 bp, Saccharomyces pastorianus
agattttttggcacaaaggcaatga

SEQ ID NO: 176020 - DNA, 25 bp, Saccharomyces pastorianus
cacaaaggcaatgagacttagagat

SEQ ID NO: 176021 - DNA, 25 bp, Saccharomyces pastorianus
ggaggtggaggaacttttgccattt

SEQ ID NO: 176022 - DNA, 25 bp, Saccharomyces pastorianus
ggcaatgtcacatccaaaggtttga

SEQ ID NO: 176023 - DNA, 25 bp, Saccharomyces pastorianus
atcatagacgacatcgagcgtagta

SEQ ID NO: 176024 - DNA, 25 bp, Saccharomyces pastorianus
aggctctgactttccaaaggaagtt

SEQ ID NO: 176025 - DNA, 25 bp, Saccharomyces pastorianus
acttttgccattttgggtgcatgca

SEQ ID NO: 176026 - DNA, 25 bp, Saccharomyces pastorianus
gggtgcatgcataatatcttccggc

SEQ ID NO: 176027 - DNA, 25 bp, Saccharomyces pastorianus
taatggcatgtttatcatagacgac

SEQ ID NO: 176028 - DNA, 25 bp, Saccharomyces pastorianus
actgatgtgaggtttcgagatgact

SEQ ID NO: 176029 - DNA, 25 bp, Saccharomyces pastorianus
aatatcttccggcaatgtcacatcc

SEQ ID NO: 176030 - DNA, 25 bp, Saccharomyces pastorianus
gaaacgaaaagcctagtcataacta

SEQ ID NO: 176031 - DNA, 25 bp, Saccharomyces pastorianus
tcactataagaatgtcccgggaggt

SEQ ID NO: 176032 - DNA, 25 bp, Saccharomyces pastorianus
aagctgtcaagctgatgccgttgcc

SEQ ID NO: 176033 - DNA, 25 bp, Saccharomyces pastorianus
gtttcggaagctcacttggttgcat

SEQ ID NO: 176034 - DNA, 25 bp, Saccharomyces pastorianus
acaacagcttgattcttaccgagga

SEQ ID NO: 176035 - DNA, 25 bp, Saccharomyces pastorianus
tattcatgcaggttcgacaactcga

SEQ ID NO: 176036 - DNA, 25 bp, Saccharomyces pastorianus
gctcgattagttcattccaagaccg

SEQ ID NO: 176037 - DNA, 25 bp, Saccharomyces pastorianus
gcgaagatttattttgctcccaaga

SEQ ID NO: 176038 - DNA, 25 bp, Saccharomyces pastorianus
gctcttcaggtattattgctcgatt

SEQ ID NO: 176039 - DNA, 25 bp, Saccharomyces pastorianus
tgcattgtcgataccgcatctcaaa

SEQ ID NO: 176040 - DNA, 25 bp, Saccharomyces pastorianus
tttggccctcaattgtttgctgatt

SEQ ID NO: 176041 - DNA, 25 bp, Saccharomyces pastorianus
gcagcggtccaagctttctggaaaa

SEQ ID NO: 176042 - DNA, 25 bp, Saccharomyces pastorianus
aagttctacaattacagcggcccat

SEQ ID NO: 176043 - DNA, 25 bp, Saccharomyces pastorianus
atatccgtcagattttcgtcgccga

SEQ ID NO: 176044 - DNA, 25 bp, Saccharomyces pastorianus
tcaggatcggccactagattatggg

SEQ ID NO: 176045 - DNA, 25 bp, Saccharomyces pastorianus
tcagcacccttgatggagtgtaaaa

SEQ ID NO: 176046 - DNA, 25 bp, Saccharomyces pastorianus
gggcaggtcaatattgggtagatat

SEQ ID NO: 176047 - DNA, 25 bp, Saccharomyces pastorianus
gtgtcttgtatttatgatatccgtc

SEQ ID NO: 176048 - DNA, 25 bp, Saccharomyces pastorianus
tttcatcaaaaacccacattctcac

SEQ ID NO: 176049 - DNA, 25 bp, Saccharomyces pastorianus
attctcacctctggctcgaagatat

SEQ ID NO: 176050 - DNA, 25 bp, Saccharomyces pastorianus
aaagatcaggatcggccactagatt

SEQ ID NO: 176051 - DNA, 25 bp, Saccharomyces pastorianus
aacgttctggtgtcttgtatttatg

SEQ ID NO: 176052 - DNA, 25 bp, Saccharomyces pastorianus
tcgtcgccgatcttttcatcaaaaa

SEQ ID NO: 176053 - DNA, 25 bp, Saccharomyces pastorianus
gatatttaacgttctggtgtcttgt

SEQ ID NO: 176054 - DNA, 25 bp, Saccharomyces pastorianus
acttcaagctactaaggaatttcaa

SEQ ID NO: 176055 - DNA, 25 bp, Saccharomyces pastorianus
aaagttactttcaatagattccgat

SEQ ID NO: 176056 - DNA, 25 bp, Saccharomyces pastorianus
gaagaccaacattctttacacgaaa

SEQ ID NO: 176057 - DNA, 25 bp, Saccharomyces pastorianus
agattccgatgaagaccaacattct

SEQ ID NO: 176058 - DNA, 25 bp, Saccharomyces pastorianus
aacatttctgcgcaggttcgatcaa

SEQ ID NO: 176059 - DNA, 25 bp, Saccharomyces pastorianus
atggcgaccctagcgagagatgaga

SEQ ID NO: 176060 - DNA, 25 bp, Saccharomyces pastorianus
agaactcgaccagttatttgaagtc

SEQ ID NO: 176061 - DNA, 25 bp, Saccharomyces pastorianus
gcgcaggttcgatcaaaagtcaaac

SEQ ID NO: 176062 - DNA, 25 bp, Saccharomyces pastorianus
gttgatatatcagaactcgaccagt

SEQ ID NO: 176063 - DNA, 25 bp, Saccharomyces pastorianus
tgcacgcaaggctagacgggatgtt

SEQ ID NO: 176064 - DNA, 25 bp, Saccharomyces pastorianus
gattctactggaacatactacttgt

SEQ ID NO: 176065 - DNA, 25 bp, Saccharomyces pastorianus
gaagactacccaggacggaaatgat

SEQ ID NO: 176066 - DNA, 25 bp, Saccharomyces pastorianus
gctggaactcgaaacagtcctttga

SEQ ID NO: 176067 - DNA, 25 bp, Saccharomyces pastorianus
gaaagtgtcgtatctgacccctgat

SEQ ID NO: 176068 - DNA, 25 bp, Saccharomyces pastorianus
gggaccctattcttatgcaaatgca

SEQ ID NO: 176069 - DNA, 25 bp, Saccharomyces pastorianus
gagagaaaacctgccacactctgtg

SEQ ID NO: 176070 - DNA, 25 bp, Saccharomyces pastorianus
atgcaaatgcaaaaaccgggcgtaa

SEQ ID NO: 176071 - DNA, 25 bp, Saccharomyces pastorianus
aaaacagcaatctctggctccaaag

SEQ ID NO: 176072 - DNA, 25 bp, Saccharomyces pastorianus
taggtccatcctggaagactaccca

SEQ ID NO: 176073 - DNA, 25 bp, Saccharomyces pastorianus
gaagaggccggactgaaagacaaca

SEQ ID NO: 176074 - DNA, 25 bp, Saccharomyces pastorianus
acactctgtggctggaactcgaaac

SEQ ID NO: 176075 - DNA, 25 bp, Saccharomyces pastorianus
acttcataacgataggtccatcctg

SEQ ID NO: 176076 - DNA, 25 bp, Saccharomyces pastorianus
caagtcacaatctgtttattcgtaa

SEQ ID NO: 176077 - DNA, 25 bp, Saccharomyces pastorianus
tggtcatgtgtgttcaaaaatagtc

SEQ ID NO: 176078 - DNA, 25 bp, Saccharomyces pastorianus
aaaatagtcaagtcacaatctgttt

SEQ ID NO: 176079 - DNA, 25 bp, Saccharomyces pastorianus
aaatagtcaagtcacaatctgttta

SEQ ID NO: 176080 - DNA, 25 bp, Saccharomyces pastorianus
atgtgtgttcaaaaatagtcaagtc

SEQ ID NO: 176081 - DNA, 25 bp, Saccharomyces pastorianus
aatgacatgatattgttcagcgaag

SEQ ID NO: 176082 - DNA, 25 bp, Saccharomyces pastorianus
gtcacaatctgtttattcgtaaatg

SEQ ID NO: 176083 - DNA, 25 bp, Saccharomyces pastorianus
tagtcaagtcacaatctgtttattc

SEQ ID NO: 176084 - DNA, 25 bp, Saccharomyces pastorianus
agtcacaatctgtttattcgtaaat

SEQ ID NO: 176085 - DNA, 25 bp, Saccharomyces pastorianus
atctgtttattcgtaaatgacatga

SEQ ID NO: 176086 - DNA, 25 bp, Saccharomyces pastorianus
acaatctgtttattcgtaaatgaca

SEQ ID NO: 176087 - DNA, 25 bp, Saccharomyces pastorianus
agtacaatcaatcttccattcgtcc

SEQ ID NO: 176088 - DNA, 25 bp, Saccharomyces pastorianus
aacacccaccagaagttacgacaat

SEQ ID NO: 176089 - DNA, 25 bp, Saccharomyces pastorianus
aacagcaatttccaaccatcttctt

SEQ ID NO: 176090 - DNA, 25 bp, Saccharomyces pastorianus
attgtcgctattatgctgtgccttt

SEQ ID NO: 176091 - DNA, 25 bp, Saccharomyces pastorianus
gtttaacgagctatcacaccagagt

SEQ ID NO: 176092 - DNA, 25 bp, Saccharomyces pastorianus
tgaacactcaatctaacgccgcaat

SEQ ID NO: 176093 - DNA, 25 bp, Saccharomyces pastorianus
gccaactcaggctaaatcagggtat

SEQ ID NO: 176094 - DNA, 25 bp, Saccharomyces pastorianus
tttccctgtgatggcagtgatgcct

SEQ ID NO: 176095 - DNA, 25 bp, Saccharomyces pastorianus
aatgttgcccaattagctacgtcgc

SEQ ID NO: 176096 - DNA, 25 bp, Saccharomyces pastorianus
accacaatctccatatcaacaagct

SEQ ID NO: 176097 - DNA, 25 bp, Saccharomyces pastorianus
tcaacaagctgtacttccttatgcc

SEQ ID NO: 176098 - DNA, 25 bp, Saccharomyces pastorianus
aagacagtccgcaattcgtaattta

SEQ ID NO: 176099 - DNA, 25 bp, Saccharomyces pastorianus
gaatgccgttgttgggtacttggac

SEQ ID NO: 176100 - DNA, 25 bp, Saccharomyces pastorianus
aaaatttgagtgtcggttgccgtcg

SEQ ID NO: 176101 - DNA, 25 bp, Saccharomyces pastorianus
aaaagtctccgatagagctgctaga

SEQ ID NO: 176102 - DNA, 25 bp, Saccharomyces pastorianus
ggagcaagagaaccttcccttggaa

SEQ ID NO: 176103 - DNA, 25 bp, Saccharomyces pastorianus
gttgccgtcgtaaatcacagctctg

SEQ ID NO: 176104 - DNA, 25 bp, Saccharomyces pastorianus
gatcacagatatccttcgatttcga

SEQ ID NO: 176105 - DNA, 25 bp, Saccharomyces pastorianus
aatcggatcctcatgggtctaactg

SEQ ID NO: 176106 - DNA, 25 bp, Saccharomyces pastorianus
tcgatgatctttctgcgtttagctc

SEQ ID NO: 176107 - DNA, 25 bp, Saccharomyces pastorianus
tgagcctaccaaccacattgatttt

SEQ ID NO: 176108 - DNA, 25 bp, Saccharomyces pastorianus
accacgggacagtttctatcagcgg

SEQ ID NO: 176109 - DNA, 25 bp, Saccharomyces pastorianus
aacctgataaaattaccagatatga

SEQ ID NO: 176110 - DNA, 25 bp, Saccharomyces pastorianus
ctcaaggctgcccaggaagcggaaa

SEQ ID NO: 176111 - DNA, 25 bp, Saccharomyces pastorianus
tcagcttccactattgcagagtggg

SEQ ID NO: 176112 - DNA, 25 bp, Saccharomyces pastorianus
caacgttgttggttcaggcagatat

SEQ ID NO: 176113 - DNA, 25 bp, Saccharomyces pastorianus
gatcagtaattgtcccatcgggtta

SEQ ID NO: 176114 - DNA, 25 bp, Saccharomyces pastorianus
cagtaattgtcccatcgggttagtt

SEQ ID NO: 176115 - DNA, 25 bp, Saccharomyces pastorianus
gatatgtgagcaataaacctgataa

SEQ ID NO: 176116 - DNA, 25 bp, Saccharomyces pastorianus
gtgggtagcatgtccatggaaatat

SEQ ID NO: 176117 - DNA, 25 bp, Saccharomyces pastorianus
ggttcaggcagatatgtgagcaata

SEQ ID NO: 176118 - DNA, 25 bp, Saccharomyces pastorianus
attgcagagtgggtagcatgtccat

SEQ ID NO: 176119 - DNA, 25 bp, Saccharomyces pastorianus
aggctgcccaggaagcggaaatgca

SEQ ID NO: 176120 - DNA, 25 bp, Saccharomyces pastorianus
acaatacttaagcgatgacgacgaa

SEQ ID NO: 176121 - DNA, 25 bp, Saccharomyces pastorianus
atcacaatacttaagcgatgacgac

SEQ ID NO: 176122 - DNA, 25 bp, Saccharomyces pastorianus
tcatcacaatacttaagcgatgacg

SEQ ID NO: 176123 - DNA, 25 bp, Saccharomyces pastorianus
tccacacacgactaacacaaaggtt

SEQ ID NO: 176124 - DNA, 25 bp, Saccharomyces pastorianus
caatacttaagcgatgacgacgaac

SEQ ID NO: 176125 - DNA, 25 bp, Saccharomyces pastorianus
cacaatacttaagcgatgacgacga

SEQ ID NO: 176126 - DNA, 25 bp, Saccharomyces pastorianus
aatacttaagcgatgacgacgaact

SEQ ID NO: 176127 - DNA, 25 bp, Saccharomyces pastorianus
atacttaagcgatgacgacgaactt

SEQ ID NO: 176128 - DNA, 25 bp, Saccharomyces pastorianus
catcacaatacttaagcgatgacga

SEQ ID NO: 176129 - DNA, 25 bp, Saccharomyces pastorianus
tcacaatacttaagcgatgacgacg

SEQ ID NO: 176130 - DNA, 25 bp, Saccharomyces pastorianus
tctccacacacgactaacacaaagg

SEQ ID NO: 176131 - DNA, 25 bp, Saccharomyces pastorianus
gcaacagacaccgtcatttgaacct

SEQ ID NO: 176132 - DNA, 25 bp, Saccharomyces pastorianus
cagatataactttcgtaacagacaa

SEQ ID NO: 176133 - DNA, 25 bp, Saccharomyces pastorianus
atgtgggtaagcaacagacaccgtc

SEQ ID NO: 176134 - DNA, 25 bp, Saccharomyces pastorianus
gtaacagacaacgaaaggaagcgtt

SEQ ID NO: 176135 - DNA, 25 bp, Saccharomyces pastorianus
gacaccgtcatttgaacctgttgag

SEQ ID NO: 176136 - DNA, 25 bp, Saccharomyces pastorianus
acaccgtcatttgaacctgttgagc

SEQ ID NO: 176137 - DNA, 25 bp, Saccharomyces pastorianus
gtaagcaacagacaccgtcatttga

SEQ ID NO: 176138 - DNA, 25 bp, Saccharomyces pastorianus
gggtaagcaacagacaccgtcattt

SEQ ID NO: 176139 - DNA, 25 bp, Saccharomyces pastorianus
cagacaccgtcatttgaacctgttg

SEQ ID NO: 176140 - DNA, 25 bp, Saccharomyces pastorianus
tacgaaagcatgtgggtaagcaaca

SEQ ID NO: 176141 - DNA, 25 bp, Saccharomyces pastorianus
gaagcgttacgaaagcatgtgggta

SEQ ID NO: 176142 - DNA, 25 bp, Saccharomyces pastorianus
attttcttcatggtagcgcctatgc

SEQ ID NO: 176143 - DNA, 25 bp, Saccharomyces pastorianus
cattttcttcatggtagcgcctatg

SEQ ID NO: 176144 - DNA, 25 bp, Saccharomyces pastorianus
aggttaattctcaacaagagacaac

SEQ ID NO: 176145 - DNA, 25 bp, Saccharomyces pastorianus
ttttcttcatggtagcgcctatgct

SEQ ID NO: 176146 - DNA, 25 bp, Saccharomyces pastorianus
ttcttcatggtagcgcctatgcttc

SEQ ID NO: 176147 - DNA, 25 bp, Saccharomyces pastorianus
agcttccaatttaccggaatttgat

SEQ ID NO: 176148 - DNA, 25 bp, Saccharomyces pastorianus
ttcagcttccaatttaccggaattt

SEQ ID NO: 176149 - DNA, 25 bp, Saccharomyces pastorianus
aaggttaattctcaacaagagacaa

SEQ ID NO: 176150 - DNA, 25 bp, Saccharomyces pastorianus
tttcttcatggtagcgcctatgctt

SEQ ID NO: 176151 - DNA, 25 bp, Saccharomyces pastorianus
ggttaattctcaacaagagacaaca

SEQ ID NO: 176152 - DNA, 25 bp, Saccharomyces pastorianus
tcttcatggtagcgcctatgcttcg

SEQ ID NO: 176153 - DNA, 25 bp, Saccharomyces pastorianus
gaaagttccatttaagctacctgaa

SEQ ID NO: 176154 - DNA, 25 bp, Saccharomyces pastorianus
tgccacagtggctcaagctgaggct

SEQ ID NO: 176155 - DNA, 25 bp, Saccharomyces pastorianus
tgttgaaatcacacccttagcacac

SEQ ID NO: 176156 - DNA, 25 bp, Saccharomyces pastorianus
gtttgttcagggtacttggtgctat

SEQ ID NO: 176157 - DNA, 25 bp, Saccharomyces pastorianus
actacttatcactattactgggcgt

SEQ ID NO: 176158 - DNA, 25 bp, Saccharomyces pastorianus
caaaggatcgctcctatttcattga

SEQ ID NO: 176159 - DNA, 25 bp, Saccharomyces pastorianus
ggttgaacagtcctcctgaaatctt

SEQ ID NO: 176160 - DNA, 25 bp, Saccharomyces pastorianus
aagctgaggcttttggcattccaaa

SEQ ID NO: 176161 - DNA, 25 bp, Saccharomyces pastorianus
gtgctattgtcaaaggtgccacagt

SEQ ID NO: 176162 - DNA, 25 bp, Saccharomyces pastorianus
taccgtgataaagcctggacagttt

SEQ ID NO: 176163 - DNA, 25 bp, Saccharomyces pastorianus
gaaaccttccaaagttgtcagtttg

SEQ ID NO: 176164 - DNA, 25 bp, Saccharomyces pastorianus
ggtacagcacggaagataaaaaatt

SEQ ID NO: 176165 - DNA, 25 bp, Saccharomyces pastorianus
ttggaggtacagcacggaagataaa

SEQ ID NO: 176166 - DNA, 25 bp, Saccharomyces pastorianus
ataaaaaattggacaagattgcctt

SEQ ID NO: 176167 - DNA, 25 bp, Saccharomyces pastorianus
ctggatttggaggtacagcacggaa

SEQ ID NO: 176168 - DNA, 25 bp, Saccharomyces pastorianus
agtctaactgttcattatatttttg

SEQ ID NO: 176169 - DNA, 25 bp, Saccharomyces pastorianus
tgctatctaagggtgggaagactag

SEQ ID NO: 176170 - DNA, 25 bp, Saccharomyces pastorianus
tcctaactggatttggaggtacagc

SEQ ID NO: 176171 - DNA, 25 bp, Saccharomyces pastorianus
atatttttgccatgggattatacag

SEQ ID NO: 176172 - DNA, 25 bp, Saccharomyces pastorianus
gactagaagtctaactgttcattat

SEQ ID NO: 176173 - DNA, 25 bp, Saccharomyces pastorianus
gccatgggattatacagagcattgt

SEQ ID NO: 176174 - DNA, 25 bp, Saccharomyces pastorianus
ttatacagagcattgtatattccta

SEQ ID NO: 176175 - DNA, 25 bp, Saccharomyces pastorianus
tacacacttatgttaatattacaga

SEQ ID NO: 176176 - DNA, 25 bp, Saccharomyces pastorianus
cacacttatgttaatattacagaaa

SEQ ID NO: 176177 - DNA, 25 bp, Saccharomyces pastorianus
acacacttatgttaatattacagaa

SEQ ID NO: 176178 - DNA, 25 bp, Saccharomyces pastorianus
gaccccaatttatacacacttatgt

SEQ ID NO: 176179 - DNA, 25 bp, Saccharomyces pastorianus
aggaccccaatttatacacacttat

SEQ ID NO: 176180 - DNA, 25 bp, Saccharomyces pastorianus
gaggaccccaatttatacacactta

SEQ ID NO: 176181 - DNA, 25 bp, Saccharomyces pastorianus
agaggaccccaatttatacacactt

SEQ ID NO: 176182 - DNA, 25 bp, Saccharomyces pastorianus
accccaatttatacacacttatgtt

SEQ ID NO: 176183 - DNA, 25 bp, Saccharomyces pastorianus
ggaccccaatttatacacacttatg

SEQ ID NO: 176184 - DNA, 25 bp, Saccharomyces pastorianus
atacacacttatgttaatattacag

SEQ ID NO: 176185 - DNA, 25 bp, Saccharomyces pastorianus
ccccaatttatacacacttatgtta

SEQ ID NO: 176186 - DNA, 25 bp, Saccharomyces pastorianus
gaagcagaagtcacaaacattcttg

SEQ ID NO: 176187 - DNA, 25 bp, Saccharomyces pastorianus
gacagttgctgatctgttttcagac

SEQ ID NO: 176188 - DNA, 25 bp, Saccharomyces pastorianus
tctgttttcagacatacattctatg

SEQ ID NO: 176189 - DNA, 25 bp, Saccharomyces pastorianus
tcacaaacattcttgacagactaaa

SEQ ID NO: 176190 - DNA, 25 bp, Saccharomyces pastorianus
caagaacagccagggctcataacgt

SEQ ID NO: 176191 - DNA, 25 bp, Saccharomyces pastorianus
tacatatgacagttgctgatctgtt

SEQ ID NO: 176192 - DNA, 25 bp, Saccharomyces pastorianus
ggtaaatgacattacgaccctagca

SEQ ID NO: 176193 - DNA, 25 bp, Saccharomyces pastorianus
caaatccataactcggaattcccaa

SEQ ID NO: 176194 - DNA, 25 bp, Saccharomyces pastorianus
ccggccctgataacgatctcataag

SEQ ID NO: 176195 - DNA, 25 bp, Saccharomyces pastorianus
gaagaacaacaggaatcaaaacgta

SEQ ID NO: 176196 - DNA, 25 bp, Saccharomyces pastorianus
ttctttccaaaagcattaacaaaat

SEQ ID NO: 176197 - DNA, 25 bp, Saccharomyces pastorianus
tcacgacttggaaacggagttctac

SEQ ID NO: 176198 - DNA, 25 bp, Saccharomyces pastorianus
agcgcattgggcttacgagactgac

SEQ ID NO: 176199 - DNA, 25 bp, Saccharomyces pastorianus
cgcattgggcttacgagactgacca

SEQ ID NO: 176200 - DNA, 25 bp, Saccharomyces pastorianus
tttggggggcatgactaacctcgat

SEQ ID NO: 176201 - DNA, 25 bp, Saccharomyces pastorianus
cattgggcttacgagactgaccaag

SEQ ID NO: 176202 - DNA, 25 bp, Saccharomyces pastorianus
ttcacgacttggaaacggagttcta

SEQ ID NO: 176203 - DNA, 25 bp, Saccharomyces pastorianus
tatccaacacagatgttcaatctga

SEQ ID NO: 176204 - DNA, 25 bp, Saccharomyces pastorianus
atttggggggcatgactaacctcga

SEQ ID NO: 176205 - DNA, 25 bp, Saccharomyces pastorianus
tggggggcatgactaacctcgattt

SEQ ID NO: 176206 - DNA, 25 bp, Saccharomyces pastorianus
ggggggcatgactaacctcgatttt

SEQ ID NO: 176207 - DNA, 25 bp, Saccharomyces pastorianus
ttggggggcatgactaacctcgatt

SEQ ID NO: 176208 - DNA, 25 bp, Saccharomyces pastorianus
tgcgtatatatacaataccttccaa

SEQ ID NO: 176209 - DNA, 25 bp, Saccharomyces pastorianus
aattattctgacatccttacagtcc

SEQ ID NO: 176210 - DNA, 25 bp, Saccharomyces pastorianus
aaattaattattctgacatccttac

SEQ ID NO: 176211 - DNA, 25 bp, Saccharomyces pastorianus
gaaattaattattctgacatcctta

SEQ ID NO: 176212 - DNA, 25 bp, Saccharomyces pastorianus
attattctgacatccttacagtcct

SEQ ID NO: 176213 - DNA, 25 bp, Saccharomyces pastorianus
ttaattattctgacatccttacagt

SEQ ID NO: 176214 - DNA, 25 bp, Saccharomyces pastorianus
attaattattctgacatccttacag

SEQ ID NO: 176215 - DNA, 25 bp, Saccharomyces pastorianus
ttattctgacatccttacagtcctt

SEQ ID NO: 176216 - DNA, 25 bp, Saccharomyces pastorianus
taattattctgacatccttacagtc

SEQ ID NO: 176217 - DNA, 25 bp, Saccharomyces pastorianus
tatatacaataccttccaagcattt

SEQ ID NO: 176218 - DNA, 25 bp, Saccharomyces pastorianus
aattaattattctgacatccttaca

SEQ ID NO: 176219 - DNA, 25 bp, Saccharomyces pastorianus
ttagtgcctactggtttcccattga

SEQ ID NO: 176220 - DNA, 25 bp, Saccharomyces pastorianus
tagaagcatcttagtgcctactggt

SEQ ID NO: 176221 - DNA, 25 bp, Saccharomyces pastorianus
gcatcttagtgcctactggtttccc

SEQ ID NO: 176222 - DNA, 25 bp, Saccharomyces pastorianus
gtgcctactggtttcccattgacta

SEQ ID NO: 176223 - DNA, 25 bp, Saccharomyces pastorianus
gaagcatcttagtgcctactggttt

SEQ ID NO: 176224 - DNA, 25 bp, Saccharomyces pastorianus
gaaactgcatattatagaagcatct

SEQ ID NO: 176225 - DNA, 25 bp, Saccharomyces pastorianus
tagtgcctactggtttcccattgac

SEQ ID NO: 176226 - DNA, 25 bp, Saccharomyces pastorianus
cccattgactactggactaggactc

SEQ ID NO: 176227 - DNA, 25 bp, Saccharomyces pastorianus
aagcatcttagtgcctactggtttc

SEQ ID NO: 176228 - DNA, 25 bp, Saccharomyces pastorianus
gcctactggtttcccattgactact

SEQ ID NO: 176229 - DNA, 25 bp, Saccharomyces pastorianus
atcttagtgcctactggtttcccat

SEQ ID NO: 176230 - DNA, 25 bp, Saccharomyces pastorianus
tatctaattacccacatatatctca

SEQ ID NO: 176231 - DNA, 25 bp, Saccharomyces pastorianus
tctaattacccacatatatctcatg

SEQ ID NO: 176232 - DNA, 25 bp, Saccharomyces pastorianus
aattacccacatatatctcatggta

SEQ ID NO: 176233 - DNA, 25 bp, Saccharomyces pastorianus
caattatctaattacccacatatat

SEQ ID NO: 176234 - DNA, 25 bp, Saccharomyces pastorianus
ttacccacatatatctcatggtagc

SEQ ID NO: 176235 - DNA, 25 bp, Saccharomyces pastorianus
acaattatctaattacccacatata

SEQ ID NO: 176236 - DNA, 25 bp, Saccharomyces pastorianus
attatctaattacccacatatatct

SEQ ID NO: 176237 - DNA, 25 bp, Saccharomyces pastorianus
taattacccacatatatctcatggt

SEQ ID NO: 176238 - DNA, 25 bp, Saccharomyces pastorianus
attacccacatatatctcatggtag

SEQ ID NO: 176239 - DNA, 25 bp, Saccharomyces pastorianus
aattatctaattacccacatatatc

SEQ ID NO: 176240 - DNA, 25 bp, Saccharomyces pastorianus
atctaattacccacatatatctcat

SEQ ID NO: 176241 - DNA, 25 bp, Saccharomyces pastorianus
ttaaaccggagctatctgcaaccca

SEQ ID NO: 176242 - DNA, 25 bp, Saccharomyces pastorianus
ttgaaggcttaaaccggagctatct

SEQ ID NO: 176243 - DNA, 25 bp, Saccharomyces pastorianus
attgaaggcttaaaccggagctatc

SEQ ID NO: 176244 - DNA, 25 bp, Saccharomyces pastorianus
cttaaaccggagctatctgcaaccc

SEQ ID NO: 176245 - DNA, 25 bp, Saccharomyces pastorianus
tgaaggcttaaaccggagctatctg

SEQ ID NO: 176246 - DNA, 25 bp, Saccharomyces pastorianus
ccagctattgaaggcttaaaccgga

SEQ ID NO: 176247 - DNA, 25 bp, Saccharomyces pastorianus
ggcttaaaccggagctatctgcaac

SEQ ID NO: 176248 - DNA, 25 bp, Saccharomyces pastorianus
aggcttaaaccggagctatctgcaa

SEQ ID NO: 176249 - DNA, 25 bp, Saccharomyces pastorianus
tattgaaggcttaaaccggagctat

SEQ ID NO: 176250 - DNA, 25 bp, Saccharomyces pastorianus
gctattgaaggcttaaaccggagct

SEQ ID NO: 176251 - DNA, 25 bp, Saccharomyces pastorianus
gcttaaaccggagctatctgcaacc

SEQ ID NO: 176252 - DNA, 25 bp, Saccharomyces pastorianus
ggcactcgaatttagggtcttcgtt

SEQ ID NO: 176253 - DNA, 25 bp, Saccharomyces pastorianus
gaatccggcactcgaatttagggtc

SEQ ID NO: 176254 - DNA, 25 bp, Saccharomyces pastorianus
caattacataatgcatgaccttcaa

SEQ ID NO: 176255 - DNA, 25 bp, Saccharomyces pastorianus
attgttgaacgcatccaattacata

SEQ ID NO: 176256 - DNA, 25 bp, Saccharomyces pastorianus
ggtacttagacaatggtgtgatatg

SEQ ID NO: 176257 - DNA, 25 bp, Saccharomyces pastorianus
ttcgttaagaatgcgcatatcgttg

SEQ ID NO: 176258 - DNA, 25 bp, Saccharomyces pastorianus
ctttacctattgttgaacgcatcca

SEQ ID NO: 176259 - DNA, 25 bp, Saccharomyces pastorianus
cccagcgtgatttaaattattatga

SEQ ID NO: 176260 - DNA, 25 bp, Saccharomyces pastorianus
gtgtgatatgaatccggcactcgaa

SEQ ID NO: 176261 - DNA, 25 bp, Saccharomyces pastorianus
aggattgaaatttgacttggtactt

SEQ ID NO: 176262 - DNA, 25 bp, Saccharomyces pastorianus
tagggtcttcgttaagaatgcgcat

SEQ ID NO: 176263 - DNA, 25 bp, Saccharomyces pastorianus
gagttggaaatgcaattcataaatt

SEQ ID NO: 176264 - DNA, 25 bp, Saccharomyces pastorianus
gtgagtggtagtggagttggaaatg

SEQ ID NO: 176265 - DNA, 25 bp, Saccharomyces pastorianus
tagtggagttggaaatgcaattcat

SEQ ID NO: 176266 - DNA, 25 bp, Saccharomyces pastorianus
tggagttggaaatgcaattcataaa

SEQ ID NO: 176267 - DNA, 25 bp, Saccharomyces pastorianus
gtggagttggaaatgcaattcataa

SEQ ID NO: 176268 - DNA, 25 bp, Saccharomyces pastorianus
ggagttggaaatgcaattcataaat

SEQ ID NO: 176269 - DNA, 25 bp, Saccharomyces pastorianus
tggaaatgcaattcataaattttta

SEQ ID NO: 176270 - DNA, 25 bp, Saccharomyces pastorianus
gtagtggagttggaaatgcaattca

SEQ ID NO: 176271 - DNA, 25 bp, Saccharomyces pastorianus
ggtagtggagttggaaatgcaattc

SEQ ID NO: 176272 - DNA, 25 bp, Saccharomyces pastorianus
agtggagttggaaatgcaattcata

SEQ ID NO: 176273 - DNA, 25 bp, Saccharomyces pastorianus
gttggaaatgcaattcataaatttt

SEQ ID NO: 176274 - DNA, 25 bp, Saccharomyces pastorianus
aactccatcaaacataatcactacg

SEQ ID NO: 176275 - DNA, 25 bp, Saccharomyces pastorianus
gaaaactccatcaaacataatcact

SEQ ID NO: 176276 - DNA, 25 bp, Saccharomyces pastorianus
actccatcaaacataatcactacga

SEQ ID NO: 176277 - DNA, 25 bp, Saccharomyces pastorianus
aaacataatcactacgaagaaagta

SEQ ID NO: 176278 - DNA, 25 bp, Saccharomyces pastorianus
aacataatcactacgaagaaagtat

SEQ ID NO: 176279 - DNA, 25 bp, Saccharomyces pastorianus
tcaaacataatcactacgaagaaag

SEQ ID NO: 176280 - DNA, 25 bp, Saccharomyces pastorianus
aaaactccatcaaacataatcacta

SEQ ID NO: 176281 - DNA, 25 bp, Saccharomyces pastorianus
ctccatcaaacataatcactacgaa

SEQ ID NO: 176282 - DNA, 25 bp, Saccharomyces pastorianus
caaacataatcactacgaagaaagt

SEQ ID NO: 176283 - DNA, 25 bp, Saccharomyces pastorianus
aaactccatcaaacataatcactac

SEQ ID NO: 176284 - DNA, 25 bp, Saccharomyces pastorianus
acataatcactacgaagaaagtatt

SEQ ID NO: 176285 - DNA, 25 bp, Saccharomyces pastorianus
gcaaatatacatcgtaccgagtgat

SEQ ID NO: 176286 - DNA, 25 bp, Saccharomyces pastorianus
aagtggctcagcattaagtagggct

SEQ ID NO: 176287 - DNA, 25 bp, Saccharomyces pastorianus
gtcgcaaatatacatcgtaccgagt

SEQ ID NO: 176288 - DNA, 25 bp, Saccharomyces pastorianus
gtaccgagtgatgaacgtggttttg

SEQ ID NO: 176289 - DNA, 25 bp, Saccharomyces pastorianus
tcgtaccgagtgatgaacgtggttt

SEQ ID NO: 176290 - DNA, 25 bp, Saccharomyces pastorianus
ggctcagcattaagtagggctaaaa

SEQ ID NO: 176291 - DNA, 25 bp, Saccharomyces pastorianus
atacatcgtaccgagtgatgaacgt

SEQ ID NO: 176292 - DNA, 25 bp, Saccharomyces pastorianus
gtagggctaaaaagagtcgcaaata

SEQ ID NO: 176293 - DNA, 25 bp, Saccharomyces pastorianus
agagtcgcaaatatacatcgtaccg

SEQ ID NO: 176294 - DNA, 25 bp, Saccharomyces pastorianus
gtaaggcaaagtggctcagcattaa

SEQ ID NO: 176295 - DNA, 25 bp, Saccharomyces pastorianus
ggttgtaaggcaaagtggctcagca

SEQ ID NO: 176296 - DNA, 25 bp, Saccharomyces pastorianus
gaattcctattataggggtgccgag

SEQ ID NO: 176297 - DNA, 25 bp, Saccharomyces pastorianus
tcatacatttttgatagacttcgta

SEQ ID NO: 176298 - DNA, 25 bp, Saccharomyces pastorianus
ctgttttatggcgcttatgtgtatt

SEQ ID NO: 176299 - DNA, 25 bp, Saccharomyces pastorianus
tactgttttatggcgcttatgtgta

SEQ ID NO: 176300 - DNA, 25 bp, Saccharomyces pastorianus
ttttgatagacttcgtatgtggagt

SEQ ID NO: 176301 - DNA, 25 bp, Saccharomyces pastorianus
ggaattcctattataggggtgccga

SEQ ID NO: 176302 - DNA, 25 bp, Saccharomyces pastorianus
aattcctattataggggtgccgagg

SEQ ID NO: 176303 - DNA, 25 bp, Saccharomyces pastorianus
atttttgatagacttcgtatgtgga

SEQ ID NO: 176304 - DNA, 25 bp, Saccharomyces pastorianus
ttcctattataggggtgccgaggtg

SEQ ID NO: 176305 - DNA, 25 bp, Saccharomyces pastorianus
attcctattataggggtgccgaggt

SEQ ID NO: 176306 - DNA, 25 bp, Saccharomyces pastorianus
gtactgttttatggcgcttatgtgt

SEQ ID NO: 176307 - DNA, 25 bp, Saccharomyces pastorianus
aagtcggtgatatatatggtcgtcg

SEQ ID NO: 176308 - DNA, 25 bp, Saccharomyces pastorianus
tattggattgattacagttactgcc

SEQ ID NO: 176309 - DNA, 25 bp, Saccharomyces pastorianus
tacgttgtaggcatcctaatccaaa

SEQ ID NO: 176310 - DNA, 25 bp, Saccharomyces pastorianus
gttgtaggcatcctaatccaaataa

SEQ ID NO: 176311 - DNA, 25 bp, Saccharomyces pastorianus
atggtcgtcgtattggattgattac

SEQ ID NO: 176312 - DNA, 25 bp, Saccharomyces pastorianus
gccatttacgttgtaggcatcctaa

SEQ ID NO: 176313 - DNA, 25 bp, Saccharomyces pastorianus
ttgtcttgtcaaaagtcggtgatat

SEQ ID NO: 176314 - DNA, 25 bp, Saccharomyces pastorianus
acagttactgccatttacgttgtag

SEQ ID NO: 176315 - DNA, 25 bp, Saccharomyces pastorianus
atatatggtcgtcgtattggattga

SEQ ID NO: 176316 - DNA, 25 bp, Saccharomyces pastorianus
ggaattgtcttgtcaaaagtcggtg

SEQ ID NO: 176317 - DNA, 25 bp, Saccharomyces pastorianus
cggtgatatatatggtcgtcgtatt

SEQ ID NO: 176318 - DNA, 25 bp, Saccharomyces pastorianus
agtttagcaggcatcatcgacagtt

SEQ ID NO: 176319 - DNA, 25 bp, Saccharomyces pastorianus
tcatcgacagttgaggagcagatat

SEQ ID NO: 176320 - DNA, 25 bp, Saccharomyces pastorianus
ttagcaggcatcatcgacagttgag

SEQ ID NO: 176321 - DNA, 25 bp, Saccharomyces pastorianus
gcatcatcgacagttgaggagcaga

SEQ ID NO: 176322 - DNA, 25 bp, Saccharomyces pastorianus
gtttagcaggcatcatcgacagttg

SEQ ID NO: 176323 - DNA, 25 bp, Saccharomyces pastorianus
tagcaggcatcatcgacagttgagg

SEQ ID NO: 176324 - DNA, 25 bp, Saccharomyces pastorianus
cagtttagcaggcatcatcgacagt

SEQ ID NO: 176325 - DNA, 25 bp, Saccharomyces pastorianus
tcgacagttgaggagcagatatgaa

SEQ ID NO: 176326 - DNA, 25 bp, Saccharomyces pastorianus
tttagcaggcatcatcgacagttga

SEQ ID NO: 176327 - DNA, 25 bp, Saccharomyces pastorianus
agcaggcatcatcgacagttgagga

SEQ ID NO: 176328 - DNA, 25 bp, Saccharomyces pastorianus
cagttgaggagcagatatgaattaa

SEQ ID NO: 176329 - DNA, 25 bp, Saccharomyces pastorianus
attcaccaaatcttcatggtagcgc

SEQ ID NO: 176330 - DNA, 25 bp, Saccharomyces pastorianus
taccaacaaccgtctatgatgacgt

SEQ ID NO: 176331 - DNA, 25 bp, Saccharomyces pastorianus
tcaccaaatcttcatggtagcgcct

SEQ ID NO: 176332 - DNA, 25 bp, Saccharomyces pastorianus
aaaattcaccaaatcttcatggtag

SEQ ID NO: 176333 - DNA, 25 bp, Saccharomyces pastorianus
aaccgtctatgatgacgtgttcaca

SEQ ID NO: 176334 - DNA, 25 bp, Saccharomyces pastorianus
ttacatcaaaattcaccaaatcttc

SEQ ID NO: 176335 - DNA, 25 bp, Saccharomyces pastorianus
attacatcaaaattcaccaaatctt

SEQ ID NO: 176336 - DNA, 25 bp, Saccharomyces pastorianus
caaaattcaccaaatcttcatggta

SEQ ID NO: 176337 - DNA, 25 bp, Saccharomyces pastorianus
gtctatgatgacgtgttcacattat

SEQ ID NO: 176338 - DNA, 25 bp, Saccharomyces pastorianus
acattaccaacaaccgtctatgatg

SEQ ID NO: 176339 - DNA, 25 bp, Saccharomyces pastorianus
aaattcaccaaatcttcatggtagc

SEQ ID NO: 176340 - DNA, 25 bp, Saccharomyces pastorianus
caacgccgctaatgaacgaaattct

SEQ ID NO: 176341 - DNA, 25 bp, Saccharomyces pastorianus
aagacagcggagacggcaggacaac

SEQ ID NO: 176342 - DNA, 25 bp, Saccharomyces pastorianus
gaaaagtgtcccatgccacttactt

SEQ ID NO: 176343 - DNA, 25 bp, Saccharomyces pastorianus
gaaaatataccttcatccactcaac

SEQ ID NO: 176344 - DNA, 25 bp, Saccharomyces pastorianus
gcatggttgtgatttggactctgaa

SEQ ID NO: 176345 - DNA, 25 bp, Saccharomyces pastorianus
aacgaaattctaccgcttgcaagca

SEQ ID NO: 176346 - DNA, 25 bp, Saccharomyces pastorianus
aagccatccacaaaatccatcgtta

SEQ ID NO: 176347 - DNA, 25 bp, Saccharomyces pastorianus
gacgtaaaagatcacgctcgtgtta

SEQ ID NO: 176348 - DNA, 25 bp, Saccharomyces pastorianus
aaagctcgctcaagaataacttcat

SEQ ID NO: 176349 - DNA, 25 bp, Saccharomyces pastorianus
aaatcaagagtatcaacgccgctaa

SEQ ID NO: 176350 - DNA, 25 bp, Saccharomyces pastorianus
catgccacttacttccacagtagtg

SEQ ID NO: 176351 - DNA, 25 bp, Saccharomyces pastorianus
tgagaactcaccagtctaccaagac

SEQ ID NO: 176352 - DNA, 25 bp, Saccharomyces pastorianus
tgctgccggcccaagaggtttaata

SEQ ID NO: 176353 - DNA, 25 bp, Saccharomyces pastorianus
caaagtcttctttggtaggcctaca

SEQ ID NO: 176354 - DNA, 25 bp, Saccharomyces pastorianus
cacatttctcgctcaatgggtcgaa

SEQ ID NO: 176355 - DNA, 25 bp, Saccharomyces pastorianus
agagatcacgccgaatacctatcgc

SEQ ID NO: 176356 - DNA, 25 bp, Saccharomyces pastorianus
tggtaggcctacactcggcgataaa

SEQ ID NO: 176357 - DNA, 25 bp, Saccharomyces pastorianus
ttatcagacgggactgcgccgtatg

SEQ ID NO: 176358 - DNA, 25 bp, Saccharomyces pastorianus
aaccgaagactattgagccgcctgt

SEQ ID NO: 176359 - DNA, 25 bp, Saccharomyces pastorianus
acaccttcgcgggtacagggttatg

SEQ ID NO: 176360 - DNA, 25 bp, Saccharomyces pastorianus
agactatgagtggtgcctgcaaaca

SEQ ID NO: 176361 - DNA, 25 bp, Saccharomyces pastorianus
gaacccaacgagaattctgctctgt

SEQ ID NO: 176362 - DNA, 25 bp, Saccharomyces pastorianus
tcacgtcttcgcgtccaattattac

SEQ ID NO: 176363 - DNA, 25 bp, Saccharomyces pastorianus
ttcacttcgacttccactgggatga

SEQ ID NO: 176364 - DNA, 25 bp, Saccharomyces pastorianus
tcagacacttcttcctcagacactt

SEQ ID NO: 176365 - DNA, 25 bp, Saccharomyces pastorianus
agacacttcttctctagtcacttct

SEQ ID NO: 176366 - DNA, 25 bp, Saccharomyces pastorianus
gaacttcagtaatttcttcctcaga

SEQ ID NO: 176367 - DNA, 25 bp, Saccharomyces pastorianus
ttctatcctagcaatggaacttcag

SEQ ID NO: 176368 - DNA, 25 bp, Saccharomyces pastorianus
aaaactccaactactgccatctcat

SEQ ID NO: 176369 - DNA, 25 bp, Saccharomyces pastorianus
agtcacttcttcagtcatttcttct

SEQ ID NO: 176370 - DNA, 25 bp, Saccharomyces pastorianus
aatttcttcctcagacacttcttcc

SEQ ID NO: 176371 - DNA, 25 bp, Saccharomyces pastorianus
tctctagtcacttcttcagtcattt

SEQ ID NO: 176372 - DNA, 25 bp, Saccharomyces pastorianus
gacacttcttcctcagacacttctt

SEQ ID NO: 176373 - DNA, 25 bp, Saccharomyces pastorianus
caccaaatcatcatggtagcgccta

SEQ ID NO: 176374 - DNA, 25 bp, Saccharomyces pastorianus
attcaccaaatcatcatggtagcgc

SEQ ID NO: 176375 - DNA, 25 bp, Saccharomyces pastorianus
ttcaccaaatcatcatggtagcgcc

SEQ ID NO: 176376 - DNA, 25 bp, Saccharomyces pastorianus
aattcaccaaatcatcatggtagcg

SEQ ID NO: 176377 - DNA, 25 bp, Saccharomyces pastorianus
atatcaaaattcaccaaatcatcat

SEQ ID NO: 176378 - DNA, 25 bp, Saccharomyces pastorianus
ttatatcaaaattcaccaaatcatc

SEQ ID NO: 176379 - DNA, 25 bp, Saccharomyces pastorianus
attatatcaaaattcaccaaatcat

SEQ ID NO: 176380 - DNA, 25 bp, Saccharomyces pastorianus
tcaccaaatcatcatggtagcgcct

SEQ ID NO: 176381 - DNA, 25 bp, Saccharomyces pastorianus
tatcaaaattcaccaaatcatcatg

SEQ ID NO: 176382 - DNA, 25 bp, Saccharomyces pastorianus
atcaaaattcaccaaatcatcatgg

SEQ ID NO: 176383 - DNA, 25 bp, Saccharomyces pastorianus
tatatcaaaattcaccaaatcatca

SEQ ID NO: 176384 - DNA, 25 bp, Saccharomyces pastorianus
ttgtcaacacaattagcgaactgag

SEQ ID NO: 176385 - DNA, 25 bp, Saccharomyces pastorianus
actggttgccaatgatttttttgtc

SEQ ID NO: 176386 - DNA, 25 bp, Saccharomyces pastorianus
ttttgtcaacacaattagcgaactg

SEQ ID NO: 176387 - DNA, 25 bp, Saccharomyces pastorianus
gatctcgtaggcaaaggactggttg

SEQ ID NO: 176388 - DNA, 25 bp, Saccharomyces pastorianus
aattagcgaactgagcagatgcttc

SEQ ID NO: 176389 - DNA, 25 bp, Saccharomyces pastorianus
cacaattagcgaactgagcagatgc

SEQ ID NO: 176390 - DNA, 25 bp, Saccharomyces pastorianus
aacacaattagcgaactgagcagat

SEQ ID NO: 176391 - DNA, 25 bp, Saccharomyces pastorianus
gcaaaggactggttgccaatgattt

SEQ ID NO: 176392 - DNA, 25 bp, Saccharomyces pastorianus
ttgccaatgatttttttgtcaacac

SEQ ID NO: 176393 - DNA, 25 bp, Saccharomyces pastorianus
aaaggactggttgccaatgattttt

SEQ ID NO: 176394 - DNA, 25 bp, Saccharomyces pastorianus
gtcaacacaattagcgaactgagca

SEQ ID NO: 176395 - DNA, 25 bp, Saccharomyces pastorianus
agaagtctcttaagaagaatgcagt

SEQ ID NO: 176396 - DNA, 25 bp, Saccharomyces pastorianus
gtctcttaagaagaatgcagttaca

SEQ ID NO: 176397 - DNA, 25 bp, Saccharomyces pastorianus
aagtctcttaagaagaatgcagtta

SEQ ID NO: 176398 - DNA, 25 bp, Saccharomyces pastorianus
gaagtctcttaagaagaatgcagtt

SEQ ID NO: 176399 - DNA, 25 bp, Saccharomyces pastorianus
agtctcttaagaagaatgcagttac

SEQ ID NO: 176400 - DNA, 25 bp, Saccharomyces pastorianus
tcttaagaagaatgcagttacatat

SEQ ID NO: 176401 - DNA, 25 bp, Saccharomyces pastorianus
cagaagtctcttaagaagaatgcag

SEQ ID NO: 176402 - DNA, 25 bp, Saccharomyces pastorianus
ctcttaagaagaatgcagttacata

SEQ ID NO: 176403 - DNA, 25 bp, Saccharomyces pastorianus
tcagaagtctcttaagaagaatgca

SEQ ID NO: 176404 - DNA, 25 bp, Saccharomyces pastorianus
tctcttaagaagaatgcagttacat

SEQ ID NO: 176405 - DNA, 25 bp, Saccharomyces pastorianus
ttcagaagtctcttaagaagaatgc

SEQ ID NO: 176406 - DNA, 25 bp, Saccharomyces pastorianus
tgtatttctacatactaatattacg

SEQ ID NO: 176407 - DNA, 25 bp, Saccharomyces pastorianus
atctgtatttctacatactaatatt

SEQ ID NO: 176408 - DNA, 25 bp, Saccharomyces pastorianus
atttctacatactaatattacgatt

SEQ ID NO: 176409 - DNA, 25 bp, Saccharomyces pastorianus
tctgtatttctacatactaatatta

SEQ ID NO: 176410 - DNA, 25 bp, Saccharomyces pastorianus
tatttctacatactaatattacgat

SEQ ID NO: 176411 - DNA, 25 bp, Saccharomyces pastorianus
ctgtatttctacatactaatattac

SEQ ID NO: 176412 - DNA, 25 bp, Saccharomyces pastorianus
aatctgtatttctacatactaatat

SEQ ID NO: 176413 - DNA, 25 bp, Saccharomyces pastorianus
gtatttctacatactaatattacga

SEQ ID NO: 176414 - DNA, 25 bp, Saccharomyces pastorianus
acccagctgggtttaaagacatctt

SEQ ID NO: 176415 - DNA, 25 bp, Saccharomyces pastorianus
cccagctgggtttaaagacatctta

SEQ ID NO: 176416 - DNA, 25 bp, Saccharomyces pastorianus
tattctcaattcttaacccagctgg

SEQ ID NO: 176417 - DNA, 25 bp, Saccharomyces pastorianus
ttctcaattcttaacccagctgggt

SEQ ID NO: 176418 - DNA, 25 bp, Saccharomyces pastorianus
ctattctcaattcttaacccagctg

SEQ ID NO: 176419 - DNA, 25 bp, Saccharomyces pastorianus
gctctattctcaattcttaacccag

SEQ ID NO: 176420 - DNA, 25 bp, Saccharomyces pastorianus
ctcaattcttaacccagctgggttt

SEQ ID NO: 176421 - DNA, 25 bp, Saccharomyces pastorianus
tctattctcaattcttaacccagct

SEQ ID NO: 176422 - DNA, 25 bp, Saccharomyces pastorianus
tctcaattcttaacccagctgggtt

SEQ ID NO: 176423 - DNA, 25 bp, Saccharomyces pastorianus
attctcaattcttaacccagctggg

SEQ ID NO: 176424 - DNA, 25 bp, Saccharomyces pastorianus
ctctattctcaattcttaacccagc

SEQ ID NO: 176425 - DNA, 25 bp, Saccharomyces pastorianus
gagtgatagtggcacaccagctcct

SEQ ID NO: 176426 - DNA, 25 bp, Saccharomyces pastorianus
ctcgaataaaagaagcaacaccaat

SEQ ID NO: 176427 - DNA, 25 bp, Saccharomyces pastorianus
gaagcaacaccaatgcaagtagtaa

SEQ ID NO: 176428 - DNA, 25 bp, Saccharomyces pastorianus
taactccccaacaacagcttttaca

SEQ ID NO: 176429 - DNA, 25 bp, Saccharomyces pastorianus
gcaagctttggaacagcagcagaat

SEQ ID NO: 176430 - DNA, 25 bp, Saccharomyces pastorianus
gacaacagcaagctttggaacagca

SEQ ID NO: 176431 - DNA, 25 bp, Saccharomyces pastorianus
aacagcttttacaaagacaacagca

SEQ ID NO: 176432 - DNA, 25 bp, Saccharomyces pastorianus
ttcagataaaccgaaggccaaacga

SEQ ID NO: 176433 - DNA, 25 bp, Saccharomyces pastorianus
tgatagtggcacaccagctcctaaa

SEQ ID NO: 176434 - DNA, 25 bp, Saccharomyces pastorianus
tggtggagccataaaaagctcgaat

SEQ ID NO: 176435 - DNA, 25 bp, Saccharomyces pastorianus
ctccccaacaacagcttttacaaag

SEQ ID NO: 176436 - DNA, 25 bp, Saccharomyces pastorianus
agaagcagtttcaaggttacatgat

SEQ ID NO: 176437 - DNA, 25 bp, Saccharomyces pastorianus
agtagatcagatacgctcaatgaag

SEQ ID NO: 176438 - DNA, 25 bp, Saccharomyces pastorianus
ccaagtagatcagatacgctcaatg

SEQ ID NO: 176439 - DNA, 25 bp, Saccharomyces pastorianus
gaaaactcagaagcagtttcaaggt

SEQ ID NO: 176440 - DNA, 25 bp, Saccharomyces pastorianus
gcagaaaactcagaagcagtttcaa

SEQ ID NO: 176441 - DNA, 25 bp, Saccharomyces pastorianus
ctcagaagcagtttcaaggttacat

SEQ ID NO: 176442 - DNA, 25 bp, Saccharomyces pastorianus
caagtagatcagatacgctcaatga

SEQ ID NO: 176443 - DNA, 25 bp, Saccharomyces pastorianus
tcagaagcagtttcaaggttacatg

SEQ ID NO: 176444 - DNA, 25 bp, Saccharomyces pastorianus
atgaagcagaaaactcagaagcagt

SEQ ID NO: 176445 - DNA, 25 bp, Saccharomyces pastorianus
actcagaagcagtttcaaggttaca

SEQ ID NO: 176446 - DNA, 25 bp, Saccharomyces pastorianus
gtagatcagatacgctcaatgaagc

SEQ ID NO: 176447 - DNA, 25 bp, Saccharomyces pastorianus
ggtatctagtgcagttaaatgtggc

SEQ ID NO: 176448 - DNA, 25 bp, Saccharomyces pastorianus
atgtggcatatgtcgcggagttgat

SEQ ID NO: 176449 - DNA, 25 bp, Saccharomyces pastorianus
gaattttgtccagtactgttaacga

SEQ ID NO: 176450 - DNA, 25 bp, Saccharomyces pastorianus
gatcataaacagttcactcgcaatg

SEQ ID NO: 176451 - DNA, 25 bp, Saccharomyces pastorianus
ggaaagcgaacaacccagggctggt

SEQ ID NO: 176452 - DNA, 25 bp, Saccharomyces pastorianus
aacccagggctggtacagaagctaa

SEQ ID NO: 176453 - DNA, 25 bp, Saccharomyces pastorianus
aatgtcctaaatgtggcgtacgata

SEQ ID NO: 176454 - DNA, 25 bp, Saccharomyces pastorianus
tgctgcaaagcatgttcataaggaa

SEQ ID NO: 176455 - DNA, 25 bp, Saccharomyces pastorianus
aacacggtgaagttccatttggcaa

SEQ ID NO: 176456 - DNA, 25 bp, Saccharomyces pastorianus
ggcgtacgatattgctccttgaaat

SEQ ID NO: 176457 - DNA, 25 bp, Saccharomyces pastorianus
gaaggcattcgatgatatatatcaa

SEQ ID NO: 176458 - DNA, 25 bp, Saccharomyces pastorianus
aacaacgtttacacatctactctgt

SEQ ID NO: 176459 - DNA, 25 bp, Saccharomyces pastorianus
acaacgtttacacatctactctgtt

SEQ ID NO: 176460 - DNA, 25 bp, Saccharomyces pastorianus
taaacaacgtttacacatctactct

SEQ ID NO: 176461 - DNA, 25 bp, Saccharomyces pastorianus
gtttacacatctactctgttgatga

SEQ ID NO: 176462 - DNA, 25 bp, Saccharomyces pastorianus
ttacacatctactctgttgatgaaa

SEQ ID NO: 176463 - DNA, 25 bp, Saccharomyces pastorianus
acgtttacacatctactctgttgat

SEQ ID NO: 176464 - DNA, 25 bp, Saccharomyces pastorianus
aaacaacgtttacacatctactctg

SEQ ID NO: 176465 - DNA, 25 bp, Saccharomyces pastorianus
aacgtttacacatctactctgttga

SEQ ID NO: 176466 - DNA, 25 bp, Saccharomyces pastorianus
tttacacatctactctgttgatgaa

SEQ ID NO: 176467 - DNA, 25 bp, Saccharomyces pastorianus
cgtttacacatctactctgttgatg

SEQ ID NO: 176468 - DNA, 25 bp, Saccharomyces pastorianus
caacgtttacacatctactctgttg

SEQ ID NO: 176469 - DNA, 25 bp, Saccharomyces pastorianus
tataccaatattacgattattcctc

SEQ ID NO: 176470 - DNA, 25 bp, Saccharomyces pastorianus
accaatattacgattattcctcatt

SEQ ID NO: 176471 - DNA, 25 bp, Saccharomyces pastorianus
ccaatattacgattattcctcattc

SEQ ID NO: 176472 - DNA, 25 bp, Saccharomyces pastorianus
ataccaatattacgattattcctca

SEQ ID NO: 176473 - DNA, 25 bp, Saccharomyces pastorianus
caatattacgattattcctcattcc

SEQ ID NO: 176474 - DNA, 25 bp, Saccharomyces pastorianus
aatattacgattattcctcattccg

SEQ ID NO: 176475 - DNA, 25 bp, Saccharomyces pastorianus
tatataccaatattacgattattcc

SEQ ID NO: 176476 - DNA, 25 bp, Saccharomyces pastorianus
tctatataccaatattacgattatt

SEQ ID NO: 176477 - DNA, 25 bp, Saccharomyces pastorianus
ctatataccaatattacgattattc

SEQ ID NO: 176478 - DNA, 25 bp, Saccharomyces pastorianus
atataccaatattacgattattcct

SEQ ID NO: 176479 - DNA, 25 bp, Saccharomyces pastorianus
taccaatattacgattattcctcat

SEQ ID NO: 176480 - DNA, 25 bp, Saccharomyces pastorianus
tacgttactagtatattatcatata

SEQ ID NO: 176481 - DNA, 25 bp, Saccharomyces pastorianus
ttacgttactagtatattatcatat

SEQ ID NO: 176482 - DNA, 25 bp, Saccharomyces pastorianus
tagtatttacgttactagtatatta

SEQ ID NO: 176483 - DNA, 25 bp, Saccharomyces pastorianus
atttacgttactagtatattatcat

SEQ ID NO: 176484 - DNA, 25 bp, Saccharomyces pastorianus
cgttactagtatattatcatatacg

SEQ ID NO: 176485 - DNA, 25 bp, Saccharomyces pastorianus
tatttacgttactagtatattatca

SEQ ID NO: 176486 - DNA, 25 bp, Saccharomyces pastorianus
tttacgttactagtatattatcata

SEQ ID NO: 176487 - DNA, 25 bp, Saccharomyces pastorianus
acgttactagtatattatcatatac

SEQ ID NO: 176488 - DNA, 25 bp, Saccharomyces pastorianus
agtatttacgttactagtatattat

SEQ ID NO: 176489 - DNA, 25 bp, Saccharomyces pastorianus
ctatcatctactaactagtatttac

SEQ ID NO: 176490 - DNA, 25 bp, Saccharomyces pastorianus
gtatttacgttactagtatattatc

SEQ ID NO: 176491 - DNA, 25 bp, Saccharomyces pastorianus
gaaacagatttttaggcacaaaggc

SEQ ID NO: 176492 - DNA, 25 bp, Saccharomyces pastorianus
taggcacaaaggcaatgagacttag

SEQ ID NO: 176493 - DNA, 25 bp, Saccharomyces pastorianus
aacagatttttaggcacaaaggcaa

SEQ ID NO: 176494 - DNA, 25 bp, Saccharomyces pastorianus
tttaggcacaaaggcaatgagactt

SEQ ID NO: 176495 - DNA, 25 bp, Saccharomyces pastorianus
aggcacaaaggcaatgagacttaga

SEQ ID NO: 176496 - DNA, 25 bp, Saccharomyces pastorianus
cagatttttaggcacaaaggcaatg

SEQ ID NO: 176497 - DNA, 25 bp, Saccharomyces pastorianus
gatttttaggcacaaaggcaatgag

SEQ ID NO: 176498 - DNA, 25 bp, Saccharomyces pastorianus
aaacagatttttaggcacaaaggca

SEQ ID NO: 176499 - DNA, 25 bp, Saccharomyces pastorianus
ttttaggcacaaaggcaatgagact

SEQ ID NO: 176500 - DNA, 25 bp, Saccharomyces pastorianus
agatttttaggcacaaaggcaatga

SEQ ID NO: 176501 - DNA, 25 bp, Saccharomyces pastorianus
tttttaggcacaaaggcaatgagac

SEQ ID NO: 176502 - DNA, 25 bp, Saccharomyces pastorianus
ttccgtcggtgtaaccaagctttgg

SEQ ID NO: 176503 - DNA, 25 bp, Saccharomyces pastorianus
tttggcctcagggaagtggtcatca

SEQ ID NO: 176504 - DNA, 25 bp, Saccharomyces pastorianus
tttttctcttcattcgtggcaatat

SEQ ID NO: 176505 - DNA, 25 bp, Saccharomyces pastorianus
gaaacctttccgcttagagtcaaat

SEQ ID NO: 176506 - DNA, 25 bp, Saccharomyces pastorianus
atgctgctttattgtgttcgcttcc

SEQ ID NO: 176507 - DNA, 25 bp, Saccharomyces pastorianus
tgtttttcatttttgcgttcgctac

SEQ ID NO: 176508 - DNA, 25 bp, Saccharomyces pastorianus
ggaagtcagcttcatgggtgccacc

SEQ ID NO: 176509 - DNA, 25 bp, Saccharomyces pastorianus
ggctagaaggcattccaccatggaa

SEQ ID NO: 176510 - DNA, 25 bp, Saccharomyces pastorianus
gctgtctatgtgttgccttctttta

SEQ ID NO: 176511 - DNA, 25 bp, Saccharomyces pastorianus
aggcggctgctttgttatcgtgtca

SEQ ID NO: 176512 - DNA, 25 bp, Saccharomyces pastorianus
ggctatgttttcattggctgtctat

SEQ ID NO: 176513 - DNA, 25 bp, Saccharomyces pastorianus
aaatcaacttacactgtcattcgaa

SEQ ID NO: 176514 - DNA, 25 bp, Saccharomyces pastorianus
aaaccaacgtcactactgtgtgcca

SEQ ID NO: 176515 - DNA, 25 bp, Saccharomyces pastorianus
acgtcactactgtgtgccaacacca

SEQ ID NO: 176516 - DNA, 25 bp, Saccharomyces pastorianus
gaatttccggcaaactccgactgag

SEQ ID NO: 176517 - DNA, 25 bp, Saccharomyces pastorianus
caacgtcactactgtgtgccaacac

SEQ ID NO: 176518 - DNA, 25 bp, Saccharomyces pastorianus
tcattcgaatttccggcaaactccg

SEQ ID NO: 176519 - DNA, 25 bp, Saccharomyces pastorianus
ctctgtgccacaaaaatcaacttac

SEQ ID NO: 176520 - DNA, 25 bp, Saccharomyces pastorianus
cactgtcattcgaatttccggcaaa

SEQ ID NO: 176521 - DNA, 25 bp, Saccharomyces pastorianus
ctgtcattcgaatttccggcaaact

SEQ ID NO: 176522 - DNA, 25 bp, Saccharomyces pastorianus
tacactgtcattcgaatttccggca

SEQ ID NO: 176523 - DNA, 25 bp, Saccharomyces pastorianus
tttccggcaaactccgactgagaaa

SEQ ID NO: 176524 - DNA, 25 bp, Saccharomyces pastorianus
caactaatacttaaaggtctatccg

SEQ ID NO: 176525 - DNA, 25 bp, Saccharomyces pastorianus
cgacagattggcctgtcaactaata

SEQ ID NO: 176526 - DNA, 25 bp, Saccharomyces pastorianus
agattggcctgtcaactaatactta

SEQ ID NO: 176527 - DNA, 25 bp, Saccharomyces pastorianus
cagattggcctgtcaactaatactt

SEQ ID NO: 176528 - DNA, 25 bp, Saccharomyces pastorianus
ttagcgacagattggcctgtcaact

SEQ ID NO: 176529 - DNA, 25 bp, Saccharomyces pastorianus
attggcctgtcaactaatacttaaa

SEQ ID NO: 176530 - DNA, 25 bp, Saccharomyces pastorianus
ttggcctgtcaactaatacttaaag

SEQ ID NO: 176531 - DNA, 25 bp, Saccharomyces pastorianus
ggcctgtcaactaatacttaaaggt

SEQ ID NO: 176532 - DNA, 25 bp, Saccharomyces pastorianus
gattggcctgtcaactaatacttaa

SEQ ID NO: 176533 - DNA, 25 bp, Saccharomyces pastorianus
tagcgacagattggcctgtcaacta

SEQ ID NO: 176534 - DNA, 25 bp, Saccharomyces pastorianus
ctgtcaactaatacttaaaggtcta

SEQ ID NO: 176535 - DNA, 25 bp, Saccharomyces pastorianus
gtcaatgtatgccttacagggtcat

SEQ ID NO: 176536 - DNA, 25 bp, Saccharomyces pastorianus
gcatatccatgcaccaagattcttg

SEQ ID NO: 176537 - DNA, 25 bp, Saccharomyces pastorianus
gaatattctgggaggcgctgatcat

SEQ ID NO: 176538 - DNA, 25 bp, Saccharomyces pastorianus
gatcgtgtatatcctgctatctatg

SEQ ID NO: 176539 - DNA, 25 bp, Saccharomyces pastorianus
caagcgggtctgagggccaattaga

SEQ ID NO: 176540 - DNA, 25 bp, Saccharomyces pastorianus
aaaggtgtatctctgcaggtatgga

SEQ ID NO: 176541 - DNA, 25 bp, Saccharomyces pastorianus
ggtaatattgtcatcagtgcctctt

SEQ ID NO: 176542 - DNA, 25 bp, Saccharomyces pastorianus
acttcagctcgatcacggcatgtta

SEQ ID NO: 176543 - DNA, 25 bp, Saccharomyces pastorianus
ttcttatgatcacaccgacttcagc

SEQ ID NO: 176544 - DNA, 25 bp, Saccharomyces pastorianus
gcctcttatgatagcacactgattg

SEQ ID NO: 176545 - DNA, 25 bp, Saccharomyces pastorianus
ggagagtgctccaatgcaacgaatt

SEQ ID NO: 176546 - DNA, 25 bp, Saccharomyces pastorianus
aaaatcataacaacactcaagaaac

SEQ ID NO: 176547 - DNA, 25 bp, Saccharomyces pastorianus
agaaaatcataacaacactcaagaa

SEQ ID NO: 176548 - DNA, 25 bp, Saccharomyces pastorianus
aaatcataacaacactcaagaaaca

SEQ ID NO: 176549 - DNA, 25 bp, Saccharomyces pastorianus
gaaaatcataacaacactcaagaaa

SEQ ID NO: 176550 - DNA, 25 bp, Saccharomyces pastorianus
acaacactcaagaaacaatacgata

SEQ ID NO: 176551 - DNA, 25 bp, Saccharomyces pastorianus
ataacaacactcaagaaacaatacg

SEQ ID NO: 176552 - DNA, 25 bp, Saccharomyces pastorianus
aacaacactcaagaaacaatacgat

SEQ ID NO: 176553 - DNA, 25 bp, Saccharomyces pastorianus
atcataacaacactcaagaaacaat

SEQ ID NO: 176554 - DNA, 25 bp, Saccharomyces pastorianus
aacactcaagaaacaatacgataca

SEQ ID NO: 176555 - DNA, 25 bp, Saccharomyces pastorianus
aatcataacaacactcaagaaacaa

SEQ ID NO: 176556 - DNA, 25 bp, Saccharomyces pastorianus
acactcaagaaacaatacgatacaa

SEQ ID NO: 176557 - DNA, 25 bp, Saccharomyces pastorianus
aaagatggaatcattcacgtaaaaa

SEQ ID NO: 176558 - DNA, 25 bp, Saccharomyces pastorianus
catgtaaaagatggaatcattcacg

SEQ ID NO: 176559 - DNA, 25 bp, Saccharomyces pastorianus
tcatgtaaaagatggaatcattcac

SEQ ID NO: 176560 - DNA, 25 bp, Saccharomyces pastorianus
aaactcatgtaaaagatggaatcat

SEQ ID NO: 176561 - DNA, 25 bp, Saccharomyces pastorianus
gtaaaagatggaatcattcacgtaa

SEQ ID NO: 176562 - DNA, 25 bp, Saccharomyces pastorianus
atgtaaaagatggaatcattcacgt

SEQ ID NO: 176563 - DNA, 25 bp, Saccharomyces pastorianus
aaaagatggaatcattcacgtaaaa

SEQ ID NO: 176564 - DNA, 25 bp, Saccharomyces pastorianus
aagatggaatcattcacgtaaaaaa

SEQ ID NO: 176565 - DNA, 25 bp, Saccharomyces pastorianus
taaaagatggaatcattcacgtaaa

SEQ ID NO: 176566 - DNA, 25 bp, Saccharomyces pastorianus
actcatgtaaaagatggaatcattc

SEQ ID NO: 176567 - DNA, 25 bp, Saccharomyces pastorianus
tgtaaaagatggaatcattcacgta

SEQ ID NO: 176568 - DNA, 25 bp, Saccharomyces pastorianus
atctgtggtttcgatttgcttcgcg

SEQ ID NO: 176569 - DNA, 25 bp, Saccharomyces pastorianus
tggctatcattatccgtcacgcgga

SEQ ID NO: 176570 - DNA, 25 bp, Saccharomyces pastorianus
aagcttactatgattcatgcgccaa

SEQ ID NO: 176571 - DNA, 25 bp, Saccharomyces pastorianus
ttgagaagtaccttcattgaagcca

SEQ ID NO: 176572 - DNA, 25 bp, Saccharomyces pastorianus
aaagattgttcttcaggccttaaga

SEQ ID NO: 176573 - DNA, 25 bp, Saccharomyces pastorianus
gggtattcaaaggactggctatcat

SEQ ID NO: 176574 - DNA, 25 bp, Saccharomyces pastorianus
aaagtgttagcaaacgctctagaaa

SEQ ID NO: 176575 - DNA, 25 bp, Saccharomyces pastorianus
gtcacgcggacagaacaccaaaaca

SEQ ID NO: 176576 - DNA, 25 bp, Saccharomyces pastorianus
tcaggccttaagaattgcgttagat

SEQ ID NO: 176577 - DNA, 25 bp, Saccharomyces pastorianus
gatttgcttcgcgtttctggtaaaa

SEQ ID NO: 176578 - DNA, 25 bp, Saccharomyces pastorianus
gaagaatctgcccattattcgtgaa

SEQ ID NO: 176579 - DNA, 25 bp, Saccharomyces pastorianus
ctcagtaaactgtagaaagaaatta

SEQ ID NO: 176580 - DNA, 25 bp, Saccharomyces pastorianus
acacagctcagtaaactgtagaaag

SEQ ID NO: 176581 - DNA, 25 bp, Saccharomyces pastorianus
cggaattacacagctcagtaaactg

SEQ ID NO: 176582 - DNA, 25 bp, Saccharomyces pastorianus
atcggaattacacagctcagtaaac

SEQ ID NO: 176583 - DNA, 25 bp, Saccharomyces pastorianus
attacacagctcagtaaactgtaga

SEQ ID NO: 176584 - DNA, 25 bp, Saccharomyces pastorianus
cacagctcagtaaactgtagaaaga

SEQ ID NO: 176585 - DNA, 25 bp, Saccharomyces pastorianus
gaattacacagctcagtaaactgta

SEQ ID NO: 176586 - DNA, 25 bp, Saccharomyces pastorianus
aattacacagctcagtaaactgtag

SEQ ID NO: 176587 - DNA, 25 bp, Saccharomyces pastorianus
ggaattacacagctcagtaaactgt

SEQ ID NO: 176588 - DNA, 25 bp, Saccharomyces pastorianus
tcggaattacacagctcagtaaact

SEQ ID NO: 176589 - DNA, 25 bp, Saccharomyces pastorianus
tacacagctcagtaaactgtagaaa

SEQ ID NO: 176590 - DNA, 25 bp, Saccharomyces pastorianus
cgtgctttctttcgtggtactgata

SEQ ID NO: 176591 - DNA, 25 bp, Saccharomyces pastorianus
gacagtcaagacgatgtgcctataa

SEQ ID NO: 176592 - DNA, 25 bp, Saccharomyces pastorianus
aaatcactcaatttccaccattcgt

SEQ ID NO: 176593 - DNA, 25 bp, Saccharomyces pastorianus
aatactgctcttcccaaagacacat

SEQ ID NO: 176594 - DNA, 25 bp, Saccharomyces pastorianus
aagaaacctaatgcgtctccagtgc

SEQ ID NO: 176595 - DNA, 25 bp, Saccharomyces pastorianus
ggttattgattcgagttctttccaa

SEQ ID NO: 176596 - DNA, 25 bp, Saccharomyces pastorianus
tacgtcctactttttgtgtggttgt

SEQ ID NO: 176597 - DNA, 25 bp, Saccharomyces pastorianus
taatgccgggagcttcgacgacaat

SEQ ID NO: 176598 - DNA, 25 bp, Saccharomyces pastorianus
agtactgctctctttggaaacgtga

SEQ ID NO: 176599 - DNA, 25 bp, Saccharomyces pastorianus
aactgcaatgttcactccttttacg

SEQ ID NO: 176600 - DNA, 25 bp, Saccharomyces pastorianus
tttttctccttttcgtccaagattg

SEQ ID NO: 176601 - DNA, 25 bp, Saccharomyces pastorianus
tatccttatcctttcattcatcgaa

SEQ ID NO: 176602 - DNA, 25 bp, Saccharomyces pastorianus
ttatcctttcattcatcgaatgctt

SEQ ID NO: 176603 - DNA, 25 bp, Saccharomyces pastorianus
ccttatcctttcattcatcgaatgc

SEQ ID NO: 176604 - DNA, 25 bp, Saccharomyces pastorianus
atcctttcattcatcgaatgcttgc

SEQ ID NO: 176605 - DNA, 25 bp, Saccharomyces pastorianus
atccttatcctttcattcatcgaat

SEQ ID NO: 176606 - DNA, 25 bp, Saccharomyces pastorianus
cttatcctttcattcatcgaatgct

SEQ ID NO: 176607 - DNA, 25 bp, Saccharomyces pastorianus
tatcctttcattcatcgaatgcttg

SEQ ID NO: 176608 - DNA, 25 bp, Saccharomyces pastorianus
tccttatcctttcattcatcgaatg

SEQ ID NO: 176609 - DNA, 25 bp, Saccharomyces pastorianus
tgtacagtaatggagcttcccctca

SEQ ID NO: 176610 - DNA, 25 bp, Saccharomyces pastorianus
cgcctattaactcttctgcaacaat

SEQ ID NO: 176611 - DNA, 25 bp, Saccharomyces pastorianus
ctcaacaaacgcctattaactcttc

SEQ ID NO: 176612 - DNA, 25 bp, Saccharomyces pastorianus
acaaacgcctattaactcttctgca

SEQ ID NO: 176613 - DNA, 25 bp, Saccharomyces pastorianus
agtaatggagcttcccctcaattac

SEQ ID NO: 176614 - DNA, 25 bp, Saccharomyces pastorianus
tggagcttcccctcaattacaagct

SEQ ID NO: 176615 - DNA, 25 bp, Saccharomyces pastorianus
agcttcccctcaattacaagctcaa

SEQ ID NO: 176616 - DNA, 25 bp, Saccharomyces pastorianus
tacagtaatggagcttcccctcaat

SEQ ID NO: 176617 - DNA, 25 bp, Saccharomyces pastorianus
atcctgctcaacaaacgcctattaa

SEQ ID NO: 176618 - DNA, 25 bp, Saccharomyces pastorianus
aaacgcctattaactcttctgcaac

SEQ ID NO: 176619 - DNA, 25 bp, Saccharomyces pastorianus
cctattaactcttctgcaacaatgt

SEQ ID NO: 176620 - DNA, 25 bp, Saccharomyces pastorianus
ccaatatccagtacgggtggtacca

SEQ ID NO: 176621 - DNA, 25 bp, Saccharomyces pastorianus
gatttcagacactcagactcgtaca

SEQ ID NO: 176622 - DNA, 25 bp, Saccharomyces pastorianus
tttcagacactcagactcgtacagt

SEQ ID NO: 176623 - DNA, 25 bp, Saccharomyces pastorianus
aaatctaaagatttcagacactcag

SEQ ID NO: 176624 - DNA, 25 bp, Saccharomyces pastorianus
taaagatttcagacactcagactcg

SEQ ID NO: 176625 - DNA, 25 bp, Saccharomyces pastorianus
aacgtaccaatatccagtacgggtg

SEQ ID NO: 176626 - DNA, 25 bp, Saccharomyces pastorianus
gagactaatcatacaaacgtaccaa

SEQ ID NO: 176627 - DNA, 25 bp, Saccharomyces pastorianus
aagatttcagacactcagactcgta

SEQ ID NO: 176628 - DNA, 25 bp, Saccharomyces pastorianus
tcatacaaacgtaccaatatccagt

SEQ ID NO: 176629 - DNA, 25 bp, Saccharomyces pastorianus
atttcagacactcagactcgtacag

SEQ ID NO: 176630 - DNA, 25 bp, Saccharomyces pastorianus
gtaccaatatccagtacgggtggta

SEQ ID NO: 176631 - DNA, 25 bp, Saccharomyces pastorianus
agatgaagtatcaggtaataattta

SEQ ID NO: 176632 - DNA, 25 bp, Saccharomyces pastorianus
acgtatactacatcgagaccaagaa

SEQ ID NO: 176633 - DNA, 25 bp, Saccharomyces pastorianus
catcgagaccaagaagaacattgct

SEQ ID NO: 176634 - DNA, 25 bp, Saccharomyces pastorianus
gtatactacatcgagaccaagaaga

SEQ ID NO: 176635 - DNA, 25 bp, Saccharomyces pastorianus
ctacatcgagaccaagaagaacatt

SEQ ID NO: 176636 - DNA, 25 bp, Saccharomyces pastorianus
atactacatcgagaccaagaagaac

SEQ ID NO: 176637 - DNA, 25 bp, Saccharomyces pastorianus
caggtaataatttatacgtatacta

SEQ ID NO: 176638 - DNA, 25 bp, Saccharomyces pastorianus
cgtatactacatcgagaccaagaag

SEQ ID NO: 176639 - DNA, 25 bp, Saccharomyces pastorianus
gaccaagaagaacattgctgatgtg

SEQ ID NO: 176640 - DNA, 25 bp, Saccharomyces pastorianus
atcaggtaataatttatacgtatac

SEQ ID NO: 176641 - DNA, 25 bp, Saccharomyces pastorianus
tactacatcgagaccaagaagaaca

SEQ ID NO: 176642 - DNA, 25 bp, Saccharomyces pastorianus
tgctaagtcgctgtcctcttcaaaa

SEQ ID NO: 176643 - DNA, 25 bp, Saccharomyces pastorianus
tttcttcagcgtttatttcgaagtt

SEQ ID NO: 176644 - DNA, 25 bp, Saccharomyces pastorianus
atgatggcaccatcggattatccag

SEQ ID NO: 176645 - DNA, 25 bp, Saccharomyces pastorianus
gtcgctgtcctcttcaaaaccagga

SEQ ID NO: 176646 - DNA, 25 bp, Saccharomyces pastorianus
ggattatccagttcttcgatttcgt

SEQ ID NO: 176647 - DNA, 25 bp, Saccharomyces pastorianus
agttcttcgatttcgtatccaggcg

SEQ ID NO: 176648 - DNA, 25 bp, Saccharomyces pastorianus
gtggaagtgctaagtcgctgtcctc

SEQ ID NO: 176649 - DNA, 25 bp, Saccharomyces pastorianus
aggcggaaggaatgtatcctcattt

SEQ ID NO: 176650 - DNA, 25 bp, Saccharomyces pastorianus
gaatgtatcctcatttaccgatgat

SEQ ID NO: 176651 - DNA, 25 bp, Saccharomyces pastorianus
gcgtttatttcgaagttgcttggag

SEQ ID NO: 176652 - DNA, 25 bp, Saccharomyces pastorianus
ttcgatttcgtatccaggcggtggt

SEQ ID NO: 176653 - DNA, 25 bp, Saccharomyces pastorianus
accaaattttcatggtagcgcctat

SEQ ID NO: 176654 - DNA, 25 bp, Saccharomyces pastorianus
attcaccaaattttcatggtagcgc

SEQ ID NO: 176655 - DNA, 25 bp, Saccharomyces pastorianus
tcaccaaattttcatggtagcgcct

SEQ ID NO: 176656 - DNA, 25 bp, Saccharomyces pastorianus
aaaattcaccaaattttcatggtag

SEQ ID NO: 176657 - DNA, 25 bp, Saccharomyces pastorianus
aaattttcatggtagcgcctatgct

SEQ ID NO: 176658 - DNA, 25 bp, Saccharomyces pastorianus
attttcatggtagcgcctatgcttc

SEQ ID NO: 176659 - DNA, 25 bp, Saccharomyces pastorianus
caccaaattttcatggtagcgccta

SEQ ID NO: 176660 - DNA, 25 bp, Saccharomyces pastorianus
caaaattcaccaaattttcatggta

SEQ ID NO: 176661 - DNA, 25 bp, Saccharomyces pastorianus
gaaccatcatcatgtctctcctcaa

SEQ ID NO: 176662 - DNA, 25 bp, Saccharomyces pastorianus
ttcaccaaattttcatggtagcgcc

SEQ ID NO: 176663 - DNA, 25 bp, Saccharomyces pastorianus
aaattcaccaaattttcatggtagc

SEQ ID NO: 176664 - DNA, 25 bp, Saccharomyces pastorianus
agaagaagatggtgttgtcccctcc

SEQ ID NO: 176665 - DNA, 25 bp, Saccharomyces pastorianus
gaagaagatggtgttgtcccctcca

SEQ ID NO: 176666 - DNA, 25 bp, Saccharomyces pastorianus
tagaagaagatggtgttgtcccctc

SEQ ID NO: 176667 - DNA, 25 bp, Saccharomyces pastorianus
cacgatcattaagcaaaccttagaa

SEQ ID NO: 176668 - DNA, 25 bp, Saccharomyces pastorianus
tatccacagatccacgatcattaag

SEQ ID NO: 176669 - DNA, 25 bp, Saccharomyces pastorianus
gatcattaagcaaaccttagaagaa

SEQ ID NO: 176670 - DNA, 25 bp, Saccharomyces pastorianus
agaagatggtgttgtcccctccaca

SEQ ID NO: 176671 - DNA, 25 bp, Saccharomyces pastorianus
aagaagatggtgttgtcccctccac

SEQ ID NO: 176672 - DNA, 25 bp, Saccharomyces pastorianus
gatccacgatcattaagcaaacctt

SEQ ID NO: 176673 - DNA, 25 bp, Saccharomyces pastorianus
attatccacagatccacgatcatta

SEQ ID NO: 176674 - DNA, 25 bp, Saccharomyces pastorianus
atccacgatcattaagcaaacctta

SEQ ID NO: 176675 - DNA, 25 bp, Saccharomyces pastorianus
ttaaaccggagctatctgcaaccca

SEQ ID NO: 176676 - DNA, 25 bp, Saccharomyces pastorianus
ttgaaggcttaaaccggagctatct

SEQ ID NO: 176677 - DNA, 25 bp, Saccharomyces pastorianus
attgaaggcttaaaccggagctatc

SEQ ID NO: 176678 - DNA, 25 bp, Saccharomyces pastorianus
cttaaaccggagctatctgcaaccc

SEQ ID NO: 176679 - DNA, 25 bp, Saccharomyces pastorianus
tgaaggcttaaaccggagctatctg

SEQ ID NO: 176680 - DNA, 25 bp, Saccharomyces pastorianus
ccagctattgaaggcttaaaccgga

SEQ ID NO: 176681 - DNA, 25 bp, Saccharomyces pastorianus
ggcttaaaccggagctatctgcaac

SEQ ID NO: 176682 - DNA, 25 bp, Saccharomyces pastorianus
aggcttaaaccggagctatctgcaa

SEQ ID NO: 176683 - DNA, 25 bp, Saccharomyces pastorianus
tattgaaggcttaaaccggagctat

SEQ ID NO: 176684 - DNA, 25 bp, Saccharomyces pastorianus
gctattgaaggcttaaaccggagct

SEQ ID NO: 176685 - DNA, 25 bp, Saccharomyces pastorianus
gcttaaaccggagctatctgcaacc

SEQ ID NO: 176686 - DNA, 25 bp, Saccharomyces pastorianus
gttcttctggcttttgttctctaca

SEQ ID NO: 176687 - DNA, 25 bp, Saccharomyces pastorianus
aaggagcagctcttctactagcagc

SEQ ID NO: 176688 - DNA, 25 bp, Saccharomyces pastorianus
acattgatcccgctgtggttcagaa

SEQ ID NO: 176689 - DNA, 25 bp, Saccharomyces pastorianus
gggcgtcttgatttcatttggctta

SEQ ID NO: 176690 - DNA, 25 bp, Saccharomyces pastorianus
ggtggacttttattcgctccagtta

SEQ ID NO: 176691 - DNA, 25 bp, Saccharomyces pastorianus
ggagctttatctaacgcagggcgtc

SEQ ID NO: 176692 - DNA, 25 bp, Saccharomyces pastorianus
ggctttaccatgtatcttcggttca

SEQ ID NO: 176693 - DNA, 25 bp, Saccharomyces pastorianus
agctttttctacaactctctgggag

SEQ ID NO: 176694 - DNA, 25 bp, Saccharomyces pastorianus
gttctctacaatttctgtacctggg

SEQ ID NO: 176695 - DNA, 25 bp, Saccharomyces pastorianus
agaaaagatcgctggcctctgggat

SEQ ID NO: 176696 - DNA, 25 bp, Saccharomyces pastorianus
gtgtcattgcacttacgttaactag

SEQ ID NO: 176697 - DNA, 25 bp, Saccharomyces pastorianus
gatagcggaatattttgtctcaaag

SEQ ID NO: 176698 - DNA, 25 bp, Saccharomyces pastorianus
ttctgctaccgatgtacgcaattgt

SEQ ID NO: 176699 - DNA, 25 bp, Saccharomyces pastorianus
gcaaagatcctgatcgtcatggata

SEQ ID NO: 176700 - DNA, 25 bp, Saccharomyces pastorianus
gaatacgcagtgaattctgctaccg

SEQ ID NO: 176701 - DNA, 25 bp, Saccharomyces pastorianus
taaaacaaccaggacttagcgctat

SEQ ID NO: 176702 - DNA, 25 bp, Saccharomyces pastorianus
atcagaaccataatcaccgatgcga

SEQ ID NO: 176703 - DNA, 25 bp, Saccharomyces pastorianus
tcaccgatgcgataactctgttaag

SEQ ID NO: 176704 - DNA, 25 bp, Saccharomyces pastorianus
cacttaaggcgatatctggtcaacc

SEQ ID NO: 176705 - DNA, 25 bp, Saccharomyces pastorianus
attcatcatatattctctggtacac

SEQ ID NO: 176706 - DNA, 25 bp, Saccharomyces pastorianus
gtacaggtcaattgccacttaaggc

SEQ ID NO: 176707 - DNA, 25 bp, Saccharomyces pastorianus
ggacttagcgctataatcttatgca

SEQ ID NO: 176708 - DNA, 25 bp, Saccharomyces pastorianus
ttcgaacctgtttttgccatttata

SEQ ID NO: 176709 - DNA, 25 bp, Saccharomyces pastorianus
tacattgaggatctagttgctacag

SEQ ID NO: 176710 - DNA, 25 bp, Saccharomyces pastorianus
ggactttcaaggcataatatctgac

SEQ ID NO: 176711 - DNA, 25 bp, Saccharomyces pastorianus
aactgtatataagccgtttactgga

SEQ ID NO: 176712 - DNA, 25 bp, Saccharomyces pastorianus
ggccgaaagcatggcattttatcac

SEQ ID NO: 176713 - DNA, 25 bp, Saccharomyces pastorianus
ataccgttgcttatcacaaatacat

SEQ ID NO: 176714 - DNA, 25 bp, Saccharomyces pastorianus
aaggttaataccgttgcttatcaca

SEQ ID NO: 176715 - DNA, 25 bp, Saccharomyces pastorianus
aatatctgacgaattggaggccgaa

SEQ ID NO: 176716 - DNA, 25 bp, Saccharomyces pastorianus
gtgacgggttgttaactgtatataa

SEQ ID NO: 176717 - DNA, 25 bp, Saccharomyces pastorianus
cactgagggctgcagaagagaaata

SEQ ID NO: 176718 - DNA, 25 bp, Saccharomyces pastorianus
ttgctacagttgatagtgacgggtt

SEQ ID NO: 176719 - DNA, 25 bp, Saccharomyces pastorianus
acatcacatacctttattcatacga

SEQ ID NO: 176720 - DNA, 25 bp, Saccharomyces pastorianus
tcgcgacatcacatacctttattca

SEQ ID NO: 176721 - DNA, 25 bp, Saccharomyces pastorianus
ttcgcgacatcacatacctttattc

SEQ ID NO: 176722 - DNA, 25 bp, Saccharomyces pastorianus
cgcgacatcacatacctttattcat

SEQ ID NO: 176723 - DNA, 25 bp, Saccharomyces pastorianus
gacatcacatacctttattcatacg

SEQ ID NO: 176724 - DNA, 25 bp, Saccharomyces pastorianus
gttcgcgacatcacatacctttatt

SEQ ID NO: 176725 - DNA, 25 bp, Saccharomyces pastorianus
aaaggttcgcgacatcacatacctt

SEQ ID NO: 176726 - DNA, 25 bp, Saccharomyces pastorianus
gcgacatcacatacctttattcata

SEQ ID NO: 176727 - DNA, 25 bp, Saccharomyces pastorianus
tcaaaggttcgcgacatcacatacc

SEQ ID NO: 176728 - DNA, 25 bp, Saccharomyces pastorianus
aggttcgcgacatcacataccttta

SEQ ID NO: 176729 - DNA, 25 bp, Saccharomyces pastorianus
ggttcgcgacatcacatacctttat

SEQ ID NO: 176730 - DNA, 25 bp, Saccharomyces pastorianus
ggtggatcagtatcctgatgtcaat

SEQ ID NO: 176731 - DNA, 25 bp, Saccharomyces pastorianus
gacaagtattatatcccggtggatc

SEQ ID NO: 176732 - DNA, 25 bp, Saccharomyces pastorianus
cagtatcctgatgtcaattttgttg

SEQ ID NO: 176733 - DNA, 25 bp, Saccharomyces pastorianus
tgagatagccctaaagaccatccct

SEQ ID NO: 176734 - DNA, 25 bp, Saccharomyces pastorianus
acccgtgagcacaggtatagaaaga

SEQ ID NO: 176735 - DNA, 25 bp, Saccharomyces pastorianus
gagacccaccaaatttcaggacaag

SEQ ID NO: 176736 - DNA, 25 bp, Saccharomyces pastorianus
cccaccaaatttcaggacaagtatt

SEQ ID NO: 176737 - DNA, 25 bp, Saccharomyces pastorianus
attaaacttgttgagatagccctaa

SEQ ID NO: 176738 - DNA, 25 bp, Saccharomyces pastorianus
tagccctaaagaccatcccttactt

SEQ ID NO: 176739 - DNA, 25 bp, Saccharomyces pastorianus
atatcccggtggatcagtatcctga

SEQ ID NO: 176740 - DNA, 25 bp, Saccharomyces pastorianus
ggatgattacaagagacccaccaaa

SEQ ID NO: 176741 - DNA, 25 bp, Saccharomyces pastorianus
ttaaaccggagctatctgcaaccca

SEQ ID NO: 176742 - DNA, 25 bp, Saccharomyces pastorianus
ttgaaggcttaaaccggagctatct

SEQ ID NO: 176743 - DNA, 25 bp, Saccharomyces pastorianus
attgaaggcttaaaccggagctatc

SEQ ID NO: 176744 - DNA, 25 bp, Saccharomyces pastorianus
cttaaaccggagctatctgcaaccc

SEQ ID NO: 176745 - DNA, 25 bp, Saccharomyces pastorianus
tgaaggcttaaaccggagctatctg

SEQ ID NO: 176746 - DNA, 25 bp, Saccharomyces pastorianus
ccagctattgaaggcttaaaccgga

SEQ ID NO: 176747 - DNA, 25 bp, Saccharomyces pastorianus
ggcttaaaccggagctatctgcaac

SEQ ID NO: 176748 - DNA, 25 bp, Saccharomyces pastorianus
aggcttaaaccggagctatctgcaa

SEQ ID NO: 176749 - DNA, 25 bp, Saccharomyces pastorianus
tattgaaggcttaaaccggagctat

SEQ ID NO: 176750 - DNA, 25 bp, Saccharomyces pastorianus
gctattgaaggcttaaaccggagct

SEQ ID NO: 176751 - DNA, 25 bp, Saccharomyces pastorianus
gcttaaaccggagctatctgcaacc

SEQ ID NO: 176752 - DNA, 25 bp, Saccharomyces pastorianus
agcggtttataccctgtgccattta

SEQ ID NO: 176753 - DNA, 25 bp, Saccharomyces pastorianus
cactgcctcagcggtttataccctg

SEQ ID NO: 176754 - DNA, 25 bp, Saccharomyces pastorianus
acggcactgcctcagcggtttatac

SEQ ID NO: 176755 - DNA, 25 bp, Saccharomyces pastorianus
cataacgcccatgattatctacatt

SEQ ID NO: 176756 - DNA, 25 bp, Saccharomyces pastorianus
actgcctcagcggtttataccctgt

SEQ ID NO: 176757 - DNA, 25 bp, Saccharomyces pastorianus
ctgcctcagcggtttataccctgtg

SEQ ID NO: 176758 - DNA, 25 bp, Saccharomyces pastorianus
ggcactgcctcagcggtttataccc

SEQ ID NO: 176759 - DNA, 25 bp, Saccharomyces pastorianus
gcactgcctcagcggtttataccct

SEQ ID NO: 176760 - DNA, 25 bp, Saccharomyces pastorianus
cggcactgcctcagcggtttatacc

SEQ ID NO: 176761 - DNA, 25 bp, Saccharomyces pastorianus
cccataacgcccatgattatctaca

SEQ ID NO: 176762 - DNA, 25 bp, Saccharomyces pastorianus
ccataacgcccatgattatctacat

SEQ ID NO: 176763 - DNA, 25 bp, Saccharomyces pastorianus
acgtatactacatcgagaccaagat

SEQ ID NO: 176764 - DNA, 25 bp, Saccharomyces pastorianus
tatactacatcgagaccaagatgaa

SEQ ID NO: 176765 - DNA, 25 bp, Saccharomyces pastorianus
gtatactacatcgagaccaagatga

SEQ ID NO: 176766 - DNA, 25 bp, Saccharomyces pastorianus
ctacatcgagaccaagatgaacatt

SEQ ID NO: 176767 - DNA, 25 bp, Saccharomyces pastorianus
atactacatcgagaccaagatgaac

SEQ ID NO: 176768 - DNA, 25 bp, Saccharomyces pastorianus
acatcgagaccaagatgaacattgc

SEQ ID NO: 176769 - DNA, 25 bp, Saccharomyces pastorianus
tacatcgagaccaagatgaacattg

SEQ ID NO: 176770 - DNA, 25 bp, Saccharomyces pastorianus
cgtatactacatcgagaccaagatg

SEQ ID NO: 176771 - DNA, 25 bp, Saccharomyces pastorianus
agaccaagatgaacattgctgatgt

SEQ ID NO: 176772 - DNA, 25 bp, Saccharomyces pastorianus
atcgagaccaagatgaacattgctg

SEQ ID NO: 176773 - DNA, 25 bp, Saccharomyces pastorianus
tactacatcgagaccaagatgaaca

SEQ ID NO: 176774 - DNA, 25 bp, Saccharomyces pastorianus
tctacgcctgaattagttccacttg

SEQ ID NO: 176775 - DNA, 25 bp, Saccharomyces pastorianus
aacttgactcttcgtttgacctgaa

SEQ ID NO: 176776 - DNA, 25 bp, Saccharomyces pastorianus
catttagcgcacaatcagcatccag

SEQ ID NO: 176777 - DNA, 25 bp, Saccharomyces pastorianus
aaaactgacgcgcagggcttcattt

SEQ ID NO: 176778 - DNA, 25 bp, Saccharomyces pastorianus
tttgcccgaccaatcttcgctagaa

SEQ ID NO: 176779 - DNA, 25 bp, Saccharomyces pastorianus
gaaacttctccaatgaactctgaat

SEQ ID NO: 176780 - DNA, 25 bp, Saccharomyces pastorianus
atgtcggcgctaacacgaattctaa

SEQ ID NO: 176781 - DNA, 25 bp, Saccharomyces pastorianus
cttattgtcgtcgtcgtactggata

SEQ ID NO: 176782 - DNA, 25 bp, Saccharomyces pastorianus
gaacgcttcatttagtgacgcagac

SEQ ID NO: 176783 - DNA, 25 bp, Saccharomyces pastorianus
taactacacatattcttccggctca

SEQ ID NO: 176784 - DNA, 25 bp, Saccharomyces pastorianus
gcattaaaccgttctgattcttctg

SEQ ID NO: 176785 - DNA, 25 bp, Saccharomyces pastorianus
tcccaacaattatctcaacattcac

SEQ ID NO: 176786 - DNA, 25 bp, Saccharomyces pastorianus
atggaatcccaacaattatctcaac

SEQ ID NO: 176787 - DNA, 25 bp, Saccharomyces pastorianus
tctcaacattcacccatttctcatg

SEQ ID NO: 176788 - DNA, 25 bp, Saccharomyces pastorianus
ggaatcccaacaattatctcaacat

SEQ ID NO: 176789 - DNA, 25 bp, Saccharomyces pastorianus
atcccaacaattatctcaacattca

SEQ ID NO: 176790 - DNA, 25 bp, Saccharomyces pastorianus
tggaatcccaacaattatctcaaca

SEQ ID NO: 176791 - DNA, 25 bp, Saccharomyces pastorianus
aatcccaacaattatctcaacattc

SEQ ID NO: 176792 - DNA, 25 bp, Saccharomyces pastorianus
tcaacattcacccatttctcatggt

SEQ ID NO: 176793 - DNA, 25 bp, Saccharomyces pastorianus
cccaacaattatctcaacattcacc

SEQ ID NO: 176794 - DNA, 25 bp, Saccharomyces pastorianus
gaatcccaacaattatctcaacatt

SEQ ID NO: 176795 - DNA, 25 bp, Saccharomyces pastorianus
atctcaacattcacccatttctcat

SEQ ID NO: 176796 - DNA, 25 bp, Saccharomyces pastorianus
atccatcacgcaaactcttattggc

SEQ ID NO: 176797 - DNA, 25 bp, Saccharomyces pastorianus
catccatcacgcaaactcttattgg

SEQ ID NO: 176798 - DNA, 25 bp, Saccharomyces pastorianus
cattccaaggttacgcccttacatc

SEQ ID NO: 176799 - DNA, 25 bp, Saccharomyces pastorianus
catccttcgtggcattccaaggtta

SEQ ID NO: 176800 - DNA, 25 bp, Saccharomyces pastorianus
ttccaaggttacgcccttacatcca

SEQ ID NO: 176801 - DNA, 25 bp, Saccharomyces pastorianus
ggcattccaaggttacgcccttaca

SEQ ID NO: 176802 - DNA, 25 bp, Saccharomyces pastorianus
tggcattccaaggttacgcccttac

SEQ ID NO: 176803 - DNA, 25 bp, Saccharomyces pastorianus
tccatcacgcaaactcttattggct

SEQ ID NO: 176804 - DNA, 25 bp, Saccharomyces pastorianus
gtggcattccaaggttacgccctta

SEQ ID NO: 176805 - DNA, 25 bp, Saccharomyces pastorianus
gcattccaaggttacgcccttacat

SEQ ID NO: 176806 - DNA, 25 bp, Saccharomyces pastorianus
atccttcgtggcattccaaggttac

SEQ ID NO: 176807 - DNA, 25 bp, Saccharomyces pastorianus
gttctttacattgaagaggccttgc

SEQ ID NO: 176808 - DNA, 25 bp, Saccharomyces pastorianus
gcaagagtagacgaacaatggaatc

SEQ ID NO: 176809 - DNA, 25 bp, Saccharomyces pastorianus
caatggaatcagttcagttctgaaa

SEQ ID NO: 176810 - DNA, 25 bp, Saccharomyces pastorianus
ttctagagccattttccctaacaaa

SEQ ID NO: 176811 - DNA, 25 bp, Saccharomyces pastorianus
agaggccttgcaagtctactttgca

SEQ ID NO: 176812 - DNA, 25 bp, Saccharomyces pastorianus
gttcaagtcattcaaggagtcagtt

SEQ ID NO: 176813 - DNA, 25 bp, Saccharomyces pastorianus
attgaatgtaattgacttgcaaggc

SEQ ID NO: 176814 - DNA, 25 bp, Saccharomyces pastorianus
caaggagtcagttctttacattgaa

SEQ ID NO: 176815 - DNA, 25 bp, Saccharomyces pastorianus
acggcgcaaagttcaagtcattcaa

SEQ ID NO: 176816 - DNA, 25 bp, Saccharomyces pastorianus
ttccctaacaaaagacaacggcgca

SEQ ID NO: 176817 - DNA, 25 bp, Saccharomyces pastorianus
tgctatgagtcatttagaacattca

SEQ ID NO: 176818 - DNA, 25 bp, Saccharomyces pastorianus
aggtattactgcatgctatacaacc

SEQ ID NO: 176819 - DNA, 25 bp, Saccharomyces pastorianus
acagaggtattactgcatgctatac

SEQ ID NO: 176820 - DNA, 25 bp, Saccharomyces pastorianus
gctatacaaccacggcagattctag

SEQ ID NO: 176821 - DNA, 25 bp, Saccharomyces pastorianus
gaacagaggtattactgcatgctat

SEQ ID NO: 176822 - DNA, 25 bp, Saccharomyces pastorianus
tctttacgaacagaggtattactgc

SEQ ID NO: 176823 - DNA, 25 bp, Saccharomyces pastorianus
cagaggtattactgcatgctataca

SEQ ID NO: 176824 - DNA, 25 bp, Saccharomyces pastorianus
tacgaacagaggtattactgcatgc

SEQ ID NO: 176825 - DNA, 25 bp, Saccharomyces pastorianus
atacaaccacggcagattctagagc

SEQ ID NO: 176826 - DNA, 25 bp, Saccharomyces pastorianus
tacaaccacggcagattctagagca

SEQ ID NO: 176827 - DNA, 25 bp, Saccharomyces pastorianus
atgctatacaaccacggcagattct

SEQ ID NO: 176828 - DNA, 25 bp, Saccharomyces pastorianus
gaggtattactgcatgctatacaac

SEQ ID NO: 176829 - DNA, 25 bp, Saccharomyces pastorianus
ccgagacaacgctgttaaggcctat

SEQ ID NO: 176830 - DNA, 25 bp, Saccharomyces pastorianus
gtattgtcacttccaattggctcac

SEQ ID NO: 176831 - DNA, 25 bp, Saccharomyces pastorianus
tacctccgtggtttccaagagctat

SEQ ID NO: 176832 - DNA, 25 bp, Saccharomyces pastorianus
ggtgctgtttgttcttcagtgactt

SEQ ID NO: 176833 - DNA, 25 bp, Saccharomyces pastorianus
ggttccgcagaacatcagtccgtgg

SEQ ID NO: 176834 - DNA, 25 bp, Saccharomyces pastorianus
ggccgacgagctccagttcattatg

SEQ ID NO: 176835 - DNA, 25 bp, Saccharomyces pastorianus
gtgactttcaacatgagctcgccta

SEQ ID NO: 176836 - DNA, 25 bp, Saccharomyces pastorianus
aaccttcatcggtgacgtattgtca

SEQ ID NO: 176837 - DNA, 25 bp, Saccharomyces pastorianus
agcaaagtagtcgacttcgccacaa

SEQ ID NO: 176838 - DNA, 25 bp, Saccharomyces pastorianus
ggctcaccagaggatttgcccgaga

SEQ ID NO: 176839 - DNA, 25 bp, Saccharomyces pastorianus
gatcgagtcctcatatgccctggaa

SEQ ID NO: 176840 - DNA, 25 bp, Saccharomyces pastorianus
ttgatagagattccactaaggttat

SEQ ID NO: 176841 - DNA, 25 bp, Saccharomyces pastorianus
gttattctcaacaagagacaacacc

SEQ ID NO: 176842 - DNA, 25 bp, Saccharomyces pastorianus
aggttattctcaacaagagacaaca

SEQ ID NO: 176843 - DNA, 25 bp, Saccharomyces pastorianus
atcatcatgtctctcctcaacctgc

SEQ ID NO: 176844 - DNA, 25 bp, Saccharomyces pastorianus
ggttattctcaacaagagacaacac

SEQ ID NO: 176845 - DNA, 25 bp, Saccharomyces pastorianus
tgatagagattccactaaggttatt

SEQ ID NO: 176846 - DNA, 25 bp, Saccharomyces pastorianus
gatagagattccactaaggttattc

SEQ ID NO: 176847 - DNA, 25 bp, Saccharomyces pastorianus
ttattctcaacaagagacaacacct

SEQ ID NO: 176848 - DNA, 25 bp, Saccharomyces pastorianus
gaaccatcatcatgtctctcctcaa

SEQ ID NO: 176849 - DNA, 25 bp, Saccharomyces pastorianus
aaggttattctcaacaagagacaac

SEQ ID NO: 176850 - DNA, 25 bp, Saccharomyces pastorianus
tattctcaacaagagacaacacctg

SEQ ID NO: 176851 - DNA, 25 bp, Saccharomyces pastorianus
tagggcggaatcttaccatgactta

SEQ ID NO: 176852 - DNA, 25 bp, Saccharomyces pastorianus
tagccgttcgtatggaacctttact

SEQ ID NO: 176853 - DNA, 25 bp, Saccharomyces pastorianus
gagttaccaaatctaaatttcacaa

SEQ ID NO: 176854 - DNA, 25 bp, Saccharomyces pastorianus
gaaatttcattcagccctttctgta

SEQ ID NO: 176855 - DNA, 25 bp, Saccharomyces pastorianus
aaggacattctcatcattgcacatg

SEQ ID NO: 176856 - DNA, 25 bp, Saccharomyces pastorianus
attgcacatgagtcaacattaagag

SEQ ID NO: 176857 - DNA, 25 bp, Saccharomyces pastorianus
tggagcatacgagcaaggacattct

SEQ ID NO: 176858 - DNA, 25 bp, Saccharomyces pastorianus
aatcttaccatgacttagccgttcg

SEQ ID NO: 176859 - DNA, 25 bp, Saccharomyces pastorianus
gcttgcacctgcgtagagttaccaa

SEQ ID NO: 176860 - DNA, 25 bp, Saccharomyces pastorianus
ctatttaatggcttgcacctgcgta

SEQ ID NO: 176861 - DNA, 25 bp, Saccharomyces pastorianus
atcattttcgattccctagggcgga

SEQ ID NO: 176862 - DNA, 25 bp, Saccharomyces pastorianus
cagtctcattctgcgtaatcgagac

SEQ ID NO: 176863 - DNA, 25 bp, Saccharomyces pastorianus
acatgagccttggatggatgtcgtg

SEQ ID NO: 176864 - DNA, 25 bp, Saccharomyces pastorianus
aagaattgaacgactgcttttatat

SEQ ID NO: 176865 - DNA, 25 bp, Saccharomyces pastorianus
cgttttgttcagagagccaaagcga

SEQ ID NO: 176866 - DNA, 25 bp, Saccharomyces pastorianus
tcgagacgttttgttcagagagcca

SEQ ID NO: 176867 - DNA, 25 bp, Saccharomyces pastorianus
gtctcattctgcgtaatcgagacgt

SEQ ID NO: 176868 - DNA, 25 bp, Saccharomyces pastorianus
agtctcattctgcgtaatcgagacg

SEQ ID NO: 176869 - DNA, 25 bp, Saccharomyces pastorianus
gaagaattgaacgactgcttttata

SEQ ID NO: 176870 - DNA, 25 bp, Saccharomyces pastorianus
gttatgacgcctttaaacatgagcc

SEQ ID NO: 176871 - DNA, 25 bp, Saccharomyces pastorianus
tctcattctgcgtaatcgagacgtt

SEQ ID NO: 176872 - DNA, 25 bp, Saccharomyces pastorianus
tgacgcctttaaacatgagccttgg

SEQ ID NO: 176873 - DNA, 25 bp, Saccharomyces pastorianus
gaacgtcttaggagatgacgacaga

SEQ ID NO: 176874 - DNA, 25 bp, Saccharomyces pastorianus
ctgtggtgaagatggttgcgttaaa

SEQ ID NO: 176875 - DNA, 25 bp, Saccharomyces pastorianus
atcggtttccacgaggccaaggaag

SEQ ID NO: 176876 - DNA, 25 bp, Saccharomyces pastorianus
tccagaaaatttttgggattactct

SEQ ID NO: 176877 - DNA, 25 bp, Saccharomyces pastorianus
aagaatcggtttccacgaggccaag

SEQ ID NO: 176878 - DNA, 25 bp, Saccharomyces pastorianus
tagacgaacctcttattattcaaaa

SEQ ID NO: 176879 - DNA, 25 bp, Saccharomyces pastorianus
gggccgttagatattccagaaaatt

SEQ ID NO: 176880 - DNA, 25 bp, Saccharomyces pastorianus
gccaaggaaggagaaacacaagaaa

SEQ ID NO: 176881 - DNA, 25 bp, Saccharomyces pastorianus
tatactcctgtggtgaagatggttg

SEQ ID NO: 176882 - DNA, 25 bp, Saccharomyces pastorianus
atgacgacagagaaggttccattaa

SEQ ID NO: 176883 - DNA, 25 bp, Saccharomyces pastorianus
gaagatggttgcgttaaaatttggg

SEQ ID NO: 176884 - DNA, 25 bp, Saccharomyces pastorianus
aagacaatatagcagatttactcac

SEQ ID NO: 176885 - DNA, 25 bp, Saccharomyces pastorianus
gacaatatagcagatttactcacaa

SEQ ID NO: 176886 - DNA, 25 bp, Saccharomyces pastorianus
tttactcacaaaaccagtatcaatt

SEQ ID NO: 176887 - DNA, 25 bp, Saccharomyces pastorianus
caatggtaaagacaatatagcagat

SEQ ID NO: 176888 - DNA, 25 bp, Saccharomyces pastorianus
aaccagtatcaatttctgattttga

SEQ ID NO: 176889 - DNA, 25 bp, Saccharomyces pastorianus
acaaaaccagtatcaatttctgatt

SEQ ID NO: 176890 - DNA, 25 bp, Saccharomyces pastorianus
agacaatatagcagatttactcaca

SEQ ID NO: 176891 - DNA, 25 bp, Saccharomyces pastorianus
gagagactataaactaataaaaatc

SEQ ID NO: 176892 - DNA, 25 bp, Saccharomyces pastorianus
caatatagcagatttactcacaaaa

SEQ ID NO: 176893 - DNA, 25 bp, Saccharomyces pastorianus
acaatatagcagatttactcacaaa

SEQ ID NO: 176894 - DNA, 25 bp, Saccharomyces pastorianus
atttactcacaaaaccagtatcaat

SEQ ID NO: 176895 - DNA, 25 bp, Saccharomyces pastorianus
tgtcgccgccgttgcctctgccgct

SEQ ID NO: 176896 - DNA, 25 bp, Saccharomyces pastorianus
tactgtcgcctctatcgccgctgtc

SEQ ID NO: 176897 - DNA, 25 bp, Saccharomyces pastorianus
tctactgtcgcctctatcgccgctg

SEQ ID NO: 176898 - DNA, 25 bp, Saccharomyces pastorianus
tgcaattctctactgtcgcctctat

SEQ ID NO: 176899 - DNA, 25 bp, Saccharomyces pastorianus
tgtcgcctctatcgccgctgtcgcc

SEQ ID NO: 176900 - DNA, 25 bp, Saccharomyces pastorianus
atgcaattctctactgtcgcctcta

SEQ ID NO: 176901 - DNA, 25 bp, Saccharomyces pastorianus
gcaattctctactgtcgcctctatc

SEQ ID NO: 176902 - DNA, 25 bp, Saccharomyces pastorianus
attctctactgtcgcctctatcgcc

SEQ ID NO: 176903 - DNA, 25 bp, Saccharomyces pastorianus
actgtcgcctctatcgccgctgtcg

SEQ ID NO: 176904 - DNA, 25 bp, Saccharomyces pastorianus
ctactgtcgcctctatcgccgctgt

SEQ ID NO: 176905 - DNA, 25 bp, Saccharomyces pastorianus
gctgtcgccgccgttgcctctgccg

SEQ ID NO: 176906 - DNA, 25 bp, Saccharomyces pastorianus
ctttcactacgtctacgcagcatat

SEQ ID NO: 176907 - DNA, 25 bp, Saccharomyces pastorianus
gtattgaggaacatttgcttgagct

SEQ ID NO: 176908 - DNA, 25 bp, Saccharomyces pastorianus
atttgcttgagctagaaactgatgc

SEQ ID NO: 176909 - DNA, 25 bp, Saccharomyces pastorianus
gtaatgttagcaatggtgttccttt

SEQ ID NO: 176910 - DNA, 25 bp, Saccharomyces pastorianus
tcccctttccggattattggtaatg

SEQ ID NO: 176911 - DNA, 25 bp, Saccharomyces pastorianus
tgatgcgaataccttacatttactt

SEQ ID NO: 176912 - DNA, 25 bp, Saccharomyces pastorianus
gtacattgggatctaccttttacat

SEQ ID NO: 176913 - DNA, 25 bp, Saccharomyces pastorianus
gtgttccttttgctactggtacatt

SEQ ID NO: 176914 - DNA, 25 bp, Saccharomyces pastorianus
agcattatcagcacactttcactac

SEQ ID NO: 176915 - DNA, 25 bp, Saccharomyces pastorianus
gaaactgatgcaaatgtcgaacatt

SEQ ID NO: 176916 - DNA, 25 bp, Saccharomyces pastorianus
gaaagaaacaccatcctcaattgta

SEQ ID NO: 176917 - DNA, 25 bp, Saccharomyces pastorianus
tatccttatcctttcattcatcgaa

SEQ ID NO: 176918 - DNA, 25 bp, Saccharomyces pastorianus
ttatcctttcattcatcgaatgctt

SEQ ID NO: 176919 - DNA, 25 bp, Saccharomyces pastorianus
ccttatcctttcattcatcgaatgc

SEQ ID NO: 176920 - DNA, 25 bp, Saccharomyces pastorianus
atcctttcattcatcgaatgcttgc

SEQ ID NO: 176921 - DNA, 25 bp, Saccharomyces pastorianus
atccttatcctttcattcatcgaat

SEQ ID NO: 176922 - DNA, 25 bp, Saccharomyces pastorianus
cttatcctttcattcatcgaatgct

SEQ ID NO: 176923 - DNA, 25 bp, Saccharomyces pastorianus
tatcctttcattcatcgaatgcttg

SEQ ID NO: 176924 - DNA, 25 bp, Saccharomyces pastorianus
tccttatcctttcattcatcgaatg

SEQ ID NO: 176925 - DNA, 25 bp, Saccharomyces pastorianus
ttctccctctgttttatgtgtttca

SEQ ID NO: 176926 - DNA, 25 bp, Saccharomyces pastorianus
attatttctccctctgttttatgtg

SEQ ID NO: 176927 - DNA, 25 bp, Saccharomyces pastorianus
atttctccctctgttttatgtgttt

SEQ ID NO: 176928 - DNA, 25 bp, Saccharomyces pastorianus
ttatttctccctctgttttatgtgt

SEQ ID NO: 176929 - DNA, 25 bp, Saccharomyces pastorianus
tctccctctgttttatgtgtttcat

SEQ ID NO: 176930 - DNA, 25 bp, Saccharomyces pastorianus
ccctctgttttatgtgtttcattat

SEQ ID NO: 176931 - DNA, 25 bp, Saccharomyces pastorianus
ctctgttttatgtgtttcattatcc

SEQ ID NO: 176932 - DNA, 25 bp, Saccharomyces pastorianus
tccctctgttttatgtgtttcatta

SEQ ID NO: 176933 - DNA, 25 bp, Saccharomyces pastorianus
tttctccctctgttttatgtgtttc

SEQ ID NO: 176934 - DNA, 25 bp, Saccharomyces pastorianus
tatttctccctctgttttatgtgtt

SEQ ID NO: 176935 - DNA, 25 bp, Saccharomyces pastorianus
ctccctctgttttatgtgtttcatt

SEQ ID NO: 176936 - DNA, 25 bp, Saccharomyces pastorianus
gacaattacttattggctcattatg

SEQ ID NO: 176937 - DNA, 25 bp, Saccharomyces pastorianus
tttgaccctgggaaacaaggacatg

SEQ ID NO: 176938 - DNA, 25 bp, Saccharomyces pastorianus
gtttctgttaaaggttcaggataca

SEQ ID NO: 176939 - DNA, 25 bp, Saccharomyces pastorianus
gaagacaaccaagaaaatacacaat

SEQ ID NO: 176940 - DNA, 25 bp, Saccharomyces pastorianus
tatcagtggttatgagttggctaaa

SEQ ID NO: 176941 - DNA, 25 bp, Saccharomyces pastorianus
ccattatcagtggttatgagttggc

SEQ ID NO: 176942 - DNA, 25 bp, Saccharomyces pastorianus
gttggctaaagaaaccgatctggtt

SEQ ID NO: 176943 - DNA, 25 bp, Saccharomyces pastorianus
tgaccctgggaaacaaggacatgaa

SEQ ID NO: 176944 - DNA, 25 bp, Saccharomyces pastorianus
ccagtttctgttaaaggttcaggat

SEQ ID NO: 176945 - DNA, 25 bp, Saccharomyces pastorianus
gaatttattacacaattatgaagac

SEQ ID NO: 176946 - DNA, 25 bp, Saccharomyces pastorianus
atacacaattatttggtattggtaa

SEQ ID NO: 176947 - DNA, 25 bp, Saccharomyces pastorianus
cagattaaagccagccatctctagt

SEQ ID NO: 176948 - DNA, 25 bp, Saccharomyces pastorianus
aaagccagccatctctagtgctcta

SEQ ID NO: 176949 - DNA, 25 bp, Saccharomyces pastorianus
tctgatataagagctcacttggccc

SEQ ID NO: 176950 - DNA, 25 bp, Saccharomyces pastorianus
aagccagccatctctagtgctctat

SEQ ID NO: 176951 - DNA, 25 bp, Saccharomyces pastorianus
ctgatataagagctcacttggccca

SEQ ID NO: 176952 - DNA, 25 bp, Saccharomyces pastorianus
atataagagctcacttggcccaata

SEQ ID NO: 176953 - DNA, 25 bp, Saccharomyces pastorianus
ggaaacctacccagtcgaagttgct

SEQ ID NO: 176954 - DNA, 25 bp, Saccharomyces pastorianus
aagagctcacttggcccaatactac

SEQ ID NO: 176955 - DNA, 25 bp, Saccharomyces pastorianus
tgatataagagctcacttggcccaa

SEQ ID NO: 176956 - DNA, 25 bp, Saccharomyces pastorianus
ataagagctcacttggcccaatact

SEQ ID NO: 176957 - DNA, 25 bp, Saccharomyces pastorianus
ctctgatataagagctcacttggcc

SEQ ID NO: 176958 - DNA, 25 bp, Saccharomyces pastorianus
acaggtcaactaccgctaaaggcga

SEQ ID NO: 176959 - DNA, 25 bp, Saccharomyces pastorianus
gcaacaaccttgttaaaacatagta

SEQ ID NO: 176960 - DNA, 25 bp, Saccharomyces pastorianus
gggaatatgcagtaacatctgccac

SEQ ID NO: 176961 - DNA, 25 bp, Saccharomyces pastorianus
gtttagaaaacaagaccacaggtca

SEQ ID NO: 176962 - DNA, 25 bp, Saccharomyces pastorianus
tatgcagtaacatctgccaccaatg

SEQ ID NO: 176963 - DNA, 25 bp, Saccharomyces pastorianus
ggtcaactaccgctaaaggcgatat

SEQ ID NO: 176964 - DNA, 25 bp, Saccharomyces pastorianus
aagaccacaggtcaactaccgctaa

SEQ ID NO: 176965 - DNA, 25 bp, Saccharomyces pastorianus
aacatctgccaccaatgtacgcaat

SEQ ID NO: 176966 - DNA, 25 bp, Saccharomyces pastorianus
atctgccaccaatgtacgcaattgt

SEQ ID NO: 176967 - DNA, 25 bp, Saccharomyces pastorianus
agtaacatctgccaccaatgtacgc

SEQ ID NO: 176968 - DNA, 25 bp, Saccharomyces pastorianus
cgctaaaggcgatatctagtcaacc

SEQ ID NO: 176969 - DNA, 25 bp, Saccharomyces pastorianus
aacaacgtttacacatctactctgt

SEQ ID NO: 176970 - DNA, 25 bp, Saccharomyces pastorianus
acaacgtttacacatctactctgtt

SEQ ID NO: 176971 - DNA, 25 bp, Saccharomyces pastorianus
taaacaacgtttacacatctactct

SEQ ID NO: 176972 - DNA, 25 bp, Saccharomyces pastorianus
gtttacacatctactctgttgatga

SEQ ID NO: 176973 - DNA, 25 bp, Saccharomyces pastorianus
ttacacatctactctgttgatgaaa

SEQ ID NO: 176974 - DNA, 25 bp, Saccharomyces pastorianus
acgtttacacatctactctgttgat

SEQ ID NO: 176975 - DNA, 25 bp, Saccharomyces pastorianus
aaacaacgtttacacatctactctg

SEQ ID NO: 176976 - DNA, 25 bp, Saccharomyces pastorianus
aacgtttacacatctactctgttga

SEQ ID NO: 176977 - DNA, 25 bp, Saccharomyces pastorianus
tttacacatctactctgttgatgaa

SEQ ID NO: 176978 - DNA, 25 bp, Saccharomyces pastorianus
cgtttacacatctactctgttgatg

SEQ ID NO: 176979 - DNA, 25 bp, Saccharomyces pastorianus
caacgtttacacatctactctgttg

SEQ ID NO: 176980 - DNA, 25 bp, Saccharomyces pastorianus
gaagttttgtctcagatgcctcaca

SEQ ID NO: 176981 - DNA, 25 bp, Saccharomyces pastorianus
agttttgtctcagatgcctcacagc

SEQ ID NO: 176982 - DNA, 25 bp, Saccharomyces pastorianus
aagttttgtctcagatgcctcacag

SEQ ID NO: 176983 - DNA, 25 bp, Saccharomyces pastorianus
atgtgcactataataatggaagttt

SEQ ID NO: 176984 - DNA, 25 bp, Saccharomyces pastorianus
ttttgtctcagatgcctcacagcct

SEQ ID NO: 176985 - DNA, 25 bp, Saccharomyces pastorianus
tcagatgcctcacagccttgaaatg

SEQ ID NO: 176986 - DNA, 25 bp, Saccharomyces pastorianus
atggaagttttgtctcagatgcctc

SEQ ID NO: 176987 - DNA, 25 bp, Saccharomyces pastorianus
tctcagatgcctcacagccttgaaa

SEQ ID NO: 176988 - DNA, 25 bp, Saccharomyces pastorianus
aatggaagttttgtctcagatgcct

SEQ ID NO: 176989 - DNA, 25 bp, Saccharomyces pastorianus
ggaagttttgtctcagatgcctcac

SEQ ID NO: 176990 - DNA, 25 bp, Saccharomyces pastorianus
tgtctcagatgcctcacagccttga

SEQ ID NO: 176991 - DNA, 25 bp, Saccharomyces pastorianus
ttatgatgccctaaacatccgtaaa

SEQ ID NO: 176992 - DNA, 25 bp, Saccharomyces pastorianus
ggacgaaatcgttccatttttcaga

SEQ ID NO: 176993 - DNA, 25 bp, Saccharomyces pastorianus
gggactttcaactgatgaagccatt

SEQ ID NO: 176994 - DNA, 25 bp, Saccharomyces pastorianus
aacgacttgtcaggtcagctggcca

SEQ ID NO: 176995 - DNA, 25 bp, Saccharomyces pastorianus
aacatagctcttgcactggagtcga

SEQ ID NO: 176996 - DNA, 25 bp, Saccharomyces pastorianus
gaaaagcttcgcatgcagatgttga

SEQ ID NO: 176997 - DNA, 25 bp, Saccharomyces pastorianus
atttttgcgtagtgccaacgtcaaa

SEQ ID NO: 176998 - DNA, 25 bp, Saccharomyces pastorianus
atataccctcagactatttttgcgt

SEQ ID NO: 176999 - DNA, 25 bp, Saccharomyces pastorianus
gtatattttgctcgctgtggcacca

SEQ ID NO: 177000 - DNA, 25 bp, Saccharomyces pastorianus
atactggcatttttcaacgacttgt

SEQ ID NO: 177001 - DNA, 25 bp, Saccharomyces pastorianus
gtcaggtcagctggccatttatgat

SEQ ID NO: 177002 - DNA, 25 bp, Saccharomyces pastorianus
agaagtctcttaagaagaatgcagt

SEQ ID NO: 177003 - DNA, 25 bp, Saccharomyces pastorianus
gtctcttaagaagaatgcagttaca

SEQ ID NO: 177004 - DNA, 25 bp, Saccharomyces pastorianus
aagtctcttaagaagaatgcagtta

SEQ ID NO: 177005 - DNA, 25 bp, Saccharomyces pastorianus
ctcttaagaagaatgcagttacata

SEQ ID NO: 177006 - DNA, 25 bp, Saccharomyces pastorianus
gaagtctcttaagaagaatgcagtt

SEQ ID NO: 177007 - DNA, 25 bp, Saccharomyces pastorianus
agtctcttaagaagaatgcagttac

SEQ ID NO: 177008 - DNA, 25 bp, Saccharomyces pastorianus
tcttaagaagaatgcagttacatat

SEQ ID NO: 177009 - DNA, 25 bp, Saccharomyces pastorianus
cagaagtctcttaagaagaatgcag

SEQ ID NO: 177010 - DNA, 25 bp, Saccharomyces pastorianus
tcagaagtctcttaagaagaatgca

SEQ ID NO: 177011 - DNA, 25 bp, Saccharomyces pastorianus
tctcttaagaagaatgcagttacat

SEQ ID NO: 177012 - DNA, 25 bp, Saccharomyces pastorianus
ttcagaagtctcttaagaagaatgc

SEQ ID NO: 177013 - DNA, 25 bp, Saccharomyces pastorianus
tttccggccctaataccaagccttg

SEQ ID NO: 177014 - DNA, 25 bp, Saccharomyces pastorianus
cctaatgaaccgaatgccggctttt

SEQ ID NO: 177015 - DNA, 25 bp, Saccharomyces pastorianus
agatcatgcgaggactcccatgcct

SEQ ID NO: 177016 - DNA, 25 bp, Saccharomyces pastorianus
cgcagtttacggttttgatttcaag

SEQ ID NO: 177017 - DNA, 25 bp, Saccharomyces pastorianus
tcccatgccttggacacctaatgaa

SEQ ID NO: 177018 - DNA, 25 bp, Saccharomyces pastorianus
aattgccttggtttctagagatcat

SEQ ID NO: 177019 - DNA, 25 bp, Saccharomyces pastorianus
aaagctattcagtttcacgaaaagg

SEQ ID NO: 177020 - DNA, 25 bp, Saccharomyces pastorianus
tgaagtagatgcctcttctagaaca

SEQ ID NO: 177021 - DNA, 25 bp, Saccharomyces pastorianus
acaaagacatcgcagtttacggttt

SEQ ID NO: 177022 - DNA, 25 bp, Saccharomyces pastorianus
gaatgagtcctttagacagggtata

SEQ ID NO: 177023 - DNA, 25 bp, Saccharomyces pastorianus
tctgattctgttctagcattctgga

SEQ ID NO: 177024 - DNA, 25 bp, Saccharomyces pastorianus
cacccaatcttcatggtagcgccta

SEQ ID NO: 177025 - DNA, 25 bp, Saccharomyces pastorianus
attcacccaatcttcatggtagcgc

SEQ ID NO: 177026 - DNA, 25 bp, Saccharomyces pastorianus
aattcacccaatcttcatggtagcg

SEQ ID NO: 177027 - DNA, 25 bp, Saccharomyces pastorianus
tcacccaatcttcatggtagcgcct

SEQ ID NO: 177028 - DNA, 25 bp, Saccharomyces pastorianus
aaaattcacccaatcttcatggtag

SEQ ID NO: 177029 - DNA, 25 bp, Saccharomyces pastorianus
cccaatcttcatggtagcgcctatg

SEQ ID NO: 177030 - DNA, 25 bp, Saccharomyces pastorianus
acccaatcttcatggtagcgcctat

SEQ ID NO: 177031 - DNA, 25 bp, Saccharomyces pastorianus
caaaattcacccaatcttcatggta

SEQ ID NO: 177032 - DNA, 25 bp, Saccharomyces pastorianus
caatcttcatggtagcgcctatgct

SEQ ID NO: 177033 - DNA, 25 bp, Saccharomyces pastorianus
atcttcatggtagcgcctatgcttc

SEQ ID NO: 177034 - DNA, 25 bp, Saccharomyces pastorianus
aaattcacccaatcttcatggtagc

SEQ ID NO: 177035 - DNA, 25 bp, Saccharomyces pastorianus
tttggcgaaattcagttcagatgat

SEQ ID NO: 177036 - DNA, 25 bp, Saccharomyces pastorianus
gactttctgacaggatttgaagaat

SEQ ID NO: 177037 - DNA, 25 bp, Saccharomyces pastorianus
gttcagatgatgaaggtgactttct

SEQ ID NO: 177038 - DNA, 25 bp, Saccharomyces pastorianus
acgatacgcaggacacaattttggc

SEQ ID NO: 177039 - DNA, 25 bp, Saccharomyces pastorianus
aggtgactttctgacaggatttgaa

SEQ ID NO: 177040 - DNA, 25 bp, Saccharomyces pastorianus
gataacgatacgcaggacacaattt

SEQ ID NO: 177041 - DNA, 25 bp, Saccharomyces pastorianus
gcaggacacaattttggcgaaattc

SEQ ID NO: 177042 - DNA, 25 bp, Saccharomyces pastorianus
gatcaacgagagtttaattacaaga

SEQ ID NO: 177043 - DNA, 25 bp, Saccharomyces pastorianus
gaaagagaagatcaacgagagttta

SEQ ID NO: 177044 - DNA, 25 bp, Saccharomyces pastorianus
gatgaaggtgactttctgacaggat

SEQ ID NO: 177045 - DNA, 25 bp, Saccharomyces pastorianus
gattgataacgatacgcaggacaca

SEQ ID NO: 177046 - DNA, 25 bp, Saccharomyces pastorianus
gaaagcggacgctcttatgcgtgat

SEQ ID NO: 177047 - DNA, 25 bp, Saccharomyces pastorianus
aatgaggccacacactcgttgatgg

SEQ ID NO: 177048 - DNA, 25 bp, Saccharomyces pastorianus
gagtttccaatcgactctaccggta

SEQ ID NO: 177049 - DNA, 25 bp, Saccharomyces pastorianus
ttggctgtctttatgcagcgtctaa

SEQ ID NO: 177050 - DNA, 25 bp, Saccharomyces pastorianus
tctaggtgttggtgcattccaccgt

SEQ ID NO: 177051 - DNA, 25 bp, Saccharomyces pastorianus
aagactgcctttacacgcttgtgga

SEQ ID NO: 177052 - DNA, 25 bp, Saccharomyces pastorianus
ggcctacatgtacgcaccagatgaa

SEQ ID NO: 177053 - DNA, 25 bp, Saccharomyces pastorianus
gtatcaaggacaccaacgcctacat

SEQ ID NO: 177054 - DNA, 25 bp, Saccharomyces pastorianus
acgcctacattgttggttccattac

SEQ ID NO: 177055 - DNA, 25 bp, Saccharomyces pastorianus
acaaggtatcgtccatctaggtgtt

SEQ ID NO: 177056 - DNA, 25 bp, Saccharomyces pastorianus
tatgcgtgatgccatggacgcccaa

SEQ ID NO: 177057 - DNA, 25 bp, Saccharomyces pastorianus
gaagcagaatctcaagtggtattaa

SEQ ID NO: 177058 - DNA, 25 bp, Saccharomyces pastorianus
tattacattgatcccacctgcgaaa

SEQ ID NO: 177059 - DNA, 25 bp, Saccharomyces pastorianus
gactgcggacctgaacttagtccat

SEQ ID NO: 177060 - DNA, 25 bp, Saccharomyces pastorianus
ttaagcattataccccatttgaaga

SEQ ID NO: 177061 - DNA, 25 bp, Saccharomyces pastorianus
gccacctaatttacctgaagcagaa

SEQ ID NO: 177062 - DNA, 25 bp, Saccharomyces pastorianus
taggcttgggaatttctgccacctc

SEQ ID NO: 177063 - DNA, 25 bp, Saccharomyces pastorianus
atcatccatccggagtaatttcatg

SEQ ID NO: 177064 - DNA, 25 bp, Saccharomyces pastorianus
tccctgtgcttataccttgggtata

SEQ ID NO: 177065 - DNA, 25 bp, Saccharomyces pastorianus
tactgggcgatatgaatgatcctat

SEQ ID NO: 177066 - DNA, 25 bp, Saccharomyces pastorianus
ttatatcgcagacggtttacagtat

SEQ ID NO: 177067 - DNA, 25 bp, Saccharomyces pastorianus
tttgttgatgtaccaaggctagcat

SEQ ID NO: 177068 - DNA, 25 bp, Saccharomyces pastorianus
gtggtactgttctcattgtcgccaa

SEQ ID NO: 177069 - DNA, 25 bp, Saccharomyces pastorianus
gataaggtggtactgttctcattgt

SEQ ID NO: 177070 - DNA, 25 bp, Saccharomyces pastorianus
cgccaagtggtccacgagagtgaac

SEQ ID NO: 177071 - DNA, 25 bp, Saccharomyces pastorianus
gaagaggacatgtttccattgcaag

SEQ ID NO: 177072 - DNA, 25 bp, Saccharomyces pastorianus
ggtacccaagtgaaagaagccattt

SEQ ID NO: 177073 - DNA, 25 bp, Saccharomyces pastorianus
gtcgagaagaggacatgtttccatt

SEQ ID NO: 177074 - DNA, 25 bp, Saccharomyces pastorianus
tccacgagagtgaactgcaaatgtt

SEQ ID NO: 177075 - DNA, 25 bp, Saccharomyces pastorianus
atgttagacttaggtacccaagtga

SEQ ID NO: 177076 - DNA, 25 bp, Saccharomyces pastorianus
gcaaatgttagacttaggtacccaa

SEQ ID NO: 177077 - DNA, 25 bp, Saccharomyces pastorianus
agtggtccacgagagtgaactgcaa

SEQ ID NO: 177078 - DNA, 25 bp, Saccharomyces pastorianus
aaggtggtactgttctcattgtcgc

SEQ ID NO: 177079 - DNA, 25 bp, Saccharomyces pastorianus
gacagtaaatctacaatcagtataa

SEQ ID NO: 177080 - DNA, 25 bp, Saccharomyces pastorianus
attgcagacgtaatgaccaaacctc

SEQ ID NO: 177081 - DNA, 25 bp, Saccharomyces pastorianus
aagaatattgcagacgtaatgacca

SEQ ID NO: 177082 - DNA, 25 bp, Saccharomyces pastorianus
taaccgacagtaaatctacaatcag

SEQ ID NO: 177083 - DNA, 25 bp, Saccharomyces pastorianus
ctgcacgtatgctatatcgaaacca

SEQ ID NO: 177084 - DNA, 25 bp, Saccharomyces pastorianus
tcaggaaatcatctgcacgtatgct

SEQ ID NO: 177085 - DNA, 25 bp, Saccharomyces pastorianus
aatcatctgcacgtatgctatatcg

SEQ ID NO: 177086 - DNA, 25 bp, Saccharomyces pastorianus
ggaaatcatctgcacgtatgctata

SEQ ID NO: 177087 - DNA, 25 bp, Saccharomyces pastorianus
tcatctgcacgtatgctatatcgaa

SEQ ID NO: 177088 - DNA, 25 bp, Saccharomyces pastorianus
gtatcaggaaatcatctgcacgtat

SEQ ID NO: 177089 - DNA, 25 bp, Saccharomyces pastorianus
gaagtatcaggaaatcatctgcacg

SEQ ID NO: 177090 - DNA, 25 bp, Saccharomyces pastorianus
gagacttccgtctggacccaaagat

SEQ ID NO: 177091 - DNA, 25 bp, Saccharomyces pastorianus
acaagttggctctggttttggttca

SEQ ID NO: 177092 - DNA, 25 bp, Saccharomyces pastorianus
tctgtgcaggatttgtttaactcat

SEQ ID NO: 177093 - DNA, 25 bp, Saccharomyces pastorianus
gttttggttcaaatccgcttcatat

SEQ ID NO: 177094 - DNA, 25 bp, Saccharomyces pastorianus
gaagacggctttgctttccaaagac

SEQ ID NO: 177095 - DNA, 25 bp, Saccharomyces pastorianus
cacagacataccagtcagtgatgat

SEQ ID NO: 177096 - DNA, 25 bp, Saccharomyces pastorianus
agctttgccatccatcacagacata

SEQ ID NO: 177097 - DNA, 25 bp, Saccharomyces pastorianus
aaagacacttccctcactgattctg

SEQ ID NO: 177098 - DNA, 25 bp, Saccharomyces pastorianus
ggcctttccacattcatctattgaa

SEQ ID NO: 177099 - DNA, 25 bp, Saccharomyces pastorianus
gtagatacgttagcacttaccagtg

SEQ ID NO: 177100 - DNA, 25 bp, Saccharomyces pastorianus
gatgcgaacgctaaagctttgccat

SEQ ID NO: 177101 - DNA, 25 bp, Saccharomyces pastorianus
acgtatactacatcgagaccaagat

SEQ ID NO: 177102 - DNA, 25 bp, Saccharomyces pastorianus
tatactacatcgagaccaagatgaa

SEQ ID NO: 177103 - DNA, 25 bp, Saccharomyces pastorianus
gtatactacatcgagaccaagatga

SEQ ID NO: 177104 - DNA, 25 bp, Saccharomyces pastorianus
ctacatcgagaccaagatgaacatt

SEQ ID NO: 177105 - DNA, 25 bp, Saccharomyces pastorianus
agaccaagatgaacattgctgatgt

SEQ ID NO: 177106 - DNA, 25 bp, Saccharomyces pastorianus
atactacatcgagaccaagatgaac

SEQ ID NO: 177107 - DNA, 25 bp, Saccharomyces pastorianus
acatcgagaccaagatgaacattgc

SEQ ID NO: 177108 - DNA, 25 bp, Saccharomyces pastorianus
tacatcgagaccaagatgaacattg

SEQ ID NO: 177109 - DNA, 25 bp, Saccharomyces pastorianus
cgtatactacatcgagaccaagatg

SEQ ID NO: 177110 - DNA, 25 bp, Saccharomyces pastorianus
atcgagaccaagatgaacattgctg

SEQ ID NO: 177111 - DNA, 25 bp, Saccharomyces pastorianus
tactacatcgagaccaagatgaaca

SEQ ID NO: 177112 - DNA, 25 bp, Saccharomyces pastorianus
tcgctttcctcatcactgctgcaat

SEQ ID NO: 177113 - DNA, 25 bp, Saccharomyces pastorianus
tgcaatactttctgcacctgtcact

SEQ ID NO: 177114 - DNA, 25 bp, Saccharomyces pastorianus
tttcctcatcactgctgcaatactt

SEQ ID NO: 177115 - DNA, 25 bp, Saccharomyces pastorianus
ctttcctcatcactgctgcaatact

SEQ ID NO: 177116 - DNA, 25 bp, Saccharomyces pastorianus
cgctttcctcatcactgctgcaata

SEQ ID NO: 177117 - DNA, 25 bp, Saccharomyces pastorianus
gcacgtgtcgctttcctcatcactg

SEQ ID NO: 177118 - DNA, 25 bp, Saccharomyces pastorianus
ttcctcatcactgctgcaatacttt

SEQ ID NO: 177119 - DNA, 25 bp, Saccharomyces pastorianus
tgcacgtgtcgctttcctcatcact

SEQ ID NO: 177120 - DNA, 25 bp, Saccharomyces pastorianus
tgtcgctttcctcatcactgctgca

SEQ ID NO: 177121 - DNA, 25 bp, Saccharomyces pastorianus
gctttcctcatcactgctgcaatac

SEQ ID NO: 177122 - DNA, 25 bp, Saccharomyces pastorianus
acgtgtcgctttcctcatcactgct

SEQ ID NO: 177123 - DNA, 25 bp, Saccharomyces pastorianus
caccaaatcatcatggtagcgccta

SEQ ID NO: 177124 - DNA, 25 bp, Saccharomyces pastorianus
aaatcatcatggtagcgcctatgct

SEQ ID NO: 177125 - DNA, 25 bp, Saccharomyces pastorianus
caaatcatcatggtagcgcctatgc

SEQ ID NO: 177126 - DNA, 25 bp, Saccharomyces pastorianus
aaaattcaccaaatcatcatggtag

SEQ ID NO: 177127 - DNA, 25 bp, Saccharomyces pastorianus
attcaccaaatcatcatggtagcgc

SEQ ID NO: 177128 - DNA, 25 bp, Saccharomyces pastorianus
atcatcatggtagcgcctatgcttc

SEQ ID NO: 177129 - DNA, 25 bp, Saccharomyces pastorianus
ttcaccaaatcatcatggtagcgcc

SEQ ID NO: 177130 - DNA, 25 bp, Saccharomyces pastorianus
aaattcaccaaatcatcatggtagc

SEQ ID NO: 177131 - DNA, 25 bp, Saccharomyces pastorianus
aattcaccaaatcatcatggtagcg

SEQ ID NO: 177132 - DNA, 25 bp, Saccharomyces pastorianus
tcaccaaatcatcatggtagcgcct

SEQ ID NO: 177133 - DNA, 25 bp, Saccharomyces pastorianus
accaaatcatcatggtagcgcctat

SEQ ID NO: 177134 - DNA, 25 bp, Saccharomyces pastorianus
ttgttattatcctacgttattcccg

SEQ ID NO: 177135 - DNA, 25 bp, Saccharomyces pastorianus
aaagatctggatgctgtcttgtcat

SEQ ID NO: 177136 - DNA, 25 bp, Saccharomyces pastorianus
ggtgtgcctttgaatgctcatctga

SEQ ID NO: 177137 - DNA, 25 bp, Saccharomyces pastorianus
ttacttggcctctagtacagctttc

SEQ ID NO: 177138 - DNA, 25 bp, Saccharomyces pastorianus
gaccattctggctcggcaaatttgg

SEQ ID NO: 177139 - DNA, 25 bp, Saccharomyces pastorianus
gctcatctgatgtcatgtgcttgga

SEQ ID NO: 177140 - DNA, 25 bp, Saccharomyces pastorianus
acatcttttggttgtgtcattgcct

SEQ ID NO: 177141 - DNA, 25 bp, Saccharomyces pastorianus
gggcgccaattctggacatctacaa

SEQ ID NO: 177142 - DNA, 25 bp, Saccharomyces pastorianus
atccttgattggtctgctttacttg

SEQ ID NO: 177143 - DNA, 25 bp, Saccharomyces pastorianus
gtgacatcgcacatggaccattctg

SEQ ID NO: 177144 - DNA, 25 bp, Saccharomyces pastorianus
gtcaatccacatactggtgtgcctt

SEQ ID NO: 177145 - DNA, 25 bp, Saccharomyces pastorianus
ttaaaccggagctatctgcaaccca

SEQ ID NO: 177146 - DNA, 25 bp, Saccharomyces pastorianus
ttgaaggcttaaaccggagctatct

SEQ ID NO: 177147 - DNA, 25 bp, Saccharomyces pastorianus
attgaaggcttaaaccggagctatc

SEQ ID NO: 177148 - DNA, 25 bp, Saccharomyces pastorianus
cttaaaccggagctatctgcaaccc

SEQ ID NO: 177149 - DNA, 25 bp, Saccharomyces pastorianus
tgaaggcttaaaccggagctatctg

SEQ ID NO: 177150 - DNA, 25 bp, Saccharomyces pastorianus
ccagctattgaaggcttaaaccgga

SEQ ID NO: 177151 - DNA, 25 bp, Saccharomyces pastorianus
ggcttaaaccggagctatctgcaac

SEQ ID NO: 177152 - DNA, 25 bp, Saccharomyces pastorianus
aggcttaaaccggagctatctgcaa

SEQ ID NO: 177153 - DNA, 25 bp, Saccharomyces pastorianus
tattgaaggcttaaaccggagctat

SEQ ID NO: 177154 - DNA, 25 bp, Saccharomyces pastorianus
gctattgaaggcttaaaccggagct

SEQ ID NO: 177155 - DNA, 25 bp, Saccharomyces pastorianus
gcttaaaccggagctatctgcaacc

SEQ ID NO: 177156 - DNA, 25 bp, Saccharomyces pastorianus
gcgcgtcattgaaataagcaggaac

SEQ ID NO: 177157 - DNA, 25 bp, Saccharomyces pastorianus
catccttggtggcttgtctttgcgc

SEQ ID NO: 177158 - DNA, 25 bp, Saccharomyces pastorianus
tggcttgtctttgcgcgtcattgaa

SEQ ID NO: 177159 - DNA, 25 bp, Saccharomyces pastorianus
aacgttcaaaccagcgatggtacca

SEQ ID NO: 177160 - DNA, 25 bp, Saccharomyces pastorianus
caaaccgtaggcaatggcggctgcg

SEQ ID NO: 177161 - DNA, 25 bp, Saccharomyces pastorianus
agatttatccaaaccgtaggcaatg

SEQ ID NO: 177162 - DNA, 25 bp, Saccharomyces pastorianus
ttccttatcagatttatccaaaccg

SEQ ID NO: 177163 - DNA, 25 bp, Saccharomyces pastorianus
aattctcaaaacgttcaaaccagcg

SEQ ID NO: 177164 - DNA, 25 bp, Saccharomyces pastorianus
gcggttggttcattaacaattctca

SEQ ID NO: 177165 - DNA, 25 bp, Saccharomyces pastorianus
ttgtctttgcgcgtcattgaaataa

SEQ ID NO: 177166 - DNA, 25 bp, Saccharomyces pastorianus
ggcggctgcggttggttcattaaca

SEQ ID NO: 177167 - DNA, 25 bp, Saccharomyces pastorianus
acaataccagtatcgatttctgact

SEQ ID NO: 177168 - DNA, 25 bp, Saccharomyces pastorianus
taccagtatcgatttctgactttga

SEQ ID NO: 177169 - DNA, 25 bp, Saccharomyces pastorianus
caaagtattgcaacacaagataaca

SEQ ID NO: 177170 - DNA, 25 bp, Saccharomyces pastorianus
aataccagtatcgatttctgacttt

SEQ ID NO: 177171 - DNA, 25 bp, Saccharomyces pastorianus
cacaataccagtatcgatttctgac

SEQ ID NO: 177172 - DNA, 25 bp, Saccharomyces pastorianus
ataccagtatcgatttctgactttg

SEQ ID NO: 177173 - DNA, 25 bp, Saccharomyces pastorianus
tcaaagtattgcaacacaagataac

SEQ ID NO: 177174 - DNA, 25 bp, Saccharomyces pastorianus
ttatcaaagtattgcaacacaagat

SEQ ID NO: 177175 - DNA, 25 bp, Saccharomyces pastorianus
tttatcaaagtattgcaacacaaga

SEQ ID NO: 177176 - DNA, 25 bp, Saccharomyces pastorianus
atcaaagtattgcaacacaagataa

SEQ ID NO: 177177 - DNA, 25 bp, Saccharomyces pastorianus
tatcaaagtattgcaacacaagata

SEQ ID NO: 177178 - DNA, 25 bp, Saccharomyces pastorianus
attctcaccaagagacaaccctggg

SEQ ID NO: 177179 - DNA, 25 bp, Saccharomyces pastorianus
gaatttgatagagattccactaagg

SEQ ID NO: 177180 - DNA, 25 bp, Saccharomyces pastorianus
atgctcttcatggtagcgcctatgc

SEQ ID NO: 177181 - DNA, 25 bp, Saccharomyces pastorianus
gctcttcatggtagcgcctatgctt

SEQ ID NO: 177182 - DNA, 25 bp, Saccharomyces pastorianus
taattctcaccaagagacaaccctg

SEQ ID NO: 177183 - DNA, 25 bp, Saccharomyces pastorianus
tgctcttcatggtagcgcctatgct

SEQ ID NO: 177184 - DNA, 25 bp, Saccharomyces pastorianus
ttctcaccaagagacaaccctggga

SEQ ID NO: 177185 - DNA, 25 bp, Saccharomyces pastorianus
ttaattctcaccaagagacaaccct

SEQ ID NO: 177186 - DNA, 25 bp, Saccharomyces pastorianus
catgctcttcatggtagcgcctatg

SEQ ID NO: 177187 - DNA, 25 bp, Saccharomyces pastorianus
ctcttcatggtagcgcctatgcttc

SEQ ID NO: 177188 - DNA, 25 bp, Saccharomyces pastorianus
aattctcaccaagagacaaccctgg

SEQ ID NO: 177189 - DNA, 25 bp, Saccharomyces pastorianus
acttgtggcgaagtttctgtatcca

SEQ ID NO: 177190 - DNA, 25 bp, Saccharomyces pastorianus
aagccaaatgggacgaaactgatga

SEQ ID NO: 177191 - DNA, 25 bp, Saccharomyces pastorianus
gtttctgtatccaatctttctctta

SEQ ID NO: 177192 - DNA, 25 bp, Saccharomyces pastorianus
cgttgggaccaagcactatatctat

SEQ ID NO: 177193 - DNA, 25 bp, Saccharomyces pastorianus
attgattgaattcccatttttacca

SEQ ID NO: 177194 - DNA, 25 bp, Saccharomyces pastorianus
ttctacgaagagagcgacagtggac

SEQ ID NO: 177195 - DNA, 25 bp, Saccharomyces pastorianus
gagaggactttgaacttgtatgaaa

SEQ ID NO: 177196 - DNA, 25 bp, Saccharomyces pastorianus
gcgccaaactttagcaccatatgcc

SEQ ID NO: 177197 - DNA, 25 bp, Saccharomyces pastorianus
actatttgattttacttgtggcgaa

SEQ ID NO: 177198 - DNA, 25 bp, Saccharomyces pastorianus
gcactatatctattgcttttattga

SEQ ID NO: 177199 - DNA, 25 bp, Saccharomyces pastorianus
atgccattttatcacagttctacga

SEQ ID NO: 177200 - DNA, 25 bp, Saccharomyces pastorianus
gaaattgcaagtactgtaaatcgga

SEQ ID NO: 177201 - DNA, 25 bp, Saccharomyces pastorianus
cagactcgcattattcagaaagaaa

SEQ ID NO: 177202 - DNA, 25 bp, Saccharomyces pastorianus
aaattgcaagtactgtaaatcggaa

SEQ ID NO: 177203 - DNA, 25 bp, Saccharomyces pastorianus
aagaaattgcaagtactgtaaatcg

SEQ ID NO: 177204 - DNA, 25 bp, Saccharomyces pastorianus
tgcaagtactgtaaatcggaattac

SEQ ID NO: 177205 - DNA, 25 bp, Saccharomyces pastorianus
aattgcaagtactgtaaatcggaat

SEQ ID NO: 177206 - DNA, 25 bp, Saccharomyces pastorianus
caagtactgtaaatcggaattacac

SEQ ID NO: 177207 - DNA, 25 bp, Saccharomyces pastorianus
ttgcaagtactgtaaatcggaatta

SEQ ID NO: 177208 - DNA, 25 bp, Saccharomyces pastorianus
ctcgcattattcagaaagaaattgc

SEQ ID NO: 177209 - DNA, 25 bp, Saccharomyces pastorianus
gactcgcattattcagaaagaaatt

SEQ ID NO: 177210 - DNA, 25 bp, Saccharomyces pastorianus
agactcgcattattcagaaagaaat

SEQ ID NO: 177211 - DNA, 25 bp, Saccharomyces pastorianus
cttttccccttccaatgacaagtat

SEQ ID NO: 177212 - DNA, 25 bp, Saccharomyces pastorianus
ttttccctatttcacttctatggtc

SEQ ID NO: 177213 - DNA, 25 bp, Saccharomyces pastorianus
tgatgctacttctagttttccctat

SEQ ID NO: 177214 - DNA, 25 bp, Saccharomyces pastorianus
gatccaggtggacttagcagcagca

SEQ ID NO: 177215 - DNA, 25 bp, Saccharomyces pastorianus
agttcccctatcatcacacagtaat

SEQ ID NO: 177216 - DNA, 25 bp, Saccharomyces pastorianus
attctcaagccgttactactactac

SEQ ID NO: 177217 - DNA, 25 bp, Saccharomyces pastorianus
gccatcggtaatctctgctgaagga

SEQ ID NO: 177218 - DNA, 25 bp, Saccharomyces pastorianus
ggaccaaagtcctatgataccgaac

SEQ ID NO: 177219 - DNA, 25 bp, Saccharomyces pastorianus
aaatctctctatctgattcctcgaa

SEQ ID NO: 177220 - DNA, 25 bp, Saccharomyces pastorianus
ataagtcatatcagccatcggtaat

SEQ ID NO: 177221 - DNA, 25 bp, Saccharomyces pastorianus
acaacgttcaacttttctggtgata

SEQ ID NO: 177222 - DNA, 25 bp, Saccharomyces pastorianus
agatgaagtatcaggtaataattta

SEQ ID NO: 177223 - DNA, 25 bp, Saccharomyces pastorianus
acgtatactacatcgagaccaagaa

SEQ ID NO: 177224 - DNA, 25 bp, Saccharomyces pastorianus
catcgagaccaagaagaacattgct

SEQ ID NO: 177225 - DNA, 25 bp, Saccharomyces pastorianus
gtatactacatcgagaccaagaaga

SEQ ID NO: 177226 - DNA, 25 bp, Saccharomyces pastorianus
ctacatcgagaccaagaagaacatt

SEQ ID NO: 177227 - DNA, 25 bp, Saccharomyces pastorianus
gatgaagtatcaggtaataatttat

SEQ ID NO: 177228 - DNA, 25 bp, Saccharomyces pastorianus
atactacatcgagaccaagaagaac

SEQ ID NO: 177229 - DNA, 25 bp, Saccharomyces pastorianus
caggtaataatttatacgtatacta

SEQ ID NO: 177230 - DNA, 25 bp, Saccharomyces pastorianus
cgtatactacatcgagaccaagaag

SEQ ID NO: 177231 - DNA, 25 bp, Saccharomyces pastorianus
gaccaagaagaacattgctgatgtg

SEQ ID NO: 177232 - DNA, 25 bp, Saccharomyces pastorianus
atcaggtaataatttatacgtatac

SEQ ID NO: 177233 - DNA, 25 bp, Saccharomyces pastorianus
ccaatggtccttgctggatcagcag

SEQ ID NO: 177234 - DNA, 25 bp, Saccharomyces pastorianus
acagtcgtcagtacagttgcggtgg

SEQ ID NO: 177235 - DNA, 25 bp, Saccharomyces pastorianus
gtcttatcataaccaacgcagctag

SEQ ID NO: 177236 - DNA, 25 bp, Saccharomyces pastorianus
gcaagttccttaagggctgtgccgc

SEQ ID NO: 177237 - DNA, 25 bp, Saccharomyces pastorianus
cagttcatcctttagtgtcgcgaga

SEQ ID NO: 177238 - DNA, 25 bp, Saccharomyces pastorianus
ggtggacggctacttttacatgttc

SEQ ID NO: 177239 - DNA, 25 bp, Saccharomyces pastorianus
gattatccgtttcaacagcctattc

SEQ ID NO: 177240 - DNA, 25 bp, Saccharomyces pastorianus
aaatctactcgtatatctgctcaga

SEQ ID NO: 177241 - DNA, 25 bp, Saccharomyces pastorianus
agtccatgactcctacagattatcc

SEQ ID NO: 177242 - DNA, 25 bp, Saccharomyces pastorianus
gcgagagacgactataacggccatt

SEQ ID NO: 177243 - DNA, 25 bp, Saccharomyces pastorianus
aagaccacggtgtccagattcaggg

SEQ ID NO: 177244 - DNA, 25 bp, Saccharomyces pastorianus
agatgaagtatcaggtaataattta

SEQ ID NO: 177245 - DNA, 25 bp, Saccharomyces pastorianus
acgtatactacatcgagaccaagaa

SEQ ID NO: 177246 - DNA, 25 bp, Saccharomyces pastorianus
catcgagaccaagaagaacattgct

SEQ ID NO: 177247 - DNA, 25 bp, Saccharomyces pastorianus
gtatactacatcgagaccaagaaga

SEQ ID NO: 177248 - DNA, 25 bp, Saccharomyces pastorianus
ctacatcgagaccaagaagaacatt

SEQ ID NO: 177249 - DNA, 25 bp, Saccharomyces pastorianus
atactacatcgagaccaagaagaac

SEQ ID NO: 177250 - DNA, 25 bp, Saccharomyces pastorianus
caggtaataatttatacgtatacta

SEQ ID NO: 177251 - DNA, 25 bp, Saccharomyces pastorianus
cgtatactacatcgagaccaagaag

SEQ ID NO: 177252 - DNA, 25 bp, Saccharomyces pastorianus
gaccaagaagaacattgctgatgtg

SEQ ID NO: 177253 - DNA, 25 bp, Saccharomyces pastorianus
atcaggtaataatttatacgtatac

SEQ ID NO: 177254 - DNA, 25 bp, Saccharomyces pastorianus
tactacatcgagaccaagaagaaca

SEQ ID NO: 177255 - DNA, 25 bp, Saccharomyces pastorianus
ttgctatgggaaacgaacactttaa

SEQ ID NO: 177256 - DNA, 25 bp, Saccharomyces pastorianus
gctggccattccatatgacgagttt

SEQ ID NO: 177257 - DNA, 25 bp, Saccharomyces pastorianus
gatggtgtctgggtaagctgaatta

SEQ ID NO: 177258 - DNA, 25 bp, Saccharomyces pastorianus
gctgaattatgagctggccattcca

SEQ ID NO: 177259 - DNA, 25 bp, Saccharomyces pastorianus
gcaaaggatctatctctaatggaaa

SEQ ID NO: 177260 - DNA, 25 bp, Saccharomyces pastorianus
agtgggctccatgcaaaggatctat

SEQ ID NO: 177261 - DNA, 25 bp, Saccharomyces pastorianus
caacgctccggtgaagagacccaga

SEQ ID NO: 177262 - DNA, 25 bp, Saccharomyces pastorianus
aattggcaaattataagtgggctcc

SEQ ID NO: 177263 - DNA, 25 bp, Saccharomyces pastorianus
atatgacgagtttttgctatgggaa

SEQ ID NO: 177264 - DNA, 25 bp, Saccharomyces pastorianus
gaaagcgaaattgcgcgtcggaact

SEQ ID NO: 177265 - DNA, 25 bp, Saccharomyces pastorianus
agagacccagagaatcagacaatga

SEQ ID NO: 177266 - DNA, 25 bp, Saccharomyces pastorianus
atgtgatgaccaaacctcttccgat

SEQ ID NO: 177267 - DNA, 25 bp, Saccharomyces pastorianus
tgatgaccaaacctcttccgataaa

SEQ ID NO: 177268 - DNA, 25 bp, Saccharomyces pastorianus
gtgatgaccaaacctcttccgataa

SEQ ID NO: 177269 - DNA, 25 bp, Saccharomyces pastorianus
ctgatgtgatgaccaaacctcttcc

SEQ ID NO: 177270 - DNA, 25 bp, Saccharomyces pastorianus
gctgatgtgatgaccaaacctcttc

SEQ ID NO: 177271 - DNA, 25 bp, Saccharomyces pastorianus
tgctgatgtgatgaccaaacctctt

SEQ ID NO: 177272 - DNA, 25 bp, Saccharomyces pastorianus
gatgtgatgaccaaacctcttccga

SEQ ID NO: 177273 - DNA, 25 bp, Saccharomyces pastorianus
gatgaccaaacctcttccgataaaa

SEQ ID NO: 177274 - DNA, 25 bp, Saccharomyces pastorianus
tgatgtgatgaccaaacctcttccg

SEQ ID NO: 177275 - DNA, 25 bp, Saccharomyces pastorianus
aacattgctgatgtgatgaccaaac

SEQ ID NO: 177276 - DNA, 25 bp, Saccharomyces pastorianus
tgtgatgaccaaacctcttccgata

SEQ ID NO: 177277 - DNA, 25 bp, Saccharomyces pastorianus
tggatggtatggacgtagttcacta

SEQ ID NO: 177278 - DNA, 25 bp, Saccharomyces pastorianus
tgcctgtaaaggaagttattattgt

SEQ ID NO: 177279 - DNA, 25 bp, Saccharomyces pastorianus
tggtgaactggaaactgttcctttg

SEQ ID NO: 177280 - DNA, 25 bp, Saccharomyces pastorianus
tgaaaacgttaagaccgacagtaga

SEQ ID NO: 177281 - DNA, 25 bp, Saccharomyces pastorianus
gaaactgttcctttggacaataaag

SEQ ID NO: 177282 - DNA, 25 bp, Saccharomyces pastorianus
ggacaataaagacgccgccaagcta

SEQ ID NO: 177283 - DNA, 25 bp, Saccharomyces pastorianus
gtatggacgtagttcactacattga

SEQ ID NO: 177284 - DNA, 25 bp, Saccharomyces pastorianus
actggaaactgttcctttggacaat

SEQ ID NO: 177285 - DNA, 25 bp, Saccharomyces pastorianus
gaccgacagtagaaatatgcctgta

SEQ ID NO: 177286 - DNA, 25 bp, Saccharomyces pastorianus
aaagacgccgccaagctacaggaag

SEQ ID NO: 177287 - DNA, 25 bp, Saccharomyces pastorianus
cgtagttcactacattgaaaacgtt

SEQ ID NO: 177288 - DNA, 25 bp, Saccharomyces pastorianus
aattaccaccgattaaggaaggctg

SEQ ID NO: 177289 - DNA, 25 bp, Saccharomyces pastorianus
tcgtaagggtgaattaccaccgatt

SEQ ID NO: 177290 - DNA, 25 bp, Saccharomyces pastorianus
taagggtgaattaccaccgattaag

SEQ ID NO: 177291 - DNA, 25 bp, Saccharomyces pastorianus
attaccaccgattaaggaaggctgt

SEQ ID NO: 177292 - DNA, 25 bp, Saccharomyces pastorianus
gattaaggaaggctgtataaccgaa

SEQ ID NO: 177293 - DNA, 25 bp, Saccharomyces pastorianus
gtgaattaccaccgattaaggaagg

SEQ ID NO: 177294 - DNA, 25 bp, Saccharomyces pastorianus
tgaattaccaccgattaaggaaggc

SEQ ID NO: 177295 - DNA, 25 bp, Saccharomyces pastorianus
aacagttgggcggcaaggaatcgta

SEQ ID NO: 177296 - DNA, 25 bp, Saccharomyces pastorianus
ggtgaattaccaccgattaaggaag

SEQ ID NO: 177297 - DNA, 25 bp, Saccharomyces pastorianus
atcgtaagggtgaattaccaccgat

SEQ ID NO: 177298 - DNA, 25 bp, Saccharomyces pastorianus
gaattaccaccgattaaggaaggct

SEQ ID NO: 177299 - DNA, 25 bp, Saccharomyces pastorianus
ttcctcatgaacaggtattttacat

SEQ ID NO: 177300 - DNA, 25 bp, Saccharomyces pastorianus
ctttcctcatgaacaggtattttac

SEQ ID NO: 177301 - DNA, 25 bp, Saccharomyces pastorianus
tttgcggttaagaaagtagctaggc

SEQ ID NO: 177302 - DNA, 25 bp, Saccharomyces pastorianus
gatgttgaatttgcggttaagaaag

SEQ ID NO: 177303 - DNA, 25 bp, Saccharomyces pastorianus
actttcctcatgaacaggtatttta

SEQ ID NO: 177304 - DNA, 25 bp, Saccharomyces pastorianus
cggttaagaaagtagctaggctagt

SEQ ID NO: 177305 - DNA, 25 bp, Saccharomyces pastorianus
aactttcctcatgaacaggtatttt

SEQ ID NO: 177306 - DNA, 25 bp, Saccharomyces pastorianus
tgcggttaagaaagtagctaggcta

SEQ ID NO: 177307 - DNA, 25 bp, Saccharomyces pastorianus
ttgcggttaagaaagtagctaggct

SEQ ID NO: 177308 - DNA, 25 bp, Saccharomyces pastorianus
gcggttaagaaagtagctaggctag

SEQ ID NO: 177309 - DNA, 25 bp, Saccharomyces pastorianus
cgatgttgaatttgcggttaagaaa

SEQ ID NO: 177310 - DNA, 25 bp, Saccharomyces pastorianus
ccttctctagtattgcggtcagcag

SEQ ID NO: 177311 - DNA, 25 bp, Saccharomyces pastorianus
gcagaggccaaatcctatatgcatt

SEQ ID NO: 177312 - DNA, 25 bp, Saccharomyces pastorianus
atattccttctctagtattgcggtc

SEQ ID NO: 177313 - DNA, 25 bp, Saccharomyces pastorianus
caatcaaattgcctataagcatgga

SEQ ID NO: 177314 - DNA, 25 bp, Saccharomyces pastorianus
atgtggttagcattgactccttaat

SEQ ID NO: 177315 - DNA, 25 bp, Saccharomyces pastorianus
ggccaaatcctatatgcattatatg

SEQ ID NO: 177316 - DNA, 25 bp, Saccharomyces pastorianus
gttgttgttttatattccttctcta

SEQ ID NO: 177317 - DNA, 25 bp, Saccharomyces pastorianus
atgctgggttacgttgttgttttat

SEQ ID NO: 177318 - DNA, 25 bp, Saccharomyces pastorianus
gaacggccagttatcaatcaaattg

SEQ ID NO: 177319 - DNA, 25 bp, Saccharomyces pastorianus
ttgcggtcagcagaggccaaatcct

SEQ ID NO: 177320 - DNA, 25 bp, Saccharomyces pastorianus
attgactccttaatagaacggccag

SEQ ID NO: 177321 - DNA, 25 bp, Saccharomyces pastorianus
ttaaaccggagctatctgcaaccca

SEQ ID NO: 177322 - DNA, 25 bp, Saccharomyces pastorianus
ttgaaggcttaaaccggagctatct

SEQ ID NO: 177323 - DNA, 25 bp, Saccharomyces pastorianus
attgaaggcttaaaccggagctatc

SEQ ID NO: 177324 - DNA, 25 bp, Saccharomyces pastorianus
cttaaaccggagctatctgcaaccc

SEQ ID NO: 177325 - DNA, 25 bp, Saccharomyces pastorianus
tgaaggcttaaaccggagctatctg

SEQ ID NO: 177326 - DNA, 25 bp, Saccharomyces pastorianus
ccagctattgaaggcttaaaccgga

SEQ ID NO: 177327 - DNA, 25 bp, Saccharomyces pastorianus
ggcttaaaccggagctatctgcaac

SEQ ID NO: 177328 - DNA, 25 bp, Saccharomyces pastorianus
aggcttaaaccggagctatctgcaa

SEQ ID NO: 177329 - DNA, 25 bp, Saccharomyces pastorianus
tattgaaggcttaaaccggagctat

SEQ ID NO: 177330 - DNA, 25 bp, Saccharomyces pastorianus
gctattgaaggcttaaaccggagct

SEQ ID NO: 177331 - DNA, 25 bp, Saccharomyces pastorianus
gcttaaaccggagctatctgcaacc

SEQ ID NO: 177332 - DNA, 25 bp, Saccharomyces pastorianus
agtgtgatcgacgaatccttgtcct

SEQ ID NO: 177333 - DNA, 25 bp, Saccharomyces pastorianus
ttgtctccttcactgctctcatttt

SEQ ID NO: 177334 - DNA, 25 bp, Saccharomyces pastorianus
tcatcgctccggtcaatcttcaata

SEQ ID NO: 177335 - DNA, 25 bp, Saccharomyces pastorianus
gaatccttgtcctccaatttatttt

SEQ ID NO: 177336 - DNA, 25 bp, Saccharomyces pastorianus
ttcatcttcctctatcgcttcatat

SEQ ID NO: 177337 - DNA, 25 bp, Saccharomyces pastorianus
aatgtcatcgagtaatcccttgtct

SEQ ID NO: 177338 - DNA, 25 bp, Saccharomyces pastorianus
atggttcagatctatggcaagttcc

SEQ ID NO: 177339 - DNA, 25 bp, Saccharomyces pastorianus
gagaatcctgttcttctaatcggag

SEQ ID NO: 177340 - DNA, 25 bp, Saccharomyces pastorianus
aaacagcttcttaatatggttcaga

SEQ ID NO: 177341 - DNA, 25 bp, Saccharomyces pastorianus
gctctcattttctttgtcatcgctc

SEQ ID NO: 177342 - DNA, 25 bp, Saccharomyces pastorianus
gtcaatcttcaataccaacactgga

SEQ ID NO: 177343 - DNA, 25 bp, Saccharomyces pastorianus
attctcaacaagagacacacctggg

SEQ ID NO: 177344 - DNA, 25 bp, Saccharomyces pastorianus
tctcttcatggtagcgcctatgctt

SEQ ID NO: 177345 - DNA, 25 bp, Saccharomyces pastorianus
attctcttcatggtagcgcctatgc

SEQ ID NO: 177346 - DNA, 25 bp, Saccharomyces pastorianus
ttctcttcatggtagcgcctatgct

SEQ ID NO: 177347 - DNA, 25 bp, Saccharomyces pastorianus
agcttccaatttaccggaatttgat

SEQ ID NO: 177348 - DNA, 25 bp, Saccharomyces pastorianus
ttcagcttccaatttaccggaattt

SEQ ID NO: 177349 - DNA, 25 bp, Saccharomyces pastorianus
ttctcaacaagagacacacctggga

SEQ ID NO: 177350 - DNA, 25 bp, Saccharomyces pastorianus
attccactaaggttaattctcaaca

SEQ ID NO: 177351 - DNA, 25 bp, Saccharomyces pastorianus
tcttcatggtagcgcctatgcttcg

SEQ ID NO: 177352 - DNA, 25 bp, Saccharomyces pastorianus
ctcttcatggtagcgcctatgcttc

SEQ ID NO: 177353 - DNA, 25 bp, Saccharomyces pastorianus
gattccactaaggttaattctcaac

SEQ ID NO: 177354 - DNA, 25 bp, Saccharomyces pastorianus
tattcgttggagaggaaaatcctgg

SEQ ID NO: 177355 - DNA, 25 bp, Saccharomyces pastorianus
atcgctgtcatcatcgccagtaagg

SEQ ID NO: 177356 - DNA, 25 bp, Saccharomyces pastorianus
cttcaacagagaatcgcaacggcga

SEQ ID NO: 177357 - DNA, 25 bp, Saccharomyces pastorianus
tagtcattctgaaccatcgctgtca

SEQ ID NO: 177358 - DNA, 25 bp, Saccharomyces pastorianus
gagttatactaagcctacttcaaca

SEQ ID NO: 177359 - DNA, 25 bp, Saccharomyces pastorianus
cattctgaaccatcgctgtcatcat

SEQ ID NO: 177360 - DNA, 25 bp, Saccharomyces pastorianus
gagatagtcattctgaaccatcgct

SEQ ID NO: 177361 - DNA, 25 bp, Saccharomyces pastorianus
aagcctacttcaacagagaatcgca

SEQ ID NO: 177362 - DNA, 25 bp, Saccharomyces pastorianus
caacttgatggagatagtcattctg

SEQ ID NO: 177363 - DNA, 25 bp, Saccharomyces pastorianus
gttcgcaaatgatattaaagacgtc

SEQ ID NO: 177364 - DNA, 25 bp, Saccharomyces pastorianus
aatcctggaaaagagttatactaag

SEQ ID NO: 177365 - DNA, 25 bp, Saccharomyces pastorianus
gccattgcggcgagtgaaggcatca

SEQ ID NO: 177366 - DNA, 25 bp, Saccharomyces pastorianus
aggcaaccccataagaatcgcgaaa

SEQ ID NO: 177367 - DNA, 25 bp, Saccharomyces pastorianus
gaaattgaagtgttccaccctgcca

SEQ ID NO: 177368 - DNA, 25 bp, Saccharomyces pastorianus
ccatccatgtgcgtggactgcgaga

SEQ ID NO: 177369 - DNA, 25 bp, Saccharomyces pastorianus
cacccactctttctatcttatacaa

SEQ ID NO: 177370 - DNA, 25 bp, Saccharomyces pastorianus
tagacgttccgcgttgcctggagtt

SEQ ID NO: 177371 - DNA, 25 bp, Saccharomyces pastorianus
gaagttgctctacaatgcagctatc

SEQ ID NO: 177372 - DNA, 25 bp, Saccharomyces pastorianus
tagaagtcatcctaggcaaccccat

SEQ ID NO: 177373 - DNA, 25 bp, Saccharomyces pastorianus
tactctcggtggaagaagttgctct

SEQ ID NO: 177374 - DNA, 25 bp, Saccharomyces pastorianus
ttgtcgaatttgaccctagggtccg

SEQ ID NO: 177375 - DNA, 25 bp, Saccharomyces pastorianus
tcttatacaacctacttgtgctagt

SEQ ID NO: 177376 - DNA, 25 bp, Saccharomyces pastorianus
aatccacattctctacatggtagcg

SEQ ID NO: 177377 - DNA, 25 bp, Saccharomyces pastorianus
cacattctctacatggtagcgccta

SEQ ID NO: 177378 - DNA, 25 bp, Saccharomyces pastorianus
aacagcacggcatgatgaccccaaa

SEQ ID NO: 177379 - DNA, 25 bp, Saccharomyces pastorianus
ctgggcacattaccaacaaccatct

SEQ ID NO: 177380 - DNA, 25 bp, Saccharomyces pastorianus
aaatccacattctctacatggtagc

SEQ ID NO: 177381 - DNA, 25 bp, Saccharomyces pastorianus
atccacattctctacatggtagcgc

SEQ ID NO: 177382 - DNA, 25 bp, Saccharomyces pastorianus
gtaccaacagcacggcatgatgacc

SEQ ID NO: 177383 - DNA, 25 bp, Saccharomyces pastorianus
ccacattctctacatggtagcgcct

SEQ ID NO: 177384 - DNA, 25 bp, Saccharomyces pastorianus
acattctctacatggtagcgcctat

SEQ ID NO: 177385 - DNA, 25 bp, Saccharomyces pastorianus
aactgggcacattaccaacaaccat

SEQ ID NO: 177386 - DNA, 25 bp, Saccharomyces pastorianus
tccacattctctacatggtagcgcc

SEQ ID NO: 177387 - DNA, 25 bp, Saccharomyces pastorianus
gacagtaataaagatgatgaccatt

SEQ ID NO: 177388 - DNA, 25 bp, Saccharomyces pastorianus
caatccacctttggcgacagtaata

SEQ ID NO: 177389 - DNA, 25 bp, Saccharomyces pastorianus
tccacctttggcgacagtaataaag

SEQ ID NO: 177390 - DNA, 25 bp, Saccharomyces pastorianus
tacttggacaatccacctttggcga

SEQ ID NO: 177391 - DNA, 25 bp, Saccharomyces pastorianus
ggaagaagtcttagccatggatgaa

SEQ ID NO: 177392 - DNA, 25 bp, Saccharomyces pastorianus
gttttacttggacaatccacctttg

SEQ ID NO: 177393 - DNA, 25 bp, Saccharomyces pastorianus
aaacgaagttgatgattttgcttct

SEQ ID NO: 177394 - DNA, 25 bp, Saccharomyces pastorianus
gacaatccacctttggcgacagtaa

SEQ ID NO: 177395 - DNA, 25 bp, Saccharomyces pastorianus
gatgattttgcttctaaaagggaaa

SEQ ID NO: 177396 - DNA, 25 bp, Saccharomyces pastorianus
aagttgatgattttgcttctaaaag

SEQ ID NO: 177397 - DNA, 25 bp, Saccharomyces pastorianus
ttggacaatccacctttggcgacag

SEQ ID NO: 177398 - DNA, 25 bp, Saccharomyces pastorianus
tgaggccgataaaattaaaaacacg

SEQ ID NO: 177399 - DNA, 25 bp, Saccharomyces pastorianus
gctaagtcttcctccagtaaaactg

SEQ ID NO: 177400 - DNA, 25 bp, Saccharomyces pastorianus
gcaatcaaggactacaaaacaaaga

SEQ ID NO: 177401 - DNA, 25 bp, Saccharomyces pastorianus
ttgttccatgcttgcagaagacgct

SEQ ID NO: 177402 - DNA, 25 bp, Saccharomyces pastorianus
gtcttcctccagtaaaactgcattg

SEQ ID NO: 177403 - DNA, 25 bp, Saccharomyces pastorianus
ttccatgcttgcagaagacgctatc

SEQ ID NO: 177404 - DNA, 25 bp, Saccharomyces pastorianus
gagctaagtcttcctccagtaaaac

SEQ ID NO: 177405 - DNA, 25 bp, Saccharomyces pastorianus
aaaactgcattgttccatgcttgca

SEQ ID NO: 177406 - DNA, 25 bp, Saccharomyces pastorianus
aaaacacggaaatcgcgaaggagct

SEQ ID NO: 177407 - DNA, 25 bp, Saccharomyces pastorianus
ggaaatcgcgaaggagctaagtctt

SEQ ID NO: 177408 - DNA, 25 bp, Saccharomyces pastorianus
gaaggagctaagtcttcctccagta

SEQ ID NO: 177409 - DNA, 25 bp, Saccharomyces pastorianus
ggttcagtctttgtagttcgagcga

SEQ ID NO: 177410 - DNA, 25 bp, Saccharomyces pastorianus
caagaatttataatggaacccaaag

SEQ ID NO: 177411 - DNA, 25 bp, Saccharomyces pastorianus
gaacccaaaggttcagtctttgtag

SEQ ID NO: 177412 - DNA, 25 bp, Saccharomyces pastorianus
gcgacattgcgcgtttccttagaaa

SEQ ID NO: 177413 - DNA, 25 bp, Saccharomyces pastorianus
tagttcgagcgacattgcgcgtttc

SEQ ID NO: 177414 - DNA, 25 bp, Saccharomyces pastorianus
tcgagcgacattgcgcgtttcctta

SEQ ID NO: 177415 - DNA, 25 bp, Saccharomyces pastorianus
tgtagttcgagcgacattgcgcgtt

SEQ ID NO: 177416 - DNA, 25 bp, Saccharomyces pastorianus
gtctttgtagttcgagcgacattgc

SEQ ID NO: 177417 - DNA, 25 bp, Saccharomyces pastorianus
aaggttcagtctttgtagttcgagc

SEQ ID NO: 177418 - DNA, 25 bp, Saccharomyces pastorianus
gacattgcgcgtttccttagaaaac

SEQ ID NO: 177419 - DNA, 25 bp, Saccharomyces pastorianus
tcagtctttgtagttcgagcgacat

SEQ ID NO: 177420 - DNA, 25 bp, Saccharomyces pastorianus
agatgaagtatcaggtaataattta

SEQ ID NO: 177421 - DNA, 25 bp, Saccharomyces pastorianus
acgtatactacatcgagaccaagaa

SEQ ID NO: 177422 - DNA, 25 bp, Saccharomyces pastorianus
catcgagaccaagaagaacattgct

SEQ ID NO: 177423 - DNA, 25 bp, Saccharomyces pastorianus
gtatactacatcgagaccaagaaga

SEQ ID NO: 177424 - DNA, 25 bp, Saccharomyces pastorianus
ctacatcgagaccaagaagaacatt

SEQ ID NO: 177425 - DNA, 25 bp, Saccharomyces pastorianus
atactacatcgagaccaagaagaac

SEQ ID NO: 177426 - DNA, 25 bp, Saccharomyces pastorianus
caggtaataatttatacgtatacta

SEQ ID NO: 177427 - DNA, 25 bp, Saccharomyces pastorianus
cgtatactacatcgagaccaagaag

SEQ ID NO: 177428 - DNA, 25 bp, Saccharomyces pastorianus
gaccaagaagaacattgctgatgtg

SEQ ID NO: 177429 - DNA, 25 bp, Saccharomyces pastorianus
atcaggtaataatttatacgtatac

SEQ ID NO: 177430 - DNA, 25 bp, Saccharomyces pastorianus
tactacatcgagaccaagaagaaca

SEQ ID NO: 177431 - DNA, 25 bp, Saccharomyces pastorianus
tattaaaacctgtggccatgtcttt

SEQ ID NO: 177432 - DNA, 25 bp, Saccharomyces pastorianus
attgttccctgtgttctaaaaattg

SEQ ID NO: 177433 - DNA, 25 bp, Saccharomyces pastorianus
gaagcacttcaagcagaaggcatct

SEQ ID NO: 177434 - DNA, 25 bp, Saccharomyces pastorianus
gtaaggaacgattggcagcgagaat

SEQ ID NO: 177435 - DNA, 25 bp, Saccharomyces pastorianus
gaaggcatctcatctagaatccaag

SEQ ID NO: 177436 - DNA, 25 bp, Saccharomyces pastorianus
ccgtacacttgtttattgttccctg

SEQ ID NO: 177437 - DNA, 25 bp, Saccharomyces pastorianus
ataagggctcgagcgatgaagcact

SEQ ID NO: 177438 - DNA, 25 bp, Saccharomyces pastorianus
acatgatacattgttccgtggtaac

SEQ ID NO: 177439 - DNA, 25 bp, Saccharomyces pastorianus
gaactagcaaatttccgtacacttg

SEQ ID NO: 177440 - DNA, 25 bp, Saccharomyces pastorianus
gagaaaatgccctacatgcaacaaa

SEQ ID NO: 177441 - DNA, 25 bp, Saccharomyces pastorianus
gaagcactcgtagaagaactagcaa

SEQ ID NO: 177442 - DNA, 25 bp, Saccharomyces pastorianus
gccaaaagcaatctgaccaatttgt

SEQ ID NO: 177443 - DNA, 25 bp, Saccharomyces pastorianus
aagcaatctgaccaatttgtatata

SEQ ID NO: 177444 - DNA, 25 bp, Saccharomyces pastorianus
gcaatctgaccaatttgtatatata

SEQ ID NO: 177445 - DNA, 25 bp, Saccharomyces pastorianus
aagggagccaaaagcaatctgacca

SEQ ID NO: 177446 - DNA, 25 bp, Saccharomyces pastorianus
gggagccaaaagcaatctgaccaat

SEQ ID NO: 177447 - DNA, 25 bp, Saccharomyces pastorianus
agggagccaaaagcaatctgaccaa

SEQ ID NO: 177448 - DNA, 25 bp, Saccharomyces pastorianus
ggagccaaaagcaatctgaccaatt

SEQ ID NO: 177449 - DNA, 25 bp, Saccharomyces pastorianus
aaaagcaatctgaccaatttgtata

SEQ ID NO: 177450 - DNA, 25 bp, Saccharomyces pastorianus
gaaagggagccaaaagcaatctgac

SEQ ID NO: 177451 - DNA, 25 bp, Saccharomyces pastorianus
gagccaaaagcaatctgaccaattt

SEQ ID NO: 177452 - DNA, 25 bp, Saccharomyces pastorianus
cgtacgaaagggagccaaaagcaat

SEQ ID NO: 177453 - DNA, 25 bp, Saccharomyces pastorianus
ggaggacgccattgagcaatttaac

SEQ ID NO: 177454 - DNA, 25 bp, Saccharomyces pastorianus
gtctaggctatgagtattacgttga

SEQ ID NO: 177455 - DNA, 25 bp, Saccharomyces pastorianus
gaggccatcacgtttgttgatgata

SEQ ID NO: 177456 - DNA, 25 bp, Saccharomyces pastorianus
caacttgaatcacatggaggacgga

SEQ ID NO: 177457 - DNA, 25 bp, Saccharomyces pastorianus
gaagccgactggttagatttatcaa

SEQ ID NO: 177458 - DNA, 25 bp, Saccharomyces pastorianus
aacgacgaagattttctgccctcta

SEQ ID NO: 177459 - DNA, 25 bp, Saccharomyces pastorianus
ggtgatatcataatttctacgagta

SEQ ID NO: 177460 - DNA, 25 bp, Saccharomyces pastorianus
atggatttgttagcggccagcgtag

SEQ ID NO: 177461 - DNA, 25 bp, Saccharomyces pastorianus
gaccaaagaggaggccatcacgttt

SEQ ID NO: 177462 - DNA, 25 bp, Saccharomyces pastorianus
gattttctgccctctatggagatta

SEQ ID NO: 177463 - DNA, 25 bp, Saccharomyces pastorianus
gagcaatttaacctgaagatcgaag

SEQ ID NO: 177464 - DNA, 25 bp, Saccharomyces pastorianus
aaggaattgaaacagcagtcggaga

SEQ ID NO: 177465 - DNA, 25 bp, Saccharomyces pastorianus
gaaagaaacccctaacgatgaagat

SEQ ID NO: 177466 - DNA, 25 bp, Saccharomyces pastorianus
agaagtcttcgaagatcacgatttt

SEQ ID NO: 177467 - DNA, 25 bp, Saccharomyces pastorianus
gatgataccgaaactcagggcacaa

SEQ ID NO: 177468 - DNA, 25 bp, Saccharomyces pastorianus
gttgaagacacctttacacctgatt

SEQ ID NO: 177469 - DNA, 25 bp, Saccharomyces pastorianus
gcttacttggcgtcagatagtgatg

SEQ ID NO: 177470 - DNA, 25 bp, Saccharomyces pastorianus
gaatgccaaatcaaaggctgaattg

SEQ ID NO: 177471 - DNA, 25 bp, Saccharomyces pastorianus
ttacacctgatttagaagatcctag

SEQ ID NO: 177472 - DNA, 25 bp, Saccharomyces pastorianus
ggctgaattggagcttttaatggat

SEQ ID NO: 177473 - DNA, 25 bp, Saccharomyces pastorianus
ttactccagccttggaaggaggaaa

SEQ ID NO: 177474 - DNA, 25 bp, Saccharomyces pastorianus
tggtgactttgggtttaattccaag

SEQ ID NO: 177475 - DNA, 25 bp, Saccharomyces pastorianus
actctcacattccactccatcaccc

SEQ ID NO: 177476 - DNA, 25 bp, Saccharomyces pastorianus
catcagtaccaaatgcactcgcatc

SEQ ID NO: 177477 - DNA, 25 bp, Saccharomyces pastorianus
tccatcacccatctctcaccatcag

SEQ ID NO: 177478 - DNA, 25 bp, Saccharomyces pastorianus
accatcagtaccaaatgcactcgca

SEQ ID NO: 177479 - DNA, 25 bp, Saccharomyces pastorianus
tctcaccatcagtaccaaatgcact

SEQ ID NO: 177480 - DNA, 25 bp, Saccharomyces pastorianus
tactctcacattccactccatcacc

SEQ ID NO: 177481 - DNA, 25 bp, Saccharomyces pastorianus
tcaccatcagtaccaaatgcactcg

SEQ ID NO: 177482 - DNA, 25 bp, Saccharomyces pastorianus
catcacccatctctcaccatcagta

SEQ ID NO: 177483 - DNA, 25 bp, Saccharomyces pastorianus
ccatcacccatctctcaccatcagt

SEQ ID NO: 177484 - DNA, 25 bp, Saccharomyces pastorianus
atctctcaccatcagtaccaaatgc

SEQ ID NO: 177485 - DNA, 25 bp, Saccharomyces pastorianus
catctctcaccatcagtaccaaatg

SEQ ID NO: 177486 - DNA, 25 bp, Saccharomyces pastorianus
tatcaaactcctcttcggttgtaga

SEQ ID NO: 177487 - DNA, 25 bp, Saccharomyces pastorianus
ccaggtgttaaatatgtccaagact

SEQ ID NO: 177488 - DNA, 25 bp, Saccharomyces pastorianus
gatgaggaaaattcaccaggtgtta

SEQ ID NO: 177489 - DNA, 25 bp, Saccharomyces pastorianus
ggtaaaatgcctatccaagtcagat

SEQ ID NO: 177490 - DNA, 25 bp, Saccharomyces pastorianus
ccttacattcatccttttccagaga

SEQ ID NO: 177491 - DNA, 25 bp, Saccharomyces pastorianus
aactcctcttcggttgtagatataa

SEQ ID NO: 177492 - DNA, 25 bp, Saccharomyces pastorianus
gattggttccgtaagggcaaaattg

SEQ ID NO: 177493 - DNA, 25 bp, Saccharomyces pastorianus
tcagtggttaaagcggagatatcta

SEQ ID NO: 177494 - DNA, 25 bp, Saccharomyces pastorianus
ggcaaaattgccttacattcatcct

SEQ ID NO: 177495 - DNA, 25 bp, Saccharomyces pastorianus
gtgtcggtctagcaccattattatc

SEQ ID NO: 177496 - DNA, 25 bp, Saccharomyces pastorianus
gatatgctggaagattggttccgta

SEQ ID NO: 177497 - DNA, 25 bp, Saccharomyces pastorianus
gattatgacggtaggattgccattt

SEQ ID NO: 177498 - DNA, 25 bp, Saccharomyces pastorianus
cagatggtgaattcgtccttggaac

SEQ ID NO: 177499 - DNA, 25 bp, Saccharomyces pastorianus
attccctgtgtttctcatgagacct

SEQ ID NO: 177500 - DNA, 25 bp, Saccharomyces pastorianus
gattgccatttggaatcattctgat

SEQ ID NO: 177501 - DNA, 25 bp, Saccharomyces pastorianus
agtaacaaagtattaaggccgcaag

SEQ ID NO: 177502 - DNA, 25 bp, Saccharomyces pastorianus
ctgcttgtttcacaccagatggtga

SEQ ID NO: 177503 - DNA, 25 bp, Saccharomyces pastorianus
gattctggatctgcttgtttcacac

SEQ ID NO: 177504 - DNA, 25 bp, Saccharomyces pastorianus
tattcgatgtttgttaccgcagacg

SEQ ID NO: 177505 - DNA, 25 bp, Saccharomyces pastorianus
gaatttctagattctggatctgctt

SEQ ID NO: 177506 - DNA, 25 bp, Saccharomyces pastorianus
ttcaaccctaaatattcgatgtttg

SEQ ID NO: 177507 - DNA, 25 bp, Saccharomyces pastorianus
aaggccgcaagggttcattccctgt

SEQ ID NO: 177508 - DNA, 25 bp, Saccharomyces pastorianus
attaccgaagttttaagagatcctg

SEQ ID NO: 177509 - DNA, 25 bp, Saccharomyces pastorianus
cgacattgatgagcgtgagacattc

SEQ ID NO: 177510 - DNA, 25 bp, Saccharomyces pastorianus
tacttattaccgataccgtactgaa

SEQ ID NO: 177511 - DNA, 25 bp, Saccharomyces pastorianus
gagacattcttggacttgacataca

SEQ ID NO: 177512 - DNA, 25 bp, Saccharomyces pastorianus
gctccccaggattctatgcaaaggc

SEQ ID NO: 177513 - DNA, 25 bp, Saccharomyces pastorianus
gattatactgtgctccccaggattc

SEQ ID NO: 177514 - DNA, 25 bp, Saccharomyces pastorianus
gagatcctgaatattctaccgtact

SEQ ID NO: 177515 - DNA, 25 bp, Saccharomyces pastorianus
agagcggcggaagagtatttgtatt

SEQ ID NO: 177516 - DNA, 25 bp, Saccharomyces pastorianus
gagatgtttattatcgcccattgtt

SEQ ID NO: 177517 - DNA, 25 bp, Saccharomyces pastorianus
cgcccattgttccactggttattta

SEQ ID NO: 177518 - DNA, 25 bp, Saccharomyces pastorianus
ttcagtactctacaaagtcatggtg

SEQ ID NO: 177519 - DNA, 25 bp, Saccharomyces pastorianus
cgtctcttctgggatgatatctcag

SEQ ID NO: 177520 - DNA, 25 bp, Saccharomyces pastorianus
aataagaccgtctcttctgggatga

SEQ ID NO: 177521 - DNA, 25 bp, Saccharomyces pastorianus
tttgatgttccccatagatgctcta

SEQ ID NO: 177522 - DNA, 25 bp, Saccharomyces pastorianus
agatatctaccatggaaggatcgat

SEQ ID NO: 177523 - DNA, 25 bp, Saccharomyces pastorianus
agatgctctaaagactcgagtacaa

SEQ ID NO: 177524 - DNA, 25 bp, Saccharomyces pastorianus
gaccgtctcttctgggatgatatct

SEQ ID NO: 177525 - DNA, 25 bp, Saccharomyces pastorianus
ggaaggatcgatggccctatggaaa

SEQ ID NO: 177526 - DNA, 25 bp, Saccharomyces pastorianus
gctgcaggtttgaataagaccgtct

SEQ ID NO: 177527 - DNA, 25 bp, Saccharomyces pastorianus
gatgttccccatagatgctctaaag

SEQ ID NO: 177528 - DNA, 25 bp, Saccharomyces pastorianus
agactcgagtacaagctgcaggttt

SEQ ID NO: 177529 - DNA, 25 bp, Saccharomyces pastorianus
tggccctatggaaaggtgttcaatc

SEQ ID NO: 177530 - DNA, 25 bp, Saccharomyces pastorianus
cattgagctgagattattcgaggaa

SEQ ID NO: 177531 - DNA, 25 bp, Saccharomyces pastorianus
ggcccgttgcaggatcttactatta

SEQ ID NO: 177532 - DNA, 25 bp, Saccharomyces pastorianus
ggcagggcccgttgcaggatcttac

SEQ ID NO: 177533 - DNA, 25 bp, Saccharomyces pastorianus
gaaactgctaaatacttttacgagg

SEQ ID NO: 177534 - DNA, 25 bp, Saccharomyces pastorianus
gtttacaatacgaggacgagccatt

SEQ ID NO: 177535 - DNA, 25 bp, Saccharomyces pastorianus
cggcagaaactatcagcagaaattg

SEQ ID NO: 177536 - DNA, 25 bp, Saccharomyces pastorianus
cgaggatttgaagctaccacgtact

SEQ ID NO: 177537 - DNA, 25 bp, Saccharomyces pastorianus
gaacattttctgacattgagctgag

SEQ ID NO: 177538 - DNA, 25 bp, Saccharomyces pastorianus
gaggacgagccattatcagaaactg

SEQ ID NO: 177539 - DNA, 25 bp, Saccharomyces pastorianus
gttaattctggtagaatcgcagatc

SEQ ID NO: 177540 - DNA, 25 bp, Saccharomyces pastorianus
tcactgtattgcacgagtggatact

SEQ ID NO: 177541 - DNA, 25 bp, Saccharomyces pastorianus
atatggcagattttgtctgttctca

SEQ ID NO: 177542 - DNA, 25 bp, Saccharomyces pastorianus
agtcgagtatatgtcaatattccat

SEQ ID NO: 177543 - DNA, 25 bp, Saccharomyces pastorianus
gagatcacaaatcccaggaatctat

SEQ ID NO: 177544 - DNA, 25 bp, Saccharomyces pastorianus
gaacgaagttcaattacaaatgctg

SEQ ID NO: 177545 - DNA, 25 bp, Saccharomyces pastorianus
atgctgaaacttttgcaggtggtta

SEQ ID NO: 177546 - DNA, 25 bp, Saccharomyces pastorianus
gtaccctcagtataacagtttcacg

SEQ ID NO: 177547 - DNA, 25 bp, Saccharomyces pastorianus
aaccttaatttggtgggacactctg

SEQ ID NO: 177548 - DNA, 25 bp, Saccharomyces pastorianus
ggaactgttggaagagtaccctcag

SEQ ID NO: 177549 - DNA, 25 bp, Saccharomyces pastorianus
tctgttctcaaagatgctcgggaag

SEQ ID NO: 177550 - DNA, 25 bp, Saccharomyces pastorianus
gggacactctgtcggagcaacattt

SEQ ID NO: 177551 - DNA, 25 bp, Saccharomyces pastorianus
atttttgttggatggcagatactca

SEQ ID NO: 177552 - DNA, 25 bp, Saccharomyces pastorianus
gaggacaatgtcaatgccgaagatg

SEQ ID NO: 177553 - DNA, 25 bp, Saccharomyces pastorianus
gtcattgggatcttttttctttgca

SEQ ID NO: 177554 - DNA, 25 bp, Saccharomyces pastorianus
gagattcagtctattctcgctgact

SEQ ID NO: 177555 - DNA, 25 bp, Saccharomyces pastorianus
ggtagcacaaaccttactcgcaaag

SEQ ID NO: 177556 - DNA, 25 bp, Saccharomyces pastorianus
gagactcggctaatagcgctcagaa

SEQ ID NO: 177557 - DNA, 25 bp, Saccharomyces pastorianus
gattccccaaaagtacagaagtcat

SEQ ID NO: 177558 - DNA, 25 bp, Saccharomyces pastorianus
aatcgcacaccttaccacaaagatg

SEQ ID NO: 177559 - DNA, 25 bp, Saccharomyces pastorianus
aaaggagccggccaagctaatcgca

SEQ ID NO: 177560 - DNA, 25 bp, Saccharomyces pastorianus
aacgggccaccaacgaaaatgagag

SEQ ID NO: 177561 - DNA, 25 bp, Saccharomyces pastorianus
ctcgctgacttgacgaagcaattca

SEQ ID NO: 177562 - DNA, 25 bp, Saccharomyces pastorianus
cttttttctttgcaatcgataggga

SEQ ID NO: 177563 - DNA, 25 bp, Saccharomyces pastorianus
tgaagccgcccacggatgtgataat

SEQ ID NO: 177564 - DNA, 25 bp, Saccharomyces pastorianus
aagccgcccacggatgtgataatgc

SEQ ID NO: 177565 - DNA, 25 bp, Saccharomyces pastorianus
aatggcagtaggtgaagccgcccac

SEQ ID NO: 177566 - DNA, 25 bp, Saccharomyces pastorianus
taatggcagtaggtgaagccgccca

SEQ ID NO: 177567 - DNA, 25 bp, Saccharomyces pastorianus
atggcagtaggtgaagccgcccacg

SEQ ID NO: 177568 - DNA, 25 bp, Saccharomyces pastorianus
gtgaagccgcccacggatgtgataa

SEQ ID NO: 177569 - DNA, 25 bp, Saccharomyces pastorianus
ccacggatgtgataatgcgttatac

SEQ ID NO: 177570 - DNA, 25 bp, Saccharomyces pastorianus
gcccacggatgtgataatgcgttat

SEQ ID NO: 177571 - DNA, 25 bp, Saccharomyces pastorianus
ccgcccacggatgtgataatgcgtt

SEQ ID NO: 177572 - DNA, 25 bp, Saccharomyces pastorianus
gccgcccacggatgtgataatgcgt

SEQ ID NO: 177573 - DNA, 25 bp, Saccharomyces pastorianus
gcagtaggtgaagccgcccacggat

SEQ ID NO: 177574 - DNA, 25 bp, Saccharomyces pastorianus
taccctgaattacgaacttgctaga

SEQ ID NO: 177575 - DNA, 25 bp, Saccharomyces pastorianus
gaaggccacaatttacatgatttat

SEQ ID NO: 177576 - DNA, 25 bp, Saccharomyces pastorianus
atttaagacgtttgagaaggccaca

SEQ ID NO: 177577 - DNA, 25 bp, Saccharomyces pastorianus
gaaaactctgaagatgctttgcata

SEQ ID NO: 177578 - DNA, 25 bp, Saccharomyces pastorianus
ttagggactctatctcacggtaacg

SEQ ID NO: 177579 - DNA, 25 bp, Saccharomyces pastorianus
ttactatatcgtgctaatttcctat

SEQ ID NO: 177580 - DNA, 25 bp, Saccharomyces pastorianus
ttttaagtgcgcctaccctgaatta

SEQ ID NO: 177581 - DNA, 25 bp, Saccharomyces pastorianus
gattttaacccaaccatagcttacg

SEQ ID NO: 177582 - DNA, 25 bp, Saccharomyces pastorianus
cacggtaacgattttgccttagagt

SEQ ID NO: 177583 - DNA, 25 bp, Saccharomyces pastorianus
tacgaaatcaaacaaagccgggaat

SEQ ID NO: 177584 - DNA, 25 bp, Saccharomyces pastorianus
atagcttacgtatggtttcattact

SEQ ID NO: 177585 - DNA, 25 bp, Saccharomyces pastorianus
acttgaaggcaccaacggacgatat

SEQ ID NO: 177586 - DNA, 25 bp, Saccharomyces pastorianus
aggcaccaacggacgatatagtaga

SEQ ID NO: 177587 - DNA, 25 bp, Saccharomyces pastorianus
gcaccaattttgtttgtggaaggta

SEQ ID NO: 177588 - DNA, 25 bp, Saccharomyces pastorianus
atgtctgctacactacaagctgaaa

SEQ ID NO: 177589 - DNA, 25 bp, Saccharomyces pastorianus
atactacttgaaggcaccaacggac

SEQ ID NO: 177590 - DNA, 25 bp, Saccharomyces pastorianus
gagtttttcaataatgcaccaattt

SEQ ID NO: 177591 - DNA, 25 bp, Saccharomyces pastorianus
aaatttgatgtttcacaatactact

SEQ ID NO: 177592 - DNA, 25 bp, Saccharomyces pastorianus
accaacggacgatatagtagatgct

SEQ ID NO: 177593 - DNA, 25 bp, Saccharomyces pastorianus
attcagtgagtttttcaataatgca

SEQ ID NO: 177594 - DNA, 25 bp, Saccharomyces pastorianus
aatgcaccaattttgtttgtggaag

SEQ ID NO: 177595 - DNA, 25 bp, Saccharomyces pastorianus
gtctgctacactacaagctgaaaaa

SEQ ID NO: 177596 - DNA, 25 bp, Saccharomyces pastorianus
ctacctcaagagcagcagtcggatt

SEQ ID NO: 177597 - DNA, 25 bp, Saccharomyces pastorianus
cagtttcaatcaccgcagtgggctt

SEQ ID NO: 177598 - DNA, 25 bp, Saccharomyces pastorianus
atggcgttgtgtgttgctgcccaaa

SEQ ID NO: 177599 - DNA, 25 bp, Saccharomyces pastorianus
agtgggcttcatcgctgatatttca

SEQ ID NO: 177600 - DNA, 25 bp, Saccharomyces pastorianus
gcgtgttcggtgatattgcttccaa

SEQ ID NO: 177601 - DNA, 25 bp, Saccharomyces pastorianus
gttgcagaagatcctcagctgtaca

SEQ ID NO: 177602 - DNA, 25 bp, Saccharomyces pastorianus
ggtactatattccagttcattgcac

SEQ ID NO: 177603 - DNA, 25 bp, Saccharomyces pastorianus
aagctctgttcccttatgttggtac

SEQ ID NO: 177604 - DNA, 25 bp, Saccharomyces pastorianus
gatgtttccagacggctcaatcaaa

SEQ ID NO: 177605 - DNA, 25 bp, Saccharomyces pastorianus
gtgctgattttattccctacttgaa

SEQ ID NO: 177606 - DNA, 25 bp, Saccharomyces pastorianus
taggagtggccaattgttcagtcaa

SEQ ID NO: 177607 - DNA, 25 bp, Saccharomyces pastorianus
agcgacaccagcagcgattgaagtt

SEQ ID NO: 177608 - DNA, 25 bp, Saccharomyces pastorianus
tagtgctgatgtaatcttaacaaga

SEQ ID NO: 177609 - DNA, 25 bp, Saccharomyces pastorianus
tggcagcgacaccagcagcgattga

SEQ ID NO: 177610 - DNA, 25 bp, Saccharomyces pastorianus
ttagtgctgatgtaatcttaacaag

SEQ ID NO: 177611 - DNA, 25 bp, Saccharomyces pastorianus
cagcgacaccagcagcgattgaagt

SEQ ID NO: 177612 - DNA, 25 bp, Saccharomyces pastorianus
atggcagcgacaccagcagcgattg

SEQ ID NO: 177613 - DNA, 25 bp, Saccharomyces pastorianus
gcgacaccagcagcgattgaagtta

SEQ ID NO: 177614 - DNA, 25 bp, Saccharomyces pastorianus
caccagcagcgattgaagttaattt

SEQ ID NO: 177615 - DNA, 25 bp, Saccharomyces pastorianus
gcagcgacaccagcagcgattgaag

SEQ ID NO: 177616 - DNA, 25 bp, Saccharomyces pastorianus
gttagtgctgatgtaatcttaacaa

SEQ ID NO: 177617 - DNA, 25 bp, Saccharomyces pastorianus
ggcagcgacaccagcagcgattgaa

SEQ ID NO: 177618 - DNA, 25 bp, Saccharomyces pastorianus
aaagttattccactcttgacgtgaa

SEQ ID NO: 177619 - DNA, 25 bp, Saccharomyces pastorianus
gaatgccacggtaggtaatttgatt

SEQ ID NO: 177620 - DNA, 25 bp, Saccharomyces pastorianus
gctggcgtaactttaatctactgta

SEQ ID NO: 177621 - DNA, 25 bp, Saccharomyces pastorianus
tgcttcgaagcatactagaccttta

SEQ ID NO: 177622 - DNA, 25 bp, Saccharomyces pastorianus
catacggtttttgtagctggcgtaa

SEQ ID NO: 177623 - DNA, 25 bp, Saccharomyces pastorianus
ggttagccaggaattttgacgatca

SEQ ID NO: 177624 - DNA, 25 bp, Saccharomyces pastorianus
tcgccaagcgtactgaacccaagaa

SEQ ID NO: 177625 - DNA, 25 bp, Saccharomyces pastorianus
gtgcaagtctcttttcgacgatgga

SEQ ID NO: 177626 - DNA, 25 bp, Saccharomyces pastorianus
aagctgctgcgggtcaaatttgtca

SEQ ID NO: 177627 - DNA, 25 bp, Saccharomyces pastorianus
ttaatggtcattctacaccagcagt

SEQ ID NO: 177628 - DNA, 25 bp, Saccharomyces pastorianus
ggctagtagtgtcgccaagcgtact

SEQ ID NO: 177629 - DNA, 25 bp, Saccharomyces pastorianus
atcatccttgataactccccagctt

SEQ ID NO: 177630 - DNA, 25 bp, Saccharomyces pastorianus
aacatgcaataccaatatcgtcctg

SEQ ID NO: 177631 - DNA, 25 bp, Saccharomyces pastorianus
ggttttcagatacccatgataacga

SEQ ID NO: 177632 - DNA, 25 bp, Saccharomyces pastorianus
gatacccatgataacgaactattag

SEQ ID NO: 177633 - DNA, 25 bp, Saccharomyces pastorianus
ttgataactccccagcttcttacat

SEQ ID NO: 177634 - DNA, 25 bp, Saccharomyces pastorianus
ataccaatatcgtcctggttttcag

SEQ ID NO: 177635 - DNA, 25 bp, Saccharomyces pastorianus
gtcctggttttcagatacccatgat

SEQ ID NO: 177636 - DNA, 25 bp, Saccharomyces pastorianus
tatcgtcctggttttcagataccca

SEQ ID NO: 177637 - DNA, 25 bp, Saccharomyces pastorianus
gaactattagatattattcctcttt

SEQ ID NO: 177638 - DNA, 25 bp, Saccharomyces pastorianus
ataactccccagcttcttacatctt

SEQ ID NO: 177639 - DNA, 25 bp, Saccharomyces pastorianus
aagacctttcagtgaaaacttcatt

SEQ ID NO: 177640 - DNA, 25 bp, Saccharomyces pastorianus
gttatctggctgttgaccacggaaa

SEQ ID NO: 177641 - DNA, 25 bp, Saccharomyces pastorianus
tatatcctgttaactattctcccct

SEQ ID NO: 177642 - DNA, 25 bp, Saccharomyces pastorianus
gctgcatatctgacaacttacttct

SEQ ID NO: 177643 - DNA, 25 bp, Saccharomyces pastorianus
ataggatcgttgtcactgggcactc

SEQ ID NO: 177644 - DNA, 25 bp, Saccharomyces pastorianus
tattctcccctttgcgttaaggaat

SEQ ID NO: 177645 - DNA, 25 bp, Saccharomyces pastorianus
aacgacggaggttgtccaccacata

SEQ ID NO: 177646 - DNA, 25 bp, Saccharomyces pastorianus
gtccaccacatattaacttctgcaa

SEQ ID NO: 177647 - DNA, 25 bp, Saccharomyces pastorianus
ggcaagctctatatcaagctgcata

SEQ ID NO: 177648 - DNA, 25 bp, Saccharomyces pastorianus
aattaggctcgggttatctggctgt

SEQ ID NO: 177649 - DNA, 25 bp, Saccharomyces pastorianus
tgttgttcattgttcgtccaacctg

SEQ ID NO: 177650 - DNA, 25 bp, Saccharomyces pastorianus
gaaactctcgggatggacgtcttta

SEQ ID NO: 177651 - DNA, 25 bp, Saccharomyces pastorianus
tactaatatcacgattattcctcat

SEQ ID NO: 177652 - DNA, 25 bp, Saccharomyces pastorianus
ctaatatcacgattattcctcattc

SEQ ID NO: 177653 - DNA, 25 bp, Saccharomyces pastorianus
tttactaatatcacgattattcctc

SEQ ID NO: 177654 - DNA, 25 bp, Saccharomyces pastorianus
tatatttctatttactaatatcacg

SEQ ID NO: 177655 - DNA, 25 bp, Saccharomyces pastorianus
atatcacgattattcctcattccgt

SEQ ID NO: 177656 - DNA, 25 bp, Saccharomyces pastorianus
taatatcacgattattcctcattcc

SEQ ID NO: 177657 - DNA, 25 bp, Saccharomyces pastorianus
ttactaatatcacgattattcctca

SEQ ID NO: 177658 - DNA, 25 bp, Saccharomyces pastorianus
actaatatcacgattattcctcatt

SEQ ID NO: 177659 - DNA, 25 bp, Saccharomyces pastorianus
atttactaatatcacgattattcct

SEQ ID NO: 177660 - DNA, 25 bp, Saccharomyces pastorianus
tatttactaatatcacgattattcc

SEQ ID NO: 177661 - DNA, 25 bp, Saccharomyces pastorianus
aatatcacgattattcctcattccg

SEQ ID NO: 177662 - DNA, 25 bp, Saccharomyces pastorianus
gacgacgactacgacgatggaaaca

SEQ ID NO: 177663 - DNA, 25 bp, Saccharomyces pastorianus
tgacgacgatagtatagataacgac

SEQ ID NO: 177664 - DNA, 25 bp, Saccharomyces pastorianus
gataggaaacaaccccacaaggctg

SEQ ID NO: 177665 - DNA, 25 bp, Saccharomyces pastorianus
gaagatgatgacgtttacaactata

SEQ ID NO: 177666 - DNA, 25 bp, Saccharomyces pastorianus
gatgagaacgggtccgtcattttac

SEQ ID NO: 177667 - DNA, 25 bp, Saccharomyces pastorianus
gtttacaactataacgacaacgacg

SEQ ID NO: 177668 - DNA, 25 bp, Saccharomyces pastorianus
gaaacaaccatatcccctttgaaga

SEQ ID NO: 177669 - DNA, 25 bp, Saccharomyces pastorianus
acaaccccacaaggctgaagatgaa

SEQ ID NO: 177670 - DNA, 25 bp, Saccharomyces pastorianus
gtcattttacaagacgacgactacg

SEQ ID NO: 177671 - DNA, 25 bp, Saccharomyces pastorianus
gatagtgatttggacgacgatgaga

SEQ ID NO: 177672 - DNA, 25 bp, Saccharomyces pastorianus
aaccatatcccctttgaagatgatg

SEQ ID NO: 177673 - DNA, 25 bp, Saccharomyces pastorianus
gacggaacagttgttggtgacatac

SEQ ID NO: 177674 - DNA, 25 bp, Saccharomyces pastorianus
cggtgccaagcagagatatcaagtt

SEQ ID NO: 177675 - DNA, 25 bp, Saccharomyces pastorianus
gttcaggaactgtaattcaaccaga

SEQ ID NO: 177676 - DNA, 25 bp, Saccharomyces pastorianus
taactttcttatactacggtgccaa

SEQ ID NO: 177677 - DNA, 25 bp, Saccharomyces pastorianus
atatgctgcgcaatacgctggattg

SEQ ID NO: 177678 - DNA, 25 bp, Saccharomyces pastorianus
atactatcacggaaggagttgtcaa

SEQ ID NO: 177679 - DNA, 25 bp, Saccharomyces pastorianus
ggagaccacccagattgttcaggaa

SEQ ID NO: 177680 - DNA, 25 bp, Saccharomyces pastorianus
acttctgattgcaacgaactctgga

SEQ ID NO: 177681 - DNA, 25 bp, Saccharomyces pastorianus
tacgctggattgcaaacgcttttgg

SEQ ID NO: 177682 - DNA, 25 bp, Saccharomyces pastorianus
gataggttcttcgattacaccaaca

SEQ ID NO: 177683 - DNA, 25 bp, Saccharomyces pastorianus
aaggtattccaaaggcccattccat

SEQ ID NO: 177684 - DNA, 25 bp, Saccharomyces pastorianus
ttcatagtgagggcttcgagcgcga

SEQ ID NO: 177685 - DNA, 25 bp, Saccharomyces pastorianus
ctgccgttcatagtgagggcttcga

SEQ ID NO: 177686 - DNA, 25 bp, Saccharomyces pastorianus
attgccgccaagctggcgctgccgt

SEQ ID NO: 177687 - DNA, 25 bp, Saccharomyces pastorianus
aggattgccgccaagctggcgctgc

SEQ ID NO: 177688 - DNA, 25 bp, Saccharomyces pastorianus
caagctggcgctgccgttcatagtg

SEQ ID NO: 177689 - DNA, 25 bp, Saccharomyces pastorianus
gctgccgttcatagtgagggcttcg

SEQ ID NO: 177690 - DNA, 25 bp, Saccharomyces pastorianus
gcgctgccgttcatagtgagggctt

SEQ ID NO: 177691 - DNA, 25 bp, Saccharomyces pastorianus
cgttcatagtgagggcttcgagcgc

SEQ ID NO: 177692 - DNA, 25 bp, Saccharomyces pastorianus
tgccgttcatagtgagggcttcgag

SEQ ID NO: 177693 - DNA, 25 bp, Saccharomyces pastorianus
gccaagctggcgctgccgttcatag

SEQ ID NO: 177694 - DNA, 25 bp, Saccharomyces pastorianus
cgctgccgttcatagtgagggcttc

SEQ ID NO: 177695 - DNA, 25 bp, Saccharomyces pastorianus
ttccgctgacttgggagtagagtac

SEQ ID NO: 177696 - DNA, 25 bp, Saccharomyces pastorianus
cggagtcgcgtattacaaatcttgt

SEQ ID NO: 177697 - DNA, 25 bp, Saccharomyces pastorianus
gagtcgcgtattacaaatcttgtac

SEQ ID NO: 177698 - DNA, 25 bp, Saccharomyces pastorianus
ttttccgctgacttgggagtagagt

SEQ ID NO: 177699 - DNA, 25 bp, Saccharomyces pastorianus
gctgcgcggagtcgcgtattacaaa

SEQ ID NO: 177700 - DNA, 25 bp, Saccharomyces pastorianus
cgcggagtcgcgtattacaaatctt

SEQ ID NO: 177701 - DNA, 25 bp, Saccharomyces pastorianus
aaatcttgtactttgcattctgtgc

SEQ ID NO: 177702 - DNA, 25 bp, Saccharomyces pastorianus
acttgggagtagagtacagctgcgc

SEQ ID NO: 177703 - DNA, 25 bp, Saccharomyces pastorianus
cagctgcgcggagtcgcgtattaca

SEQ ID NO: 177704 - DNA, 25 bp, Saccharomyces pastorianus
tacagctgcgcggagtcgcgtatta

SEQ ID NO: 177705 - DNA, 25 bp, Saccharomyces pastorianus
gtcgcgtattacaaatcttgtactt

SEQ ID NO: 177706 - DNA, 25 bp, Saccharomyces pastorianus
gctggcacagtggaactgatagaaa

SEQ ID NO: 177707 - DNA, 25 bp, Saccharomyces pastorianus
gtctgctggcacagtggaactgata

SEQ ID NO: 177708 - DNA, 25 bp, Saccharomyces pastorianus
ctgtctgctggcacagtggaactga

SEQ ID NO: 177709 - DNA, 25 bp, Saccharomyces pastorianus
cagacctgtctgctggcacagtgga

SEQ ID NO: 177710 - DNA, 25 bp, Saccharomyces pastorianus
tgtctgctggcacagtggaactgat

SEQ ID NO: 177711 - DNA, 25 bp, Saccharomyces pastorianus
cctgtctgctggcacagtggaactg

SEQ ID NO: 177712 - DNA, 25 bp, Saccharomyces pastorianus
tctgctggcacagtggaactgatag

SEQ ID NO: 177713 - DNA, 25 bp, Saccharomyces pastorianus
ctgctggcacagtggaactgataga

SEQ ID NO: 177714 - DNA, 25 bp, Saccharomyces pastorianus
acctgtctgctggcacagtggaact

SEQ ID NO: 177715 - DNA, 25 bp, Saccharomyces pastorianus
agacctgtctgctggcacagtggaa

SEQ ID NO: 177716 - DNA, 25 bp, Saccharomyces pastorianus
gacctgtctgctggcacagtggaac

SEQ ID NO: 177717 - DNA, 25 bp, Saccharomyces pastorianus
agccaagaggtttgaactccgctag

SEQ ID NO: 177718 - DNA, 25 bp, Saccharomyces pastorianus
gccaagaggtttgaactccgctaga

SEQ ID NO: 177719 - DNA, 25 bp, Saccharomyces pastorianus
ccaagaggtttgaactccgctagaa

SEQ ID NO: 177720 - DNA, 25 bp, Saccharomyces pastorianus
ggtaagccaagaggtttgaactccg

SEQ ID NO: 177721 - DNA, 25 bp, Saccharomyces pastorianus
aagaggtttgaactccgctagaaag

SEQ ID NO: 177722 - DNA, 25 bp, Saccharomyces pastorianus
aagccaagaggtttgaactccgcta

SEQ ID NO: 177723 - DNA, 25 bp, Saccharomyces pastorianus
gtaagccaagaggtttgaactccgc

SEQ ID NO: 177724 - DNA, 25 bp, Saccharomyces pastorianus
caagaggtttgaactccgctagaaa

SEQ ID NO: 177725 - DNA, 25 bp, Saccharomyces pastorianus
taagccaagaggtttgaactccgct

SEQ ID NO: 177726 - DNA, 25 bp, Saccharomyces pastorianus
tctagcgggatcgaaccgctgatcc

SEQ ID NO: 177727 - DNA, 25 bp, Saccharomyces pastorianus
cgaaccgctgatccccgcgttatta

SEQ ID NO: 177728 - DNA, 25 bp, Saccharomyces pastorianus
atggtctctagcgggatcgaaccgc

SEQ ID NO: 177729 - DNA, 25 bp, Saccharomyces pastorianus
gtctctagcgggatcgaaccgctga

SEQ ID NO: 177730 - DNA, 25 bp, Saccharomyces pastorianus
tctctagcgggatcgaaccgctgat

SEQ ID NO: 177731 - DNA, 25 bp, Saccharomyces pastorianus
ctctagcgggatcgaaccgctgatc

SEQ ID NO: 177732 - DNA, 25 bp, Saccharomyces pastorianus
ggtctctagcgggatcgaaccgctg

SEQ ID NO: 177733 - DNA, 25 bp, Saccharomyces pastorianus
ggatcgaaccgctgatccccgcgtt

SEQ ID NO: 177734 - DNA, 25 bp, Saccharomyces pastorianus
tagcgggatcgaaccgctgatcccc

SEQ ID NO: 177735 - DNA, 25 bp, Saccharomyces pastorianus
atcgaaccgctgatccccgcgttat

SEQ ID NO: 177736 - DNA, 25 bp, Saccharomyces pastorianus
gctgatccccgcgttattagcacgg

SEQ ID NO: 177737 - DNA, 25 bp, Saccharomyces pastorianus
aatagaacagatttatcaaaaagag

SEQ ID NO: 177738 - DNA, 25 bp, Saccharomyces pastorianus
gtaatagaacagatttatcaaaaag

SEQ ID NO: 177739 - DNA, 25 bp, Saccharomyces pastorianus
atgaagcagaaaaaatttaactcca

SEQ ID NO: 177740 - DNA, 25 bp, Saccharomyces pastorianus
aaaagtaatagaacagatttatcaa

SEQ ID NO: 177741 - DNA, 25 bp, Saccharomyces pastorianus
atagaacagatttatcaaaaagagg

SEQ ID NO: 177742 - DNA, 25 bp, Saccharomyces pastorianus
tgaagcagaaaaaatttaactccaa

SEQ ID NO: 177743 - DNA, 25 bp, Saccharomyces pastorianus
tagaacagatttatcaaaaagagga

SEQ ID NO: 177744 - DNA, 25 bp, Saccharomyces pastorianus
aagtaatagaacagatttatcaaaa

SEQ ID NO: 177745 - DNA, 25 bp, Saccharomyces pastorianus
aaagtaatagaacagatttatcaaa

SEQ ID NO: 177746 - DNA, 25 bp, Saccharomyces pastorianus
agggtactcgagttcgggacctgat

SEQ ID NO: 177747 - DNA, 25 bp, Saccharomyces pastorianus
cctggttcgtatcttgcgtggaatt

SEQ ID NO: 177748 - DNA, 25 bp, Saccharomyces pastorianus
gctacgacctctgaagggtactcga

SEQ ID NO: 177749 - DNA, 25 bp, Saccharomyces pastorianus
ggaattcgtgactcggatactacca

SEQ ID NO: 177750 - DNA, 25 bp, Saccharomyces pastorianus
gttcgggacctgatagaatttattc

SEQ ID NO: 177751 - DNA, 25 bp, Saccharomyces pastorianus
gggtaatgtacattcaccagataat

SEQ ID NO: 177752 - DNA, 25 bp, Saccharomyces pastorianus
tcggatactaccatcacagcaggaa

SEQ ID NO: 177753 - DNA, 25 bp, Saccharomyces pastorianus
atcttgcgtggaattcgtgactcgg

SEQ ID NO: 177754 - DNA, 25 bp, Saccharomyces pastorianus
atttattctgcaaagggtaatgtac

SEQ ID NO: 177755 - DNA, 25 bp, Saccharomyces pastorianus
gcaggaaacagctacgacctctgaa

SEQ ID NO: 177756 - DNA, 25 bp, Saccharomyces pastorianus
ttcttcctctacttcctggttcgta

SEQ ID NO: 177757 - DNA, 25 bp, Saccharomyces pastorianus
aagttttgttcagagaaccgaagcg

SEQ ID NO: 177758 - DNA, 25 bp, Saccharomyces pastorianus
gttcagagaaccgaagcgaggaatt

SEQ ID NO: 177759 - DNA, 25 bp, Saccharomyces pastorianus
caacctcattttgcgtaatcgagaa

SEQ ID NO: 177760 - DNA, 25 bp, Saccharomyces pastorianus
agttttgttcagagaaccgaagcga

SEQ ID NO: 177761 - DNA, 25 bp, Saccharomyces pastorianus
acctcattttgcgtaatcgagaagt

SEQ ID NO: 177762 - DNA, 25 bp, Saccharomyces pastorianus
aacctcattttgcgtaatcgagaag

SEQ ID NO: 177763 - DNA, 25 bp, Saccharomyces pastorianus
tgccaacctcattttgcgtaatcga

SEQ ID NO: 177764 - DNA, 25 bp, Saccharomyces pastorianus
ttgccaacctcattttgcgtaatcg

SEQ ID NO: 177765 - DNA, 25 bp, Saccharomyces pastorianus
cagagaaccgaagcgaggaattgac

SEQ ID NO: 177766 - DNA, 25 bp, Saccharomyces pastorianus
ttgttcagagaaccgaagcgaggaa

SEQ ID NO: 177767 - DNA, 25 bp, Saccharomyces pastorianus
gccaacctcattttgcgtaatcgag

SEQ ID NO: 177768 - DNA, 25 bp, Saccharomyces pastorianus
tgtataaatgcccttgatacatacg

SEQ ID NO: 177769 - DNA, 25 bp, Saccharomyces pastorianus
ataaatgcccttgatacatacgtta

SEQ ID NO: 177770 - DNA, 25 bp, Saccharomyces pastorianus
taaatgcccttgatacatacgttat

SEQ ID NO: 177771 - DNA, 25 bp, Saccharomyces pastorianus
aaatgcccttgatacatacgttata

SEQ ID NO: 177772 - DNA, 25 bp, Saccharomyces pastorianus
caaatattgtataaatgcccttgat

SEQ ID NO: 177773 - DNA, 25 bp, Saccharomyces pastorianus
ccaaatattgtataaatgcccttga

SEQ ID NO: 177774 - DNA, 25 bp, Saccharomyces pastorianus
gtataaatgcccttgatacatacgt

SEQ ID NO: 177775 - DNA, 25 bp, Saccharomyces pastorianus
tataaatgcccttgatacatacgtt

SEQ ID NO: 177776 - DNA, 25 bp, Saccharomyces pastorianus
aatattgtataaatgcccttgatac

SEQ ID NO: 177777 - DNA, 25 bp, Saccharomyces pastorianus
aaatattgtataaatgcccttgata

SEQ ID NO: 177778 - DNA, 25 bp, Saccharomyces pastorianus
aatgcccttgatacatacgttatac

SEQ ID NO: 177779 - DNA, 25 bp, Saccharomyces pastorianus
aatcatctaccgcatggataagtgt

SEQ ID NO: 177780 - DNA, 25 bp, Saccharomyces pastorianus
ggtttgcgattatttttactcaggt

SEQ ID NO: 177781 - DNA, 25 bp, Saccharomyces pastorianus
gcagaacgatatttgtcgccgagat

SEQ ID NO: 177782 - DNA, 25 bp, Saccharomyces pastorianus
ttatgctgcaatgttttggttgggc

SEQ ID NO: 177783 - DNA, 25 bp, Saccharomyces pastorianus
taaattacactctcgttggtttgcg

SEQ ID NO: 177784 - DNA, 25 bp, Saccharomyces pastorianus
gtttatttgatgcttactggtgtta

SEQ ID NO: 177785 - DNA, 25 bp, Saccharomyces pastorianus
tggctcctgttttatactcttggca

SEQ ID NO: 177786 - DNA, 25 bp, Saccharomyces pastorianus
ttactcaggttttcaatatcattgg

SEQ ID NO: 177787 - DNA, 25 bp, Saccharomyces pastorianus
tttgtcgccgagatgctcaaactag

SEQ ID NO: 177788 - DNA, 25 bp, Saccharomyces pastorianus
ttgggctatggctcctgttttatac

SEQ ID NO: 177789 - DNA, 25 bp, Saccharomyces pastorianus
atatcattggtaactccatattagc

SEQ ID NO: 177790 - DNA, 25 bp, Saccharomyces pastorianus
atgagcggtacgagaatcgaacccg

SEQ ID NO: 177791 - DNA, 25 bp, Saccharomyces pastorianus
atttctaaaaatgagcggtacgaga

SEQ ID NO: 177792 - DNA, 25 bp, Saccharomyces pastorianus
gaatttctaaaaatgagcggtacga

SEQ ID NO: 177793 - DNA, 25 bp, Saccharomyces pastorianus
tacgagaatcgaacccgtgtcccca

SEQ ID NO: 177794 - DNA, 25 bp, Saccharomyces pastorianus
taaaaatgagcggtacgagaatcga

SEQ ID NO: 177795 - DNA, 25 bp, Saccharomyces pastorianus
aatgagcggtacgagaatcgaaccc

SEQ ID NO: 177796 - DNA, 25 bp, Saccharomyces pastorianus
tttctaaaaatgagcggtacgagaa

SEQ ID NO: 177797 - DNA, 25 bp, Saccharomyces pastorianus
aaaatgagcggtacgagaatcgaac

SEQ ID NO: 177798 - DNA, 25 bp, Saccharomyces pastorianus
aatttctaaaaatgagcggtacgag

SEQ ID NO: 177799 - DNA, 25 bp, Saccharomyces pastorianus
agaatttctaaaaatgagcggtacg

SEQ ID NO: 177800 - DNA, 25 bp, Saccharomyces pastorianus
gcggtacgagaatcgaacccgtgtc

SEQ ID NO: 177801 - DNA, 25 bp, Saccharomyces pastorianus
atttctctggcgctgggtgtatttg

SEQ ID NO: 177802 - DNA, 25 bp, Saccharomyces pastorianus
ttagagaggtgccaacagcccattc

SEQ ID NO: 177803 - DNA, 25 bp, Saccharomyces pastorianus
atttagccccgtcacatacaaatct

SEQ ID NO: 177804 - DNA, 25 bp, Saccharomyces pastorianus
ggtgtcatcggccattatagagcta

SEQ ID NO: 177805 - DNA, 25 bp, Saccharomyces pastorianus
aaatctctatggtgggttgactatt

SEQ ID NO: 177806 - DNA, 25 bp, Saccharomyces pastorianus
gactgatcttcattatgctgcaacg

SEQ ID NO: 177807 - DNA, 25 bp, Saccharomyces pastorianus
cacactttttggcatttcttcgtag

SEQ ID NO: 177808 - DNA, 25 bp, Saccharomyces pastorianus
tgtccgtctcatgccaaatcattta

SEQ ID NO: 177809 - DNA, 25 bp, Saccharomyces pastorianus
agcccattccaaatgcagttcctgt

SEQ ID NO: 177810 - DNA, 25 bp, Saccharomyces pastorianus
gtattttacggttcgttcattcctg

SEQ ID NO: 177811 - DNA, 25 bp, Saccharomyces pastorianus
tttcttcgtagtgttgggtgtcatc

SEQ ID NO: 177812 - DNA, 25 bp, Saccharomyces pastorianus
aacgccggtcattttccataatttg

SEQ ID NO: 177813 - DNA, 25 bp, Saccharomyces pastorianus
gccggtcattttccataatttgatc

SEQ ID NO: 177814 - DNA, 25 bp, Saccharomyces pastorianus
ataacgccggtcattttccataatt

SEQ ID NO: 177815 - DNA, 25 bp, Saccharomyces pastorianus
caataacttcagcaaacgagcagat

SEQ ID NO: 177816 - DNA, 25 bp, Saccharomyces pastorianus
acgagcagataacgccggtcatttt

SEQ ID NO: 177817 - DNA, 25 bp, Saccharomyces pastorianus
aaacgagcagataacgccggtcatt

SEQ ID NO: 177818 - DNA, 25 bp, Saccharomyces pastorianus
ggtcattttccataatttgatcatg

SEQ ID NO: 177819 - DNA, 25 bp, Saccharomyces pastorianus
tgtttccagccgttccagaaaaacg

SEQ ID NO: 177820 - DNA, 25 bp, Saccharomyces pastorianus
cagataacgccggtcattttccata

SEQ ID NO: 177821 - DNA, 25 bp, Saccharomyces pastorianus
tttgatcatggatatggtactaccc

SEQ ID NO: 177822 - DNA, 25 bp, Saccharomyces pastorianus
aaaactatggtacaataacttcagc

SEQ ID NO: 177823 - DNA, 25 bp, Saccharomyces pastorianus
attctcaaaagcatacagttgaagc

SEQ ID NO: 177824 - DNA, 25 bp, Saccharomyces pastorianus
agacatattctcaaaagcatacagt

SEQ ID NO: 177825 - DNA, 25 bp, Saccharomyces pastorianus
gaaaacagacatattctcaaaagca

SEQ ID NO: 177826 - DNA, 25 bp, Saccharomyces pastorianus
aaaacagacatattctcaaaagcat

SEQ ID NO: 177827 - DNA, 25 bp, Saccharomyces pastorianus
cagacatattctcaaaagcatacag

SEQ ID NO: 177828 - DNA, 25 bp, Saccharomyces pastorianus
acatattctcaaaagcatacagttg

SEQ ID NO: 177829 - DNA, 25 bp, Saccharomyces pastorianus
ggaaaggaaagaaaacagacatatt

SEQ ID NO: 177830 - DNA, 25 bp, Saccharomyces pastorianus
aacagacatattctcaaaagcatac

SEQ ID NO: 177831 - DNA, 25 bp, Saccharomyces pastorianus
gacatattctcaaaagcatacagtt

SEQ ID NO: 177832 - DNA, 25 bp, Saccharomyces pastorianus
aaacagacatattctcaaaagcata

SEQ ID NO: 177833 - DNA, 25 bp, Saccharomyces pastorianus
acagacatattctcaaaagcataca

SEQ ID NO: 177834 - DNA, 25 bp, Saccharomyces pastorianus
tgaatcttttgccatcaactccatc

SEQ ID NO: 177835 - DNA, 25 bp, Saccharomyces pastorianus
aaaacgaagtgcgatgccttcccta

SEQ ID NO: 177836 - DNA, 25 bp, Saccharomyces pastorianus
gatgagatctttggcttgtattccc

SEQ ID NO: 177837 - DNA, 25 bp, Saccharomyces pastorianus
ggcgctgattgccttatgctacagt

SEQ ID NO: 177838 - DNA, 25 bp, Saccharomyces pastorianus
aagtaacgtctaatcctatggtcaa

SEQ ID NO: 177839 - DNA, 25 bp, Saccharomyces pastorianus
cagtgtcatctgcaggaagtccgaa

SEQ ID NO: 177840 - DNA, 25 bp, Saccharomyces pastorianus
ttccaattcttatcgctccaaggta

SEQ ID NO: 177841 - DNA, 25 bp, Saccharomyces pastorianus
gtttccatcatctcaaccaaggttg

SEQ ID NO: 177842 - DNA, 25 bp, Saccharomyces pastorianus
ttacctcaaccctttgtgcaagaca

SEQ ID NO: 177843 - DNA, 25 bp, Saccharomyces pastorianus
ggtatcggtaaatgcttccttaatt

SEQ ID NO: 177844 - DNA, 25 bp, Saccharomyces pastorianus
accaaggttgcatatccatagccaa

SEQ ID NO: 177845 - DNA, 25 bp, Saccharomyces pastorianus
ctgactttgtttctggcacacctat

SEQ ID NO: 177846 - DNA, 25 bp, Saccharomyces pastorianus
tttcactgactttgtttctggcaca

SEQ ID NO: 177847 - DNA, 25 bp, Saccharomyces pastorianus
ctttcactgactttgtttctggcac

SEQ ID NO: 177848 - DNA, 25 bp, Saccharomyces pastorianus
ttcactgactttgtttctggcacac

SEQ ID NO: 177849 - DNA, 25 bp, Saccharomyces pastorianus
actttcactgactttgtttctggca

SEQ ID NO: 177850 - DNA, 25 bp, Saccharomyces pastorianus
tggcacacctattgtaaggagtctt

SEQ ID NO: 177851 - DNA, 25 bp, Saccharomyces pastorianus
gtttctggcacacctattgtaagga

SEQ ID NO: 177852 - DNA, 25 bp, Saccharomyces pastorianus
acacctattgtaaggagtcttcaga

SEQ ID NO: 177853 - DNA, 25 bp, Saccharomyces pastorianus
cactgactttgtttctggcacacct

SEQ ID NO: 177854 - DNA, 25 bp, Saccharomyces pastorianus
actgactttgtttctggcacaccta

SEQ ID NO: 177855 - DNA, 25 bp, Saccharomyces pastorianus
tcactgactttgtttctggcacacc

SEQ ID NO: 177856 - DNA, 25 bp, Saccharomyces pastorianus
atgaaacccttttccgtgcctgtat

SEQ ID NO: 177857 - DNA, 25 bp, Saccharomyces pastorianus
ggtgccgggtgccttatgaaaccct

SEQ ID NO: 177858 - DNA, 25 bp, Saccharomyces pastorianus
tatgaaacccttttccgtgcctgta

SEQ ID NO: 177859 - DNA, 25 bp, Saccharomyces pastorianus
ctgttttatggcgcttatgtgtatt

SEQ ID NO: 177860 - DNA, 25 bp, Saccharomyces pastorianus
tgaaacccttttccgtgcctgtatt

SEQ ID NO: 177861 - DNA, 25 bp, Saccharomyces pastorianus
tactgttttatggcgcttatgtgta

SEQ ID NO: 177862 - DNA, 25 bp, Saccharomyces pastorianus
gtgccgggtgccttatgaaaccctt

SEQ ID NO: 177863 - DNA, 25 bp, Saccharomyces pastorianus
tgcctgtatttccgttttcgtcgaa

SEQ ID NO: 177864 - DNA, 25 bp, Saccharomyces pastorianus
tgccgggtgccttatgaaacccttt

SEQ ID NO: 177865 - DNA, 25 bp, Saccharomyces pastorianus
gtactgttttatggcgcttatgtgt

SEQ ID NO: 177866 - DNA, 25 bp, Saccharomyces pastorianus
atcatacatctttgatagacttcgt

SEQ ID NO: 177867 - DNA, 25 bp, Saccharomyces pastorianus
ttggcgccggtgttaagcagaacat

SEQ ID NO: 177868 - DNA, 25 bp, Saccharomyces pastorianus
agtttggcgccggtgttaagcagaa

SEQ ID NO: 177869 - DNA, 25 bp, Saccharomyces pastorianus
gttaagcagaacatcttgtcttctt

SEQ ID NO: 177870 - DNA, 25 bp, Saccharomyces pastorianus
ggtgttaagcagaacatcttgtctt

SEQ ID NO: 177871 - DNA, 25 bp, Saccharomyces pastorianus
gcagaacatcttgtcttctttactt

SEQ ID NO: 177872 - DNA, 25 bp, Saccharomyces pastorianus
tttactttctgaggaatggcacgcg

SEQ ID NO: 177873 - DNA, 25 bp, Saccharomyces pastorianus
tattctcagtttggcgccggtgtta

SEQ ID NO: 177874 - DNA, 25 bp, Saccharomyces pastorianus
tactattctcagtttggcgccggtg

SEQ ID NO: 177875 - DNA, 25 bp, Saccharomyces pastorianus
tgtcttctttactttctgaggaatg

SEQ ID NO: 177876 - DNA, 25 bp, Saccharomyces pastorianus
gcgccggtgttaagcagaacatctt

SEQ ID NO: 177877 - DNA, 25 bp, Saccharomyces pastorianus
actttctgaggaatggcacgcggac

SEQ ID NO: 177878 - DNA, 25 bp, Saccharomyces pastorianus
gaagtaacaattcggcacgcatcct

SEQ ID NO: 177879 - DNA, 25 bp, Saccharomyces pastorianus
gaaagccctctgaaacgccaaaaat

SEQ ID NO: 177880 - DNA, 25 bp, Saccharomyces pastorianus
ttattacggaaagccctctgaaacg

SEQ ID NO: 177881 - DNA, 25 bp, Saccharomyces pastorianus
taaattcctttgaagattattacgg

SEQ ID NO: 177882 - DNA, 25 bp, Saccharomyces pastorianus
tacggaaagccctctgaaacgccaa

SEQ ID NO: 177883 - DNA, 25 bp, Saccharomyces pastorianus
agattattacggaaagccctctgaa

SEQ ID NO: 177884 - DNA, 25 bp, Saccharomyces pastorianus
gtaacaattcggcacgcatcctgtg

SEQ ID NO: 177885 - DNA, 25 bp, Saccharomyces pastorianus
aattcggcacgcatcctgtgcggaa

SEQ ID NO: 177886 - DNA, 25 bp, Saccharomyces pastorianus
agccctctgaaacgccaaaaatgga

SEQ ID NO: 177887 - DNA, 25 bp, Saccharomyces pastorianus
ctctgaaacgccaaaaatggaggaa

SEQ ID NO: 177888 - DNA, 25 bp, Saccharomyces pastorianus
ttggaagtaacaattcggcacgcat

SEQ ID NO: 177889 - DNA, 25 bp, Saccharomyces pastorianus
tacgttactagtatattatcatata

SEQ ID NO: 177890 - DNA, 25 bp, Saccharomyces pastorianus
ttacgttactagtatattatcatat

SEQ ID NO: 177891 - DNA, 25 bp, Saccharomyces pastorianus
tagtatttacgttactagtatatta

SEQ ID NO: 177892 - DNA, 25 bp, Saccharomyces pastorianus
atttacgttactagtatattatcat

SEQ ID NO: 177893 - DNA, 25 bp, Saccharomyces pastorianus
cgttactagtatattatcatatacg

SEQ ID NO: 177894 - DNA, 25 bp, Saccharomyces pastorianus
tatttacgttactagtatattatca

SEQ ID NO: 177895 - DNA, 25 bp, Saccharomyces pastorianus
tttacgttactagtatattatcata

SEQ ID NO: 177896 - DNA, 25 bp, Saccharomyces pastorianus
acgttactagtatattatcatatac

SEQ ID NO: 177897 - DNA, 25 bp, Saccharomyces pastorianus
agtatttacgttactagtatattat

SEQ ID NO: 177898 - DNA, 25 bp, Saccharomyces pastorianus
ctatcatctactaactagtatttac

SEQ ID NO: 177899 - DNA, 25 bp, Saccharomyces pastorianus
gtatttacgttactagtatattatc

SEQ ID NO: 177900 - DNA, 25 bp, Saccharomyces pastorianus
gagggaacttcatacaacgtcactt

SEQ ID NO: 177901 - DNA, 25 bp, Saccharomyces pastorianus
gactttccttggatagtttcctcga

SEQ ID NO: 177902 - DNA, 25 bp, Saccharomyces pastorianus
tttgattcattagctgccaactccg

SEQ ID NO: 177903 - DNA, 25 bp, Saccharomyces pastorianus
agaacactgtgatagtcggctgatc

SEQ ID NO: 177904 - DNA, 25 bp, Saccharomyces pastorianus
gaggctttgaacgttttgcacgata

SEQ ID NO: 177905 - DNA, 25 bp, Saccharomyces pastorianus
ttctatgaagttcacggccccggaa

SEQ ID NO: 177906 - DNA, 25 bp, Saccharomyces pastorianus
tgccaactccgtaaacgtttcttgt

SEQ ID NO: 177907 - DNA, 25 bp, Saccharomyces pastorianus
gcttggaagctagcgcctctaacaa

SEQ ID NO: 177908 - DNA, 25 bp, Saccharomyces pastorianus
taatgcgctcataccagtcaaaatt

SEQ ID NO: 177909 - DNA, 25 bp, Saccharomyces pastorianus
aaactgcccttatttctatacctat

SEQ ID NO: 177910 - DNA, 25 bp, Saccharomyces pastorianus
taccgctaaatgtcaaactgccctt

SEQ ID NO: 177911 - DNA, 25 bp, Saccharomyces pastorianus
gctaccgtgtccgtggcgtattcaa

SEQ ID NO: 177912 - DNA, 25 bp, Saccharomyces pastorianus
aaccattgttgtcaaggctgaaaag

SEQ ID NO: 177913 - DNA, 25 bp, Saccharomyces pastorianus
tggaggcggaagtttcagctaccgt

SEQ ID NO: 177914 - DNA, 25 bp, Saccharomyces pastorianus
gtccgtggcgtattcaaccattgtt

SEQ ID NO: 177915 - DNA, 25 bp, Saccharomyces pastorianus
gaactcattatcaattctatttgca

SEQ ID NO: 177916 - DNA, 25 bp, Saccharomyces pastorianus
aaaggcggatgcacgggcattgaac

SEQ ID NO: 177917 - DNA, 25 bp, Saccharomyces pastorianus
gtggcgtattcaaccattgttgtca

SEQ ID NO: 177918 - DNA, 25 bp, Saccharomyces pastorianus
ggcggaagtttcagctaccgtgtcc

SEQ ID NO: 177919 - DNA, 25 bp, Saccharomyces pastorianus
aagtttcagctaccgtgtccgtggc

SEQ ID NO: 177920 - DNA, 25 bp, Saccharomyces pastorianus
gtcaaggctgaaaaggcggatgcac

SEQ ID NO: 177921 - DNA, 25 bp, Saccharomyces pastorianus
ctgaaaaggcggatgcacgggcatt

SEQ ID NO: 177922 - DNA, 25 bp, Saccharomyces pastorianus
cgatctgatcaagtcaaattttgaa

SEQ ID NO: 177923 - DNA, 25 bp, Saccharomyces pastorianus
agacctcgaaaatttcagcttgtgg

SEQ ID NO: 177924 - DNA, 25 bp, Saccharomyces pastorianus
gaaacttttgacttgagagcctggt

SEQ ID NO: 177925 - DNA, 25 bp, Saccharomyces pastorianus
aaattgatggccgaagactatgaaa

SEQ ID NO: 177926 - DNA, 25 bp, Saccharomyces pastorianus
cttgagagcctggtcgagacaaaga

SEQ ID NO: 177927 - DNA, 25 bp, Saccharomyces pastorianus
cctcgaaaatttcagcttgtggaaa

SEQ ID NO: 177928 - DNA, 25 bp, Saccharomyces pastorianus
atggccgaagactatgaaacttttg

SEQ ID NO: 177929 - DNA, 25 bp, Saccharomyces pastorianus
gctattttaaattgatggccgaaga

SEQ ID NO: 177930 - DNA, 25 bp, Saccharomyces pastorianus
tgacttgagagcctggtcgagacaa

SEQ ID NO: 177931 - DNA, 25 bp, Saccharomyces pastorianus
acttttgacttgagagcctggtcga

SEQ ID NO: 177932 - DNA, 25 bp, Saccharomyces pastorianus
gagacaaagacctcgaaaatttcag

SEQ ID NO: 177933 - DNA, 25 bp, Saccharomyces pastorianus
gaaacatgcctcattgtgacgacct

SEQ ID NO: 177934 - DNA, 25 bp, Saccharomyces pastorianus
gcgagctagccacgaatattttaca

SEQ ID NO: 177935 - DNA, 25 bp, Saccharomyces pastorianus
ggcgacattgaaacatgcctcattg

SEQ ID NO: 177936 - DNA, 25 bp, Saccharomyces pastorianus
atatacaccacaatcgtgttggtag

SEQ ID NO: 177937 - DNA, 25 bp, Saccharomyces pastorianus
tatttaccaggtgtgtttgcccttg

SEQ ID NO: 177938 - DNA, 25 bp, Saccharomyces pastorianus
cacattgctctattccgcagattat

SEQ ID NO: 177939 - DNA, 25 bp, Saccharomyces pastorianus
taatgacactttaagcgagctagcc

SEQ ID NO: 177940 - DNA, 25 bp, Saccharomyces pastorianus
attccgcagattatttaccaggtgt

SEQ ID NO: 177941 - DNA, 25 bp, Saccharomyces pastorianus
gtgacgacctctctatttaatgaca

SEQ ID NO: 177942 - DNA, 25 bp, Saccharomyces pastorianus
gaagctggctattgccacattgctc

SEQ ID NO: 177943 - DNA, 25 bp, Saccharomyces pastorianus
gtttgcccttggtcaccaagtgaat

SEQ ID NO: 177944 - DNA, 25 bp, Saccharomyces pastorianus
gtgaagttgctagctcttctattgc

SEQ ID NO: 177945 - DNA, 25 bp, Saccharomyces pastorianus
tgctgccacatcttcaagtgaagtt

SEQ ID NO: 177946 - DNA, 25 bp, Saccharomyces pastorianus
ttgctagctcttctattgcttcatc

SEQ ID NO: 177947 - DNA, 25 bp, Saccharomyces pastorianus
gttaagaccaacattgccgactaca

SEQ ID NO: 177948 - DNA, 25 bp, Saccharomyces pastorianus
ttcatccactagctcttctgttgca

SEQ ID NO: 177949 - DNA, 25 bp, Saccharomyces pastorianus
ttccgttgcttcatcctcaagtgaa

SEQ ID NO: 177950 - DNA, 25 bp, Saccharomyces pastorianus
ttctctaactacctcaagttctgct

SEQ ID NO: 177951 - DNA, 25 bp, Saccharomyces pastorianus
aagttctgctgccacatcttcaagt

SEQ ID NO: 177952 - DNA, 25 bp, Saccharomyces pastorianus
tattgcttcatccactagctcttct

SEQ ID NO: 177953 - DNA, 25 bp, Saccharomyces pastorianus
aagaccaacattgccgactacatca

SEQ ID NO: 177954 - DNA, 25 bp, Saccharomyces pastorianus
gcaccattctcaagtgaagttgtca

SEQ ID NO: 177955 - DNA, 25 bp, Saccharomyces pastorianus
tgagtttcgcgtatggtcacccact

SEQ ID NO: 177956 - DNA, 25 bp, Saccharomyces pastorianus
atggtcacccactacactactcggt

SEQ ID NO: 177957 - DNA, 25 bp, Saccharomyces pastorianus
tcaggctcttaccagcttaactaca

SEQ ID NO: 177958 - DNA, 25 bp, Saccharomyces pastorianus
cacctgagtttcgcgtatggtcacc

SEQ ID NO: 177959 - DNA, 25 bp, Saccharomyces pastorianus
gtttcgcgtatggtcacccactaca

SEQ ID NO: 177960 - DNA, 25 bp, Saccharomyces pastorianus
gcacctgagtttcgcgtatggtcac

SEQ ID NO: 177961 - DNA, 25 bp, Saccharomyces pastorianus
tactcggtcaggctcttaccagctt

SEQ ID NO: 177962 - DNA, 25 bp, Saccharomyces pastorianus
acctgagtttcgcgtatggtcaccc

SEQ ID NO: 177963 - DNA, 25 bp, Saccharomyces pastorianus
cactacactactcggtcaggctctt

SEQ ID NO: 177964 - DNA, 25 bp, Saccharomyces pastorianus
ggtcaggctcttaccagcttaacta

SEQ ID NO: 177965 - DNA, 25 bp, Saccharomyces pastorianus
ctgagtttcgcgtatggtcacccac

SEQ ID NO: 177966 - DNA, 25 bp, Saccharomyces pastorianus
actgcactggacaaaggctggactt

SEQ ID NO: 177967 - DNA, 25 bp, Saccharomyces pastorianus
gtgggtgatgccttaaccaacctga

SEQ ID NO: 177968 - DNA, 25 bp, Saccharomyces pastorianus
ataacgtgggcgatgcaattactgc

SEQ ID NO: 177969 - DNA, 25 bp, Saccharomyces pastorianus
actacaggtacagtcagctcgccaa

SEQ ID NO: 177970 - DNA, 25 bp, Saccharomyces pastorianus
gactgatgccttgggcaacagcaca

SEQ ID NO: 177971 - DNA, 25 bp, Saccharomyces pastorianus
ggcacagcagccactgatgcagtaa

SEQ ID NO: 177972 - DNA, 25 bp, Saccharomyces pastorianus
gacagcctcaggttcgaactcgaat

SEQ ID NO: 177973 - DNA, 25 bp, Saccharomyces pastorianus
ttcaacttgcagatgcgcctgtatt

SEQ ID NO: 177974 - DNA, 25 bp, Saccharomyces pastorianus
gtaacagcggcagtgttgaccgtaa

SEQ ID NO: 177975 - DNA, 25 bp, Saccharomyces pastorianus
ttaccaatgttggtgcgggcacagc

SEQ ID NO: 177976 - DNA, 25 bp, Saccharomyces pastorianus
tatcacaggtggtctgacagcctca

SEQ ID NO: 177977 - DNA, 25 bp, Saccharomyces pastorianus
tgccttattaaaaatggaatcccaa

SEQ ID NO: 177978 - DNA, 25 bp, Saccharomyces pastorianus
tattgccttattaaaaatggaatcc

SEQ ID NO: 177979 - DNA, 25 bp, Saccharomyces pastorianus
ttgtgtagaattgcagattcccttt

SEQ ID NO: 177980 - DNA, 25 bp, Saccharomyces pastorianus
tctagtacattctacatacctaata

SEQ ID NO: 177981 - DNA, 25 bp, Saccharomyces pastorianus
aacttctagtacattctacatacct

SEQ ID NO: 177982 - DNA, 25 bp, Saccharomyces pastorianus
tatggattcctaaatcctcgaggag

SEQ ID NO: 177983 - DNA, 25 bp, Saccharomyces pastorianus
ctagtacattctacatacctaatat

SEQ ID NO: 177984 - DNA, 25 bp, Saccharomyces pastorianus
ttgccttattaaaaatggaatccca

SEQ ID NO: 177985 - DNA, 25 bp, Saccharomyces pastorianus
gattatccctctttctattttatat

SEQ ID NO: 177986 - DNA, 25 bp, Saccharomyces pastorianus
actaaaagttctccacgaggacata

SEQ ID NO: 177987 - DNA, 25 bp, Saccharomyces pastorianus
cgattatccctctttctattttata

SEQ ID NO: 177988 - DNA, 25 bp, Saccharomyces pastorianus
atccctctttctattttatatgttt

SEQ ID NO: 177989 - DNA, 25 bp, Saccharomyces pastorianus
aaagttctccacgaggacataggaa

SEQ ID NO: 177990 - DNA, 25 bp, Saccharomyces pastorianus
tacgattatccctctttctatttta

SEQ ID NO: 177991 - DNA, 25 bp, Saccharomyces pastorianus
cctctttctattttatatgtttcat

SEQ ID NO: 177992 - DNA, 25 bp, Saccharomyces pastorianus
ttacgattatccctctttctatttt

SEQ ID NO: 177993 - DNA, 25 bp, Saccharomyces pastorianus
acgattatccctctttctattttat

SEQ ID NO: 177994 - DNA, 25 bp, Saccharomyces pastorianus
tcctatcatattatcaatctttgca

SEQ ID NO: 177995 - DNA, 25 bp, Saccharomyces pastorianus
ttatccctctttctattttatatgt

SEQ ID NO: 177996 - DNA, 25 bp, Saccharomyces pastorianus
gcagatgactttaagacagcctctt

SEQ ID NO: 177997 - DNA, 25 bp, Saccharomyces pastorianus
agacaaaccctccatcgctattaag

SEQ ID NO: 177998 - DNA, 25 bp, Saccharomyces pastorianus
acaggtaatccttcaaatgccacgg

SEQ ID NO: 177999 - DNA, 25 bp, Saccharomyces pastorianus
aaatcttgttgcgacgatggcgact

SEQ ID NO: 178000 - DNA, 25 bp, Saccharomyces pastorianus
tgaaacttctttccaatcttctctc

SEQ ID NO: 178001 - DNA, 25 bp, Saccharomyces pastorianus
gaaaattagaagtccagcgcctggt

SEQ ID NO: 178002 - DNA, 25 bp, Saccharomyces pastorianus
atcttctctctaccttcaacaaaaa

SEQ ID NO: 178003 - DNA, 25 bp, Saccharomyces pastorianus
gctgtagaagaggttgtctccctaa

SEQ ID NO: 178004 - DNA, 25 bp, Saccharomyces pastorianus
aatgccacggatttcgattctgttt

SEQ ID NO: 178005 - DNA, 25 bp, Saccharomyces pastorianus
tctccctaaagggttggcctcataa

SEQ ID NO: 178006 - DNA, 25 bp, Saccharomyces pastorianus
gactgctgctcctgcaaaaagggta

SEQ ID NO: 178007 - DNA, 25 bp, Saccharomyces pastorianus
aatggaggtcgactctatcctgtca

SEQ ID NO: 178008 - DNA, 25 bp, Saccharomyces pastorianus
ggaccaggaggcatcggatcaccat

SEQ ID NO: 178009 - DNA, 25 bp, Saccharomyces pastorianus
gaaaggctaatcacaacaccaccag

SEQ ID NO: 178010 - DNA, 25 bp, Saccharomyces pastorianus
atggaaccgctatcaatacccaaaa

SEQ ID NO: 178011 - DNA, 25 bp, Saccharomyces pastorianus
gaaaccggacaatggccacatgaat

SEQ ID NO: 178012 - DNA, 25 bp, Saccharomyces pastorianus
ttgtgaggctcactaaccagttctc

SEQ ID NO: 178013 - DNA, 25 bp, Saccharomyces pastorianus
gtcggcacagcggtaatcaacagtc

SEQ ID NO: 178014 - DNA, 25 bp, Saccharomyces pastorianus
agttctctcccatggatgatcctaa

SEQ ID NO: 178015 - DNA, 25 bp, Saccharomyces pastorianus
gaatgacctcaatagcagcgaagtt

SEQ ID NO: 178016 - DNA, 25 bp, Saccharomyces pastorianus
agaagtttccggatcaccagtcggc

SEQ ID NO: 178017 - DNA, 25 bp, Saccharomyces pastorianus
ggatcaccatcaacagcaagaattt

SEQ ID NO: 178018 - DNA, 25 bp, Saccharomyces pastorianus
agaacttcaacccatccggtgggtg

SEQ ID NO: 178019 - DNA, 25 bp, Saccharomyces pastorianus
gatgatcagacgcaagggaagacca

SEQ ID NO: 178020 - DNA, 25 bp, Saccharomyces pastorianus
tcacactgatggtccgctacagatg

SEQ ID NO: 178021 - DNA, 25 bp, Saccharomyces pastorianus
gtgtactcacactgatggtccgcta

SEQ ID NO: 178022 - DNA, 25 bp, Saccharomyces pastorianus
gacgcaagggaagaccatcgaccac

SEQ ID NO: 178023 - DNA, 25 bp, Saccharomyces pastorianus
aacccatccggtgggtgcatgtgtg

SEQ ID NO: 178024 - DNA, 25 bp, Saccharomyces pastorianus
tggccattgtaaagagctgagaaga

SEQ ID NO: 178025 - DNA, 25 bp, Saccharomyces pastorianus
agaaccaagaacttcaacccatccg

SEQ ID NO: 178026 - DNA, 25 bp, Saccharomyces pastorianus
gtccgctacagatgatcagacgcaa

SEQ ID NO: 178027 - DNA, 25 bp, Saccharomyces pastorianus
acagggcggcgcagtgtactcacac

SEQ ID NO: 178028 - DNA, 25 bp, Saccharomyces pastorianus
gatggtccgctacagatgatcagac

SEQ ID NO: 178029 - DNA, 25 bp, Saccharomyces pastorianus
ttgaccccagaagatgcccaacttt

SEQ ID NO: 178030 - DNA, 25 bp, Saccharomyces pastorianus
tgaccccagaagatgcccaactttt

SEQ ID NO: 178031 - DNA, 25 bp, Saccharomyces pastorianus
tttgaccccagaagatgcccaactt

SEQ ID NO: 178032 - DNA, 25 bp, Saccharomyces pastorianus
gaagatgcccaacttttgttggcct

SEQ ID NO: 178033 - DNA, 25 bp, Saccharomyces pastorianus
atttgaccccagaagatgcccaact

SEQ ID NO: 178034 - DNA, 25 bp, Saccharomyces pastorianus
agatgcccaacttttgttggcctct

SEQ ID NO: 178035 - DNA, 25 bp, Saccharomyces pastorianus
atgcccaacttttgttggcctctaa

SEQ ID NO: 178036 - DNA, 25 bp, Saccharomyces pastorianus
tacttttgatttgaccccagaagat

SEQ ID NO: 178037 - DNA, 25 bp, Saccharomyces pastorianus
accccagaagatgcccaacttttgt

SEQ ID NO: 178038 - DNA, 25 bp, Saccharomyces pastorianus
tgcccaacttttgttggcctctaac

SEQ ID NO: 178039 - DNA, 25 bp, Saccharomyces pastorianus
gatttgaccccagaagatgcccaac

SEQ ID NO: 178040 - DNA, 25 bp, Saccharomyces pastorianus
tcgatacttctacataataatatta

SEQ ID NO: 178041 - DNA, 25 bp, Saccharomyces pastorianus
cataataatattacgattattcctc

SEQ ID NO: 178042 - DNA, 25 bp, Saccharomyces pastorianus
tacttctacataataatattacgat

SEQ ID NO: 178043 - DNA, 25 bp, Saccharomyces pastorianus
atacttctacataataatattacga

SEQ ID NO: 178044 - DNA, 25 bp, Saccharomyces pastorianus
cgatacttctacataataatattac

SEQ ID NO: 178045 - DNA, 25 bp, Saccharomyces pastorianus
atcgatacttctacataataatatt

SEQ ID NO: 178046 - DNA, 25 bp, Saccharomyces pastorianus
aatcgatacttctacataataatat

SEQ ID NO: 178047 - DNA, 25 bp, Saccharomyces pastorianus
gaatcgatacttctacataataata

SEQ ID NO: 178048 - DNA, 25 bp, Saccharomyces pastorianus
gatacttctacataataatattacg

SEQ ID NO: 178049 - DNA, 25 bp, Saccharomyces pastorianus
acttctacataataatattacgatt

SEQ ID NO: 178050 - DNA, 25 bp, Saccharomyces pastorianus
ggaatcgatacttctacataataat

SEQ ID NO: 178051 - DNA, 25 bp, Saccharomyces pastorianus
atgattcctgattcattgacgctga

SEQ ID NO: 178052 - DNA, 25 bp, Saccharomyces pastorianus
aatacgcaaatgaacgggccagatg

SEQ ID NO: 178053 - DNA, 25 bp, Saccharomyces pastorianus
atggcggtatctcgaagcagcctgc

SEQ ID NO: 178054 - DNA, 25 bp, Saccharomyces pastorianus
agaactatcgttcatttggtggtag

SEQ ID NO: 178055 - DNA, 25 bp, Saccharomyces pastorianus
gccgactcccagtacttgatggata

SEQ ID NO: 178056 - DNA, 25 bp, Saccharomyces pastorianus
aactggcatctatgtattccgccga

SEQ ID NO: 178057 - DNA, 25 bp, Saccharomyces pastorianus
ctgactatttcacgtttcctaagca

SEQ ID NO: 178058 - DNA, 25 bp, Saccharomyces pastorianus
ggttcaactcggagctcttctagaa

SEQ ID NO: 178059 - DNA, 25 bp, Saccharomyces pastorianus
aagcagcctgcgacaccaggttcaa

SEQ ID NO: 178060 - DNA, 25 bp, Saccharomyces pastorianus
tcctaagcaggagaatggcggtatc

SEQ ID NO: 178061 - DNA, 25 bp, Saccharomyces pastorianus
gccagcatctggaaatacgcaaatg

SEQ ID NO: 178062 - DNA, 25 bp, Saccharomyces pastorianus
aattattgttattcgcgactctcgt

SEQ ID NO: 178063 - DNA, 25 bp, Saccharomyces pastorianus
gtatatgggccgtttgtcgcaagaa

SEQ ID NO: 178064 - DNA, 25 bp, Saccharomyces pastorianus
gcgatatcgttgaagctacctttgc

SEQ ID NO: 178065 - DNA, 25 bp, Saccharomyces pastorianus
atcacaaacggtgccctaagttggt

SEQ ID NO: 178066 - DNA, 25 bp, Saccharomyces pastorianus
ggagccgacagcaacgagcttacaa

SEQ ID NO: 178067 - DNA, 25 bp, Saccharomyces pastorianus
actacacccgttcgctagaatgatt

SEQ ID NO: 178068 - DNA, 25 bp, Saccharomyces pastorianus
aaacctggcttactccgactgagaa

SEQ ID NO: 178069 - DNA, 25 bp, Saccharomyces pastorianus
gatcctgaactatttcttggcaagc

SEQ ID NO: 178070 - DNA, 25 bp, Saccharomyces pastorianus
tgttactagggaccttttccttcag

SEQ ID NO: 178071 - DNA, 25 bp, Saccharomyces pastorianus
tagcgtggccattcggctcaaatga

SEQ ID NO: 178072 - DNA, 25 bp, Saccharomyces pastorianus
aagctcgctaatgtcacgtcattgc

SEQ ID NO: 178073 - DNA, 25 bp, Saccharomyces pastorianus
tgtatataactatctattcgatgat

SEQ ID NO: 178074 - DNA, 25 bp, Saccharomyces pastorianus
aataccactacaatggatgatgtat

SEQ ID NO: 178075 - DNA, 25 bp, Saccharomyces pastorianus
gtcacctggttggacggaccaaact

SEQ ID NO: 178076 - DNA, 25 bp, Saccharomyces pastorianus
aacgcgtttggaatcactacaggga

SEQ ID NO: 178077 - DNA, 25 bp, Saccharomyces pastorianus
aaaaccactgtcacctggttggacg

SEQ ID NO: 178078 - DNA, 25 bp, Saccharomyces pastorianus
tgcgtataacgcgtttggaatcact

SEQ ID NO: 178079 - DNA, 25 bp, Saccharomyces pastorianus
ttggacggaccaaactgcgtataac

SEQ ID NO: 178080 - DNA, 25 bp, Saccharomyces pastorianus
gtttggaatcactacagggatgttt

SEQ ID NO: 178081 - DNA, 25 bp, Saccharomyces pastorianus
cagggatgtttaataccactacaat

SEQ ID NO: 178082 - DNA, 25 bp, Saccharomyces pastorianus
gaataatgaaatcacggctagtaaa

SEQ ID NO: 178083 - DNA, 25 bp, Saccharomyces pastorianus
aataattcaaaaccactgtcacctg

SEQ ID NO: 178084 - DNA, 25 bp, Saccharomyces pastorianus
gattacttgagtttcatatcgagtc

SEQ ID NO: 178085 - DNA, 25 bp, Saccharomyces pastorianus
gtggtatcctgaacttgttgagctt

SEQ ID NO: 178086 - DNA, 25 bp, Saccharomyces pastorianus
gaaaatgcccagtcaacatcgcact

SEQ ID NO: 178087 - DNA, 25 bp, Saccharomyces pastorianus
gtatcttagagatttggtttctgca

SEQ ID NO: 178088 - DNA, 25 bp, Saccharomyces pastorianus
gaatcattctatgggctgtttaatt

SEQ ID NO: 178089 - DNA, 25 bp, Saccharomyces pastorianus
ctcagagacaattagcaacggcgat

SEQ ID NO: 178090 - DNA, 25 bp, Saccharomyces pastorianus
aacatcgcactattgaatcattcta

SEQ ID NO: 178091 - DNA, 25 bp, Saccharomyces pastorianus
taattttcagattcctcagagacaa

SEQ ID NO: 178092 - DNA, 25 bp, Saccharomyces pastorianus
gagttagctgctttgaggaatacat

SEQ ID NO: 178093 - DNA, 25 bp, Saccharomyces pastorianus
tatcgagtcagggacgtggtatcct

SEQ ID NO: 178094 - DNA, 25 bp, Saccharomyces pastorianus
gtaatcatctacctgatttctctat

SEQ ID NO: 178095 - DNA, 25 bp, Saccharomyces pastorianus
ctaggaaataccatatccaacggaa

SEQ ID NO: 178096 - DNA, 25 bp, Saccharomyces pastorianus
ggttttcaataggtccagggcaact

SEQ ID NO: 178097 - DNA, 25 bp, Saccharomyces pastorianus
gaaataccatatccaacggaaatta

SEQ ID NO: 178098 - DNA, 25 bp, Saccharomyces pastorianus
ttttcaataggtccagggcaactag

SEQ ID NO: 178099 - DNA, 25 bp, Saccharomyces pastorianus
taaaagtgcgccatattcaaatgct

SEQ ID NO: 178100 - DNA, 25 bp, Saccharomyces pastorianus
tcaataggtccagggcaactaggaa

SEQ ID NO: 178101 - DNA, 25 bp, Saccharomyces pastorianus
gggcttgctttagtgtcggattatt

SEQ ID NO: 178102 - DNA, 25 bp, Saccharomyces pastorianus
gggcaactaggaaataccatatcca

SEQ ID NO: 178103 - DNA, 25 bp, Saccharomyces pastorianus
ggcttgctttagtgtcggattattt

SEQ ID NO: 178104 - DNA, 25 bp, Saccharomyces pastorianus
acggaaattaaaagtgcgccatatt

SEQ ID NO: 178105 - DNA, 25 bp, Saccharomyces pastorianus
gtccagggcaactaggaaataccat

SEQ ID NO: 178106 - DNA, 25 bp, Saccharomyces pastorianus
gaatttgaggtaattgttgggattc

SEQ ID NO: 178107 - DNA, 25 bp, Saccharomyces pastorianus
tgaatttgaggtaattgttgggatt

SEQ ID NO: 178108 - DNA, 25 bp, Saccharomyces pastorianus
tgaggtaattgttgggattccattt

SEQ ID NO: 178109 - DNA, 25 bp, Saccharomyces pastorianus
ttgaggtaattgttgggattccatt

SEQ ID NO: 178110 - DNA, 25 bp, Saccharomyces pastorianus
gtaattgttgggattccatttttga

SEQ ID NO: 178111 - DNA, 25 bp, Saccharomyces pastorianus
gaggtaattgttgggattccatttt

SEQ ID NO: 178112 - DNA, 25 bp, Saccharomyces pastorianus
tttgaggtaattgttgggattccat

SEQ ID NO: 178113 - DNA, 25 bp, Saccharomyces pastorianus
aattgttgggattccatttttgata

SEQ ID NO: 178114 - DNA, 25 bp, Saccharomyces pastorianus
ggtaattgttgggattccatttttg

SEQ ID NO: 178115 - DNA, 25 bp, Saccharomyces pastorianus
taattgttgggattccatttttgat

SEQ ID NO: 178116 - DNA, 25 bp, Saccharomyces pastorianus
atttgaggtaattgttgggattcca

SEQ ID NO: 178117 - DNA, 25 bp, Saccharomyces pastorianus
gacttatttcgtcacttggtataca

SEQ ID NO: 178118 - DNA, 25 bp, Saccharomyces pastorianus
gagaattctgatacagtcgctgata

SEQ ID NO: 178119 - DNA, 25 bp, Saccharomyces pastorianus
agtgaaccattctgtacacctcgtg

SEQ ID NO: 178120 - DNA, 25 bp, Saccharomyces pastorianus
ttgacaatgtcgatggcctactgcc

SEQ ID NO: 178121 - DNA, 25 bp, Saccharomyces pastorianus
gaccagcgaaagatatccccagtga

SEQ ID NO: 178122 - DNA, 25 bp, Saccharomyces pastorianus
ctcccgatcggtacttcagcaaagg

SEQ ID NO: 178123 - DNA, 25 bp, Saccharomyces pastorianus
gtcgctgataaagtccgtgtccatt

SEQ ID NO: 178124 - DNA, 25 bp, Saccharomyces pastorianus
gaccctaatgacgtccacgaagaag

SEQ ID NO: 178125 - DNA, 25 bp, Saccharomyces pastorianus
tattattagatgcactcccgatcgg

SEQ ID NO: 178126 - DNA, 25 bp, Saccharomyces pastorianus
gtacacctcgtgaaaattccgactg

SEQ ID NO: 178127 - DNA, 25 bp, Saccharomyces pastorianus
gtccgtgtccatttgtcttatgtca

SEQ ID NO: 178128 - DNA, 25 bp, Saccharomyces pastorianus
attatttcttcttccgtcttatatt

SEQ ID NO: 178129 - DNA, 25 bp, Saccharomyces pastorianus
ttatttcttcttccgtcttatattt

SEQ ID NO: 178130 - DNA, 25 bp, Saccharomyces pastorianus
tttttattgtcctattacatcatca

SEQ ID NO: 178131 - DNA, 25 bp, Saccharomyces pastorianus
ttcttccgtcttatattttttattg

SEQ ID NO: 178132 - DNA, 25 bp, Saccharomyces pastorianus
tcttcttccgtcttatattttttat

SEQ ID NO: 178133 - DNA, 25 bp, Saccharomyces pastorianus
cgtcttatattttttattgtcctat

SEQ ID NO: 178134 - DNA, 25 bp, Saccharomyces pastorianus
tccgtcttatattttttattgtcct

SEQ ID NO: 178135 - DNA, 25 bp, Saccharomyces pastorianus
ttacgattatttcttcttccgtctt

SEQ ID NO: 178136 - DNA, 25 bp, Saccharomyces pastorianus
acgattatttcttcttccgtcttat

SEQ ID NO: 178137 - DNA, 25 bp, Saccharomyces pastorianus
tacgattatttcttcttccgtctta

SEQ ID NO: 178138 - DNA, 25 bp, Saccharomyces pastorianus
atattttttattgtcctattacatc

SEQ ID NO: 178139 - DNA, 25 bp, Saccharomyces pastorianus
ttgatctcgttctttgtctattggg

SEQ ID NO: 178140 - DNA, 25 bp, Saccharomyces pastorianus
caggcattgcctggcaagtcaataa

SEQ ID NO: 178141 - DNA, 25 bp, Saccharomyces pastorianus
atcgcctgggtttgtggcatgactc

SEQ ID NO: 178142 - DNA, 25 bp, Saccharomyces pastorianus
ggctatgtctagtgttccctatgaa

SEQ ID NO: 178143 - DNA, 25 bp, Saccharomyces pastorianus
gccggtattgtaaacttctactacg

SEQ ID NO: 178144 - DNA, 25 bp, Saccharomyces pastorianus
tccacaacgccggtattgtaaactt

SEQ ID NO: 178145 - DNA, 25 bp, Saccharomyces pastorianus
ttggagagccatcatcgcctgggtt

SEQ ID NO: 178146 - DNA, 25 bp, Saccharomyces pastorianus
gtgttccctatgaaaatcgttgtca

SEQ ID NO: 178147 - DNA, 25 bp, Saccharomyces pastorianus
taactgcatgtctctcctgggcttg

SEQ ID NO: 178148 - DNA, 25 bp, Saccharomyces pastorianus
tccgtcaccaatgcctttattctta

SEQ ID NO: 178149 - DNA, 25 bp, Saccharomyces pastorianus
ctcatttttgatctcgttctttgtc

SEQ ID NO: 178150 - DNA, 25 bp, Saccharomyces pastorianus
agatgaagcagcagaagagccagaa

SEQ ID NO: 178151 - DNA, 25 bp, Saccharomyces pastorianus
aagcagatgaagcagcagatgaagc

SEQ ID NO: 178152 - DNA, 25 bp, Saccharomyces pastorianus
agctgcaccagcgttcttggaggta

SEQ ID NO: 178153 - DNA, 25 bp, Saccharomyces pastorianus
aagctgcagaagaggccttggaaga

SEQ ID NO: 178154 - DNA, 25 bp, Saccharomyces pastorianus
ggagctattagtagatttttctgca

SEQ ID NO: 178155 - DNA, 25 bp, Saccharomyces pastorianus
caccagcgttcttggaggtagcaga

SEQ ID NO: 178156 - DNA, 25 bp, Saccharomyces pastorianus
gaagacttagcagcttcagaagcag

SEQ ID NO: 178157 - DNA, 25 bp, Saccharomyces pastorianus
tttttctgcagaagaggaggccttt

SEQ ID NO: 178158 - DNA, 25 bp, Saccharomyces pastorianus
gcagagccagaagacttggcagagc

SEQ ID NO: 178159 - DNA, 25 bp, Saccharomyces pastorianus
aggcctttgcagaagaggaagctgc

SEQ ID NO: 178160 - DNA, 25 bp, Saccharomyces pastorianus
aagagccagaagacttggcagagct

SEQ ID NO: 178161 - DNA, 25 bp, Saccharomyces pastorianus
tgaagatcctgacttccaagctgcc

SEQ ID NO: 178162 - DNA, 25 bp, Saccharomyces pastorianus
cagtctctgtctcaatttcaagctc

SEQ ID NO: 178163 - DNA, 25 bp, Saccharomyces pastorianus
attttcggtaatccaatctcccaag

SEQ ID NO: 178164 - DNA, 25 bp, Saccharomyces pastorianus
aaaggctacgcgaagagaggtctat

SEQ ID NO: 178165 - DNA, 25 bp, Saccharomyces pastorianus
ccagcgtactacgacattttcggta

SEQ ID NO: 178166 - DNA, 25 bp, Saccharomyces pastorianus
aggccctagaggagagcagaattac

SEQ ID NO: 178167 - DNA, 25 bp, Saccharomyces pastorianus
acagagctgctaggccaaggccaag

SEQ ID NO: 178168 - DNA, 25 bp, Saccharomyces pastorianus
cttccaagctgccttacaactaagt

SEQ ID NO: 178169 - DNA, 25 bp, Saccharomyces pastorianus
aacaaggagcaacccacacgattct

SEQ ID NO: 178170 - DNA, 25 bp, Saccharomyces pastorianus
aacgtagaagagaactggcccagta

SEQ ID NO: 178171 - DNA, 25 bp, Saccharomyces pastorianus
ttctccctcttaccaggacgatttg

SEQ ID NO: 178172 - DNA, 25 bp, Saccharomyces pastorianus
aaacagcatacttccgatactacag

SEQ ID NO: 178173 - DNA, 25 bp, Saccharomyces pastorianus
agtaacatctgatcctgattctgag

SEQ ID NO: 178174 - DNA, 25 bp, Saccharomyces pastorianus
agctctcaaaacacttcattacgat

SEQ ID NO: 178175 - DNA, 25 bp, Saccharomyces pastorianus
ccctctgtcgaggacatttctgaag

SEQ ID NO: 178176 - DNA, 25 bp, Saccharomyces pastorianus
gattacttattagtgtttctgatct

SEQ ID NO: 178177 - DNA, 25 bp, Saccharomyces pastorianus
gtgatcgaaattgaccacatgattg

SEQ ID NO: 178178 - DNA, 25 bp, Saccharomyces pastorianus
aagcaacttgatgacgccaaagcat

SEQ ID NO: 178179 - DNA, 25 bp, Saccharomyces pastorianus
aagtgaaattaattccttacagagc

SEQ ID NO: 178180 - DNA, 25 bp, Saccharomyces pastorianus
ggaccactagtgaagaagacatttt

SEQ ID NO: 178181 - DNA, 25 bp, Saccharomyces pastorianus
gccaaagcatctatttcttcgttaa

SEQ ID NO: 178182 - DNA, 25 bp, Saccharomyces pastorianus
cacatgattgaaacaggcccctctg

SEQ ID NO: 178183 - DNA, 25 bp, Saccharomyces pastorianus
caaagcagtcttcattcgtaccata

SEQ ID NO: 178184 - DNA, 25 bp, Saccharomyces pastorianus
gtcttcattcgtaccatatgttggc

SEQ ID NO: 178185 - DNA, 25 bp, Saccharomyces pastorianus
aaagcagtcttcattcgtaccatat

SEQ ID NO: 178186 - DNA, 25 bp, Saccharomyces pastorianus
aagcagtcttcattcgtaccatatg

SEQ ID NO: 178187 - DNA, 25 bp, Saccharomyces pastorianus
cttcattcgtaccatatgttggcca

SEQ ID NO: 178188 - DNA, 25 bp, Saccharomyces pastorianus
ttcattcgtaccatatgttggccag

SEQ ID NO: 178189 - DNA, 25 bp, Saccharomyces pastorianus
gcagtcttcattcgtaccatatgtt

SEQ ID NO: 178190 - DNA, 25 bp, Saccharomyces pastorianus
agtcttcattcgtaccatatgttgg

SEQ ID NO: 178191 - DNA, 25 bp, Saccharomyces pastorianus
agcagtcttcattcgtaccatatgt

SEQ ID NO: 178192 - DNA, 25 bp, Saccharomyces pastorianus
gcaaagcagtcttcattcgtaccat

SEQ ID NO: 178193 - DNA, 25 bp, Saccharomyces pastorianus
cattcgtaccatatgttggccagac

SEQ ID NO: 178194 - DNA, 25 bp, Saccharomyces pastorianus
tcagaatccgactcgagctcaagct

SEQ ID NO: 178195 - DNA, 25 bp, Saccharomyces pastorianus
tagcgactcttcgtcagattcggat

SEQ ID NO: 178196 - DNA, 25 bp, Saccharomyces pastorianus
agtagttcctccgactcagaatccg

SEQ ID NO: 178197 - DNA, 25 bp, Saccharomyces pastorianus
actccgactccgattctgaaacaaa

SEQ ID NO: 178198 - DNA, 25 bp, Saccharomyces pastorianus
agctcaagctctggctctgggtctg

SEQ ID NO: 178199 - DNA, 25 bp, Saccharomyces pastorianus
ggtctggctctagttctagttctag

SEQ ID NO: 178200 - DNA, 25 bp, Saccharomyces pastorianus
gactgaaccagaatcttcatcctct

SEQ ID NO: 178201 - DNA, 25 bp, Saccharomyces pastorianus
tagctctagcgagtcttcctccgaa

SEQ ID NO: 178202 - DNA, 25 bp, Saccharomyces pastorianus
aagctccagtgagtcctcttcatct

SEQ ID NO: 178203 - DNA, 25 bp, Saccharomyces pastorianus
aatcggactcgagctcaagttctag

SEQ ID NO: 178204 - DNA, 25 bp, Saccharomyces pastorianus
ttcctcgtcagattcaagctccagt

SEQ ID NO: 178205 - DNA, 25 bp, Saccharomyces pastorianus
tctcactttccactccatcacccat

SEQ ID NO: 178206 - DNA, 25 bp, Saccharomyces pastorianus
cactttccactccatcacccatctc

SEQ ID NO: 178207 - DNA, 25 bp, Saccharomyces pastorianus
aatctcactttccactccatcaccc

SEQ ID NO: 178208 - DNA, 25 bp, Saccharomyces pastorianus
actttccactccatcacccatctct

SEQ ID NO: 178209 - DNA, 25 bp, Saccharomyces pastorianus
tcactttccactccatcacccatct

SEQ ID NO: 178210 - DNA, 25 bp, Saccharomyces pastorianus
ctaatctcactttccactccatcac

SEQ ID NO: 178211 - DNA, 25 bp, Saccharomyces pastorianus
taatctcactttccactccatcacc

SEQ ID NO: 178212 - DNA, 25 bp, Saccharomyces pastorianus
atctcactttccactccatcaccca

SEQ ID NO: 178213 - DNA, 25 bp, Saccharomyces pastorianus
ccatcacccatctctcaccatcagt

SEQ ID NO: 178214 - DNA, 25 bp, Saccharomyces pastorianus
cctaatctcactttccactccatca

SEQ ID NO: 178215 - DNA, 25 bp, Saccharomyces pastorianus
tttccactccatcacccatctctca

SEQ ID NO: 178216 - DNA, 25 bp, Saccharomyces pastorianus
tcgttttcttcgtcatcctcctcgt

SEQ ID NO: 178217 - DNA, 25 bp, Saccharomyces pastorianus
ttatcctcgtcctcatcgttttctt

SEQ ID NO: 178218 - DNA, 25 bp, Saccharomyces pastorianus
ttcatgcacattatcctcgtcctca

SEQ ID NO: 178219 - DNA, 25 bp, Saccharomyces pastorianus
agcatcatcatatcgagatcgttct

SEQ ID NO: 178220 - DNA, 25 bp, Saccharomyces pastorianus
tgttctcttgtatgtgttcccgttc

SEQ ID NO: 178221 - DNA, 25 bp, Saccharomyces pastorianus
atgtgttcccgttcatgcacattat

SEQ ID NO: 178222 - DNA, 25 bp, Saccharomyces pastorianus
tctggtcgagtgtttcctctgcggg

SEQ ID NO: 178223 - DNA, 25 bp, Saccharomyces pastorianus
cctctgcaccaaatagcatcatcat

SEQ ID NO: 178224 - DNA, 25 bp, Saccharomyces pastorianus
agatcgttctggtcgagtgtttcct

SEQ ID NO: 178225 - DNA, 25 bp, Saccharomyces pastorianus
gcaccaccttgttctcttgtatgtg

SEQ ID NO: 178226 - DNA, 25 bp, Saccharomyces pastorianus
atcaagttcgcgcaccaccttgttc

SEQ ID NO: 178227 - DNA, 25 bp, Saccharomyces pastorianus
gacgctgccatcaaagccgccggta

SEQ ID NO: 178228 - DNA, 25 bp, Saccharomyces pastorianus
taaggaatacgttgtcgaagacggt

SEQ ID NO: 178229 - DNA, 25 bp, Saccharomyces pastorianus
aaggacgacgctgccatcaaagccg

SEQ ID NO: 178230 - DNA, 25 bp, Saccharomyces pastorianus
ttgaatacaaggacgacgctgccat

SEQ ID NO: 178231 - DNA, 25 bp, Saccharomyces pastorianus
gctgccatcaaagccgccggtaagt

SEQ ID NO: 178232 - DNA, 25 bp, Saccharomyces pastorianus
gatgcaaaagggtaaggaatacgtt

SEQ ID NO: 178233 - DNA, 25 bp, Saccharomyces pastorianus
gaatacaaggacgacgctgccatca

SEQ ID NO: 178234 - DNA, 25 bp, Saccharomyces pastorianus
atacgttgtcgaagacggtgacgtt

SEQ ID NO: 178235 - DNA, 25 bp, Saccharomyces pastorianus
gcccaagttatgaagtgtgaagata

SEQ ID NO: 178236 - DNA, 25 bp, Saccharomyces pastorianus
atacaaggacgacgctgccatcaaa

SEQ ID NO: 178237 - DNA, 25 bp, Saccharomyces pastorianus
agtgtgaagatatccttgaatacaa

SEQ ID NO: 178238 - DNA, 25 bp, Saccharomyces pastorianus
aaaatgagtgcatattcacaaagac

SEQ ID NO: 178239 - DNA, 25 bp, Saccharomyces pastorianus
gtcaagtctgctctatttatacaaa

SEQ ID NO: 178240 - DNA, 25 bp, Saccharomyces pastorianus
gatataagccctactaggaagaaaa

SEQ ID NO: 178241 - DNA, 25 bp, Saccharomyces pastorianus
ctgatataagccctactaggaagaa

SEQ ID NO: 178242 - DNA, 25 bp, Saccharomyces pastorianus
aatgagtgcatattcacaaagacag

SEQ ID NO: 178243 - DNA, 25 bp, Saccharomyces pastorianus
gtctgctctatttatacaaattcct

SEQ ID NO: 178244 - DNA, 25 bp, Saccharomyces pastorianus
tcaagtctgctctatttatacaaat

SEQ ID NO: 178245 - DNA, 25 bp, Saccharomyces pastorianus
agtctgctctatttatacaaattcc

SEQ ID NO: 178246 - DNA, 25 bp, Saccharomyces pastorianus
gggtcaagtctgctctatttataca

SEQ ID NO: 178247 - DNA, 25 bp, Saccharomyces pastorianus
ggtcaagtctgctctatttatacaa

SEQ ID NO: 178248 - DNA, 25 bp, Saccharomyces pastorianus
caagtctgctctatttatacaaatt

SEQ ID NO: 178249 - DNA, 25 bp, Saccharomyces pastorianus
gtgaatctacacattcagcccaaga

SEQ ID NO: 178250 - DNA, 25 bp, Saccharomyces pastorianus
atagcgcgagtgaatctacacattc

SEQ ID NO: 178251 - DNA, 25 bp, Saccharomyces pastorianus
cagcatttgcagcatcaagagatgt

SEQ ID NO: 178252 - DNA, 25 bp, Saccharomyces pastorianus
aagagatgtcaatgggcagcccgaa

SEQ ID NO: 178253 - DNA, 25 bp, Saccharomyces pastorianus
gatgcaagacaacagacacctacag

SEQ ID NO: 178254 - DNA, 25 bp, Saccharomyces pastorianus
aaaggccaaactaaaccatatgact

SEQ ID NO: 178255 - DNA, 25 bp, Saccharomyces pastorianus
gatgaaaatccaattgagccagagg

SEQ ID NO: 178256 - DNA, 25 bp, Saccharomyces pastorianus
gcagcccgaagctttgctaggtgat

SEQ ID NO: 178257 - DNA, 25 bp, Saccharomyces pastorianus
agctttgctaggtgatgaaaatcca

SEQ ID NO: 178258 - DNA, 25 bp, Saccharomyces pastorianus
gacacctacagcatttgcagcatca

SEQ ID NO: 178259 - DNA, 25 bp, Saccharomyces pastorianus
ggttgatttatataatagcgcgagt

SEQ ID NO: 178260 - DNA, 25 bp, Saccharomyces pastorianus
gacaaaatcaccaacgaactcactg

SEQ ID NO: 178261 - DNA, 25 bp, Saccharomyces pastorianus
attttcttcgtaggccaggccactg

SEQ ID NO: 178262 - DNA, 25 bp, Saccharomyces pastorianus
aaaatcaccaacgaactcactgtat

SEQ ID NO: 178263 - DNA, 25 bp, Saccharomyces pastorianus
acaaaatcaccaacgaactcactgt

SEQ ID NO: 178264 - DNA, 25 bp, Saccharomyces pastorianus
taggccaggccactggcctgaatat

SEQ ID NO: 178265 - DNA, 25 bp, Saccharomyces pastorianus
gtaggccaggccactggcctgaata

SEQ ID NO: 178266 - DNA, 25 bp, Saccharomyces pastorianus
gaattttcttcgtaggccaggccac

SEQ ID NO: 178267 - DNA, 25 bp, Saccharomyces pastorianus
aatcaccaacgaactcactgtattc

SEQ ID NO: 178268 - DNA, 25 bp, Saccharomyces pastorianus
aaatcaccaacgaactcactgtatt

SEQ ID NO: 178269 - DNA, 25 bp, Saccharomyces pastorianus
caaaatcaccaacgaactcactgta

SEQ ID NO: 178270 - DNA, 25 bp, Saccharomyces pastorianus
aattttcttcgtaggccaggccact

SEQ ID NO: 178271 - DNA, 25 bp, Saccharomyces pastorianus
accaaatgcattcgcatcattatgc

SEQ ID NO: 178272 - DNA, 25 bp, Saccharomyces pastorianus
taccaaatgcattcgcatcattatg

SEQ ID NO: 178273 - DNA, 25 bp, Saccharomyces pastorianus
actctcacattccactccatgaccc

SEQ ID NO: 178274 - DNA, 25 bp, Saccharomyces pastorianus
tccatgacccatctctcaccatcag

SEQ ID NO: 178275 - DNA, 25 bp, Saccharomyces pastorianus
ctactctcacattccactccatgac

SEQ ID NO: 178276 - DNA, 25 bp, Saccharomyces pastorianus
cagtaccaaatgcattcgcatcatt

SEQ ID NO: 178277 - DNA, 25 bp, Saccharomyces pastorianus
tactctcacattccactccatgacc

SEQ ID NO: 178278 - DNA, 25 bp, Saccharomyces pastorianus
tcagtaccaaatgcattcgcatcat

SEQ ID NO: 178279 - DNA, 25 bp, Saccharomyces pastorianus
catgacccatctctcaccatcagta

SEQ ID NO: 178280 - DNA, 25 bp, Saccharomyces pastorianus
ccatgacccatctctcaccatcagt

SEQ ID NO: 178281 - DNA, 25 bp, Saccharomyces pastorianus
cctactctcacattccactccatga

SEQ ID NO: 178282 - DNA, 25 bp, Saccharomyces pastorianus
gtgtattcagtagcgacgccgctaa

SEQ ID NO: 178283 - DNA, 25 bp, Saccharomyces pastorianus
agtgtattcagtagcgacgccgcta

SEQ ID NO: 178284 - DNA, 25 bp, Saccharomyces pastorianus
tagtgtattcagtagcgacgccgct

SEQ ID NO: 178285 - DNA, 25 bp, Saccharomyces pastorianus
gacgccgctaacagtggtcgtagca

SEQ ID NO: 178286 - DNA, 25 bp, Saccharomyces pastorianus
gtattcagtagcgacgccgctaaca

SEQ ID NO: 178287 - DNA, 25 bp, Saccharomyces pastorianus
attcagtagcgacgccgctaacagt

SEQ ID NO: 178288 - DNA, 25 bp, Saccharomyces pastorianus
acgccgctaacagtggtcgtagcag

SEQ ID NO: 178289 - DNA, 25 bp, Saccharomyces pastorianus
cgtagcagtagaaacgatggcagga

SEQ ID NO: 178290 - DNA, 25 bp, Saccharomyces pastorianus
ggtcgtagcagtagaaacgatggca

SEQ ID NO: 178291 - DNA, 25 bp, Saccharomyces pastorianus
tgtagtgtattcagtagcgacgccg

SEQ ID NO: 178292 - DNA, 25 bp, Saccharomyces pastorianus
agcgacgccgctaacagtggtcgta

SEQ ID NO: 178293 - DNA, 25 bp, Saccharomyces pastorianus
gtatctttccatttggctccatcgc

SEQ ID NO: 178294 - DNA, 25 bp, Saccharomyces pastorianus
tccatcgccgttgagttgtatttca

SEQ ID NO: 178295 - DNA, 25 bp, Saccharomyces pastorianus
tttctctttcctcctattaactttg

SEQ ID NO: 178296 - DNA, 25 bp, Saccharomyces pastorianus
acttatcattccttatgcctggaga

SEQ ID NO: 178297 - DNA, 25 bp, Saccharomyces pastorianus
attgtcttatacgtgggatactcct

SEQ ID NO: 178298 - DNA, 25 bp, Saccharomyces pastorianus
gggtggattcacgactattgtctta

SEQ ID NO: 178299 - DNA, 25 bp, Saccharomyces pastorianus
tcatttcattactctgctgtttggt

SEQ ID NO: 178300 - DNA, 25 bp, Saccharomyces pastorianus
gctactttgattgctggtatctttc

SEQ ID NO: 178301 - DNA, 25 bp, Saccharomyces pastorianus
agttcactcgtcactattttgatca

SEQ ID NO: 178302 - DNA, 25 bp, Saccharomyces pastorianus
tacatgtttggtttcctctttttct

SEQ ID NO: 178303 - DNA, 25 bp, Saccharomyces pastorianus
ggatactcctcagtcatttcattac

SEQ ID NO: 178304 - DNA, 25 bp, Saccharomyces pastorianus
aagtttctgaccttcgttgaagacg

SEQ ID NO: 178305 - DNA, 25 bp, Saccharomyces pastorianus
agtttctgaccttcgttgaagacga

SEQ ID NO: 178306 - DNA, 25 bp, Saccharomyces pastorianus
tcattcccgtcgtggtcaagaaaaa

SEQ ID NO: 178307 - DNA, 25 bp, Saccharomyces pastorianus
gtttctgaccttcgttgaagacgaa

SEQ ID NO: 178308 - DNA, 25 bp, Saccharomyces pastorianus
attcccgtcgtggtcaagaaaaatg

SEQ ID NO: 178309 - DNA, 25 bp, Saccharomyces pastorianus
cgtcgtggtcaagaaaaatgcacaa

SEQ ID NO: 178310 - DNA, 25 bp, Saccharomyces pastorianus
tggtcaagaaaaatgcacaaaagtt

SEQ ID NO: 178311 - DNA, 25 bp, Saccharomyces pastorianus
tcccgtcgtggtcaagaaaaatgca

SEQ ID NO: 178312 - DNA, 25 bp, Saccharomyces pastorianus
tctgaccttcgttgaagacgaacca

SEQ ID NO: 178313 - DNA, 25 bp, Saccharomyces pastorianus
cattcccgtcgtggtcaagaaaaat

SEQ ID NO: 178314 - DNA, 25 bp, Saccharomyces pastorianus
gtcattcccgtcgtggtcaagaaaa

SEQ ID NO: 178315 - DNA, 25 bp, Saccharomyces pastorianus
agaaagtacattccctataatattt

SEQ ID NO: 178316 - DNA, 25 bp, Saccharomyces pastorianus
gggccctacagaaagtacattccct

SEQ ID NO: 178317 - DNA, 25 bp, Saccharomyces pastorianus
gtcacttaaatacgcttgattatat

SEQ ID NO: 178318 - DNA, 25 bp, Saccharomyces pastorianus
tccaacaatgtggaattggtcactt

SEQ ID NO: 178319 - DNA, 25 bp, Saccharomyces pastorianus
gtacattccctataatattttccaa

SEQ ID NO: 178320 - DNA, 25 bp, Saccharomyces pastorianus
ttccctataatattttccaacaatg

SEQ ID NO: 178321 - DNA, 25 bp, Saccharomyces pastorianus
gccctacagaaagtacattccctat

SEQ ID NO: 178322 - DNA, 25 bp, Saccharomyces pastorianus
tggtcacttaaatacgcttgattat

SEQ ID NO: 178323 - DNA, 25 bp, Saccharomyces pastorianus
gtggaattggtcacttaaatacgct

SEQ ID NO: 178324 - DNA, 25 bp, Saccharomyces pastorianus
ggaattggtcacttaaatacgcttg

SEQ ID NO: 178325 - DNA, 25 bp, Saccharomyces pastorianus
aattggtcacttaaatacgcttgat

SEQ ID NO: 178326 - DNA, 25 bp, Saccharomyces pastorianus
gaaagttctttacagatgatgcaaa

SEQ ID NO: 178327 - DNA, 25 bp, Saccharomyces pastorianus
gaaattgctcctgagtatttaacaa

SEQ ID NO: 178328 - DNA, 25 bp, Saccharomyces pastorianus
gtcctcgggagcagatgctgtcaaa

SEQ ID NO: 178329 - DNA, 25 bp, Saccharomyces pastorianus
agaaacaacttcaatcagggagctg

SEQ ID NO: 178330 - DNA, 25 bp, Saccharomyces pastorianus
attatctgccacgaaagggttcaag

SEQ ID NO: 178331 - DNA, 25 bp, Saccharomyces pastorianus
gaggaagaccctctaaacgacccat

SEQ ID NO: 178332 - DNA, 25 bp, Saccharomyces pastorianus
gacagcagtgacaatgacgctcaga

SEQ ID NO: 178333 - DNA, 25 bp, Saccharomyces pastorianus
tgacgctcagaataagaatgctagt

SEQ ID NO: 178334 - DNA, 25 bp, Saccharomyces pastorianus
agatctttatcattgccgtcctcgg

SEQ ID NO: 178335 - DNA, 25 bp, Saccharomyces pastorianus
gaattcttccaatgcttcagagtat

SEQ ID NO: 178336 - DNA, 25 bp, Saccharomyces pastorianus
aaacgacccattcgcttcaagtaga

SEQ ID NO: 178337 - DNA, 25 bp, Saccharomyces pastorianus
gtgtcgtcgccatcgcttccggtgc

SEQ ID NO: 178338 - DNA, 25 bp, Saccharomyces pastorianus
ggtgtcgtcgccatcgcttccggtg

SEQ ID NO: 178339 - DNA, 25 bp, Saccharomyces pastorianus
atggtcaaattagcttctatcgccg

SEQ ID NO: 178340 - DNA, 25 bp, Saccharomyces pastorianus
ggtcaaattagcttctatcgccgct

SEQ ID NO: 178341 - DNA, 25 bp, Saccharomyces pastorianus
ccaccaccaccctagctcaatccga

SEQ ID NO: 178342 - DNA, 25 bp, Saccharomyces pastorianus
tgtcgtcgccatcgcttccggtgcc

SEQ ID NO: 178343 - DNA, 25 bp, Saccharomyces pastorianus
tggtgtcgtcgccatcgcttccggt

SEQ ID NO: 178344 - DNA, 25 bp, Saccharomyces pastorianus
tcgtcgccatcgcttccggtgccgc

SEQ ID NO: 178345 - DNA, 25 bp, Saccharomyces pastorianus
gtcgccatcgcttccggtgccgccg

SEQ ID NO: 178346 - DNA, 25 bp, Saccharomyces pastorianus
tcgccatcgcttccggtgccgccgc

SEQ ID NO: 178347 - DNA, 25 bp, Saccharomyces pastorianus
atcgcttccggtgccgccgccgcca

SEQ ID NO: 178348 - DNA, 25 bp, Saccharomyces pastorianus
taagaaatgattctcatcactccat

SEQ ID NO: 178349 - DNA, 25 bp, Saccharomyces pastorianus
cactccatctcatcctatatattta

SEQ ID NO: 178350 - DNA, 25 bp, Saccharomyces pastorianus
atgattctcatcactccatctcatc

SEQ ID NO: 178351 - DNA, 25 bp, Saccharomyces pastorianus
tcactccatctcatcctatatattt

SEQ ID NO: 178352 - DNA, 25 bp, Saccharomyces pastorianus
aatgattctcatcactccatctcat

SEQ ID NO: 178353 - DNA, 25 bp, Saccharomyces pastorianus
ctcatcctatatatttaacagcttt

SEQ ID NO: 178354 - DNA, 25 bp, Saccharomyces pastorianus
actccatctcatcctatatatttaa

SEQ ID NO: 178355 - DNA, 25 bp, Saccharomyces pastorianus
atcactccatctcatcctatatatt

SEQ ID NO: 178356 - DNA, 25 bp, Saccharomyces pastorianus
aaatgattctcatcactccatctca

SEQ ID NO: 178357 - DNA, 25 bp, Saccharomyces pastorianus
gaaatgattctcatcactccatctc

SEQ ID NO: 178358 - DNA, 25 bp, Saccharomyces pastorianus
ccatctcatcctatatatttaacag

SEQ ID NO: 178359 - DNA, 25 bp, Saccharomyces pastorianus
tagtattatgtatacagcatatact

SEQ ID NO: 178360 - DNA, 25 bp, Saccharomyces pastorianus
agtattatgtatacagcatatacta

SEQ ID NO: 178361 - DNA, 25 bp, Saccharomyces pastorianus
ctatagtattatgtatacagcatat

SEQ ID NO: 178362 - DNA, 25 bp, Saccharomyces pastorianus
atgatcaaggctatagtattatgta

SEQ ID NO: 178363 - DNA, 25 bp, Saccharomyces pastorianus
atagtattatgtatacagcatatac

SEQ ID NO: 178364 - DNA, 25 bp, Saccharomyces pastorianus
atcaaggctatagtattatgtatac

SEQ ID NO: 178365 - DNA, 25 bp, Saccharomyces pastorianus
gctatagtattatgtatacagcata

SEQ ID NO: 178366 - DNA, 25 bp, Saccharomyces pastorianus
tgatcaaggctatagtattatgtat

SEQ ID NO: 178367 - DNA, 25 bp, Saccharomyces pastorianus
gatcaaggctatagtattatgtata

SEQ ID NO: 178368 - DNA, 25 bp, Saccharomyces pastorianus
tatagtattatgtatacagcatata

SEQ ID NO: 178369 - DNA, 25 bp, Saccharomyces pastorianus
ggctatagtattatgtatacagcat

SEQ ID NO: 178370 - DNA, 25 bp, Saccharomyces pastorianus
gcagccaatctgtctccaaggagga

SEQ ID NO: 178371 - DNA, 25 bp, Saccharomyces pastorianus
aaatacttggaaggctctgtcacag

SEQ ID NO: 178372 - DNA, 25 bp, Saccharomyces pastorianus
gttagaattatctttcgaccgacag

SEQ ID NO: 178373 - DNA, 25 bp, Saccharomyces pastorianus
acagttggacagtattgcacagtta

SEQ ID NO: 178374 - DNA, 25 bp, Saccharomyces pastorianus
ggccgaaattgacaccttgaaaggt

SEQ ID NO: 178375 - DNA, 25 bp, Saccharomyces pastorianus
ttaataaatcagcaaccccatcgcc

SEQ ID NO: 178376 - DNA, 25 bp, Saccharomyces pastorianus
cttgaaaggtcacagcagccaatct

SEQ ID NO: 178377 - DNA, 25 bp, Saccharomyces pastorianus
gaactgctaaccactaatgctatct

SEQ ID NO: 178378 - DNA, 25 bp, Saccharomyces pastorianus
atcatcgggaaataccatgtcgcat

SEQ ID NO: 178379 - DNA, 25 bp, Saccharomyces pastorianus
aaaaggatccgtaagctcatcatcg

SEQ ID NO: 178380 - DNA, 25 bp, Saccharomyces pastorianus
tctgtcacagagctcggaattaata

SEQ ID NO: 178381 - DNA, 25 bp, Saccharomyces pastorianus
gacattaaacgggttcgcttctaca

SEQ ID NO: 178382 - DNA, 25 bp, Saccharomyces pastorianus
tagcgatgtgctcaggtcgatttct

SEQ ID NO: 178383 - DNA, 25 bp, Saccharomyces pastorianus
cgggttcgcttctacattgtctagc

SEQ ID NO: 178384 - DNA, 25 bp, Saccharomyces pastorianus
ctacattgtctagcgatgtgctcag

SEQ ID NO: 178385 - DNA, 25 bp, Saccharomyces pastorianus
gtctagcgatgtgctcaggtcgatt

SEQ ID NO: 178386 - DNA, 25 bp, Saccharomyces pastorianus
cattaaacgggttcgcttctacatt

SEQ ID NO: 178387 - DNA, 25 bp, Saccharomyces pastorianus
taaacgggttcgcttctacattgtc

SEQ ID NO: 178388 - DNA, 25 bp, Saccharomyces pastorianus
gcttctacattgtctagcgatgtgc

SEQ ID NO: 178389 - DNA, 25 bp, Saccharomyces pastorianus
cattgtctagcgatgtgctcaggtc

SEQ ID NO: 178390 - DNA, 25 bp, Saccharomyces pastorianus
aacgggttcgcttctacattgtcta

SEQ ID NO: 178391 - DNA, 25 bp, Saccharomyces pastorianus
ggttcgcttctacattgtctagcga

SEQ ID NO: 178392 - DNA, 25 bp, Saccharomyces pastorianus
gtcggtccgaagacgtactagaaga

SEQ ID NO: 178393 - DNA, 25 bp, Saccharomyces pastorianus
agacgtactagaagatgggcaaatt

SEQ ID NO: 178394 - DNA, 25 bp, Saccharomyces pastorianus
atgggcaaattggagaacctggaca

SEQ ID NO: 178395 - DNA, 25 bp, Saccharomyces pastorianus
gcaaattggagaacctggacaagaa

SEQ ID NO: 178396 - DNA, 25 bp, Saccharomyces pastorianus
gcagtcggtccgaagacgtactaga

SEQ ID NO: 178397 - DNA, 25 bp, Saccharomyces pastorianus
ctgtcgaaggacatgaacaagtcgg

SEQ ID NO: 178398 - DNA, 25 bp, Saccharomyces pastorianus
aagaggtaaccggtcaaggcagtcg

SEQ ID NO: 178399 - DNA, 25 bp, Saccharomyces pastorianus
aaggcagtcggtccgaagacgtact

SEQ ID NO: 178400 - DNA, 25 bp, Saccharomyces pastorianus
cgaaggacatgaacaagtcggacac

SEQ ID NO: 178401 - DNA, 25 bp, Saccharomyces pastorianus
gtaaccggtcaaggcagtcggtccg

SEQ ID NO: 178402 - DNA, 25 bp, Saccharomyces pastorianus
cgaagacgtactagaagatgggcaa

SEQ ID NO: 178403 - DNA, 25 bp, Saccharomyces pastorianus
catttacccataaagtccatcatta

SEQ ID NO: 178404 - DNA, 25 bp, Saccharomyces pastorianus
ttacccataaagtccatcattatcc

SEQ ID NO: 178405 - DNA, 25 bp, Saccharomyces pastorianus
taccacttttacgccatatactaac

SEQ ID NO: 178406 - DNA, 25 bp, Saccharomyces pastorianus
ataccacttttacgccatatactaa

SEQ ID NO: 178407 - DNA, 25 bp, Saccharomyces pastorianus
tataccacttttacgccatatacta

SEQ ID NO: 178408 - DNA, 25 bp, Saccharomyces pastorianus
ttataccacttttacgccatatact

SEQ ID NO: 178409 - DNA, 25 bp, Saccharomyces pastorianus
tacccataaagtccatcattatcca

SEQ ID NO: 178410 - DNA, 25 bp, Saccharomyces pastorianus
cgttataccacttttacgccatata

SEQ ID NO: 178411 - DNA, 25 bp, Saccharomyces pastorianus
atttacccataaagtccatcattat

SEQ ID NO: 178412 - DNA, 25 bp, Saccharomyces pastorianus
cccataaagtccatcattatccaca

SEQ ID NO: 178413 - DNA, 25 bp, Saccharomyces pastorianus
gttataccacttttacgccatatac

SEQ ID NO: 178414 - DNA, 25 bp, Saccharomyces pastorianus
cacaccctctgtggcagtacaggcc

SEQ ID NO: 178415 - DNA, 25 bp, Saccharomyces pastorianus
accctctgtggcagtacaggcccca

SEQ ID NO: 178416 - DNA, 25 bp, Saccharomyces pastorianus
gcagacacaccctctgtggcagtac

SEQ ID NO: 178417 - DNA, 25 bp, Saccharomyces pastorianus
acacaccctctgtggcagtacaggc

SEQ ID NO: 178418 - DNA, 25 bp, Saccharomyces pastorianus
atggcagacacaccctctgtggcag

SEQ ID NO: 178419 - DNA, 25 bp, Saccharomyces pastorianus
ctgtggcagtacaggccccaccggg

SEQ ID NO: 178420 - DNA, 25 bp, Saccharomyces pastorianus
cagacacaccctctgtggcagtaca

SEQ ID NO: 178421 - DNA, 25 bp, Saccharomyces pastorianus
ggcagacacaccctctgtggcagta

SEQ ID NO: 178422 - DNA, 25 bp, Saccharomyces pastorianus
tggcagacacaccctctgtggcagt

SEQ ID NO: 178423 - DNA, 25 bp, Saccharomyces pastorianus
gacacaccctctgtggcagtacagg

SEQ ID NO: 178424 - DNA, 25 bp, Saccharomyces pastorianus
agacacaccctctgtggcagtacag

SEQ ID NO: 178425 - DNA, 25 bp, Saccharomyces pastorianus
gaagcaaccagttcaactgctccaa

SEQ ID NO: 178426 - DNA, 25 bp, Saccharomyces pastorianus
gcaaccagctcaaccagctcaacta

SEQ ID NO: 178427 - DNA, 25 bp, Saccharomyces pastorianus
actgctccaaccagttcaactgacg

SEQ ID NO: 178428 - DNA, 25 bp, Saccharomyces pastorianus
gctccaaccagttcaactgacgcaa

SEQ ID NO: 178429 - DNA, 25 bp, Saccharomyces pastorianus
agttcaactgctccaaccagttcaa

SEQ ID NO: 178430 - DNA, 25 bp, Saccharomyces pastorianus
caactgctccaaccagttcaactga

SEQ ID NO: 178431 - DNA, 25 bp, Saccharomyces pastorianus
acgcaaccagctcaaccagctcaac

SEQ ID NO: 178432 - DNA, 25 bp, Saccharomyces pastorianus
gacgcaaccagctcaaccagctcaa

SEQ ID NO: 178433 - DNA, 25 bp, Saccharomyces pastorianus
ttcaactgctccaaccagttcaact

SEQ ID NO: 178434 - DNA, 25 bp, Saccharomyces pastorianus
aaccagttcaactgaagcaaccagt

SEQ ID NO: 178435 - DNA, 25 bp, Saccharomyces pastorianus
tcaaccagctcaactacttcaactg

SEQ ID NO: 178436 - DNA, 25 bp, Saccharomyces pastorianus
ttccagtgaggatgctgctgtttca

SEQ ID NO: 178437 - DNA, 25 bp, Saccharomyces pastorianus
attactgctctacaattctcacatc

SEQ ID NO: 178438 - DNA, 25 bp, Saccharomyces pastorianus
gggacacacggcaagggttaatgat

SEQ ID NO: 178439 - DNA, 25 bp, Saccharomyces pastorianus
ggctcatacgagcacaacattttgt

SEQ ID NO: 178440 - DNA, 25 bp, Saccharomyces pastorianus
gatgtggatattcaccccaccaata

SEQ ID NO: 178441 - DNA, 25 bp, Saccharomyces pastorianus
gatgcagcaaagacaccacatttta

SEQ ID NO: 178442 - DNA, 25 bp, Saccharomyces pastorianus
gatgactctaagaaatgctgctgta

SEQ ID NO: 178443 - DNA, 25 bp, Saccharomyces pastorianus
tatttcattttcaagcccattcgtt

SEQ ID NO: 178444 - DNA, 25 bp, Saccharomyces pastorianus
agtcatcagggctctattactgctc

SEQ ID NO: 178445 - DNA, 25 bp, Saccharomyces pastorianus
ggatccaatgacgagcacatcagaa

SEQ ID NO: 178446 - DNA, 25 bp, Saccharomyces pastorianus
gaagatacctagtttctggatccaa

SEQ ID NO: 178447 - DNA, 25 bp, Saccharomyces pastorianus
ttgaagattcgtttttgtggattcc

SEQ ID NO: 178448 - DNA, 25 bp, Saccharomyces pastorianus
aattatcgtctgatttttacagggt

SEQ ID NO: 178449 - DNA, 25 bp, Saccharomyces pastorianus
aaatccacgaggaaaatctctagta

SEQ ID NO: 178450 - DNA, 25 bp, Saccharomyces pastorianus
atcccaaaaattatcgtctgatttt

SEQ ID NO: 178451 - DNA, 25 bp, Saccharomyces pastorianus
tcgtctgatttttacagggtaatac

SEQ ID NO: 178452 - DNA, 25 bp, Saccharomyces pastorianus
aaattatcgtctgatttttacaggg

SEQ ID NO: 178453 - DNA, 25 bp, Saccharomyces pastorianus
tggaatcccaaaaattatcgtctga

SEQ ID NO: 178454 - DNA, 25 bp, Saccharomyces pastorianus
tatcgtctgatttttacagggtaat

SEQ ID NO: 178455 - DNA, 25 bp, Saccharomyces pastorianus
attatcgtctgatttttacagggta

SEQ ID NO: 178456 - DNA, 25 bp, Saccharomyces pastorianus
gtctgatttttacagggtaatacta

SEQ ID NO: 178457 - DNA, 25 bp, Saccharomyces pastorianus
catcatgcaaaattgaagattcgtt

SEQ ID NO: 178458 - DNA, 25 bp, Saccharomyces pastorianus
tcacttggcccaatactacatgttc

SEQ ID NO: 178459 - DNA, 25 bp, Saccharomyces pastorianus
cagattaaagccagccatctccagt

SEQ ID NO: 178460 - DNA, 25 bp, Saccharomyces pastorianus
tgaaacctacccagtcgaagttgct

SEQ ID NO: 178461 - DNA, 25 bp, Saccharomyces pastorianus
aaagccagccatctccagtgctcta

SEQ ID NO: 178462 - DNA, 25 bp, Saccharomyces pastorianus
agattaaagccagccatctccagtg

SEQ ID NO: 178463 - DNA, 25 bp, Saccharomyces pastorianus
attaaagccagccatctccagtgct

SEQ ID NO: 178464 - DNA, 25 bp, Saccharomyces pastorianus
gattaaagccagccatctccagtgc

SEQ ID NO: 178465 - DNA, 25 bp, Saccharomyces pastorianus
tgaccagaatgatcaccggtgttcc

SEQ ID NO: 178466 - DNA, 25 bp, Saccharomyces pastorianus
taaagccagccatctccagtgctct

SEQ ID NO: 178467 - DNA, 25 bp, Saccharomyces pastorianus
ttaaagccagccatctccagtgctc

SEQ ID NO: 178468 - DNA, 25 bp, Saccharomyces pastorianus
agtgaccagaatgatcaccggtgtt

SEQ ID NO: 178469 - DNA, 25 bp, Saccharomyces pastorianus
taagagatataagaacctaaacggt

SEQ ID NO: 178470 - DNA, 25 bp, Saccharomyces pastorianus
tgggatctgctaaggataaccttac

SEQ ID NO: 178471 - DNA, 25 bp, Saccharomyces pastorianus
ttgtaagtttggtggtaagagatat

SEQ ID NO: 178472 - DNA, 25 bp, Saccharomyces pastorianus
atctgctaaggataaccttaccttt

SEQ ID NO: 178473 - DNA, 25 bp, Saccharomyces pastorianus
tgctaaggataaccttaccttttgt

SEQ ID NO: 178474 - DNA, 25 bp, Saccharomyces pastorianus
gggatctgctaaggataaccttacc

SEQ ID NO: 178475 - DNA, 25 bp, Saccharomyces pastorianus
atgggatctgctaaggataacctta

SEQ ID NO: 178476 - DNA, 25 bp, Saccharomyces pastorianus
gatctgctaaggataaccttacctt

SEQ ID NO: 178477 - DNA, 25 bp, Saccharomyces pastorianus
ctgctaaggataaccttaccttttg

SEQ ID NO: 178478 - DNA, 25 bp, Saccharomyces pastorianus
tctgctaaggataaccttacctttt

SEQ ID NO: 178479 - DNA, 25 bp, Saccharomyces pastorianus
ggatctgctaaggataaccttacct

SEQ ID NO: 178480 - DNA, 25 bp, Saccharomyces pastorianus
attgacatggaggtctacggacggt

SEQ ID NO: 178481 - DNA, 25 bp, Saccharomyces pastorianus
gttcacacagttgtcttatccacta

SEQ ID NO: 178482 - DNA, 25 bp, Saccharomyces pastorianus
cattccggagctgccatttttgaga

SEQ ID NO: 178483 - DNA, 25 bp, Saccharomyces pastorianus
tacggacggtgacaaggttcacaca

SEQ ID NO: 178484 - DNA, 25 bp, Saccharomyces pastorianus
ttgacaagttacaagctacccctgc

SEQ ID NO: 178485 - DNA, 25 bp, Saccharomyces pastorianus
tgacccttcaacaaatcatctcacg

SEQ ID NO: 178486 - DNA, 25 bp, Saccharomyces pastorianus
gtttcacccgcagaattgacatgga

SEQ ID NO: 178487 - DNA, 25 bp, Saccharomyces pastorianus
aaatgaggatgtttcacccgcagaa

SEQ ID NO: 178488 - DNA, 25 bp, Saccharomyces pastorianus
gcccaaaccgcaacgtcatatgtta

SEQ ID NO: 178489 - DNA, 25 bp, Saccharomyces pastorianus
ctacccctgcttccagtgaaaaaat

SEQ ID NO: 178490 - DNA, 25 bp, Saccharomyces pastorianus
aaatgaggttgtgcccaaaccgcaa

SEQ ID NO: 178491 - DNA, 25 bp, Saccharomyces pastorianus
gaatatcgacaactccattactaat

SEQ ID NO: 178492 - DNA, 25 bp, Saccharomyces pastorianus
tttttgatgcaaaggcgtccaattc

SEQ ID NO: 178493 - DNA, 25 bp, Saccharomyces pastorianus
aaggcgtccaattcggtaatcaaga

SEQ ID NO: 178494 - DNA, 25 bp, Saccharomyces pastorianus
ttttgaggaaatacacgccaccatt

SEQ ID NO: 178495 - DNA, 25 bp, Saccharomyces pastorianus
cgacatgctccgtttttgcaaacat

SEQ ID NO: 178496 - DNA, 25 bp, Saccharomyces pastorianus
aaattatgcgatgcgacatgctccg

SEQ ID NO: 178497 - DNA, 25 bp, Saccharomyces pastorianus
tacacgccaccattaggtaaattgg

SEQ ID NO: 178498 - DNA, 25 bp, Saccharomyces pastorianus
tgcaaacattgcaaagccagttatt

SEQ ID NO: 178499 - DNA, 25 bp, Saccharomyces pastorianus
gacggcgattactacaattatcatc

SEQ ID NO: 178500 - DNA, 25 bp, Saccharomyces pastorianus
aattggcaggcgagagatctgcttc

SEQ ID NO: 178501 - DNA, 25 bp, Saccharomyces pastorianus
gatctgcttcagacggcgattacta

SEQ ID NO: 178502 - DNA, 25 bp, Saccharomyces pastorianus
tcctgttttccattaaaatctcaag

SEQ ID NO: 178503 - DNA, 25 bp, Saccharomyces pastorianus
tctcaagaaccgaccccttgactgt

SEQ ID NO: 178504 - DNA, 25 bp, Saccharomyces pastorianus
gtgctcatatatcaagtatcggttt

SEQ ID NO: 178505 - DNA, 25 bp, Saccharomyces pastorianus
accccttgactgtgctcatatatca

SEQ ID NO: 178506 - DNA, 25 bp, Saccharomyces pastorianus
agacctgtatgtgcaactttcctgt

SEQ ID NO: 178507 - DNA, 25 bp, Saccharomyces pastorianus
gcaagcaaagaaaagcagacctgta

SEQ ID NO: 178508 - DNA, 25 bp, Saccharomyces pastorianus
aagtcccctaattgtgataattgca

SEQ ID NO: 178509 - DNA, 25 bp, Saccharomyces pastorianus
gataattgcaagaacgacagtcaga

SEQ ID NO: 178510 - DNA, 25 bp, Saccharomyces pastorianus
agtatcgttgtctggagcaagcaaa

SEQ ID NO: 178511 - DNA, 25 bp, Saccharomyces pastorianus
gttttagttctaagtatcgttgtct

SEQ ID NO: 178512 - DNA, 25 bp, Saccharomyces pastorianus
atgtgcaactttcctgttttccatt

SEQ ID NO: 178513 - DNA, 25 bp, Saccharomyces pastorianus
gaagggctatgtctctaaggaaact

SEQ ID NO: 178514 - DNA, 25 bp, Saccharomyces pastorianus
gtgagattgagtatgtcccctttga

SEQ ID NO: 178515 - DNA, 25 bp, Saccharomyces pastorianus
ccaagaaggattatgtcgccggaat

SEQ ID NO: 178516 - DNA, 25 bp, Saccharomyces pastorianus
gcaaccgcaggagtttacgtgacat

SEQ ID NO: 178517 - DNA, 25 bp, Saccharomyces pastorianus
ggatatcacctaacaagacagatgg

SEQ ID NO: 178518 - DNA, 25 bp, Saccharomyces pastorianus
aaaagcaaccgcaggagtttacgtg

SEQ ID NO: 178519 - DNA, 25 bp, Saccharomyces pastorianus
agtttttgaaaccacctatgaggat

SEQ ID NO: 178520 - DNA, 25 bp, Saccharomyces pastorianus
gtatacaagtaacaccaagaaggat

SEQ ID NO: 178521 - DNA, 25 bp, Saccharomyces pastorianus
tgaggacgacaagccaaaaagagtt

SEQ ID NO: 178522 - DNA, 25 bp, Saccharomyces pastorianus
gaaaccacctatgaggatatcacct

SEQ ID NO: 178523 - DNA, 25 bp, Saccharomyces pastorianus
gagtatgtcccctttgaggacgaca

SEQ ID NO: 178524 - DNA, 25 bp, Saccharomyces pastorianus
catttacccataacgcccacgatta

SEQ ID NO: 178525 - DNA, 25 bp, Saccharomyces pastorianus
ttacccataacgcccacgattatcc

SEQ ID NO: 178526 - DNA, 25 bp, Saccharomyces pastorianus
tttacccataacgcccacgattatc

SEQ ID NO: 178527 - DNA, 25 bp, Saccharomyces pastorianus
atttacccataacgcccacgattat

SEQ ID NO: 178528 - DNA, 25 bp, Saccharomyces pastorianus
tacccataacgcccacgattatcca

SEQ ID NO: 178529 - DNA, 25 bp, Saccharomyces pastorianus
ataacgcccacgattatccacattt

SEQ ID NO: 178530 - DNA, 25 bp, Saccharomyces pastorianus
cccataacgcccacgattatccaca

SEQ ID NO: 178531 - DNA, 25 bp, Saccharomyces pastorianus
acccataacgcccacgattatccac

SEQ ID NO: 178532 - DNA, 25 bp, Saccharomyces pastorianus
gccatttacccataacgcccacgat

SEQ ID NO: 178533 - DNA, 25 bp, Saccharomyces pastorianus
aacgcccacgattatccacatttta

SEQ ID NO: 178534 - DNA, 25 bp, Saccharomyces pastorianus
ccataacgcccacgattatccacat

SEQ ID NO: 178535 - DNA, 25 bp, Saccharomyces pastorianus
atatatactagaagttttcctcgag

SEQ ID NO: 178536 - DNA, 25 bp, Saccharomyces pastorianus
tcattccgttttattccttattccg

SEQ ID NO: 178537 - DNA, 25 bp, Saccharomyces pastorianus
tcctcaaaatggaatctgtatttct

SEQ ID NO: 178538 - DNA, 25 bp, Saccharomyces pastorianus
cagtatatatactagaagttttcct

SEQ ID NO: 178539 - DNA, 25 bp, Saccharomyces pastorianus
gtatatatactagaagttttcctcg

SEQ ID NO: 178540 - DNA, 25 bp, Saccharomyces pastorianus
tatatatactagaagttttcctcga

SEQ ID NO: 178541 - DNA, 25 bp, Saccharomyces pastorianus
agtatatatactagaagttttcctc

SEQ ID NO: 178542 - DNA, 25 bp, Saccharomyces pastorianus
gaagttttcctcgaggatataggaa

SEQ ID NO: 178543 - DNA, 25 bp, Saccharomyces pastorianus
acatactaatattaagattattcct

SEQ ID NO: 178544 - DNA, 25 bp, Saccharomyces pastorianus
tatatactagaagttttcctcgagg

SEQ ID NO: 178545 - DNA, 25 bp, Saccharomyces pastorianus
atatactagaagttttcctcgagga

SEQ ID NO: 178546 - DNA, 25 bp, Saccharomyces pastorianus
aattgtcatggaatttcccaaccca

SEQ ID NO: 178547 - DNA, 25 bp, Saccharomyces pastorianus
aagagtcagtcgaagcacaattgtc

SEQ ID NO: 178548 - DNA, 25 bp, Saccharomyces pastorianus
gtcgaagcacaattgtcatggaatt

SEQ ID NO: 178549 - DNA, 25 bp, Saccharomyces pastorianus
gagtcagtcgaagcacaattgtcat

SEQ ID NO: 178550 - DNA, 25 bp, Saccharomyces pastorianus
attgtcatggaatttcccaacccaa

SEQ ID NO: 178551 - DNA, 25 bp, Saccharomyces pastorianus
gtcagtcgaagcacaattgtcatgg

SEQ ID NO: 178552 - DNA, 25 bp, Saccharomyces pastorianus
cagtcgaagcacaattgtcatggaa

SEQ ID NO: 178553 - DNA, 25 bp, Saccharomyces pastorianus
aggaagagtcagtcgaagcacaatt

SEQ ID NO: 178554 - DNA, 25 bp, Saccharomyces pastorianus
agcacaattgtcatggaatttccca

SEQ ID NO: 178555 - DNA, 25 bp, Saccharomyces pastorianus
cacaattgtcatggaatttcccaac

SEQ ID NO: 178556 - DNA, 25 bp, Saccharomyces pastorianus
gaagcacaattgtcatggaatttcc

SEQ ID NO: 178557 - DNA, 25 bp, Saccharomyces pastorianus
aaatggattattgagctggctgaac

SEQ ID NO: 178558 - DNA, 25 bp, Saccharomyces pastorianus
ggctggttccatgcaacaacaagtt

SEQ ID NO: 178559 - DNA, 25 bp, Saccharomyces pastorianus
aagttactttgtatcctcacgtcga

SEQ ID NO: 178560 - DNA, 25 bp, Saccharomyces pastorianus
acggctgcaggttacactcacatga

SEQ ID NO: 178561 - DNA, 25 bp, Saccharomyces pastorianus
aaaaagatcagagccgggacctgcc

SEQ ID NO: 178562 - DNA, 25 bp, Saccharomyces pastorianus
aaacctccagtttctcaaaatgcgg

SEQ ID NO: 178563 - DNA, 25 bp, Saccharomyces pastorianus
ggttgttacttattttcacatcctg

SEQ ID NO: 178564 - DNA, 25 bp, Saccharomyces pastorianus
catgttatggatacgagggcttcga

SEQ ID NO: 178565 - DNA, 25 bp, Saccharomyces pastorianus
tgtatcctcacgtcgaccaaaataa

SEQ ID NO: 178566 - DNA, 25 bp, Saccharomyces pastorianus
tcatcttcacaattatccggctggt

SEQ ID NO: 178567 - DNA, 25 bp, Saccharomyces pastorianus
ggacctgcccaggaacatattaggg

SEQ ID NO: 178568 - DNA, 25 bp, Saccharomyces pastorianus
ggcaattaggacttggtacaaacat

SEQ ID NO: 178569 - DNA, 25 bp, Saccharomyces pastorianus
gtatccaaaagctaaagacgccctg

SEQ ID NO: 178570 - DNA, 25 bp, Saccharomyces pastorianus
ctgtctcaaaaaaggttaccgctgt

SEQ ID NO: 178571 - DNA, 25 bp, Saccharomyces pastorianus
aactagcttctagaggtttccgtgc

SEQ ID NO: 178572 - DNA, 25 bp, Saccharomyces pastorianus
aatcaatgaggccagaaaccttggt

SEQ ID NO: 178573 - DNA, 25 bp, Saccharomyces pastorianus
gatgacaccgctcaaacaatcaatg

SEQ ID NO: 178574 - DNA, 25 bp, Saccharomyces pastorianus
cggtgacgctgttggtatcgcgaaa

SEQ ID NO: 178575 - DNA, 25 bp, Saccharomyces pastorianus
agacgccctgaccaagtacaaagtt

SEQ ID NO: 178576 - DNA, 25 bp, Saccharomyces pastorianus
ttaccgctgttgtagaatccccaga

SEQ ID NO: 178577 - DNA, 25 bp, Saccharomyces pastorianus
gaagtcattgattgagtatccaaaa

SEQ ID NO: 178578 - DNA, 25 bp, Saccharomyces pastorianus
atgcctggttcagagttggctgatt

SEQ ID NO: 178579 - DNA, 25 bp, Saccharomyces pastorianus
agtaatctgtccgtcatcatcgtca

SEQ ID NO: 178580 - DNA, 25 bp, Saccharomyces pastorianus
gcatcacagcttatgcagtaatctg

SEQ ID NO: 178581 - DNA, 25 bp, Saccharomyces pastorianus
agattactgcatcacagcttatgca

SEQ ID NO: 178582 - DNA, 25 bp, Saccharomyces pastorianus
gcttatgcagtaatctgtccgtcat

SEQ ID NO: 178583 - DNA, 25 bp, Saccharomyces pastorianus
aaacaagattactgcatcacagctt

SEQ ID NO: 178584 - DNA, 25 bp, Saccharomyces pastorianus
tatgcagtaatctgtccgtcatcat

SEQ ID NO: 178585 - DNA, 25 bp, Saccharomyces pastorianus
tgcagtaatctgtccgtcatcatcg

SEQ ID NO: 178586 - DNA, 25 bp, Saccharomyces pastorianus
caagattactgcatcacagcttatg

SEQ ID NO: 178587 - DNA, 25 bp, Saccharomyces pastorianus
gtcatgatattaattctgcaaaaac

SEQ ID NO: 178588 - DNA, 25 bp, Saccharomyces pastorianus
cagcttatgcagtaatctgtccgtc

SEQ ID NO: 178589 - DNA, 25 bp, Saccharomyces pastorianus
cttttagtcatgatattaattctgc

SEQ ID NO: 178590 - DNA, 25 bp, Saccharomyces pastorianus
gtcacggttaaggttccagtcgcgg

SEQ ID NO: 178591 - DNA, 25 bp, Saccharomyces pastorianus
atgggtgctcatactttctacgtca

SEQ ID NO: 178592 - DNA, 25 bp, Saccharomyces pastorianus
gggcagcaagcatctcttggcagat

SEQ ID NO: 178593 - DNA, 25 bp, Saccharomyces pastorianus
gtaaccacccagcagaacatttcaa

SEQ ID NO: 178594 - DNA, 25 bp, Saccharomyces pastorianus
agtcgcgggaatacctcaccaaatt

SEQ ID NO: 178595 - DNA, 25 bp, Saccharomyces pastorianus
gcgagatcagcgctgtcaatgacaa

SEQ ID NO: 178596 - DNA, 25 bp, Saccharomyces pastorianus
agatggcagcaacctcgggcagcaa

SEQ ID NO: 178597 - DNA, 25 bp, Saccharomyces pastorianus
aagtacacgtcgttcatgggtgctc

SEQ ID NO: 178598 - DNA, 25 bp, Saccharomyces pastorianus
tttcaagaatcgaatgtcacggtta

SEQ ID NO: 178599 - DNA, 25 bp, Saccharomyces pastorianus
aggcatagaacaccgcttagagata

SEQ ID NO: 178600 - DNA, 25 bp, Saccharomyces pastorianus
tttctacgtcatcgcattgcccatg

SEQ ID NO: 178601 - DNA, 25 bp, Saccharomyces pastorianus
cccatctctctctaaatcagtacta

SEQ ID NO: 178602 - DNA, 25 bp, Saccharomyces pastorianus
atccatggcccatctctctctaaat

SEQ ID NO: 178603 - DNA, 25 bp, Saccharomyces pastorianus
ctctctctaaatcagtactaaatgc

SEQ ID NO: 178604 - DNA, 25 bp, Saccharomyces pastorianus
tctctctctaaatcagtactaaatg

SEQ ID NO: 178605 - DNA, 25 bp, Saccharomyces pastorianus
tctctctaaatcagtactaaatgca

SEQ ID NO: 178606 - DNA, 25 bp, Saccharomyces pastorianus
tctctaaatcagtactaaatgcact

SEQ ID NO: 178607 - DNA, 25 bp, Saccharomyces pastorianus
atttacccataacgcccacgattat

SEQ ID NO: 178608 - DNA, 25 bp, Saccharomyces pastorianus
ctctctaaatcagtactaaatgcac

SEQ ID NO: 178609 - DNA, 25 bp, Saccharomyces pastorianus
gccatttacccataacgcccacgat

SEQ ID NO: 178610 - DNA, 25 bp, Saccharomyces pastorianus
gcccatctctctctaaatcagtact

SEQ ID NO: 178611 - DNA, 25 bp, Saccharomyces pastorianus
ccatctctctctaaatcagtactaa

SEQ ID NO: 178612 - DNA, 25 bp, Saccharomyces pastorianus
ttacgtcaaaaagagatcccacaaa

SEQ ID NO: 178613 - DNA, 25 bp, Saccharomyces pastorianus
ggtaagttgttagccaaagttggtg

SEQ ID NO: 178614 - DNA, 25 bp, Saccharomyces pastorianus
ggatccaatgactacttacgtcaaa

SEQ ID NO: 178615 - DNA, 25 bp, Saccharomyces pastorianus
gtgaggatccaatgactacttacgt

SEQ ID NO: 178616 - DNA, 25 bp, Saccharomyces pastorianus
tagccaaagttggtgaggatccaat

SEQ ID NO: 178617 - DNA, 25 bp, Saccharomyces pastorianus
gctaagggtaagttgttagccaaag

SEQ ID NO: 178618 - DNA, 25 bp, Saccharomyces pastorianus
gactacttacgtcaaaaagagatcc

SEQ ID NO: 178619 - DNA, 25 bp, Saccharomyces pastorianus
gatccaatgactacttacgtcaaaa

SEQ ID NO: 178620 - DNA, 25 bp, Saccharomyces pastorianus
gaggatccaatgactacttacgtca

SEQ ID NO: 178621 - DNA, 25 bp, Saccharomyces pastorianus
gtcaaaaagagatcccacaaactga

SEQ ID NO: 178622 - DNA, 25 bp, Saccharomyces pastorianus
ggtgaggatccaatgactacttacg

SEQ ID NO: 178623 - DNA, 25 bp, Saccharomyces pastorianus
gacacggcagaagatcctgagatca

SEQ ID NO: 178624 - DNA, 25 bp, Saccharomyces pastorianus
tttcctttattaccttatttgcttg

SEQ ID NO: 178625 - DNA, 25 bp, Saccharomyces pastorianus
gaactctatcttccatcgcgttatt

SEQ ID NO: 178626 - DNA, 25 bp, Saccharomyces pastorianus
cttttaccagttgaccatttccagg

SEQ ID NO: 178627 - DNA, 25 bp, Saccharomyces pastorianus
gagatcacacacaaggtctactttg

SEQ ID NO: 178628 - DNA, 25 bp, Saccharomyces pastorianus
tgtctcttcacaacagccatttttg

SEQ ID NO: 178629 - DNA, 25 bp, Saccharomyces pastorianus
gggttatttgaactctatcttccat

SEQ ID NO: 178630 - DNA, 25 bp, Saccharomyces pastorianus
tgggattgtatggtctcaccacacc

SEQ ID NO: 178631 - DNA, 25 bp, Saccharomyces pastorianus
ttgaccatttccagggaccctaaga

SEQ ID NO: 178632 - DNA, 25 bp, Saccharomyces pastorianus
taccttatttgcttgtctcttcaca

SEQ ID NO: 178633 - DNA, 25 bp, Saccharomyces pastorianus
gccatttttgcgaaagaggacacgg

SEQ ID NO: 178634 - DNA, 25 bp, Saccharomyces pastorianus
ggtagaggtactttatttgtccgtg

SEQ ID NO: 178635 - DNA, 25 bp, Saccharomyces pastorianus
caggtagaggtactttatttgtccg

SEQ ID NO: 178636 - DNA, 25 bp, Saccharomyces pastorianus
tacccaggtagaggtactttatttg

SEQ ID NO: 178637 - DNA, 25 bp, Saccharomyces pastorianus
aaactccaaatctgcttcgacctgc

SEQ ID NO: 178638 - DNA, 25 bp, Saccharomyces pastorianus
gtccgtggtgactccaaaattttca

SEQ ID NO: 178639 - DNA, 25 bp, Saccharomyces pastorianus
gtagaggtactttatttgtccgtgg

SEQ ID NO: 178640 - DNA, 25 bp, Saccharomyces pastorianus
atctacccaggtagaggtactttat

SEQ ID NO: 178641 - DNA, 25 bp, Saccharomyces pastorianus
gtactttatttgtccgtggtgactc

SEQ ID NO: 178642 - DNA, 25 bp, Saccharomyces pastorianus
gactccaaaattttcagattccaaa

SEQ ID NO: 178643 - DNA, 25 bp, Saccharomyces pastorianus
tctacccaggtagaggtactttatt

SEQ ID NO: 178644 - DNA, 25 bp, Saccharomyces pastorianus
ttatttgtccgtggtgactccaaaa

SEQ ID NO: 178645 - DNA, 25 bp, Saccharomyces pastorianus
gtaaggctacacaatatctccctgc

SEQ ID NO: 178646 - DNA, 25 bp, Saccharomyces pastorianus
ggccctttgaggtcttttctcataa

SEQ ID NO: 178647 - DNA, 25 bp, Saccharomyces pastorianus
gtgtcctctgtttttggttataaag

SEQ ID NO: 178648 - DNA, 25 bp, Saccharomyces pastorianus
aatgctatatgcaaccgtgtcctct

SEQ ID NO: 178649 - DNA, 25 bp, Saccharomyces pastorianus
aatacacggcaaacgttccatacgt

SEQ ID NO: 178650 - DNA, 25 bp, Saccharomyces pastorianus
tacatttgtttctcaatacgtgaac

SEQ ID NO: 178651 - DNA, 25 bp, Saccharomyces pastorianus
atgttcatcctcctttagtggcaat

SEQ ID NO: 178652 - DNA, 25 bp, Saccharomyces pastorianus
cgatgtgactattaaacgcggccct

SEQ ID NO: 178653 - DNA, 25 bp, Saccharomyces pastorianus
atctccctgccaaatagtgttgttt

SEQ ID NO: 178654 - DNA, 25 bp, Saccharomyces pastorianus
atacgtcgcgatgaggttcttttct

SEQ ID NO: 178655 - DNA, 25 bp, Saccharomyces pastorianus
aggttcttttctgctactttgggca

SEQ ID NO: 178656 - DNA, 25 bp, Saccharomyces pastorianus
attgactccaatgcgcctattttat

SEQ ID NO: 178657 - DNA, 25 bp, Saccharomyces pastorianus
agttatcgacatgttttgtaccgct

SEQ ID NO: 178658 - DNA, 25 bp, Saccharomyces pastorianus
acttatatctatctggtggttttca

SEQ ID NO: 178659 - DNA, 25 bp, Saccharomyces pastorianus
aggttacggtgatgttcccactatc

SEQ ID NO: 178660 - DNA, 25 bp, Saccharomyces pastorianus
aaccaatgtctctatgttagcatac

SEQ ID NO: 178661 - DNA, 25 bp, Saccharomyces pastorianus
gttagcatacgcagcacttatatct

SEQ ID NO: 178662 - DNA, 25 bp, Saccharomyces pastorianus
aggaggcttccgaatctaaagtaga

SEQ ID NO: 178663 - DNA, 25 bp, Saccharomyces pastorianus
gtaccgctgctatggttaatttctc

SEQ ID NO: 178664 - DNA, 25 bp, Saccharomyces pastorianus
ccactatcgctagggaggaggcttc

SEQ ID NO: 178665 - DNA, 25 bp, Saccharomyces pastorianus
gcgcctattttatcattggacagtg

SEQ ID NO: 178666 - DNA, 25 bp, Saccharomyces pastorianus
gacagtgttcaccaataatccaaag

SEQ ID NO: 178667 - DNA, 25 bp, Saccharomyces pastorianus
gtgtagaattgcagattccatttta

SEQ ID NO: 178668 - DNA, 25 bp, Saccharomyces pastorianus
tgccttattaaaaatggaatcccaa

SEQ ID NO: 178669 - DNA, 25 bp, Saccharomyces pastorianus
tattgccttattaaaaatggaatcc

SEQ ID NO: 178670 - DNA, 25 bp, Saccharomyces pastorianus
ttgtgtagaattgcagattccattt

SEQ ID NO: 178671 - DNA, 25 bp, Saccharomyces pastorianus
tctagtacattctacatacctaata

SEQ ID NO: 178672 - DNA, 25 bp, Saccharomyces pastorianus
gtagaattgcagattccattttatg

SEQ ID NO: 178673 - DNA, 25 bp, Saccharomyces pastorianus
aacttctagtacattctacatacct

SEQ ID NO: 178674 - DNA, 25 bp, Saccharomyces pastorianus
tatggattcctaaatcctcgaggag

SEQ ID NO: 178675 - DNA, 25 bp, Saccharomyces pastorianus
aattgtgtagaattgcagattccat

SEQ ID NO: 178676 - DNA, 25 bp, Saccharomyces pastorianus
ctagtacattctacatacctaatat

SEQ ID NO: 178677 - DNA, 25 bp, Saccharomyces pastorianus
ttgccttattaaaaatggaatccca

SEQ ID NO: 178678 - DNA, 25 bp, Saccharomyces pastorianus
gatccaaaagtcagagagttctcca

SEQ ID NO: 178679 - DNA, 25 bp, Saccharomyces pastorianus
tctgttactttatagaatcacggaa

SEQ ID NO: 178680 - DNA, 25 bp, Saccharomyces pastorianus
ctccagatccgtggttcattaaaaa

SEQ ID NO: 178681 - DNA, 25 bp, Saccharomyces pastorianus
gaattattcttttctgttactttat

SEQ ID NO: 178682 - DNA, 25 bp, Saccharomyces pastorianus
tttcgtatcggttggattatactat

SEQ ID NO: 178683 - DNA, 25 bp, Saccharomyces pastorianus
aactatttttatctgtatacataca

SEQ ID NO: 178684 - DNA, 25 bp, Saccharomyces pastorianus
tttttgattttcgtatcggttggat

SEQ ID NO: 178685 - DNA, 25 bp, Saccharomyces pastorianus
ggcaactacatcatgttttttaact

SEQ ID NO: 178686 - DNA, 25 bp, Saccharomyces pastorianus
catacaaggaatagaaaacacgttt

SEQ ID NO: 178687 - DNA, 25 bp, Saccharomyces pastorianus
gatgaaggcaactacatcatgtttt

SEQ ID NO: 178688 - DNA, 25 bp, Saccharomyces pastorianus
agtcagagagttctccagatccgtg

SEQ ID NO: 178689 - DNA, 25 bp, Saccharomyces pastorianus
ggagcggctctcttctaatggtcgt

SEQ ID NO: 178690 - DNA, 25 bp, Saccharomyces pastorianus
ttgatcaacttttccaacttggcgt

SEQ ID NO: 178691 - DNA, 25 bp, Saccharomyces pastorianus
gccttgccactttgatttgggctta

SEQ ID NO: 178692 - DNA, 25 bp, Saccharomyces pastorianus
ggcttacattgatctacccgaaaca

SEQ ID NO: 178693 - DNA, 25 bp, Saccharomyces pastorianus
tcgtcgcgtttttctacaacctggg

SEQ ID NO: 178694 - DNA, 25 bp, Saccharomyces pastorianus
atattgtaccaactgaattccgaga

SEQ ID NO: 178695 - DNA, 25 bp, Saccharomyces pastorianus
ggactagcctttcagaccattatat

SEQ ID NO: 178696 - DNA, 25 bp, Saccharomyces pastorianus
tggaatgttcagacactcacggcgc

SEQ ID NO: 178697 - DNA, 25 bp, Saccharomyces pastorianus
ggaagtggatccgtttctcataaaa

SEQ ID NO: 178698 - DNA, 25 bp, Saccharomyces pastorianus
tggtgggcctctaagtactttggta

SEQ ID NO: 178699 - DNA, 25 bp, Saccharomyces pastorianus
gcactgatacagctttcacttttag

SEQ ID NO: 178700 - DNA, 25 bp, Saccharomyces pastorianus
tgaccgccgggtatttgacattatc

SEQ ID NO: 178701 - DNA, 25 bp, Saccharomyces pastorianus
gaaacgtgttcgtgagctctgcgac

SEQ ID NO: 178702 - DNA, 25 bp, Saccharomyces pastorianus
gtgaacgtcgaagtcctgcaagagc

SEQ ID NO: 178703 - DNA, 25 bp, Saccharomyces pastorianus
ataatctacattctgcctccatatg

SEQ ID NO: 178704 - DNA, 25 bp, Saccharomyces pastorianus
aatccgttagcatgcgctgttgcaa

SEQ ID NO: 178705 - DNA, 25 bp, Saccharomyces pastorianus
gaaccggcatgctctttgggtttca

SEQ ID NO: 178706 - DNA, 25 bp, Saccharomyces pastorianus
gagcatggattagacctttcggtaa

SEQ ID NO: 178707 - DNA, 25 bp, Saccharomyces pastorianus
gagggctgcttcatgcacggacaaa

SEQ ID NO: 178708 - DNA, 25 bp, Saccharomyces pastorianus
ttgttgatccttggcgaagtcgcag

SEQ ID NO: 178709 - DNA, 25 bp, Saccharomyces pastorianus
aaatgagcttttgcccttactggaa

SEQ ID NO: 178710 - DNA, 25 bp, Saccharomyces pastorianus
gagctctgcgacgaactcgatattt

SEQ ID NO: 178711 - DNA, 25 bp, Saccharomyces pastorianus
ccatggctcagttgtagttatgatg

SEQ ID NO: 178712 - DNA, 25 bp, Saccharomyces pastorianus
taccggtgacggtggtcatttctgt

SEQ ID NO: 178713 - DNA, 25 bp, Saccharomyces pastorianus
ggttcggtcgtagttatggcagtac

SEQ ID NO: 178714 - DNA, 25 bp, Saccharomyces pastorianus
cttgctggtagtaggtgtagtgaca

SEQ ID NO: 178715 - DNA, 25 bp, Saccharomyces pastorianus
tggcaaaccgttggtaccggtgacg

SEQ ID NO: 178716 - DNA, 25 bp, Saccharomyces pastorianus
gaaagtgccagtccatggctcagtt

SEQ ID NO: 178717 - DNA, 25 bp, Saccharomyces pastorianus
gtagaggtgaaagtgccagtccatg

SEQ ID NO: 178718 - DNA, 25 bp, Saccharomyces pastorianus
gacagtagtcatctcagtagacgta

SEQ ID NO: 178719 - DNA, 25 bp, Saccharomyces pastorianus
ttggtacaccgttggttccagtgac

SEQ ID NO: 178720 - DNA, 25 bp, Saccharomyces pastorianus
aagtgcgagtccatggttcggtcgt

SEQ ID NO: 178721 - DNA, 25 bp, Saccharomyces pastorianus
ccgttggttccagtgacagtagtca

SEQ ID NO: 178722 - DNA, 25 bp, Saccharomyces pastorianus
gaaagcgcagctgacttcgtcctca

SEQ ID NO: 178723 - DNA, 25 bp, Saccharomyces pastorianus
gcaagaacagcagtacgggccagta

SEQ ID NO: 178724 - DNA, 25 bp, Saccharomyces pastorianus
gggcgttggtgaccgcgctggaggg

SEQ ID NO: 178725 - DNA, 25 bp, Saccharomyces pastorianus
atcattgtggtttctaacagactgc

SEQ ID NO: 178726 - DNA, 25 bp, Saccharomyces pastorianus
gacaacgcgaaagcgcagctgactt

SEQ ID NO: 178727 - DNA, 25 bp, Saccharomyces pastorianus
atgactacagacaacgcgaaagcgc

SEQ ID NO: 178728 - DNA, 25 bp, Saccharomyces pastorianus
ttctaacagactgcctgtgaccatt

SEQ ID NO: 178729 - DNA, 25 bp, Saccharomyces pastorianus
ctgcctgtgaccattagcaagaaca

SEQ ID NO: 178730 - DNA, 25 bp, Saccharomyces pastorianus
acagactgcctgtgaccattagcaa

SEQ ID NO: 178731 - DNA, 25 bp, Saccharomyces pastorianus
agcgcagctgacttcgtcctcaggg

SEQ ID NO: 178732 - DNA, 25 bp, Saccharomyces pastorianus
gggcaacatcattgtggtttctaac

SEQ ID NO: 178733 - DNA, 25 bp, Saccharomyces pastorianus
taggtgcaatactttcgtccgtcat

SEQ ID NO: 178734 - DNA, 25 bp, Saccharomyces pastorianus
ataacactaccaacacattcttcaa

SEQ ID NO: 178735 - DNA, 25 bp, Saccharomyces pastorianus
gcgattgtcccgttgcaatattgtt

SEQ ID NO: 178736 - DNA, 25 bp, Saccharomyces pastorianus
gtaggatatggagaccacctcggtc

SEQ ID NO: 178737 - DNA, 25 bp, Saccharomyces pastorianus
tactttgctatgcagggctaacctt

SEQ ID NO: 178738 - DNA, 25 bp, Saccharomyces pastorianus
ggttcatgaccaccattgcatatgg

SEQ ID NO: 178739 - DNA, 25 bp, Saccharomyces pastorianus
aaaaaccctgtattccatcgtgtgg

SEQ ID NO: 178740 - DNA, 25 bp, Saccharomyces pastorianus
ctgttccacatgtaacgtctgcgta

SEQ ID NO: 178741 - DNA, 25 bp, Saccharomyces pastorianus
ggctaaccttatggtatccggcaat

SEQ ID NO: 178742 - DNA, 25 bp, Saccharomyces pastorianus
gcccaagctttgtaagtgccagaaa

SEQ ID NO: 178743 - DNA, 25 bp, Saccharomyces pastorianus
aattgtgccatccatattgcacggg

SEQ ID NO: 178744 - DNA, 25 bp, Saccharomyces pastorianus
gaattttagatatggaccctcgttc

SEQ ID NO: 178745 - DNA, 25 bp, Saccharomyces pastorianus
tttagatatggaccctcgttcagaa

SEQ ID NO: 178746 - DNA, 25 bp, Saccharomyces pastorianus
tatgttacccttttccgtgccgtgt

SEQ ID NO: 178747 - DNA, 25 bp, Saccharomyces pastorianus
tgccgtatgttacccttttccgtgc

SEQ ID NO: 178748 - DNA, 25 bp, Saccharomyces pastorianus
gtgccgtatgttacccttttccgtg

SEQ ID NO: 178749 - DNA, 25 bp, Saccharomyces pastorianus
gccgaggtgccgtatgttacccttt

SEQ ID NO: 178750 - DNA, 25 bp, Saccharomyces pastorianus
ggttgccgaggtgccgtatgttacc

SEQ ID NO: 178751 - DNA, 25 bp, Saccharomyces pastorianus
gtatgttacccttttccgtgccgtg

SEQ ID NO: 178752 - DNA, 25 bp, Saccharomyces pastorianus
ttgccgaggtgccgtatgttaccct

SEQ ID NO: 178753 - DNA, 25 bp, Saccharomyces pastorianus
tgccgaggtgccgtatgttaccctt

SEQ ID NO: 178754 - DNA, 25 bp, Saccharomyces pastorianus
gttgccgaggtgccgtatgttaccc

SEQ ID NO: 178755 - DNA, 25 bp, Saccharomyces pastorianus
agtggtgaagtccaactgcctgtga

SEQ ID NO: 178756 - DNA, 25 bp, Saccharomyces pastorianus
ggacaaattcagatttcgccagcat

SEQ ID NO: 178757 - DNA, 25 bp, Saccharomyces pastorianus
gaggagattccactactatcacgca

SEQ ID NO: 178758 - DNA, 25 bp, Saccharomyces pastorianus
actactatcacgcagattacaggaa

SEQ ID NO: 178759 - DNA, 25 bp, Saccharomyces pastorianus
tccaactgcctgtgaaaatgactat

SEQ ID NO: 178760 - DNA, 25 bp, Saccharomyces pastorianus
tgagcactttgttgatccgttgaat

SEQ ID NO: 178761 - DNA, 25 bp, Saccharomyces pastorianus
ctgacagggcggcttttgatttaac

SEQ ID NO: 178762 - DNA, 25 bp, Saccharomyces pastorianus
cagatttcgccagcatttgaagaat

SEQ ID NO: 178763 - DNA, 25 bp, Saccharomyces pastorianus
gatccgttgaataagtcacatgcaa

SEQ ID NO: 178764 - DNA, 25 bp, Saccharomyces pastorianus
gttttgtcaaaattttcccaggatg

SEQ ID NO: 178765 - DNA, 25 bp, Saccharomyces pastorianus
tgatttaactgtacactccaagaaa

SEQ ID NO: 178766 - DNA, 25 bp, Saccharomyces pastorianus
tgcaagcgcttatatccaagcaatg

SEQ ID NO: 178767 - DNA, 25 bp, Saccharomyces pastorianus
cgaagttattcgttatgcgactcag

SEQ ID NO: 178768 - DNA, 25 bp, Saccharomyces pastorianus
gaacgccctaatatggctttatttg

SEQ ID NO: 178769 - DNA, 25 bp, Saccharomyces pastorianus
gcctgataatgttgagaccagtatt

SEQ ID NO: 178770 - DNA, 25 bp, Saccharomyces pastorianus
tattcaaccctgcaagcgcttatat

SEQ ID NO: 178771 - DNA, 25 bp, Saccharomyces pastorianus
atcggataatccctgaagacattat

SEQ ID NO: 178772 - DNA, 25 bp, Saccharomyces pastorianus
tggcgaaagtcttaccacactcaag

SEQ ID NO: 178773 - DNA, 25 bp, Saccharomyces pastorianus
gtcacgagacattgatcacgattaa

SEQ ID NO: 178774 - DNA, 25 bp, Saccharomyces pastorianus
cattattccggaatgtcacgagaca

SEQ ID NO: 178775 - DNA, 25 bp, Saccharomyces pastorianus
gaagaagttctttatgcctgataat

SEQ ID NO: 178776 - DNA, 25 bp, Saccharomyces pastorianus
accgaggaagcttcctcctcattag

SEQ ID NO: 178777 - DNA, 25 bp, Saccharomyces pastorianus
aatccataaaagggaatctgctatt

SEQ ID NO: 178778 - DNA, 25 bp, Saccharomyces pastorianus
gaatccataaaagggaatctgctat

SEQ ID NO: 178779 - DNA, 25 bp, Saccharomyces pastorianus
cataaaagggaatctgctattctac

SEQ ID NO: 178780 - DNA, 25 bp, Saccharomyces pastorianus
aaagggaatctgctattctacacaa

SEQ ID NO: 178781 - DNA, 25 bp, Saccharomyces pastorianus
tccataaaagggaatctgctattct

SEQ ID NO: 178782 - DNA, 25 bp, Saccharomyces pastorianus
atccataaaagggaatctgctattc

SEQ ID NO: 178783 - DNA, 25 bp, Saccharomyces pastorianus
aaaagggaatctgctattctacaca

SEQ ID NO: 178784 - DNA, 25 bp, Saccharomyces pastorianus
ataaaagggaatctgctattctaca

SEQ ID NO: 178785 - DNA, 25 bp, Saccharomyces pastorianus
taaaagggaatctgctattctacac

SEQ ID NO: 178786 - DNA, 25 bp, Saccharomyces pastorianus
ccataaaagggaatctgctattcta

SEQ ID NO: 178787 - DNA, 25 bp, Saccharomyces pastorianus
tcgaggactttaggaatccataaaa

SEQ ID NO: 178788 - DNA, 25 bp, Saccharomyces pastorianus
ggttctttccatttaagcatttcta

SEQ ID NO: 178789 - DNA, 25 bp, Saccharomyces pastorianus
gaagcgctgttcaaatactatttta

SEQ ID NO: 178790 - DNA, 25 bp, Saccharomyces pastorianus
gagcagttctttaaccaacatggca

SEQ ID NO: 178791 - DNA, 25 bp, Saccharomyces pastorianus
gctgtaaatgtgtatccaatgctaa

SEQ ID NO: 178792 - DNA, 25 bp, Saccharomyces pastorianus
aaaagtttctcgcaatgatgtgtac

SEQ ID NO: 178793 - DNA, 25 bp, Saccharomyces pastorianus
gaccaggttctgttatatcccaatt

SEQ ID NO: 178794 - DNA, 25 bp, Saccharomyces pastorianus
cggcctgcgttcattcaacaattat

SEQ ID NO: 178795 - DNA, 25 bp, Saccharomyces pastorianus
atactaatcaattcgaagcgctgtt

SEQ ID NO: 178796 - DNA, 25 bp, Saccharomyces pastorianus
gaggagtcctctttatcacgattta

SEQ ID NO: 178797 - DNA, 25 bp, Saccharomyces pastorianus
ttgaaagacggtattgcgccccaat

SEQ ID NO: 178798 - DNA, 25 bp, Saccharomyces pastorianus
ggtaaaacccgattgcggcctgcgt

SEQ ID NO: 178799 - DNA, 25 bp, Saccharomyces pastorianus
gaaagtgctgctatgtctggtctta

SEQ ID NO: 178800 - DNA, 25 bp, Saccharomyces pastorianus
ataccacgtcatcgaagttgtcgcc

SEQ ID NO: 178801 - DNA, 25 bp, Saccharomyces pastorianus
aacgacgactatgaattctgctgca

SEQ ID NO: 178802 - DNA, 25 bp, Saccharomyces pastorianus
gcgtcgaacctgtagatttcaccgg

SEQ ID NO: 178803 - DNA, 25 bp, Saccharomyces pastorianus
ttactgggtctgttaacgagcctga

SEQ ID NO: 178804 - DNA, 25 bp, Saccharomyces pastorianus
agaagctcatccagcgatacgcatt

SEQ ID NO: 178805 - DNA, 25 bp, Saccharomyces pastorianus
tttttgttcttggatttgcggcctc

SEQ ID NO: 178806 - DNA, 25 bp, Saccharomyces pastorianus
actacatccatttaactggcccatg

SEQ ID NO: 178807 - DNA, 25 bp, Saccharomyces pastorianus
atcgttgccgagcagagacctgtac

SEQ ID NO: 178808 - DNA, 25 bp, Saccharomyces pastorianus
tcgccattttgggtatcacgctttt

SEQ ID NO: 178809 - DNA, 25 bp, Saccharomyces pastorianus
tatgctccgctttctgaattgtacg

SEQ ID NO: 178810 - DNA, 25 bp, Saccharomyces pastorianus
acagagagcactttttagacagtta

SEQ ID NO: 178811 - DNA, 25 bp, Saccharomyces pastorianus
gctggcaaatgtgagggcactgtat

SEQ ID NO: 178812 - DNA, 25 bp, Saccharomyces pastorianus
aatggcgtaattgcgctgggacaat

SEQ ID NO: 178813 - DNA, 25 bp, Saccharomyces pastorianus
gttgcacaggctattacagagagca

SEQ ID NO: 178814 - DNA, 25 bp, Saccharomyces pastorianus
gataacgtctataccaaagcctctg

SEQ ID NO: 178815 - DNA, 25 bp, Saccharomyces pastorianus
gagaagattacaagccaaacgcctt

SEQ ID NO: 178816 - DNA, 25 bp, Saccharomyces pastorianus
gaagatattggcaacaacgttcaag

SEQ ID NO: 178817 - DNA, 25 bp, Saccharomyces pastorianus
ggtactggcagttcaatggcgtaat

SEQ ID NO: 178818 - DNA, 25 bp, Saccharomyces pastorianus
tgtaacgttgggttgtacactagta

SEQ ID NO: 178819 - DNA, 25 bp, Saccharomyces pastorianus
ataacgctttttagctcgagaagat

SEQ ID NO: 178820 - DNA, 25 bp, Saccharomyces pastorianus
gtacactagtaacattgctggcaaa

SEQ ID NO: 178821 - DNA, 25 bp, Saccharomyces pastorianus
tcgattgttcccacggcaacagtaa

SEQ ID NO: 178822 - DNA, 25 bp, Saccharomyces pastorianus
gagaatagtctctgtggtgttatga

SEQ ID NO: 178823 - DNA, 25 bp, Saccharomyces pastorianus
ccaaccaaaggttgccaaatgtatt

SEQ ID NO: 178824 - DNA, 25 bp, Saccharomyces pastorianus
gatgcttgtattggctgggagtcca

SEQ ID NO: 178825 - DNA, 25 bp, Saccharomyces pastorianus
gtggtgttatgattgagtccaacat

SEQ ID NO: 178826 - DNA, 25 bp, Saccharomyces pastorianus
tttatgaccagctgacggagggtga

SEQ ID NO: 178827 - DNA, 25 bp, Saccharomyces pastorianus
gctgggagtccaccgaacaggtatt

SEQ ID NO: 178828 - DNA, 25 bp, Saccharomyces pastorianus
acaggtattggagctattggcagaa

SEQ ID NO: 178829 - DNA, 25 bp, Saccharomyces pastorianus
gatattcccaaagaaggtggcacag

SEQ ID NO: 178830 - DNA, 25 bp, Saccharomyces pastorianus
aaatgtatttatgaccagctgacgg

SEQ ID NO: 178831 - DNA, 25 bp, Saccharomyces pastorianus
atggttgttctgttacggatgcttg

SEQ ID NO: 178832 - DNA, 25 bp, Saccharomyces pastorianus
acatgggcgtccaatagcgcaagtg

SEQ ID NO: 178833 - DNA, 25 bp, Saccharomyces pastorianus
cttggataggcattgtaactgtata

SEQ ID NO: 178834 - DNA, 25 bp, Saccharomyces pastorianus
atgggcgtccaatagcgcaagtggt

SEQ ID NO: 178835 - DNA, 25 bp, Saccharomyces pastorianus
atcttggataggcattgtaactgta

SEQ ID NO: 178836 - DNA, 25 bp, Saccharomyces pastorianus
ggataggcattgtaactgtatattt

SEQ ID NO: 178837 - DNA, 25 bp, Saccharomyces pastorianus
atggacatgggcgtccaatagcgca

SEQ ID NO: 178838 - DNA, 25 bp, Saccharomyces pastorianus
gggcgtccaatagcgcaagtggtac

SEQ ID NO: 178839 - DNA, 25 bp, Saccharomyces pastorianus
gacatgggcgtccaatagcgcaagt

SEQ ID NO: 178840 - DNA, 25 bp, Saccharomyces pastorianus
tgggcgtccaatagcgcaagtggta

SEQ ID NO: 178841 - DNA, 25 bp, Saccharomyces pastorianus
tggacatgggcgtccaatagcgcaa

SEQ ID NO: 178842 - DNA, 25 bp, Saccharomyces pastorianus
tagagaatggacatgggcgtccaat

SEQ ID NO: 178843 - DNA, 25 bp, Saccharomyces pastorianus
tatacatgttttgcatccggcctaa

SEQ ID NO: 178844 - DNA, 25 bp, Saccharomyces pastorianus
aaaagcgcacaacactcaggtctat

SEQ ID NO: 178845 - DNA, 25 bp, Saccharomyces pastorianus
gctctgactctcctataggcaacaa

SEQ ID NO: 178846 - DNA, 25 bp, Saccharomyces pastorianus
ggcaaagttgttaccgcttatcgta

SEQ ID NO: 178847 - DNA, 25 bp, Saccharomyces pastorianus
gaaaccgacaaattcagctctgact

SEQ ID NO: 178848 - DNA, 25 bp, Saccharomyces pastorianus
tgacgatattgatcccgaagacata

SEQ ID NO: 178849 - DNA, 25 bp, Saccharomyces pastorianus
gaaaacttgccatctgctttttata

SEQ ID NO: 178850 - DNA, 25 bp, Saccharomyces pastorianus
tggtattggtgttcccctcttaatt

SEQ ID NO: 178851 - DNA, 25 bp, Saccharomyces pastorianus
aacagcttcagcgtcttcgaaaaaa

SEQ ID NO: 178852 - DNA, 25 bp, Saccharomyces pastorianus
ggcaccaatgatcaatattcgcctg

SEQ ID NO: 178853 - DNA, 25 bp, Saccharomyces pastorianus
gcctgctaaatctgcgtcatattcg

SEQ ID NO: 178854 - DNA, 25 bp, Saccharomyces pastorianus
tagtactggtgataacatattccgt

SEQ ID NO: 178855 - DNA, 25 bp, Saccharomyces pastorianus
aaacttggacggcttgacttataat

SEQ ID NO: 178856 - DNA, 25 bp, Saccharomyces pastorianus
tcgcctccgatgtcaaatacttcaa

SEQ ID NO: 178857 - DNA, 25 bp, Saccharomyces pastorianus
aataccataggcaacgatatccaaa

SEQ ID NO: 178858 - DNA, 25 bp, Saccharomyces pastorianus
caatttcctcctccaacgttaatat

SEQ ID NO: 178859 - DNA, 25 bp, Saccharomyces pastorianus
tgaaccttttttcctctaacagtgg

SEQ ID NO: 178860 - DNA, 25 bp, Saccharomyces pastorianus
tccaacgttaatatcgcctccgatg

SEQ ID NO: 178861 - DNA, 25 bp, Saccharomyces pastorianus
tcgtcacaacgaactctgcaaatgg

SEQ ID NO: 178862 - DNA, 25 bp, Saccharomyces pastorianus
actgctttcattttctccacaaaat

SEQ ID NO: 178863 - DNA, 25 bp, Saccharomyces pastorianus
aaatggcggatatcaatttcctcct

SEQ ID NO: 178864 - DNA, 25 bp, Saccharomyces pastorianus
aatggttcaccatccaggaaatacc

SEQ ID NO: 178865 - DNA, 25 bp, Saccharomyces pastorianus
gaatcggtcccttatttggcaagtg

SEQ ID NO: 178866 - DNA, 25 bp, Saccharomyces pastorianus
tcgaatcggtcccttatttggcaag

SEQ ID NO: 178867 - DNA, 25 bp, Saccharomyces pastorianus
aaggtgatgctatcgaatcggtccc

SEQ ID NO: 178868 - DNA, 25 bp, Saccharomyces pastorianus
atcggtcccttatttggcaagtgat

SEQ ID NO: 178869 - DNA, 25 bp, Saccharomyces pastorianus
aagaatgggaaggtgatgctatcga

SEQ ID NO: 178870 - DNA, 25 bp, Saccharomyces pastorianus
gatgctatcgaatcggtcccttatt

SEQ ID NO: 178871 - DNA, 25 bp, Saccharomyces pastorianus
ggtcccttatttggcaagtgatgaa

SEQ ID NO: 178872 - DNA, 25 bp, Saccharomyces pastorianus
gctatcgaatcggtcccttatttgg

SEQ ID NO: 178873 - DNA, 25 bp, Saccharomyces pastorianus
gtgatgctatcgaatcggtccctta

SEQ ID NO: 178874 - DNA, 25 bp, Saccharomyces pastorianus
tatcgaatcggtcccttatttggca

SEQ ID NO: 178875 - DNA, 25 bp, Saccharomyces pastorianus
tcccttatttggcaagtgatgaaaa

SEQ ID NO: 178876 - DNA, 25 bp, Saccharomyces pastorianus
ttcatcgatggcttccgggttcaaa

SEQ ID NO: 178877 - DNA, 25 bp, Saccharomyces pastorianus
atcatcttcaaagtccgggtttctt

SEQ ID NO: 178878 - DNA, 25 bp, Saccharomyces pastorianus
tcttcttctggagtaatggtcaagt

SEQ ID NO: 178879 - DNA, 25 bp, Saccharomyces pastorianus
ttcactttcagccttcttgccttta

SEQ ID NO: 178880 - DNA, 25 bp, Saccharomyces pastorianus
attgttggtattgggcttccggaga

SEQ ID NO: 178881 - DNA, 25 bp, Saccharomyces pastorianus
acggattcttggaactcatcgtcct

SEQ ID NO: 178882 - DNA, 25 bp, Saccharomyces pastorianus
ttcatcatcctcactttcactttca

SEQ ID NO: 178883 - DNA, 25 bp, Saccharomyces pastorianus
tcttaaagtcgatggtttgttctct

SEQ ID NO: 178884 - DNA, 25 bp, Saccharomyces pastorianus
ttcctcagaggattcttcgtctatt

SEQ ID NO: 178885 - DNA, 25 bp, Saccharomyces pastorianus
tcgtcttcatcaaaatcaccaccta

SEQ ID NO: 178886 - DNA, 25 bp, Saccharomyces pastorianus
ttccgggttcaaagcagccatagta

SEQ ID NO: 178887 - DNA, 25 bp, Saccharomyces pastorianus
ccatggtctattgatgaggctgcaa

SEQ ID NO: 178888 - DNA, 25 bp, Saccharomyces pastorianus
agtgatataacgtctttagcgaagg

SEQ ID NO: 178889 - DNA, 25 bp, Saccharomyces pastorianus
tgttcagtggtcatccttgtccagc

SEQ ID NO: 178890 - DNA, 25 bp, Saccharomyces pastorianus
taagaagcttctttcccatcaaaag

SEQ ID NO: 178891 - DNA, 25 bp, Saccharomyces pastorianus
agcacacgttaaccgaatcagattt

SEQ ID NO: 178892 - DNA, 25 bp, Saccharomyces pastorianus
ggtaaagattactgagggctattca

SEQ ID NO: 178893 - DNA, 25 bp, Saccharomyces pastorianus
ggaccagaccagacacgttcaattt

SEQ ID NO: 178894 - DNA, 25 bp, Saccharomyces pastorianus
atatatcccattaccagaggaccag

SEQ ID NO: 178895 - DNA, 25 bp, Saccharomyces pastorianus
agcgcagcggctggttcaaacaaaa

SEQ ID NO: 178896 - DNA, 25 bp, Saccharomyces pastorianus
gacaaacttaccatggtctattgat

SEQ ID NO: 178897 - DNA, 25 bp, Saccharomyces pastorianus
aacaattctgacaccaatggcgacg

SEQ ID NO: 178898 - DNA, 25 bp, Saccharomyces pastorianus
ggcgcctgatggagaacctgttctg

SEQ ID NO: 178899 - DNA, 25 bp, Saccharomyces pastorianus
gtttgtccgtcttatttgtcatgca

SEQ ID NO: 178900 - DNA, 25 bp, Saccharomyces pastorianus
tgttcacgttcataaggcgcctgat

SEQ ID NO: 178901 - DNA, 25 bp, Saccharomyces pastorianus
atatgtgcattaattccctgggtta

SEQ ID NO: 178902 - DNA, 25 bp, Saccharomyces pastorianus
attccctgggttaaagcatgcttcg

SEQ ID NO: 178903 - DNA, 25 bp, Saccharomyces pastorianus
gtcattcctattattggcgtcctat

SEQ ID NO: 178904 - DNA, 25 bp, Saccharomyces pastorianus
atgccgagtgctactgctcaagtat

SEQ ID NO: 178905 - DNA, 25 bp, Saccharomyces pastorianus
gatattaacgtggtccatgccgagt

SEQ ID NO: 178906 - DNA, 25 bp, Saccharomyces pastorianus
gcagtatgcgattcttttcatcact

SEQ ID NO: 178907 - DNA, 25 bp, Saccharomyces pastorianus
aaatccgccttattgatgacatgct

SEQ ID NO: 178908 - DNA, 25 bp, Saccharomyces pastorianus
gaaattaagtcattgccacctggat

SEQ ID NO: 178909 - DNA, 25 bp, Saccharomyces pastorianus
actatcgtctatcaactaatagtta

SEQ ID NO: 178910 - DNA, 25 bp, Saccharomyces pastorianus
aatccactatcgtctatcaactaat

SEQ ID NO: 178911 - DNA, 25 bp, Saccharomyces pastorianus
cgtatatgataatattgttggaata

SEQ ID NO: 178912 - DNA, 25 bp, Saccharomyces pastorianus
ccactatcgtctatcaactaatagt

SEQ ID NO: 178913 - DNA, 25 bp, Saccharomyces pastorianus
ataaaaatccactatcgtctatcaa

SEQ ID NO: 178914 - DNA, 25 bp, Saccharomyces pastorianus
ctatcgtctatcaactaatagttat

SEQ ID NO: 178915 - DNA, 25 bp, Saccharomyces pastorianus
tccactatcgtctatcaactaatag

SEQ ID NO: 178916 - DNA, 25 bp, Saccharomyces pastorianus
cactatcgtctatcaactaatagtt

SEQ ID NO: 178917 - DNA, 25 bp, Saccharomyces pastorianus
atccactatcgtctatcaactaata

SEQ ID NO: 178918 - DNA, 25 bp, Saccharomyces pastorianus
aataaaaatccactatcgtctatca

SEQ ID NO: 178919 - DNA, 25 bp, Saccharomyces pastorianus
gaataaaaatccactatcgtctatc

SEQ ID NO: 178920 - DNA, 25 bp, Saccharomyces pastorianus
atggcttgaccatatggaggcaaac

SEQ ID NO: 178921 - DNA, 25 bp, Saccharomyces pastorianus
ccatatggaggcaaacgatccttca

SEQ ID NO: 178922 - DNA, 25 bp, Saccharomyces pastorianus
ccagaattgtcccagctattatcaa

SEQ ID NO: 178923 - DNA, 25 bp, Saccharomyces pastorianus
aaccagaattgtcccagctattatc

SEQ ID NO: 178924 - DNA, 25 bp, Saccharomyces pastorianus
tgaccatatggaggcaaacgatcct

SEQ ID NO: 178925 - DNA, 25 bp, Saccharomyces pastorianus
ttgtcccagctattatcaatgtccg

SEQ ID NO: 178926 - DNA, 25 bp, Saccharomyces pastorianus
tttatgaaaccagaattgtcccagc

SEQ ID NO: 178927 - DNA, 25 bp, Saccharomyces pastorianus
gaattgtcccagctattatcaatgt

SEQ ID NO: 178928 - DNA, 25 bp, Saccharomyces pastorianus
gaaaccagaattgtcccagctatta

SEQ ID NO: 178929 - DNA, 25 bp, Saccharomyces pastorianus
atgaaaccagaattgtcccagctat

SEQ ID NO: 178930 - DNA, 25 bp, Saccharomyces pastorianus
gaatggcttgaccatatggaggcaa

SEQ ID NO: 178931 - DNA, 25 bp, Saccharomyces pastorianus
ggtatcactgtccaaacaattacaa

SEQ ID NO: 178932 - DNA, 25 bp, Saccharomyces pastorianus
acctcatgcggcgttactgaattta

SEQ ID NO: 178933 - DNA, 25 bp, Saccharomyces pastorianus
ggcgttactgaatttacttccttct

SEQ ID NO: 178934 - DNA, 25 bp, Saccharomyces pastorianus
ttacttccttcttcggtatcactgt

SEQ ID NO: 178935 - DNA, 25 bp, Saccharomyces pastorianus
tactgaatttacttccttcttcggt

SEQ ID NO: 178936 - DNA, 25 bp, Saccharomyces pastorianus
tctgctactacctcatgcggcgtta

SEQ ID NO: 178937 - DNA, 25 bp, Saccharomyces pastorianus
ccaagtgagccatggtcaaccttaa

SEQ ID NO: 178938 - DNA, 25 bp, Saccharomyces pastorianus
gagccatggtcaaccttaactcctt

SEQ ID NO: 178939 - DNA, 25 bp, Saccharomyces pastorianus
atgcggcgttactgaatttacttcc

SEQ ID NO: 178940 - DNA, 25 bp, Saccharomyces pastorianus
ttcttcggtatcactgtccaaacaa

SEQ ID NO: 178941 - DNA, 25 bp, Saccharomyces pastorianus
gaatttacttccttcttcggtatca

SEQ ID NO: 178942 - DNA, 25 bp, Saccharomyces pastorianus
taagtgcagggcgacaaaagttaac

SEQ ID NO: 178943 - DNA, 25 bp, Saccharomyces pastorianus
aaaatctcaaatggatcaggtggag

SEQ ID NO: 178944 - DNA, 25 bp, Saccharomyces pastorianus
ggcgacaaaagttaaccatcgaaca

SEQ ID NO: 178945 - DNA, 25 bp, Saccharomyces pastorianus
ttacgcaaggagctagacgaaattt

SEQ ID NO: 178946 - DNA, 25 bp, Saccharomyces pastorianus
gattacgcaaggagctagacgaaat

SEQ ID NO: 178947 - DNA, 25 bp, Saccharomyces pastorianus
cataagtggattacgcaaggagcta

SEQ ID NO: 178948 - DNA, 25 bp, Saccharomyces pastorianus
acaaaagcaggaaatcataagtgga

SEQ ID NO: 178949 - DNA, 25 bp, Saccharomyces pastorianus
atcataagtggattacgcaaggagc

SEQ ID NO: 178950 - DNA, 25 bp, Saccharomyces pastorianus
aagtggattacgcaaggagctagac

SEQ ID NO: 178951 - DNA, 25 bp, Saccharomyces pastorianus
aaagttaaccatcgaacaaaagcag

SEQ ID NO: 178952 - DNA, 25 bp, Saccharomyces pastorianus
gcaaggagctagacgaaatttattc

SEQ ID NO: 178953 - DNA, 25 bp, Saccharomyces pastorianus
ttcttcatcaagatcctcgatttcc

SEQ ID NO: 178954 - DNA, 25 bp, Saccharomyces pastorianus
gtcattgtcatcctgttcttcaaag

SEQ ID NO: 178955 - DNA, 25 bp, Saccharomyces pastorianus
gacagcgagttcatagatagtttgg

SEQ ID NO: 178956 - DNA, 25 bp, Saccharomyces pastorianus
aaaggcggcgaaatcttcttcatca

SEQ ID NO: 178957 - DNA, 25 bp, Saccharomyces pastorianus
attttcttcctcgtcatcattgtca

SEQ ID NO: 178958 - DNA, 25 bp, Saccharomyces pastorianus
atcctgttcttcaaaggcggcgaaa

SEQ ID NO: 178959 - DNA, 25 bp, Saccharomyces pastorianus
tctccttttctcgacatcgggatta

SEQ ID NO: 178960 - DNA, 25 bp, Saccharomyces pastorianus
taaagtcctcatcgtcattgtcatc

SEQ ID NO: 178961 - DNA, 25 bp, Saccharomyces pastorianus
gtcatcattgtcactgtcattgtca

SEQ ID NO: 178962 - DNA, 25 bp, Saccharomyces pastorianus
gaagaggaagatctctttctccttt

SEQ ID NO: 178963 - DNA, 25 bp, Saccharomyces pastorianus
atcgggattaaagtcctcatcgtca

SEQ ID NO: 178964 - DNA, 25 bp, Saccharomyces pastorianus
aacaaacaagtccagcaacagcagc

SEQ ID NO: 178965 - DNA, 25 bp, Saccharomyces pastorianus
tggtcaacaaacaagtccagcaaca

SEQ ID NO: 178966 - DNA, 25 bp, Saccharomyces pastorianus
gtcaacaaacaagtccagcaacagc

SEQ ID NO: 178967 - DNA, 25 bp, Saccharomyces pastorianus
aaacaagtccagcaacagcagcaaa

SEQ ID NO: 178968 - DNA, 25 bp, Saccharomyces pastorianus
acaaacaagtccagcaacagcagca

SEQ ID NO: 178969 - DNA, 25 bp, Saccharomyces pastorianus
tcaacaaacaagtccagcaacagca

SEQ ID NO: 178970 - DNA, 25 bp, Saccharomyces pastorianus
gcagcaaattcagcaacaacagcag

SEQ ID NO: 178971 - DNA, 25 bp, Saccharomyces pastorianus
acaagtccagcaacagcagcaaatt

SEQ ID NO: 178972 - DNA, 25 bp, Saccharomyces pastorianus
caaacaagtccagcaacagcagcaa

SEQ ID NO: 178973 - DNA, 25 bp, Saccharomyces pastorianus
caacaaacaagtccagcaacagcag

SEQ ID NO: 178974 - DNA, 25 bp, Saccharomyces pastorianus
ggtcaacaaacaagtccagcaacag

SEQ ID NO: 178975 - DNA, 25 bp, Saccharomyces pastorianus
tcgtggtttaatgactggtgttgag

SEQ ID NO: 178976 - DNA, 25 bp, Saccharomyces pastorianus
ggaggtgtctttagaattgcacccc

SEQ ID NO: 178977 - DNA, 25 bp, Saccharomyces pastorianus
ggactgtctgcaaatttgatatctg

SEQ ID NO: 178978 - DNA, 25 bp, Saccharomyces pastorianus
aagctagcggacaggatgatggaac

SEQ ID NO: 178979 - DNA, 25 bp, Saccharomyces pastorianus
gatgatggaacttggactgtctgca

SEQ ID NO: 178980 - DNA, 25 bp, Saccharomyces pastorianus
atttgatatctgttcctgcgtttgg

SEQ ID NO: 178981 - DNA, 25 bp, Saccharomyces pastorianus
gaaaattctgcaaacatgggtgatc

SEQ ID NO: 178982 - DNA, 25 bp, Saccharomyces pastorianus
acatgggtgatctatttaggtcaga

SEQ ID NO: 178983 - DNA, 25 bp, Saccharomyces pastorianus
tgagattatcaagccggaaaccaga

SEQ ID NO: 178984 - DNA, 25 bp, Saccharomyces pastorianus
ttcctgcgtttggaggtgtctttag

SEQ ID NO: 178985 - DNA, 25 bp, Saccharomyces pastorianus
cccctatcaccatttctaaagaaga

SEQ ID NO: 178986 - DNA, 25 bp, Saccharomyces pastorianus
gttccagcaacagtatttgtcccaa

SEQ ID NO: 178987 - DNA, 25 bp, Saccharomyces pastorianus
aacagcagcaacaattcgctcaaca

SEQ ID NO: 178988 - DNA, 25 bp, Saccharomyces pastorianus
tcaatcacagcaaagtccacaaagt

SEQ ID NO: 178989 - DNA, 25 bp, Saccharomyces pastorianus
aacagcatcagttccagcaacagta

SEQ ID NO: 178990 - DNA, 25 bp, Saccharomyces pastorianus
gcaacagtatttgtcccaacaacaa

SEQ ID NO: 178991 - DNA, 25 bp, Saccharomyces pastorianus
caacaaccagtacaagctcaagctc

SEQ ID NO: 178992 - DNA, 25 bp, Saccharomyces pastorianus
acaacctcaatcacagcaaagtcca

SEQ ID NO: 178993 - DNA, 25 bp, Saccharomyces pastorianus
gcaacaacaaccagtacaagctcaa

SEQ ID NO: 178994 - DNA, 25 bp, Saccharomyces pastorianus
aacaattcgctcaacaacagcatca

SEQ ID NO: 178995 - DNA, 25 bp, Saccharomyces pastorianus
caacctcaatcacaacaacctcaat

SEQ ID NO: 178996 - DNA, 25 bp, Saccharomyces pastorianus
aagctcaagcccaagaagaacaatt

SEQ ID NO: 178997 - DNA, 25 bp, Saccharomyces pastorianus
agctctttggaagactcattacctt

SEQ ID NO: 178998 - DNA, 25 bp, Saccharomyces pastorianus
aagaatgtcctgagtcttgtagctc

SEQ ID NO: 178999 - DNA, 25 bp, Saccharomyces pastorianus
gaatctactgatttcagctctttgg

SEQ ID NO: 179000 - DNA, 25 bp, Saccharomyces pastorianus
gtcttgtagctcactatttgaccta

SEQ ID NO: 179001 - DNA, 25 bp, Saccharomyces pastorianus
gctacccaaagtcactcatcagaat

SEQ ID NO: 179002 - DNA, 25 bp, Saccharomyces pastorianus
aaaatcgtagatcttggcctacaaa

SEQ ID NO: 179003 - DNA, 25 bp, Saccharomyces pastorianus
ttcaaacaccctatggaaccattag

SEQ ID NO: 179004 - DNA, 25 bp, Saccharomyces pastorianus
gactcattaccttctagtatctctc

SEQ ID NO: 179005 - DNA, 25 bp, Saccharomyces pastorianus
tctctcctcctatacagacaacaag

SEQ ID NO: 179006 - DNA, 25 bp, Saccharomyces pastorianus
gaaggatcatgtctctcaagatttc

SEQ ID NO: 179007 - DNA, 25 bp, Saccharomyces pastorianus
ggaggactgtgatatccttggagat

SEQ ID NO: 179008 - DNA, 25 bp, Saccharomyces pastorianus
ttctacctaagtttttctccattca

SEQ ID NO: 179009 - DNA, 25 bp, Saccharomyces pastorianus
aagatctcttggtctctttgacatt

SEQ ID NO: 179010 - DNA, 25 bp, Saccharomyces pastorianus
ttgaagctttagactcagatcagga

SEQ ID NO: 179011 - DNA, 25 bp, Saccharomyces pastorianus
gcatggatggccttccagagagtaa

SEQ ID NO: 179012 - DNA, 25 bp, Saccharomyces pastorianus
agggctcagggctacgcagatgatt

SEQ ID NO: 179013 - DNA, 25 bp, Saccharomyces pastorianus
tctgaagagcatttggagctaacaa

SEQ ID NO: 179014 - DNA, 25 bp, Saccharomyces pastorianus
ggcctatccgactgcactttatgaa

SEQ ID NO: 179015 - DNA, 25 bp, Saccharomyces pastorianus
aactgaagatccatgggcctatccg

SEQ ID NO: 179016 - DNA, 25 bp, Saccharomyces pastorianus
taaagaatggttactgagggctcag

SEQ ID NO: 179017 - DNA, 25 bp, Saccharomyces pastorianus
gaaatcccgccattgaagctttaga

SEQ ID NO: 179018 - DNA, 25 bp, Saccharomyces pastorianus
taactgagtatagaaatcccgccat

SEQ ID NO: 179019 - DNA, 25 bp, Saccharomyces pastorianus
aatcaaggatcccaactcggttttg

SEQ ID NO: 179020 - DNA, 25 bp, Saccharomyces pastorianus
cgatttcgagtttattgatttagac

SEQ ID NO: 179021 - DNA, 25 bp, Saccharomyces pastorianus
cattgcccttatctccagggaccat

SEQ ID NO: 179022 - DNA, 25 bp, Saccharomyces pastorianus
atgaaatcaaggatcccaactcggt

SEQ ID NO: 179023 - DNA, 25 bp, Saccharomyces pastorianus
ctgtgtacggatacgatttcgagtt

SEQ ID NO: 179024 - DNA, 25 bp, Saccharomyces pastorianus
gaaaggcgcataaagacattactgt

SEQ ID NO: 179025 - DNA, 25 bp, Saccharomyces pastorianus
tttcagagaaggcattaacgtcgaa

SEQ ID NO: 179026 - DNA, 25 bp, Saccharomyces pastorianus
aagacattactgtgtacggatacga

SEQ ID NO: 179027 - DNA, 25 bp, Saccharomyces pastorianus
ggcattaacgtcgaagatgaaatca

SEQ ID NO: 179028 - DNA, 25 bp, Saccharomyces pastorianus
aagccattgcccttatctccaggga

SEQ ID NO: 179029 - DNA, 25 bp, Saccharomyces pastorianus
gaagttgtttagcttcacaaagaag

SEQ ID NO: 179030 - DNA, 25 bp, Saccharomyces pastorianus
aatgcaaccgcttggattaactcaa

SEQ ID NO: 179031 - DNA, 25 bp, Saccharomyces pastorianus
gacactagattattaacaacactcg

SEQ ID NO: 179032 - DNA, 25 bp, Saccharomyces pastorianus
gtatatccactactcaacatgttgg

SEQ ID NO: 179033 - DNA, 25 bp, Saccharomyces pastorianus
gtgattacacacttaatatctctgt

SEQ ID NO: 179034 - DNA, 25 bp, Saccharomyces pastorianus
aacactcgagaatgcaaccgcttgg

SEQ ID NO: 179035 - DNA, 25 bp, Saccharomyces pastorianus
cactaacgtagcagaccggcttgat

SEQ ID NO: 179036 - DNA, 25 bp, Saccharomyces pastorianus
accgaatccaatacgtatatccact

SEQ ID NO: 179037 - DNA, 25 bp, Saccharomyces pastorianus
gggcacaagtgattacacacttaat

SEQ ID NO: 179038 - DNA, 25 bp, Saccharomyces pastorianus
cagagaaattggttgacactagatt

SEQ ID NO: 179039 - DNA, 25 bp, Saccharomyces pastorianus
gcttggattaactcaaactctattg

SEQ ID NO: 179040 - DNA, 25 bp, Saccharomyces pastorianus
gcatggctaaattctaccgaatcca

SEQ ID NO: 179041 - DNA, 25 bp, Saccharomyces pastorianus
agacaataattcgtttcctcctcac

SEQ ID NO: 179042 - DNA, 25 bp, Saccharomyces pastorianus
ttgtttctacaatcatccctcgtcg

SEQ ID NO: 179043 - DNA, 25 bp, Saccharomyces pastorianus
gggaatttcccaagcttctgatatt

SEQ ID NO: 179044 - DNA, 25 bp, Saccharomyces pastorianus
tttcctcctcacttttacttagatg

SEQ ID NO: 179045 - DNA, 25 bp, Saccharomyces pastorianus
tttcaatctacttcattctcgagcg

SEQ ID NO: 179046 - DNA, 25 bp, Saccharomyces pastorianus
atgacgctttgattgatcatcacag

SEQ ID NO: 179047 - DNA, 25 bp, Saccharomyces pastorianus
tattggattcccattgtttctacaa

SEQ ID NO: 179048 - DNA, 25 bp, Saccharomyces pastorianus
ctcgtcgccgaattttcaatctact

SEQ ID NO: 179049 - DNA, 25 bp, Saccharomyces pastorianus
agcgcagctcctttctcgggaattt

SEQ ID NO: 179050 - DNA, 25 bp, Saccharomyces pastorianus
ctgcatgtctcagtgatgacgcttt

SEQ ID NO: 179051 - DNA, 25 bp, Saccharomyces pastorianus
aatactttcagttcatctccaccca

SEQ ID NO: 179052 - DNA, 25 bp, Saccharomyces pastorianus
aaggcattgcaaccatacagtacaa

SEQ ID NO: 179053 - DNA, 25 bp, Saccharomyces pastorianus
aaattattcaggaaattcgatacta

SEQ ID NO: 179054 - DNA, 25 bp, Saccharomyces pastorianus
gtacaaagattttatcgatgctaca

SEQ ID NO: 179055 - DNA, 25 bp, Saccharomyces pastorianus
attgcaaccatacagtacaaagatt

SEQ ID NO: 179056 - DNA, 25 bp, Saccharomyces pastorianus
ggcattgcaaccatacagtacaaag

SEQ ID NO: 179057 - DNA, 25 bp, Saccharomyces pastorianus
gaaggcattgcaaccatacagtaca

SEQ ID NO: 179058 - DNA, 25 bp, Saccharomyces pastorianus
actaatcaagaaggcattgcaacca

SEQ ID NO: 179059 - DNA, 25 bp, Saccharomyces pastorianus
attcgatactaatcaagaaggcatt

SEQ ID NO: 179060 - DNA, 25 bp, Saccharomyces pastorianus
agaaggcattgcaaccatacagtac

SEQ ID NO: 179061 - DNA, 25 bp, Saccharomyces pastorianus
gcaaccatacagtacaaagatttta

SEQ ID NO: 179062 - DNA, 25 bp, Saccharomyces pastorianus
ttcaggaaattcgatactaatcaag

SEQ ID NO: 179063 - DNA, 25 bp, Saccharomyces pastorianus
gcaatcggtagcgcgtatgactctt

SEQ ID NO: 179064 - DNA, 25 bp, Saccharomyces pastorianus
atcggtagcgcgtatgactcttaat

SEQ ID NO: 179065 - DNA, 25 bp, Saccharomyces pastorianus
tcggtagcgcgtatgactcttaatc

SEQ ID NO: 179066 - DNA, 25 bp, Saccharomyces pastorianus
ggcgcaatcggtagcgcgtatgact

SEQ ID NO: 179067 - DNA, 25 bp, Saccharomyces pastorianus
cttgttggcgcaatcggtagcgcgt

SEQ ID NO: 179068 - DNA, 25 bp, Saccharomyces pastorianus
ttggcgcaatcggtagcgcgtatga

SEQ ID NO: 179069 - DNA, 25 bp, Saccharomyces pastorianus
gcgcaatcggtagcgcgtatgactc

SEQ ID NO: 179070 - DNA, 25 bp, Saccharomyces pastorianus
ttgttggcgcaatcggtagcgcgta

SEQ ID NO: 179071 - DNA, 25 bp, Saccharomyces pastorianus
aatcggtagcgcgtatgactcttaa

SEQ ID NO: 179072 - DNA, 25 bp, Saccharomyces pastorianus
ccttgttggcgcaatcggtagcgcg

SEQ ID NO: 179073 - DNA, 25 bp, Saccharomyces pastorianus
ggtagcgcgtatgactcttaatcat

SEQ ID NO: 179074 - DNA, 25 bp, Saccharomyces pastorianus
gcaccactgactgaaatgcaaatat

SEQ ID NO: 179075 - DNA, 25 bp, Saccharomyces pastorianus
ctcgaagtcatttggaatggaacca

SEQ ID NO: 179076 - DNA, 25 bp, Saccharomyces pastorianus
ggtatctcgaagtcatttggaatgg

SEQ ID NO: 179077 - DNA, 25 bp, Saccharomyces pastorianus
caccactgactgaaatgcaaatata

SEQ ID NO: 179078 - DNA, 25 bp, Saccharomyces pastorianus
aggtatctcgaagtcatttggaatg

SEQ ID NO: 179079 - DNA, 25 bp, Saccharomyces pastorianus
atctcgaagtcatttggaatggaac

SEQ ID NO: 179080 - DNA, 25 bp, Saccharomyces pastorianus
gaagtcatttggaatggaaccagca

SEQ ID NO: 179081 - DNA, 25 bp, Saccharomyces pastorianus
gtatctcgaagtcatttggaatgga

SEQ ID NO: 179082 - DNA, 25 bp, Saccharomyces pastorianus
agcaccactgactgaaatgcaaata

SEQ ID NO: 179083 - DNA, 25 bp, Saccharomyces pastorianus
ccactgactgaaatgcaaatatata

SEQ ID NO: 179084 - DNA, 25 bp, Saccharomyces pastorianus
ggaaccagcaccactgactgaaatg

SEQ ID NO: 179085 - DNA, 25 bp, Saccharomyces pastorianus
ggacgtccaaattccattgctgcat

SEQ ID NO: 179086 - DNA, 25 bp, Saccharomyces pastorianus
gcatcatctgcaggttcgttatttt

SEQ ID NO: 179087 - DNA, 25 bp, Saccharomyces pastorianus
ggagaactttcagccacaacttcat

SEQ ID NO: 179088 - DNA, 25 bp, Saccharomyces pastorianus
gatggtggtttcattctccaaagcc

SEQ ID NO: 179089 - DNA, 25 bp, Saccharomyces pastorianus
atgtgtatcggtatcctcacttttc

SEQ ID NO: 179090 - DNA, 25 bp, Saccharomyces pastorianus
gagtaccaacaggttcgcttttcaa

SEQ ID NO: 179091 - DNA, 25 bp, Saccharomyces pastorianus
tcccgttgcttcttcatttggagaa

SEQ ID NO: 179092 - DNA, 25 bp, Saccharomyces pastorianus
tattttcatctgctacttcggctac

SEQ ID NO: 179093 - DNA, 25 bp, Saccharomyces pastorianus
agcttccgaaggattaccctcattg

SEQ ID NO: 179094 - DNA, 25 bp, Saccharomyces pastorianus
tcagctacttcttcagtctgtacaa

SEQ ID NO: 179095 - DNA, 25 bp, Saccharomyces pastorianus
gtgtcctcgggcatcttattttcat

SEQ ID NO: 179096 - DNA, 25 bp, Saccharomyces pastorianus
actctcactttccactccatcaccc

SEQ ID NO: 179097 - DNA, 25 bp, Saccharomyces pastorianus
tctcactttccactccatcacccat

SEQ ID NO: 179098 - DNA, 25 bp, Saccharomyces pastorianus
cactttccactccatcacccatctc

SEQ ID NO: 179099 - DNA, 25 bp, Saccharomyces pastorianus
actttccactccatcacccatctct

SEQ ID NO: 179100 - DNA, 25 bp, Saccharomyces pastorianus
tcactttccactccatcacccatct

SEQ ID NO: 179101 - DNA, 25 bp, Saccharomyces pastorianus
ctactctcactttccactccatcac

SEQ ID NO: 179102 - DNA, 25 bp, Saccharomyces pastorianus
ctctcactttccactccatcaccca

SEQ ID NO: 179103 - DNA, 25 bp, Saccharomyces pastorianus
tactctcactttccactccatcacc

SEQ ID NO: 179104 - DNA, 25 bp, Saccharomyces pastorianus
ccatcacccatctctcaccatcagt

SEQ ID NO: 179105 - DNA, 25 bp, Saccharomyces pastorianus
cctactctcactttccactccatca

SEQ ID NO: 179106 - DNA, 25 bp, Saccharomyces pastorianus
tttccactccatcacccatctctca

SEQ ID NO: 179107 - DNA, 25 bp, Saccharomyces pastorianus
gaaaactttgatggatacgtagaat

SEQ ID NO: 179108 - DNA, 25 bp, Saccharomyces pastorianus
ttgatgcacggaacaggagatgata

SEQ ID NO: 179109 - DNA, 25 bp, Saccharomyces pastorianus
ggatacgtagaatcaagcgttcata

SEQ ID NO: 179110 - DNA, 25 bp, Saccharomyces pastorianus
gattttacgattctgtttatactga

SEQ ID NO: 179111 - DNA, 25 bp, Saccharomyces pastorianus
tgataacgttcactttcaaaattcc

SEQ ID NO: 179112 - DNA, 25 bp, Saccharomyces pastorianus
gctttggcacaagcaaatagatttt

SEQ ID NO: 179113 - DNA, 25 bp, Saccharomyces pastorianus
gagaggtacatgcatactcctcaag

SEQ ID NO: 179114 - DNA, 25 bp, Saccharomyces pastorianus
caagcgttcataatgtcactgcttt

SEQ ID NO: 179115 - DNA, 25 bp, Saccharomyces pastorianus
aatagatttttgttgatgcacggaa

SEQ ID NO: 179116 - DNA, 25 bp, Saccharomyces pastorianus
ggagatgataacgttcactttcaaa

SEQ ID NO: 179117 - DNA, 25 bp, Saccharomyces pastorianus
gactggagattttacgattctgttt

SEQ ID NO: 179118 - DNA, 25 bp, Saccharomyces pastorianus
tgagggctttatatttgggtgcagt

SEQ ID NO: 179119 - DNA, 25 bp, Saccharomyces pastorianus
gaatttgtcacagagaggtcttctg

SEQ ID NO: 179120 - DNA, 25 bp, Saccharomyces pastorianus
cattgacaaagcgactggccaagaa

SEQ ID NO: 179121 - DNA, 25 bp, Saccharomyces pastorianus
cgctgagggcaatgaggtcgtaaaa

SEQ ID NO: 179122 - DNA, 25 bp, Saccharomyces pastorianus
agtcgattcgttaccgagtttggtg

SEQ ID NO: 179123 - DNA, 25 bp, Saccharomyces pastorianus
tagctgctaaccacacgatccatgg

SEQ ID NO: 179124 - DNA, 25 bp, Saccharomyces pastorianus
ggatgctgtctctgaagagcctttt

SEQ ID NO: 179125 - DNA, 25 bp, Saccharomyces pastorianus
acacatttaatgacgctgagggcaa

SEQ ID NO: 179126 - DNA, 25 bp, Saccharomyces pastorianus
ggtcttctgaaggtagtcgattcgt

SEQ ID NO: 179127 - DNA, 25 bp, Saccharomyces pastorianus
accacacgatccatggtgtcatttt

SEQ ID NO: 179128 - DNA, 25 bp, Saccharomyces pastorianus
gccttttatcgaatggctagctgct

SEQ ID NO: 179129 - DNA, 25 bp, Saccharomyces pastorianus
gagtttacgaatcctacggatgtta

SEQ ID NO: 179130 - DNA, 25 bp, Saccharomyces pastorianus
tagagtttacgaatcctacggatgt

SEQ ID NO: 179131 - DNA, 25 bp, Saccharomyces pastorianus
tatgtgatcatggaatagagtttac

SEQ ID NO: 179132 - DNA, 25 bp, Saccharomyces pastorianus
atagaataaattcgctgttcagtgg

SEQ ID NO: 179133 - DNA, 25 bp, Saccharomyces pastorianus
aataaattcgctgttcagtggtaag

SEQ ID NO: 179134 - DNA, 25 bp, Saccharomyces pastorianus
gtttacgaatcctacggatgttaat

SEQ ID NO: 179135 - DNA, 25 bp, Saccharomyces pastorianus
gaataaattcgctgttcagtggtaa

SEQ ID NO: 179136 - DNA, 25 bp, Saccharomyces pastorianus
ggaatagagtttacgaatcctacgg

SEQ ID NO: 179137 - DNA, 25 bp, Saccharomyces pastorianus
gaatcctacggatgttaatagaata

SEQ ID NO: 179138 - DNA, 25 bp, Saccharomyces pastorianus
aatagagtttacgaatcctacggat

SEQ ID NO: 179139 - DNA, 25 bp, Saccharomyces pastorianus
ttacgaatcctacggatgttaatag

SEQ ID NO: 179140 - DNA, 25 bp, Saccharomyces pastorianus
tgcttaattatgctggtgctgccct

SEQ ID NO: 179141 - DNA, 25 bp, Saccharomyces pastorianus
gcaccatcctaaattgttctctttc

SEQ ID NO: 179142 - DNA, 25 bp, Saccharomyces pastorianus
gattgttccaactactcggctggca

SEQ ID NO: 179143 - DNA, 25 bp, Saccharomyces pastorianus
gactggcgcgaaatggcttaacttt

SEQ ID NO: 179144 - DNA, 25 bp, Saccharomyces pastorianus
tggcttaactttggcagcggtccca

SEQ ID NO: 179145 - DNA, 25 bp, Saccharomyces pastorianus
aagagcaacacccaaaagtcgccat

SEQ ID NO: 179146 - DNA, 25 bp, Saccharomyces pastorianus
aaaagccatgtgttctcgctgtgct

SEQ ID NO: 179147 - DNA, 25 bp, Saccharomyces pastorianus
accagaccattgatctataccgatt

SEQ ID NO: 179148 - DNA, 25 bp, Saccharomyces pastorianus
gcggtcccatttatcttagtgcgta

SEQ ID NO: 179149 - DNA, 25 bp, Saccharomyces pastorianus
cagtcgcataatggccctcttgaag

SEQ ID NO: 179150 - DNA, 25 bp, Saccharomyces pastorianus
ttcccactctattcggcttttagaa

SEQ ID NO: 179151 - DNA, 25 bp, Saccharomyces pastorianus
aaaggggaagcgatatttctacata

SEQ ID NO: 179152 - DNA, 25 bp, Saccharomyces pastorianus
agaggaatcctcaaaggggaagcga

SEQ ID NO: 179153 - DNA, 25 bp, Saccharomyces pastorianus
ggaatcctcaaaggggaagcgatat

SEQ ID NO: 179154 - DNA, 25 bp, Saccharomyces pastorianus
ctcaaaggggaagcgatatttctac

SEQ ID NO: 179155 - DNA, 25 bp, Saccharomyces pastorianus
tcctcaaaggggaagcgatatttct

SEQ ID NO: 179156 - DNA, 25 bp, Saccharomyces pastorianus
atcctcaaaggggaagcgatatttc

SEQ ID NO: 179157 - DNA, 25 bp, Saccharomyces pastorianus
caaaggggaagcgatatttctacat

SEQ ID NO: 179158 - DNA, 25 bp, Saccharomyces pastorianus
ctcgagggtagaggaatcctcaaag

SEQ ID NO: 179159 - DNA, 25 bp, Saccharomyces pastorianus
gaggaatcctcaaaggggaagcgat

SEQ ID NO: 179160 - DNA, 25 bp, Saccharomyces pastorianus
tcgagggtagaggaatcctcaaagg

SEQ ID NO: 179161 - DNA, 25 bp, Saccharomyces pastorianus
cgagggtagaggaatcctcaaaggg

SEQ ID NO: 179162 - DNA, 25 bp, Saccharomyces pastorianus
gaattgggtcttgtcccacactaaa

SEQ ID NO: 179163 - DNA, 25 bp, Saccharomyces pastorianus
tggtgcccgtttgctgactgtaaat

SEQ ID NO: 179164 - DNA, 25 bp, Saccharomyces pastorianus
gatgggacatccttcgagtagtaag

SEQ ID NO: 179165 - DNA, 25 bp, Saccharomyces pastorianus
actgttccctggcattgaaaaatga

SEQ ID NO: 179166 - DNA, 25 bp, Saccharomyces pastorianus
ttctgttggatttgtgagggcccct

SEQ ID NO: 179167 - DNA, 25 bp, Saccharomyces pastorianus
gattctgtttcaattgcggattcga

SEQ ID NO: 179168 - DNA, 25 bp, Saccharomyces pastorianus
gtgcacttgcgagatacgtcatcat

SEQ ID NO: 179169 - DNA, 25 bp, Saccharomyces pastorianus
gactgtaaatccatcgtgcacttgc

SEQ ID NO: 179170 - DNA, 25 bp, Saccharomyces pastorianus
aatcgtaactataaatggtgcccgt

SEQ ID NO: 179171 - DNA, 25 bp, Saccharomyces pastorianus
aagttcattccccagcagattgtaa

SEQ ID NO: 179172 - DNA, 25 bp, Saccharomyces pastorianus
gtttgcattattcacctttcgttaa

SEQ ID NO: 179173 - DNA, 25 bp, Saccharomyces pastorianus
gcaccaatcctgctgggactagata

SEQ ID NO: 179174 - DNA, 25 bp, Saccharomyces pastorianus
cgcttatgcaagacgttactgagaa

SEQ ID NO: 179175 - DNA, 25 bp, Saccharomyces pastorianus
agtcgaaattatgccacgcttatgc

SEQ ID NO: 179176 - DNA, 25 bp, Saccharomyces pastorianus
tctagagccccttcaagtcgaaatt

SEQ ID NO: 179177 - DNA, 25 bp, Saccharomyces pastorianus
ctcgttgacgaggatggcaccaatc

SEQ ID NO: 179178 - DNA, 25 bp, Saccharomyces pastorianus
atggcgagaaatttcctctagagcc

SEQ ID NO: 179179 - DNA, 25 bp, Saccharomyces pastorianus
atatgtgctgctgccactaattctt

SEQ ID NO: 179180 - DNA, 25 bp, Saccharomyces pastorianus
gcagcgcttccttcagatggaacaa

SEQ ID NO: 179181 - DNA, 25 bp, Saccharomyces pastorianus
tacaaccggaagtcttacactctaa

SEQ ID NO: 179182 - DNA, 25 bp, Saccharomyces pastorianus
gttatcaccgatgcaagaacctcgt

SEQ ID NO: 179183 - DNA, 25 bp, Saccharomyces pastorianus
gaacggcttgttctctgtcgatggc

SEQ ID NO: 179184 - DNA, 25 bp, Saccharomyces pastorianus
ttccctcttgcgttttagttcctct

SEQ ID NO: 179185 - DNA, 25 bp, Saccharomyces pastorianus
tctagccttttctgttctctaatac

SEQ ID NO: 179186 - DNA, 25 bp, Saccharomyces pastorianus
agcgcatcctctgcaattaatcttt

SEQ ID NO: 179187 - DNA, 25 bp, Saccharomyces pastorianus
tagttcctctttctgtttccgttgt

SEQ ID NO: 179188 - DNA, 25 bp, Saccharomyces pastorianus
attaatctttgtctctcttcttctt

SEQ ID NO: 179189 - DNA, 25 bp, Saccharomyces pastorianus
gtttaatttctgttttcttagcgca

SEQ ID NO: 179190 - DNA, 25 bp, Saccharomyces pastorianus
atttctgttttcttagcgcatcctc

SEQ ID NO: 179191 - DNA, 25 bp, Saccharomyces pastorianus
tctctaatacgtttcctttcttctt

SEQ ID NO: 179192 - DNA, 25 bp, Saccharomyces pastorianus
gtagcttttcttgttctagcctttt

SEQ ID NO: 179193 - DNA, 25 bp, Saccharomyces pastorianus
tgctcttccaatctacgctttctct

SEQ ID NO: 179194 - DNA, 25 bp, Saccharomyces pastorianus
ttctttttctttctgtagcttttct

SEQ ID NO: 179195 - DNA, 25 bp, Saccharomyces pastorianus
tcctattttggtggttccgcatgga

SEQ ID NO: 179196 - DNA, 25 bp, Saccharomyces pastorianus
tggtggttccgcatggaccttcgat

SEQ ID NO: 179197 - DNA, 25 bp, Saccharomyces pastorianus
ctattttggtggttccgcatggacc

SEQ ID NO: 179198 - DNA, 25 bp, Saccharomyces pastorianus
atatggtacgaatgaagactgcttt

SEQ ID NO: 179199 - DNA, 25 bp, Saccharomyces pastorianus
ctggccaacatatggtacgaatgaa

SEQ ID NO: 179200 - DNA, 25 bp, Saccharomyces pastorianus
cctattttggtggttccgcatggac

SEQ ID NO: 179201 - DNA, 25 bp, Saccharomyces pastorianus
tattttggtggttccgcatggacct

SEQ ID NO: 179202 - DNA, 25 bp, Saccharomyces pastorianus
ttggtggttccgcatggaccttcga

SEQ ID NO: 179203 - DNA, 25 bp, Saccharomyces pastorianus
atggtacgaatgaagactgctttgc

SEQ ID NO: 179204 - DNA, 25 bp, Saccharomyces pastorianus
attttggtggttccgcatggacctt

SEQ ID NO: 179205 - DNA, 25 bp, Saccharomyces pastorianus
ggccaacatatggtacgaatgaaga

SEQ ID NO: 179206 - DNA, 25 bp, Saccharomyces pastorianus
ttgggttatcaaacttcgcaacgga

SEQ ID NO: 179207 - DNA, 25 bp, Saccharomyces pastorianus
ttcatacaaaggctagcggattttc

SEQ ID NO: 179208 - DNA, 25 bp, Saccharomyces pastorianus
ccagaccctgaaactcctattgaag

SEQ ID NO: 179209 - DNA, 25 bp, Saccharomyces pastorianus
aacggaggacgtgaagcgcatccac

SEQ ID NO: 179210 - DNA, 25 bp, Saccharomyces pastorianus
gcgaattccgggttccaagtagatt

SEQ ID NO: 179211 - DNA, 25 bp, Saccharomyces pastorianus
gcggattttcagctggatgtttaac

SEQ ID NO: 179212 - DNA, 25 bp, Saccharomyces pastorianus
tgaagagtcgttgagcctgctaggc

SEQ ID NO: 179213 - DNA, 25 bp, Saccharomyces pastorianus
tctcggcgcaataaactctctgtat

SEQ ID NO: 179214 - DNA, 25 bp, Saccharomyces pastorianus
gcctgctaggcgttccaaatgttga

SEQ ID NO: 179215 - DNA, 25 bp, Saccharomyces pastorianus
aaacatattttttgcactcgccaga

SEQ ID NO: 179216 - DNA, 25 bp, Saccharomyces pastorianus
gcgaaaaaatccttggcgaattccg

SEQ ID NO: 179217 - DNA, 25 bp, Saccharomyces pastorianus
gttatcgtcctacgttcttgagaca

SEQ ID NO: 179218 - DNA, 25 bp, Saccharomyces pastorianus
gtttacgctttccaaccagttatcg

SEQ ID NO: 179219 - DNA, 25 bp, Saccharomyces pastorianus
gttgcactgtcttgtctatacttac

SEQ ID NO: 179220 - DNA, 25 bp, Saccharomyces pastorianus
tttcagcgcctaaaagtcgtcgtac

SEQ ID NO: 179221 - DNA, 25 bp, Saccharomyces pastorianus
ttaaatcagaccacctttttcagcg

SEQ ID NO: 179222 - DNA, 25 bp, Saccharomyces pastorianus
gtaccttttacatcactgcttatca

SEQ ID NO: 179223 - DNA, 25 bp, Saccharomyces pastorianus
aaagatagtcgcttttgcgcaatat

SEQ ID NO: 179224 - DNA, 25 bp, Saccharomyces pastorianus
acaattgactccgtgtttacgcttt

SEQ ID NO: 179225 - DNA, 25 bp, Saccharomyces pastorianus
agtcagcttccttgtgtacctttta

SEQ ID NO: 179226 - DNA, 25 bp, Saccharomyces pastorianus
gcacaccatttcctactggttacaa

SEQ ID NO: 179227 - DNA, 25 bp, Saccharomyces pastorianus
aacatattttccacagtcagcttcc

SEQ ID NO: 179228 - DNA, 25 bp, Saccharomyces pastorianus
gagtacaagtggaccaaaatgcaga

SEQ ID NO: 179229 - DNA, 25 bp, Saccharomyces pastorianus
gtacaagtggaccaaaatgcagacg

SEQ ID NO: 179230 - DNA, 25 bp, Saccharomyces pastorianus
aaagtcaagagtacaagtggaccaa

SEQ ID NO: 179231 - DNA, 25 bp, Saccharomyces pastorianus
tcaagagtacaagtggaccaaaatg

SEQ ID NO: 179232 - DNA, 25 bp, Saccharomyces pastorianus
aagtcaagagtacaagtggaccaaa

SEQ ID NO: 179233 - DNA, 25 bp, Saccharomyces pastorianus
acaagtggaccaaaatgcagacgca

SEQ ID NO: 179234 - DNA, 25 bp, Saccharomyces pastorianus
caagcttatgatttaaagtcaagag

SEQ ID NO: 179235 - DNA, 25 bp, Saccharomyces pastorianus
caagtggaccaaaatgcagacgcat

SEQ ID NO: 179236 - DNA, 25 bp, Saccharomyces pastorianus
aagtggaccaaaatgcagacgcatc

SEQ ID NO: 179237 - DNA, 25 bp, Saccharomyces pastorianus
agtggaccaaaatgcagacgcatca

SEQ ID NO: 179238 - DNA, 25 bp, Saccharomyces pastorianus
aagagtacaagtggaccaaaatgca

SEQ ID NO: 179239 - DNA, 25 bp, Saccharomyces pastorianus
aatactgtcttggtttggcaggcac

SEQ ID NO: 179240 - DNA, 25 bp, Saccharomyces pastorianus
gggtcatttttcagctgtttcaagg

SEQ ID NO: 179241 - DNA, 25 bp, Saccharomyces pastorianus
gtattgttgcagaaatcccatccgc

SEQ ID NO: 179242 - DNA, 25 bp, Saccharomyces pastorianus
aatgctattctaacgccctatatgc

SEQ ID NO: 179243 - DNA, 25 bp, Saccharomyces pastorianus
ccttcactttctcgctaattcaata

SEQ ID NO: 179244 - DNA, 25 bp, Saccharomyces pastorianus
gtatcggagctgtcgtttactgtat

SEQ ID NO: 179245 - DNA, 25 bp, Saccharomyces pastorianus
gctacaatctaatggccgtcttcaa

SEQ ID NO: 179246 - DNA, 25 bp, Saccharomyces pastorianus
caagaccattgtgctggcccgtatt

SEQ ID NO: 179247 - DNA, 25 bp, Saccharomyces pastorianus
gcacgcttggttcctgggtaatatc

SEQ ID NO: 179248 - DNA, 25 bp, Saccharomyces pastorianus
atctttcttctataacgcgggtatc

SEQ ID NO: 179249 - DNA, 25 bp, Saccharomyces pastorianus
ttgcgtgtttgacttgggttgctca

SEQ ID NO: 179250 - DNA, 25 bp, Saccharomyces pastorianus
gatctaggaatcctcaaaatggaat

SEQ ID NO: 179251 - DNA, 25 bp, Saccharomyces pastorianus
tctacaagaagttctcctcgaggat

SEQ ID NO: 179252 - DNA, 25 bp, Saccharomyces pastorianus
ctcgaggatctaggaatcctcaaaa

SEQ ID NO: 179253 - DNA, 25 bp, Saccharomyces pastorianus
cgaggatctaggaatcctcaaaatg

SEQ ID NO: 179254 - DNA, 25 bp, Saccharomyces pastorianus
ctacaagaagttctcctcgaggatc

SEQ ID NO: 179255 - DNA, 25 bp, Saccharomyces pastorianus
tcgaggatctaggaatcctcaaaat

SEQ ID NO: 179256 - DNA, 25 bp, Saccharomyces pastorianus
gaggatctaggaatcctcaaaatgg

SEQ ID NO: 179257 - DNA, 25 bp, Saccharomyces pastorianus
tctctacaagaagttctcctcgagg

SEQ ID NO: 179258 - DNA, 25 bp, Saccharomyces pastorianus
ctctacaagaagttctcctcgagga

SEQ ID NO: 179259 - DNA, 25 bp, Saccharomyces pastorianus
ggatctaggaatcctcaaaatggaa

SEQ ID NO: 179260 - DNA, 25 bp, Saccharomyces pastorianus
aggatctaggaatcctcaaaatgga

SEQ ID NO: 179261 - DNA, 25 bp, Saccharomyces pastorianus
atcaaggagagaccttgtctacggc

SEQ ID NO: 179262 - DNA, 25 bp, Saccharomyces pastorianus
tagctagttcattgaccattcaaag

SEQ ID NO: 179263 - DNA, 25 bp, Saccharomyces pastorianus
gggtgcttttctgttcgcacgaaag

SEQ ID NO: 179264 - DNA, 25 bp, Saccharomyces pastorianus
aattgagggtcttcaaatcgtggaa

SEQ ID NO: 179265 - DNA, 25 bp, Saccharomyces pastorianus
gaagtacaattccttccggctattc

SEQ ID NO: 179266 - DNA, 25 bp, Saccharomyces pastorianus
agctggagatactttcctgggcggt

SEQ ID NO: 179267 - DNA, 25 bp, Saccharomyces pastorianus
aatgtttcggttgttgatactacag

SEQ ID NO: 179268 - DNA, 25 bp, Saccharomyces pastorianus
gttcgcacgaaagccctgaagtaca

SEQ ID NO: 179269 - DNA, 25 bp, Saccharomyces pastorianus
gggcggtttggttactcaattgtat

SEQ ID NO: 179270 - DNA, 25 bp, Saccharomyces pastorianus
gaccttttggtcgttaatgaaattg

SEQ ID NO: 179271 - DNA, 25 bp, Saccharomyces pastorianus
ccttccggctattcaaaatgtttcg

SEQ ID NO: 179272 - DNA, 25 bp, Saccharomyces pastorianus
atacaagtggttcaggcgcccagta

SEQ ID NO: 179273 - DNA, 25 bp, Saccharomyces pastorianus
attggatcctccacttgttgaaccg

SEQ ID NO: 179274 - DNA, 25 bp, Saccharomyces pastorianus
atacgatgccgaacgctacatttca

SEQ ID NO: 179275 - DNA, 25 bp, Saccharomyces pastorianus
atattctaagcttgaactctcccac

SEQ ID NO: 179276 - DNA, 25 bp, Saccharomyces pastorianus
gcgcccagtagccatttgaatttga

SEQ ID NO: 179277 - DNA, 25 bp, Saccharomyces pastorianus
ttatgcaaaatgttccgtgtccaat

SEQ ID NO: 179278 - DNA, 25 bp, Saccharomyces pastorianus
tgaatttccattgtatccgaactac

SEQ ID NO: 179279 - DNA, 25 bp, Saccharomyces pastorianus
gaacttcatcagctttcggcaacac

SEQ ID NO: 179280 - DNA, 25 bp, Saccharomyces pastorianus
atattggttcaagatccgcgccata

SEQ ID NO: 179281 - DNA, 25 bp, Saccharomyces pastorianus
gctagcttcagtaattccgccaaag

SEQ ID NO: 179282 - DNA, 25 bp, Saccharomyces pastorianus
gcgccataggcctaacgtttatcaa

SEQ ID NO: 179283 - DNA, 25 bp, Saccharomyces pastorianus
gctcctttgaattcagggacttgca

SEQ ID NO: 179284 - DNA, 25 bp, Saccharomyces pastorianus
gaaactctttggcagctcctttgaa

SEQ ID NO: 179285 - DNA, 25 bp, Saccharomyces pastorianus
ttggcagctcctttgaattcaggga

SEQ ID NO: 179286 - DNA, 25 bp, Saccharomyces pastorianus
ggacttgcatcagttgcgcttatgt

SEQ ID NO: 179287 - DNA, 25 bp, Saccharomyces pastorianus
tttgaattcagggacttgcatcagt

SEQ ID NO: 179288 - DNA, 25 bp, Saccharomyces pastorianus
tcagggacttgcatcagttgcgctt

SEQ ID NO: 179289 - DNA, 25 bp, Saccharomyces pastorianus
aattcagggacttgcatcagttgcg

SEQ ID NO: 179290 - DNA, 25 bp, Saccharomyces pastorianus
gcagctcctttgaattcagggactt

SEQ ID NO: 179291 - DNA, 25 bp, Saccharomyces pastorianus
agggacttgcatcagttgcgcttat

SEQ ID NO: 179292 - DNA, 25 bp, Saccharomyces pastorianus
tctttggcagctcctttgaattcag

SEQ ID NO: 179293 - DNA, 25 bp, Saccharomyces pastorianus
aaactctttggcagctcctttgaat

SEQ ID NO: 179294 - DNA, 25 bp, Saccharomyces pastorianus
gataagggatattggcctactccat

SEQ ID NO: 179295 - DNA, 25 bp, Saccharomyces pastorianus
attcggatccatcaaccggcgatgg

SEQ ID NO: 179296 - DNA, 25 bp, Saccharomyces pastorianus
tacggatgcgagagacgctccgaat

SEQ ID NO: 179297 - DNA, 25 bp, Saccharomyces pastorianus
gacatgttcaagtctcacttttatt

SEQ ID NO: 179298 - DNA, 25 bp, Saccharomyces pastorianus
gctccgaatgatggcgacccaattt

SEQ ID NO: 179299 - DNA, 25 bp, Saccharomyces pastorianus
cctactccatactacttttactgtg

SEQ ID NO: 179300 - DNA, 25 bp, Saccharomyces pastorianus
gggaatatcactcttcctgaagaca

SEQ ID NO: 179301 - DNA, 25 bp, Saccharomyces pastorianus
gaaattcaaaaacaggccgtacgag

SEQ ID NO: 179302 - DNA, 25 bp, Saccharomyces pastorianus
ggtaacctcatcgtattcatatttt

SEQ ID NO: 179303 - DNA, 25 bp, Saccharomyces pastorianus
gaatcccgatgcacattcggatcca

SEQ ID NO: 179304 - DNA, 25 bp, Saccharomyces pastorianus
gtaatttcaatttcatcggttctaa

SEQ ID NO: 179305 - DNA, 25 bp, Saccharomyces pastorianus
attattcttcactctgttttacatg

SEQ ID NO: 179306 - DNA, 25 bp, Saccharomyces pastorianus
tattcttcactctgttttacatgtt

SEQ ID NO: 179307 - DNA, 25 bp, Saccharomyces pastorianus
cgattattcttcactctgttttaca

SEQ ID NO: 179308 - DNA, 25 bp, Saccharomyces pastorianus
attcttcactctgttttacatgttt

SEQ ID NO: 179309 - DNA, 25 bp, Saccharomyces pastorianus
gattattcttcactctgttttacat

SEQ ID NO: 179310 - DNA, 25 bp, Saccharomyces pastorianus
ctctgttttacatgtttcattatcc

SEQ ID NO: 179311 - DNA, 25 bp, Saccharomyces pastorianus
tcttcactctgttttacatgtttca

SEQ ID NO: 179312 - DNA, 25 bp, Saccharomyces pastorianus
ttcactctgttttacatgtttcatt

SEQ ID NO: 179313 - DNA, 25 bp, Saccharomyces pastorianus
acgattattcttcactctgttttac

SEQ ID NO: 179314 - DNA, 25 bp, Saccharomyces pastorianus
ttattcttcactctgttttacatgt

SEQ ID NO: 179315 - DNA, 25 bp, Saccharomyces pastorianus
ttcttcactctgttttacatgtttc

SEQ ID NO: 179316 - DNA, 25 bp, Saccharomyces pastorianus
tagagactctcagactaatcccttc

SEQ ID NO: 179317 - DNA, 25 bp, Saccharomyces pastorianus
ggaagctaacccaactaatccattc

SEQ ID NO: 179318 - DNA, 25 bp, Saccharomyces pastorianus
gtggaatctacctttggtaccgcta

SEQ ID NO: 179319 - DNA, 25 bp, Saccharomyces pastorianus
gctggccttagggtgttattcacag

SEQ ID NO: 179320 - DNA, 25 bp, Saccharomyces pastorianus
gtatcaaatttacggcattccatgc

SEQ ID NO: 179321 - DNA, 25 bp, Saccharomyces pastorianus
tgttctactgcctgtttttgcttta

SEQ ID NO: 179322 - DNA, 25 bp, Saccharomyces pastorianus
gaactcggtggtggacaagtcccaa

SEQ ID NO: 179323 - DNA, 25 bp, Saccharomyces pastorianus
gactatcattctactgttgacgtca

SEQ ID NO: 179324 - DNA, 25 bp, Saccharomyces pastorianus
gagtactggtctcaacatgctgatg

SEQ ID NO: 179325 - DNA, 25 bp, Saccharomyces pastorianus
caggccatgtattgggtgcagcgat

SEQ ID NO: 179326 - DNA, 25 bp, Saccharomyces pastorianus
tgagaggaggccgtgttctactgcc

SEQ ID NO: 179327 - DNA, 25 bp, Saccharomyces pastorianus
ggacaggactccgacaagtgcaagg

SEQ ID NO: 179328 - DNA, 25 bp, Saccharomyces pastorianus
aaggaggagcgtgacacctgcatct

SEQ ID NO: 179329 - DNA, 25 bp, Saccharomyces pastorianus
catgctgtgtttgcaagcccgagaa

SEQ ID NO: 179330 - DNA, 25 bp, Saccharomyces pastorianus
tcgacaagtacaaggagtgcatgaa

SEQ ID NO: 179331 - DNA, 25 bp, Saccharomyces pastorianus
gacaagtgcaaggagttcatcgaca

SEQ ID NO: 179332 - DNA, 25 bp, Saccharomyces pastorianus
ttgttcaacggacaggactccgaca

SEQ ID NO: 179333 - DNA, 25 bp, Saccharomyces pastorianus
ctgtgtttgcaagcccgagaaggag

SEQ ID NO: 179334 - DNA, 25 bp, Saccharomyces pastorianus
gagttcatcgacaagtacaaggagt

SEQ ID NO: 179335 - DNA, 25 bp, Saccharomyces pastorianus
tgcatcttgttcaacggacaggact

SEQ ID NO: 179336 - DNA, 25 bp, Saccharomyces pastorianus
gagcgtgacacctgcatcttgttca

SEQ ID NO: 179337 - DNA, 25 bp, Saccharomyces pastorianus
gtgcaaggagttcatcgacaagtac

SEQ ID NO: 179338 - DNA, 25 bp, Saccharomyces pastorianus
cagattaaagccagccatctccagt

SEQ ID NO: 179339 - DNA, 25 bp, Saccharomyces pastorianus
gccccagaccaagtgactagaatga

SEQ ID NO: 179340 - DNA, 25 bp, Saccharomyces pastorianus
ttgccccagaccaagtgactagaat

SEQ ID NO: 179341 - DNA, 25 bp, Saccharomyces pastorianus
tgccccagaccaagtgactagaatg

SEQ ID NO: 179342 - DNA, 25 bp, Saccharomyces pastorianus
tattgccccagaccaagtgactaga

SEQ ID NO: 179343 - DNA, 25 bp, Saccharomyces pastorianus
attgccccagaccaagtgactagaa

SEQ ID NO: 179344 - DNA, 25 bp, Saccharomyces pastorianus
gtattgccccagaccaagtgactag

SEQ ID NO: 179345 - DNA, 25 bp, Saccharomyces pastorianus
ggtattgccccagaccaagtgacta

SEQ ID NO: 179346 - DNA, 25 bp, Saccharomyces pastorianus
tggtattgccccagaccaagtgact

SEQ ID NO: 179347 - DNA, 25 bp, Saccharomyces pastorianus
cccagaccaagtgactagaatgatc

SEQ ID NO: 179348 - DNA, 25 bp, Saccharomyces pastorianus
agtgactagaatgatcaccggtgtc

SEQ ID NO: 179349 - DNA, 25 bp, Saccharomyces pastorianus
ttacctgatttcgaccagaccaatc

SEQ ID NO: 179350 - DNA, 25 bp, Saccharomyces pastorianus
aattctgttatcttaagaactccac

SEQ ID NO: 179351 - DNA, 25 bp, Saccharomyces pastorianus
tgccagacagactataagatcacgt

SEQ ID NO: 179352 - DNA, 25 bp, Saccharomyces pastorianus
agatcacgtcagattacattcaaga

SEQ ID NO: 179353 - DNA, 25 bp, Saccharomyces pastorianus
gaactccacaatgccagacagacta

SEQ ID NO: 179354 - DNA, 25 bp, Saccharomyces pastorianus
ttaagaactccacaatgccagacag

SEQ ID NO: 179355 - DNA, 25 bp, Saccharomyces pastorianus
atgaggcctcttttgaaattacaag

SEQ ID NO: 179356 - DNA, 25 bp, Saccharomyces pastorianus
tcgaccagaccaatccggatgcttg

SEQ ID NO: 179357 - DNA, 25 bp, Saccharomyces pastorianus
gatttcgaccagaccaatccggatg

SEQ ID NO: 179358 - DNA, 25 bp, Saccharomyces pastorianus
gattacattcaagatcttttacctg

SEQ ID NO: 179359 - DNA, 25 bp, Saccharomyces pastorianus
aagatcttttacctgatttcgacca

SEQ ID NO: 179360 - DNA, 25 bp, Saccharomyces pastorianus
aattaccaccgaacaaggaaggctg

SEQ ID NO: 179361 - DNA, 25 bp, Saccharomyces pastorianus
attatctagacaatacagttgggcg

SEQ ID NO: 179362 - DNA, 25 bp, Saccharomyces pastorianus
tatctagacaatacagttgggcggc

SEQ ID NO: 179363 - DNA, 25 bp, Saccharomyces pastorianus
tctagacaatacagttgggcggcaa

SEQ ID NO: 179364 - DNA, 25 bp, Saccharomyces pastorianus
ctagacaatacagttgggcggcaag

SEQ ID NO: 179365 - DNA, 25 bp, Saccharomyces pastorianus
taccaccgaacaaggaaggctgtat

SEQ ID NO: 179366 - DNA, 25 bp, Saccharomyces pastorianus
ggtgaattaccaccgaacaaggaag

SEQ ID NO: 179367 - DNA, 25 bp, Saccharomyces pastorianus
gaattaccaccgaacaaggaaggct

SEQ ID NO: 179368 - DNA, 25 bp, Saccharomyces pastorianus
ttatctagacaatacagttgggcgg

SEQ ID NO: 179369 - DNA, 25 bp, Saccharomyces pastorianus
tagacaatacagttgggcggcaagg

SEQ ID NO: 179370 - DNA, 25 bp, Saccharomyces pastorianus
accaccgaacaaggaaggctgtata

SEQ ID NO: 179371 - DNA, 25 bp, Saccharomyces pastorianus
tggtttctgttgtggttgctgctgc

SEQ ID NO: 179372 - DNA, 25 bp, Saccharomyces pastorianus
tgctgttgctccatctcttttaaca

SEQ ID NO: 179373 - DNA, 25 bp, Saccharomyces pastorianus
aacagcagctgtctcttcttagact

SEQ ID NO: 179374 - DNA, 25 bp, Saccharomyces pastorianus
ctgttgttgtggttgctgtttctgt

SEQ ID NO: 179375 - DNA, 25 bp, Saccharomyces pastorianus
ctttcttattggcttgtacttgtat

SEQ ID NO: 179376 - DNA, 25 bp, Saccharomyces pastorianus
gttgctccatctcttttaacagcag

SEQ ID NO: 179377 - DNA, 25 bp, Saccharomyces pastorianus
agctgtctcttcttagactttctta

SEQ ID NO: 179378 - DNA, 25 bp, Saccharomyces pastorianus
ctccatctcttttaacagcagctgt

SEQ ID NO: 179379 - DNA, 25 bp, Saccharomyces pastorianus
gctgtttctgttgtggtttctgttg

SEQ ID NO: 179380 - DNA, 25 bp, Saccharomyces pastorianus
agactttcttattggcttgtacttg

SEQ ID NO: 179381 - DNA, 25 bp, Saccharomyces pastorianus
ggttgctgtttctgttgtggtttct

SEQ ID NO: 179382 - DNA, 25 bp, Saccharomyces pastorianus
gtaatgagccttgtaatatggaaca

SEQ ID NO: 179383 - DNA, 25 bp, Saccharomyces pastorianus
acgtggatctggctactttgataga

SEQ ID NO: 179384 - DNA, 25 bp, Saccharomyces pastorianus
taagctcgctgacaagttgaatgca

SEQ ID NO: 179385 - DNA, 25 bp, Saccharomyces pastorianus
aagggccgtaatgagccttgtaata

SEQ ID NO: 179386 - DNA, 25 bp, Saccharomyces pastorianus
gtagcaattgtcgtatcggaagtca

SEQ ID NO: 179387 - DNA, 25 bp, Saccharomyces pastorianus
gattttgaatccctgcatcagtccg

SEQ ID NO: 179388 - DNA, 25 bp, Saccharomyces pastorianus
tccctgcatcagtccgttaagaaaa

SEQ ID NO: 179389 - DNA, 25 bp, Saccharomyces pastorianus
tctggctactttgatagataccacg

SEQ ID NO: 179390 - DNA, 25 bp, Saccharomyces pastorianus
gttaagaaaaataagctcgctgaca

SEQ ID NO: 179391 - DNA, 25 bp, Saccharomyces pastorianus
aagtcaaggacgtggatctggctac

SEQ ID NO: 179392 - DNA, 25 bp, Saccharomyces pastorianus
gaactttacatggtcaagggccgta

SEQ ID NO: 179393 - DNA, 25 bp, Saccharomyces pastorianus
aggcacggctgctttcaaagatcct

SEQ ID NO: 179394 - DNA, 25 bp, Saccharomyces pastorianus
gcggcccagagtgcactcaaacata

SEQ ID NO: 179395 - DNA, 25 bp, Saccharomyces pastorianus
ggatctgcggttattcagtgtcctg

SEQ ID NO: 179396 - DNA, 25 bp, Saccharomyces pastorianus
gcgcggcatgaaaccgttcatcgta

SEQ ID NO: 179397 - DNA, 25 bp, Saccharomyces pastorianus
accacgttgagattgcgcagcgcgg

SEQ ID NO: 179398 - DNA, 25 bp, Saccharomyces pastorianus
aaattcgatatgcaggcggcccaga

SEQ ID NO: 179399 - DNA, 25 bp, Saccharomyces pastorianus
taccttcacgttttactatcatggg

SEQ ID NO: 179400 - DNA, 25 bp, Saccharomyces pastorianus
ggctctcgggttactatcgttgaat

SEQ ID NO: 179401 - DNA, 25 bp, Saccharomyces pastorianus
cagtgtcctggtgttgcaatagata

SEQ ID NO: 179402 - DNA, 25 bp, Saccharomyces pastorianus
gcggctgtttcctgcaaaattcgat

SEQ ID NO: 179403 - DNA, 25 bp, Saccharomyces pastorianus
atatattgttgtggcgaccggatct

SEQ ID NO: 179404 - DNA, 25 bp, Saccharomyces pastorianus
cagacatcgcgcaacagcaacctca

SEQ ID NO: 179405 - DNA, 25 bp, Saccharomyces pastorianus
acaatcggatatcgcacaacagcaa

SEQ ID NO: 179406 - DNA, 25 bp, Saccharomyces pastorianus
agcaaccagacatcgcgcaacagca

SEQ ID NO: 179407 - DNA, 25 bp, Saccharomyces pastorianus
caaccagacatcgcgcaacagcaac

SEQ ID NO: 179408 - DNA, 25 bp, Saccharomyces pastorianus
gacaatcggatatcgcacaacagca

SEQ ID NO: 179409 - DNA, 25 bp, Saccharomyces pastorianus
atcggatatcgcacaacagcaacaa

SEQ ID NO: 179410 - DNA, 25 bp, Saccharomyces pastorianus
acagcagcaaccagacatcgcgcaa

SEQ ID NO: 179411 - DNA, 25 bp, Saccharomyces pastorianus
agcagcaaccagacatcgcgcaaca

SEQ ID NO: 179412 - DNA, 25 bp, Saccharomyces pastorianus
aatcggatatcgcacaacagcaaca

SEQ ID NO: 179413 - DNA, 25 bp, Saccharomyces pastorianus
gcagcaaccagacatcgcgcaacag

SEQ ID NO: 179414 - DNA, 25 bp, Saccharomyces pastorianus
gcaaccagacatcgcgcaacagcaa

SEQ ID NO: 179415 - DNA, 25 bp, Saccharomyces pastorianus
ttggccttctggagacaaagttaaa

SEQ ID NO: 179416 - DNA, 25 bp, Saccharomyces pastorianus
atcgtcttcgtcactttcactttca

SEQ ID NO: 179417 - DNA, 25 bp, Saccharomyces pastorianus
ttggaactcgtcgtcttcgtcatca

SEQ ID NO: 179418 - DNA, 25 bp, Saccharomyces pastorianus
acttcttcttctggagcaatggtta

SEQ ID NO: 179419 - DNA, 25 bp, Saccharomyces pastorianus
tcttctggagcaatggttaggtcca

SEQ ID NO: 179420 - DNA, 25 bp, Saccharomyces pastorianus
acagattcttggaactcgtcgtctt

SEQ ID NO: 179421 - DNA, 25 bp, Saccharomyces pastorianus
gttaggtccaatgattgttggcatt

SEQ ID NO: 179422 - DNA, 25 bp, Saccharomyces pastorianus
tcactttcactctcgctttcaactt

SEQ ID NO: 179423 - DNA, 25 bp, Saccharomyces pastorianus
ttggcattggccttctggagacaaa

SEQ ID NO: 179424 - DNA, 25 bp, Saccharomyces pastorianus
ctttcttgcccttgttcttcttctt

SEQ ID NO: 179425 - DNA, 25 bp, Saccharomyces pastorianus
tttcaactttcttgcccttgttctt

SEQ ID NO: 179426 - DNA, 25 bp, Saccharomyces pastorianus
gcaatgctctctcctcgttaaaaaa

SEQ ID NO: 179427 - DNA, 25 bp, Saccharomyces pastorianus
gccctccaccagttggcacaaatag

SEQ ID NO: 179428 - DNA, 25 bp, Saccharomyces pastorianus
acagtgatcatggtgatgctcctaa

SEQ ID NO: 179429 - DNA, 25 bp, Saccharomyces pastorianus
aatattaagttcctcgtcttccaca

SEQ ID NO: 179430 - DNA, 25 bp, Saccharomyces pastorianus
gctttacagagccagattcggtctt

SEQ ID NO: 179431 - DNA, 25 bp, Saccharomyces pastorianus
tcgtcttccacaattgctagcaatg

SEQ ID NO: 179432 - DNA, 25 bp, Saccharomyces pastorianus
gtaccgaatgtgtattcactcaaca

SEQ ID NO: 179433 - DNA, 25 bp, Saccharomyces pastorianus
actgtatcaagtttcgtaccgaatg

SEQ ID NO: 179434 - DNA, 25 bp, Saccharomyces pastorianus
aatgagtctgatgcgttcaccaaga

SEQ ID NO: 179435 - DNA, 25 bp, Saccharomyces pastorianus
aagaaaatgccttccgagagccctc

SEQ ID NO: 179436 - DNA, 25 bp, Saccharomyces pastorianus
gcactaccatcatctgaaagcaacg

SEQ ID NO: 179437 - DNA, 25 bp, Saccharomyces pastorianus
atgaacacgaacacgaacacgaaca

SEQ ID NO: 179438 - DNA, 25 bp, Saccharomyces pastorianus
acatgaacacgaacacgaacacgaa

SEQ ID NO: 179439 - DNA, 25 bp, Saccharomyces pastorianus
catgaacacgaacacgaacacgaac

SEQ ID NO: 179440 - DNA, 25 bp, Saccharomyces pastorianus
gaacacgaacacgaacacgaacacg

SEQ ID NO: 179441 - DNA, 25 bp, Saccharomyces pastorianus
acacgaacacgaacacgaacacgaa

SEQ ID NO: 179442 - DNA, 25 bp, Saccharomyces pastorianus
aacatgaacacgaacacgaacacga

SEQ ID NO: 179443 - DNA, 25 bp, Saccharomyces pastorianus
tgaacacgaacacgaacacgaacac

SEQ ID NO: 179444 - DNA, 25 bp, Saccharomyces pastorianus
acgaacacgaacacgaacacgaaca

SEQ ID NO: 179445 - DNA, 25 bp, Saccharomyces pastorianus
aacacgaacacgaacacgaacacga

SEQ ID NO: 179446 - DNA, 25 bp, Saccharomyces pastorianus
cacgaacacgaacacgaacacgaac

SEQ ID NO: 179447 - DNA, 25 bp, Saccharomyces pastorianus
cgaacacgaacacgaacacgaacac

SEQ ID NO: 179448 - DNA, 25 bp, Saccharomyces pastorianus
agtagctggtactgatttccttaaa

SEQ ID NO: 179449 - DNA, 25 bp, Saccharomyces pastorianus
cagtgctctaacgatacctatgtta

SEQ ID NO: 179450 - DNA, 25 bp, Saccharomyces pastorianus
tgggaagttccagtgctctaacgat

SEQ ID NO: 179451 - DNA, 25 bp, Saccharomyces pastorianus
taaagtctgtaacgttagcagcgtc

SEQ ID NO: 179452 - DNA, 25 bp, Saccharomyces pastorianus
aacggcttctacgactttgctgaaa

SEQ ID NO: 179453 - DNA, 25 bp, Saccharomyces pastorianus
ttccagtgctctaacgatacctatg

SEQ ID NO: 179454 - DNA, 25 bp, Saccharomyces pastorianus
ggtactgatttccttaaagtctgta

SEQ ID NO: 179455 - DNA, 25 bp, Saccharomyces pastorianus
gaagttccagtgctctaacgatacc

SEQ ID NO: 179456 - DNA, 25 bp, Saccharomyces pastorianus
ttttcttgtgaaataaacggcttct

SEQ ID NO: 179457 - DNA, 25 bp, Saccharomyces pastorianus
cggcttctacgactttgctgaaaag

SEQ ID NO: 179458 - DNA, 25 bp, Saccharomyces pastorianus
ataaacggcttctacgactttgctg

SEQ ID NO: 179459 - DNA, 25 bp, Saccharomyces pastorianus
gttctctccatcacacaatagcaat

SEQ ID NO: 179460 - DNA, 25 bp, Saccharomyces pastorianus
tagcaatgcaagaacgtcctctaat

SEQ ID NO: 179461 - DNA, 25 bp, Saccharomyces pastorianus
aaaggccccaaatagcgtcatttct

SEQ ID NO: 179462 - DNA, 25 bp, Saccharomyces pastorianus
taattggacgagtgacctcgctagt

SEQ ID NO: 179463 - DNA, 25 bp, Saccharomyces pastorianus
aatagaggtcctccttctatcattt

SEQ ID NO: 179464 - DNA, 25 bp, Saccharomyces pastorianus
agcctttcccatttcacaacaaata

SEQ ID NO: 179465 - DNA, 25 bp, Saccharomyces pastorianus
gaaaaggtgcttagcctttcccatt

SEQ ID NO: 179466 - DNA, 25 bp, Saccharomyces pastorianus
tagcccatctactacaagcaacgac

SEQ ID NO: 179467 - DNA, 25 bp, Saccharomyces pastorianus
ggatgacagccacaacataatcgat

SEQ ID NO: 179468 - DNA, 25 bp, Saccharomyces pastorianus
ggagctaacagcgtcaatacatata

SEQ ID NO: 179469 - DNA, 25 bp, Saccharomyces pastorianus
tttaaacccgtggaacatccgccag

SEQ ID NO: 179470 - DNA, 25 bp, Saccharomyces pastorianus
agggtattcgtacacagatgccaat

SEQ ID NO: 179471 - DNA, 25 bp, Saccharomyces pastorianus
aggtgctacacttttcaagactaga

SEQ ID NO: 179472 - DNA, 25 bp, Saccharomyces pastorianus
tcgtacacagatgccaatatcaaga

SEQ ID NO: 179473 - DNA, 25 bp, Saccharomyces pastorianus
gaaaataacatgtcagagtacttga

SEQ ID NO: 179474 - DNA, 25 bp, Saccharomyces pastorianus
caccgtggaaaagggtggcccacat

SEQ ID NO: 179475 - DNA, 25 bp, Saccharomyces pastorianus
tggtccaaacttgcatggtatcttt

SEQ ID NO: 179476 - DNA, 25 bp, Saccharomyces pastorianus
tcaagctgaagggtattcgtacaca

SEQ ID NO: 179477 - DNA, 25 bp, Saccharomyces pastorianus
gtggcccacataaggttggtccaaa

SEQ ID NO: 179478 - DNA, 25 bp, Saccharomyces pastorianus
tctgctaagaaaggtgctacacttt

SEQ ID NO: 179479 - DNA, 25 bp, Saccharomyces pastorianus
tatcaagaaaaacgtgttgtgggac

SEQ ID NO: 179480 - DNA, 25 bp, Saccharomyces pastorianus
gacactctggtcaagctgaagggta

SEQ ID NO: 179481 - DNA, 25 bp, Saccharomyces pastorianus
taatagttctaaaagctctcgcagt

SEQ ID NO: 179482 - DNA, 25 bp, Saccharomyces pastorianus
gctagaagaaaagttacaccctcca

SEQ ID NO: 179483 - DNA, 25 bp, Saccharomyces pastorianus
tgcagtttcgccacatcggacacta

SEQ ID NO: 179484 - DNA, 25 bp, Saccharomyces pastorianus
aaaattgcagtttcgccacatcgga

SEQ ID NO: 179485 - DNA, 25 bp, Saccharomyces pastorianus
gggaatctgttatctgtggaagcta

SEQ ID NO: 179486 - DNA, 25 bp, Saccharomyces pastorianus
gccacatcggacactacagagctca

SEQ ID NO: 179487 - DNA, 25 bp, Saccharomyces pastorianus
atctgttatctgtggaagctagaag

SEQ ID NO: 179488 - DNA, 25 bp, Saccharomyces pastorianus
tcggacactacagagctcaccaggg

SEQ ID NO: 179489 - DNA, 25 bp, Saccharomyces pastorianus
agttctaaaagctctcgcagtaggg

SEQ ID NO: 179490 - DNA, 25 bp, Saccharomyces pastorianus
acccgccaaaattgcagtttcgcca

SEQ ID NO: 179491 - DNA, 25 bp, Saccharomyces pastorianus
gtttcgccacatcggacactacaga

SEQ ID NO: 179492 - DNA, 25 bp, Saccharomyces pastorianus
gattttgagagacgaaggcctgttc

SEQ ID NO: 179493 - DNA, 25 bp, Saccharomyces pastorianus
gccgctggacgtgttgaagattaag

SEQ ID NO: 179494 - DNA, 25 bp, Saccharomyces pastorianus
agagacgaaggcctgttcaacttat

SEQ ID NO: 179495 - DNA, 25 bp, Saccharomyces pastorianus
gaaggcctgttcaacttatataggg

SEQ ID NO: 179496 - DNA, 25 bp, Saccharomyces pastorianus
gacgaaggcctgttcaacttatata

SEQ ID NO: 179497 - DNA, 25 bp, Saccharomyces pastorianus
cttttgccgctggacgtgttgaaga

SEQ ID NO: 179498 - DNA, 25 bp, Saccharomyces pastorianus
ttgccgctggacgtgttgaagatta

SEQ ID NO: 179499 - DNA, 25 bp, Saccharomyces pastorianus
attaagagacagaccaatcccgaat

SEQ ID NO: 179500 - DNA, 25 bp, Saccharomyces pastorianus
ctggacgtgttgaagattaagagac

SEQ ID NO: 179501 - DNA, 25 bp, Saccharomyces pastorianus
gtagaggtttcatcaagattttgag

SEQ ID NO: 179502 - DNA, 25 bp, Saccharomyces pastorianus
agagacagaccaatcccgaatcgtt

SEQ ID NO: 179503 - DNA, 25 bp, Saccharomyces pastorianus
aggtagtcagacgtgcttgccaagc

SEQ ID NO: 179504 - DNA, 25 bp, Saccharomyces pastorianus
ggctcttcattgcagaaaccagttc

SEQ ID NO: 179505 - DNA, 25 bp, Saccharomyces pastorianus
aggttatacgacacttattccgatg

SEQ ID NO: 179506 - DNA, 25 bp, Saccharomyces pastorianus
cgatgcctgatgattttgacgaaat

SEQ ID NO: 179507 - DNA, 25 bp, Saccharomyces pastorianus
aaactgttcccatttgcaagacgaa

SEQ ID NO: 179508 - DNA, 25 bp, Saccharomyces pastorianus
atcaagatacgaccgaggcttattt

SEQ ID NO: 179509 - DNA, 25 bp, Saccharomyces pastorianus
aaacgagttctcttcaggtagtcag

SEQ ID NO: 179510 - DNA, 25 bp, Saccharomyces pastorianus
gaaatcggttcatatactacaggag

SEQ ID NO: 179511 - DNA, 25 bp, Saccharomyces pastorianus
tatactactccgcttgatacagatt

SEQ ID NO: 179512 - DNA, 25 bp, Saccharomyces pastorianus
attttaggtcatgcaggctcttcat

SEQ ID NO: 179513 - DNA, 25 bp, Saccharomyces pastorianus
ttcaagcctttatttctaaccacga

SEQ ID NO: 179514 - DNA, 25 bp, Saccharomyces pastorianus
atggactgtcaaatggttcaactag

SEQ ID NO: 179515 - DNA, 25 bp, Saccharomyces pastorianus
ggaacggtctcgctcaataatactg

SEQ ID NO: 179516 - DNA, 25 bp, Saccharomyces pastorianus
ggcaaacggtgtgaactcctccatt

SEQ ID NO: 179517 - DNA, 25 bp, Saccharomyces pastorianus
gcgaatctagctaacggaaggccgt

SEQ ID NO: 179518 - DNA, 25 bp, Saccharomyces pastorianus
gatccactagcagatgtggcaccag

SEQ ID NO: 179519 - DNA, 25 bp, Saccharomyces pastorianus
attcctactgtaactggctcttcta

SEQ ID NO: 179520 - DNA, 25 bp, Saccharomyces pastorianus
ctactactgtatccgccattgaaag

SEQ ID NO: 179521 - DNA, 25 bp, Saccharomyces pastorianus
gttcaactagtgcagctaacggttt

SEQ ID NO: 179522 - DNA, 25 bp, Saccharomyces pastorianus
actagaggatgcaggcccagctgaa

SEQ ID NO: 179523 - DNA, 25 bp, Saccharomyces pastorianus
atgggtctcagacacctactgttga

SEQ ID NO: 179524 - DNA, 25 bp, Saccharomyces pastorianus
atggcaatgcatctacagcgaatct

SEQ ID NO: 179525 - DNA, 25 bp, Saccharomyces pastorianus
gacgcgaacgcaagaagctccggta

SEQ ID NO: 179526 - DNA, 25 bp, Saccharomyces pastorianus
atagagccagagacgaagcggacga

SEQ ID NO: 179527 - DNA, 25 bp, Saccharomyces pastorianus
aacgcaagaagctccggtaagaaga

SEQ ID NO: 179528 - DNA, 25 bp, Saccharomyces pastorianus
gaagaagacgcgaacgcaagaagct

SEQ ID NO: 179529 - DNA, 25 bp, Saccharomyces pastorianus
agacgaagaagacgcgaacgcaaga

SEQ ID NO: 179530 - DNA, 25 bp, Saccharomyces pastorianus
aagacgcgaacgcaagaagctccgg

SEQ ID NO: 179531 - DNA, 25 bp, Saccharomyces pastorianus
agacgcgaacgcaagaagctccggt

SEQ ID NO: 179532 - DNA, 25 bp, Saccharomyces pastorianus
gccagagacgaagcggacgaagacg

SEQ ID NO: 179533 - DNA, 25 bp, Saccharomyces pastorianus
agaagacgcgaacgcaagaagctcc

SEQ ID NO: 179534 - DNA, 25 bp, Saccharomyces pastorianus
gcgaacgcaagaagctccggtaaga

SEQ ID NO: 179535 - DNA, 25 bp, Saccharomyces pastorianus
aagacgaagaagacgcgaacgcaag

SEQ ID NO: 179536 - DNA, 25 bp, Saccharomyces pastorianus
ccaggcgcaagctcaggctcaagcg

SEQ ID NO: 179537 - DNA, 25 bp, Saccharomyces pastorianus
agctcaagcacaggcccaggcgcag

SEQ ID NO: 179538 - DNA, 25 bp, Saccharomyces pastorianus
aggctcaggtgcaagctcaggctca

SEQ ID NO: 179539 - DNA, 25 bp, Saccharomyces pastorianus
gcaagctcaggctcaagcgcaagct

SEQ ID NO: 179540 - DNA, 25 bp, Saccharomyces pastorianus
gcaagctcaggctcaggcgcaagct

SEQ ID NO: 179541 - DNA, 25 bp, Saccharomyces pastorianus
aagcgcaagctcaagcgcaggctca

SEQ ID NO: 179542 - DNA, 25 bp, Saccharomyces pastorianus
aggtgcaagctcaggctcaggcgca

SEQ ID NO: 179543 - DNA, 25 bp, Saccharomyces pastorianus
gcaacaacaagcccaggcgcaagct

SEQ ID NO: 179544 - DNA, 25 bp, Saccharomyces pastorianus
ggctcaagcacaagctcaggcacag

SEQ ID NO: 179545 - DNA, 25 bp, Saccharomyces pastorianus
aggctcaggcgcaagctcaagctca

SEQ ID NO: 179546 - DNA, 25 bp, Saccharomyces pastorianus
gctcaggctcaggtgcaagctcagg

SEQ ID NO: 179547 - DNA, 25 bp, Saccharomyces pastorianus
gaagccgaacagctaggtgacctaa

SEQ ID NO: 179548 - DNA, 25 bp, Saccharomyces pastorianus
cattattctagttagggatctacca

SEQ ID NO: 179549 - DNA, 25 bp, Saccharomyces pastorianus
cgcctcaccaaaaaccattattcta

SEQ ID NO: 179550 - DNA, 25 bp, Saccharomyces pastorianus
tatgtttccctaaaagatggttatc

SEQ ID NO: 179551 - DNA, 25 bp, Saccharomyces pastorianus
tttcgcctcaccaaaaaccattatt

SEQ ID NO: 179552 - DNA, 25 bp, Saccharomyces pastorianus
ggttatctacaaaacaacgctactg

SEQ ID NO: 179553 - DNA, 25 bp, Saccharomyces pastorianus
aacgctactgaacacatcacaccag

SEQ ID NO: 179554 - DNA, 25 bp, Saccharomyces pastorianus
atcacaccagataatttacgtagag

SEQ ID NO: 179555 - DNA, 25 bp, Saccharomyces pastorianus
taggtgacctaactactttggccaa

SEQ ID NO: 179556 - DNA, 25 bp, Saccharomyces pastorianus
ggatctaccaagaacaaggtcagga

SEQ ID NO: 179557 - DNA, 25 bp, Saccharomyces pastorianus
gaagcatccatctcaaatcacgaaa

SEQ ID NO: 179558 - DNA, 25 bp, Saccharomyces pastorianus
gaatgcaaactacttttcctcgcaa

SEQ ID NO: 179559 - DNA, 25 bp, Saccharomyces pastorianus
ttcccattccccagatattatcagt

SEQ ID NO: 179560 - DNA, 25 bp, Saccharomyces pastorianus
gaggccctatatactgaattctttt

SEQ ID NO: 179561 - DNA, 25 bp, Saccharomyces pastorianus
gtcttcttcttcgtacatcaactat

SEQ ID NO: 179562 - DNA, 25 bp, Saccharomyces pastorianus
caacattaatgcctattctccagtc

SEQ ID NO: 179563 - DNA, 25 bp, Saccharomyces pastorianus
tgcacaaacggaattctctcactct

SEQ ID NO: 179564 - DNA, 25 bp, Saccharomyces pastorianus
gagcaaggccaaactacgttatcga

SEQ ID NO: 179565 - DNA, 25 bp, Saccharomyces pastorianus
gtgttaatgctcatgtgctgccaaa

SEQ ID NO: 179566 - DNA, 25 bp, Saccharomyces pastorianus
taaggtatcgtacaggccctgcaat

SEQ ID NO: 179567 - DNA, 25 bp, Saccharomyces pastorianus
agtctcttcgtcttcatctaacatt

SEQ ID NO: 179568 - DNA, 25 bp, Saccharomyces pastorianus
atgctagatcagcttctttctctac

SEQ ID NO: 179569 - DNA, 25 bp, Saccharomyces pastorianus
gttcaccatactgtacctaatttca

SEQ ID NO: 179570 - DNA, 25 bp, Saccharomyces pastorianus
aaggagggtattgcagttgatcaca

SEQ ID NO: 179571 - DNA, 25 bp, Saccharomyces pastorianus
gtacatcaacgacatagagaatctt

SEQ ID NO: 179572 - DNA, 25 bp, Saccharomyces pastorianus
ggaaaagttgccaataagcacgaaa

SEQ ID NO: 179573 - DNA, 25 bp, Saccharomyces pastorianus
ctatacagagtaatactgccctaga

SEQ ID NO: 179574 - DNA, 25 bp, Saccharomyces pastorianus
gttgatcacattgaacacgccaata

SEQ ID NO: 179575 - DNA, 25 bp, Saccharomyces pastorianus
aacagttcagagtacatcaacgaca

SEQ ID NO: 179576 - DNA, 25 bp, Saccharomyces pastorianus
gtaagcgacgttcaagttcaccata

SEQ ID NO: 179577 - DNA, 25 bp, Saccharomyces pastorianus
agaagagaaagcctgatacaatcaa

SEQ ID NO: 179578 - DNA, 25 bp, Saccharomyces pastorianus
gccaatatctcggacagtaaaacag

SEQ ID NO: 179579 - DNA, 25 bp, Saccharomyces pastorianus
gcacgaaaatattagtagcaagctt

SEQ ID NO: 179580 - DNA, 25 bp, Saccharomyces pastorianus
gccaagccagaggacgttaagagga

SEQ ID NO: 179581 - DNA, 25 bp, Saccharomyces pastorianus
gaggcttgtgtagcaattctaagaa

SEQ ID NO: 179582 - DNA, 25 bp, Saccharomyces pastorianus
attacggcctagatttgattagagg

SEQ ID NO: 179583 - DNA, 25 bp, Saccharomyces pastorianus
ggacgagattcacgctggtgttctt

SEQ ID NO: 179584 - DNA, 25 bp, Saccharomyces pastorianus
aattgtggacgagattcacgctggt

SEQ ID NO: 179585 - DNA, 25 bp, Saccharomyces pastorianus
gtcaaatccttgaaatcagcattgg

SEQ ID NO: 179586 - DNA, 25 bp, Saccharomyces pastorianus
gagaagctacagaaattacggccta

SEQ ID NO: 179587 - DNA, 25 bp, Saccharomyces pastorianus
gagccaaccataagcaaagtcaaat

SEQ ID NO: 179588 - DNA, 25 bp, Saccharomyces pastorianus
atcagcattggaggcttgtgtagca

SEQ ID NO: 179589 - DNA, 25 bp, Saccharomyces pastorianus
gattcacgctggtgttcttgagcca

SEQ ID NO: 179590 - DNA, 25 bp, Saccharomyces pastorianus
gttcttgagccaaccataagcaaag

SEQ ID NO: 179591 - DNA, 25 bp, Saccharomyces pastorianus
caaaggcaaagtgttccgaaagagg

SEQ ID NO: 179592 - DNA, 25 bp, Saccharomyces pastorianus
gaggggtcgtcatcaatgcagaaga

SEQ ID NO: 179593 - DNA, 25 bp, Saccharomyces pastorianus
aggggtcgtcatcaatgcagaagac

SEQ ID NO: 179594 - DNA, 25 bp, Saccharomyces pastorianus
gcaaaggcaaagtgttccgaaagag

SEQ ID NO: 179595 - DNA, 25 bp, Saccharomyces pastorianus
aaagaggggtcgtcatcaatgcaga

SEQ ID NO: 179596 - DNA, 25 bp, Saccharomyces pastorianus
gaaagaggggtcgtcatcaatgcag

SEQ ID NO: 179597 - DNA, 25 bp, Saccharomyces pastorianus
ggtcgtcatcaatgcagaagacgtt

SEQ ID NO: 179598 - DNA, 25 bp, Saccharomyces pastorianus
aagaggggtcgtcatcaatgcagaa

SEQ ID NO: 179599 - DNA, 25 bp, Saccharomyces pastorianus
agaggggtcgtcatcaatgcagaag

SEQ ID NO: 179600 - DNA, 25 bp, Saccharomyces pastorianus
gtgttccgaaagaggggtcgtcatc

SEQ ID NO: 179601 - DNA, 25 bp, Saccharomyces pastorianus
gggtcgtcatcaatgcagaagacgt

SEQ ID NO: 179602 - DNA, 25 bp, Saccharomyces pastorianus
ttatttataagagccgcggtcattt

SEQ ID NO: 179603 - DNA, 25 bp, Saccharomyces pastorianus
aagtggcaccgtaagctcgtcaatg

SEQ ID NO: 179604 - DNA, 25 bp, Saccharomyces pastorianus
acagccactttatttataagagccg

SEQ ID NO: 179605 - DNA, 25 bp, Saccharomyces pastorianus
cagccactttatttataagagccgc

SEQ ID NO: 179606 - DNA, 25 bp, Saccharomyces pastorianus
atggcaacagccactttatttataa

SEQ ID NO: 179607 - DNA, 25 bp, Saccharomyces pastorianus
aatggcaacagccactttatttata

SEQ ID NO: 179608 - DNA, 25 bp, Saccharomyces pastorianus
tggcaacagccactttatttataag

SEQ ID NO: 179609 - DNA, 25 bp, Saccharomyces pastorianus
agccactttatttataagagccgcg

SEQ ID NO: 179610 - DNA, 25 bp, Saccharomyces pastorianus
caatggcaacagccactttatttat

SEQ ID NO: 179611 - DNA, 25 bp, Saccharomyces pastorianus
ggcaacagccactttatttataaga

SEQ ID NO: 179612 - DNA, 25 bp, Saccharomyces pastorianus
tcaatggcaacagccactttattta

SEQ ID NO: 179613 - DNA, 25 bp, Saccharomyces pastorianus
atactagaagtcatacccaaagata

SEQ ID NO: 179614 - DNA, 25 bp, Saccharomyces pastorianus
ataactgttgggattccactgttgt

SEQ ID NO: 179615 - DNA, 25 bp, Saccharomyces pastorianus
ggattccactgttgttagagactat

SEQ ID NO: 179616 - DNA, 25 bp, Saccharomyces pastorianus
gtcataactgttgggattccactgt

SEQ ID NO: 179617 - DNA, 25 bp, Saccharomyces pastorianus
ttttgtcataactgttgggattcca

SEQ ID NO: 179618 - DNA, 25 bp, Saccharomyces pastorianus
gattccactgttgttagagactata

SEQ ID NO: 179619 - DNA, 25 bp, Saccharomyces pastorianus
gataatactagaagtcatacccaaa

SEQ ID NO: 179620 - DNA, 25 bp, Saccharomyces pastorianus
ttgtcataactgttgggattccact

SEQ ID NO: 179621 - DNA, 25 bp, Saccharomyces pastorianus
attccactgttgttagagactataa

SEQ ID NO: 179622 - DNA, 25 bp, Saccharomyces pastorianus
ataaattttgtcataactgttggga

SEQ ID NO: 179623 - DNA, 25 bp, Saccharomyces pastorianus
tccactgttgttagagactataata

SEQ ID NO: 179624 - DNA, 25 bp, Saccharomyces pastorianus
tatcgcgatgatgttccgatcggaa

SEQ ID NO: 179625 - DNA, 25 bp, Saccharomyces pastorianus
aatgatataaatggcctgctatttc

SEQ ID NO: 179626 - DNA, 25 bp, Saccharomyces pastorianus
ccgatcggaagctctaatttgaaag

SEQ ID NO: 179627 - DNA, 25 bp, Saccharomyces pastorianus
tagcagtctttctcccttggagcct

SEQ ID NO: 179628 - DNA, 25 bp, Saccharomyces pastorianus
aaatggcctgctatttctgtatcgc

SEQ ID NO: 179629 - DNA, 25 bp, Saccharomyces pastorianus
atcgctatcgcgatgatgttccgat

SEQ ID NO: 179630 - DNA, 25 bp, Saccharomyces pastorianus
tggcctgctatttctgtatcgctat

SEQ ID NO: 179631 - DNA, 25 bp, Saccharomyces pastorianus
tgctatttctgtatcgctatcgcga

SEQ ID NO: 179632 - DNA, 25 bp, Saccharomyces pastorianus
gttccgatcggaagctctaatttga

SEQ ID NO: 179633 - DNA, 25 bp, Saccharomyces pastorianus
tgattattagcagtctttctccctt

SEQ ID NO: 179634 - DNA, 25 bp, Saccharomyces pastorianus
tattagcagtctttctcccttggag

SEQ ID NO: 179635 - DNA, 25 bp, Saccharomyces pastorianus
gacagtaaccgcaaaattcgctttg

SEQ ID NO: 179636 - DNA, 25 bp, Saccharomyces pastorianus
aggagcttccggaagatccacccta

SEQ ID NO: 179637 - DNA, 25 bp, Saccharomyces pastorianus
tgcgatcgaaactggaaagtggact

SEQ ID NO: 179638 - DNA, 25 bp, Saccharomyces pastorianus
accctaacattcttcgatgcgatcg

SEQ ID NO: 179639 - DNA, 25 bp, Saccharomyces pastorianus
ggaagatccaccctaacattcttcg

SEQ ID NO: 179640 - DNA, 25 bp, Saccharomyces pastorianus
agatccaccctaacattcttcgatg

SEQ ID NO: 179641 - DNA, 25 bp, Saccharomyces pastorianus
taaggaagcaatgtcaaatgaagga

SEQ ID NO: 179642 - DNA, 25 bp, Saccharomyces pastorianus
taaccgcaaaattcgctttggaaca

SEQ ID NO: 179643 - DNA, 25 bp, Saccharomyces pastorianus
gcaaaattcgctttggaacacataa

SEQ ID NO: 179644 - DNA, 25 bp, Saccharomyces pastorianus
gaacacataaaggagcttccggaag

SEQ ID NO: 179645 - DNA, 25 bp, Saccharomyces pastorianus
ctggaaagtggacttggataacatt

SEQ ID NO: 179646 - DNA, 25 bp, Saccharomyces pastorianus
tctgttttcctttctgctccatcat

SEQ ID NO: 179647 - DNA, 25 bp, Saccharomyces pastorianus
tctgccttgttatctatgcttttgc

SEQ ID NO: 179648 - DNA, 25 bp, Saccharomyces pastorianus
tatgcttttgcttggctcttctggg

SEQ ID NO: 179649 - DNA, 25 bp, Saccharomyces pastorianus
gtcacctcaaccttattaatttctt

SEQ ID NO: 179650 - DNA, 25 bp, Saccharomyces pastorianus
tcttcctctttttctgccttgttat

SEQ ID NO: 179651 - DNA, 25 bp, Saccharomyces pastorianus
gccttgttatctttggtatttactt

SEQ ID NO: 179652 - DNA, 25 bp, Saccharomyces pastorianus
actttgccttgtacttcctcttgta

SEQ ID NO: 179653 - DNA, 25 bp, Saccharomyces pastorianus
gtttactgtttcattttctatctca

SEQ ID NO: 179654 - DNA, 25 bp, Saccharomyces pastorianus
cttcctcttgtacatcttctatcga

SEQ ID NO: 179655 - DNA, 25 bp, Saccharomyces pastorianus
tttctatctcattttctgttttcct

SEQ ID NO: 179656 - DNA, 25 bp, Saccharomyces pastorianus
tttcagccttgtcttctgttttgtt

SEQ ID NO: 179657 - DNA, 25 bp, Saccharomyces pastorianus
gcaccacaattcgatttggacaata

SEQ ID NO: 179658 - DNA, 25 bp, Saccharomyces pastorianus
ggaagctcttcgctgtcttgctaca

SEQ ID NO: 179659 - DNA, 25 bp, Saccharomyces pastorianus
acagcttcaatcagatatgcctggt

SEQ ID NO: 179660 - DNA, 25 bp, Saccharomyces pastorianus
gaaactgtttgcgtacgtagcctca

SEQ ID NO: 179661 - DNA, 25 bp, Saccharomyces pastorianus
gatccagagttccaatacacaccgc

SEQ ID NO: 179662 - DNA, 25 bp, Saccharomyces pastorianus
gatgatcctacgaaagcaccacaat

SEQ ID NO: 179663 - DNA, 25 bp, Saccharomyces pastorianus
agcagtgatcatttaaccatctcag

SEQ ID NO: 179664 - DNA, 25 bp, Saccharomyces pastorianus
tgcctggtgagtaacattgcggaat

SEQ ID NO: 179665 - DNA, 25 bp, Saccharomyces pastorianus
agcaagttccagtgcaagcttacaa

SEQ ID NO: 179666 - DNA, 25 bp, Saccharomyces pastorianus
gtacgtagcctcaccatggaatgga

SEQ ID NO: 179667 - DNA, 25 bp, Saccharomyces pastorianus
gaatttatcaagagttttcccctag

SEQ ID NO: 179668 - DNA, 25 bp, Saccharomyces pastorianus
tacgttactagtatattatcatata

SEQ ID NO: 179669 - DNA, 25 bp, Saccharomyces pastorianus
ttacgttactagtatattatcatat

SEQ ID NO: 179670 - DNA, 25 bp, Saccharomyces pastorianus
tagtatttacgttactagtatatta

SEQ ID NO: 179671 - DNA, 25 bp, Saccharomyces pastorianus
atttacgttactagtatattatcat

SEQ ID NO: 179672 - DNA, 25 bp, Saccharomyces pastorianus
cgttactagtatattatcatatacg

SEQ ID NO: 179673 - DNA, 25 bp, Saccharomyces pastorianus
tatttacgttactagtatattatca

SEQ ID NO: 179674 - DNA, 25 bp, Saccharomyces pastorianus
tttacgttactagtatattatcata

SEQ ID NO: 179675 - DNA, 25 bp, Saccharomyces pastorianus
acgttactagtatattatcatatac

SEQ ID NO: 179676 - DNA, 25 bp, Saccharomyces pastorianus
agtatttacgttactagtatattat

SEQ ID NO: 179677 - DNA, 25 bp, Saccharomyces pastorianus
ctatcatctactaactagtatttac

SEQ ID NO: 179678 - DNA, 25 bp, Saccharomyces pastorianus
gtatttacgttactagtatattatc

SEQ ID NO: 179679 - DNA, 25 bp, Saccharomyces pastorianus
accgattcttgttttacgccattgg

SEQ ID NO: 179680 - DNA, 25 bp, Saccharomyces pastorianus
ggtgccagctgtatccgttacgtct

SEQ ID NO: 179681 - DNA, 25 bp, Saccharomyces pastorianus
gcattttctctagcagtttcatcgt

SEQ ID NO: 179682 - DNA, 25 bp, Saccharomyces pastorianus
cgttacgtcttcaaattcatcttcc

SEQ ID NO: 179683 - DNA, 25 bp, Saccharomyces pastorianus
tatcatccataacatcttccatctc

SEQ ID NO: 179684 - DNA, 25 bp, Saccharomyces pastorianus
gccattggaggcgtttgattctgtc

SEQ ID NO: 179685 - DNA, 25 bp, Saccharomyces pastorianus
agcagtttcatcgttatcatccata

SEQ ID NO: 179686 - DNA, 25 bp, Saccharomyces pastorianus
gtttgattctgtctttgcggtgcca

SEQ ID NO: 179687 - DNA, 25 bp, Saccharomyces pastorianus
catcttccaatgcattttctctagc

SEQ ID NO: 179688 - DNA, 25 bp, Saccharomyces pastorianus
gcttcttcagtcttatcattaaccg

SEQ ID NO: 179689 - DNA, 25 bp, Saccharomyces pastorianus
gcatttacagcttcttcagtcttat

SEQ ID NO: 179690 - DNA, 25 bp, Saccharomyces pastorianus
ggaccctcgttcagaagcttattgt

SEQ ID NO: 179691 - DNA, 25 bp, Saccharomyces pastorianus
attttagatttggaccctcgttcag

SEQ ID NO: 179692 - DNA, 25 bp, Saccharomyces pastorianus
ttattgtctaagcctaaattcagtc

SEQ ID NO: 179693 - DNA, 25 bp, Saccharomyces pastorianus
tattgtctaagcctaaattcagtct

SEQ ID NO: 179694 - DNA, 25 bp, Saccharomyces pastorianus
tttagatttggaccctcgttcagaa

SEQ ID NO: 179695 - DNA, 25 bp, Saccharomyces pastorianus
ccctcgttcagaagcttattgtcta

SEQ ID NO: 179696 - DNA, 25 bp, Saccharomyces pastorianus
ttgtctaagcctaaattcagtctgc

SEQ ID NO: 179697 - DNA, 25 bp, Saccharomyces pastorianus
attgtctaagcctaaattcagtctg

SEQ ID NO: 179698 - DNA, 25 bp, Saccharomyces pastorianus
gatttggaccctcgttcagaagctt

SEQ ID NO: 179699 - DNA, 25 bp, Saccharomyces pastorianus
ttttagatttggaccctcgttcaga

SEQ ID NO: 179700 - DNA, 25 bp, Saccharomyces pastorianus
tttggaccctcgttcagaagcttat

SEQ ID NO: 179701 - DNA, 25 bp, Saccharomyces pastorianus
ctgttttatggcgcttatgtgtatt

SEQ ID NO: 179702 - DNA, 25 bp, Saccharomyces pastorianus
tactgttttatggcgcttatgtgta

SEQ ID NO: 179703 - DNA, 25 bp, Saccharomyces pastorianus
ttttgatagacttcgtatgtggagt

SEQ ID NO: 179704 - DNA, 25 bp, Saccharomyces pastorianus
atttttgatagacttcgtatgtgga

SEQ ID NO: 179705 - DNA, 25 bp, Saccharomyces pastorianus
gaacgaatcatacatttttgataga

SEQ ID NO: 179706 - DNA, 25 bp, Saccharomyces pastorianus
atggagatgctcttgtttctgaacg

SEQ ID NO: 179707 - DNA, 25 bp, Saccharomyces pastorianus
actgttttatggcgcttatgtgtat

SEQ ID NO: 179708 - DNA, 25 bp, Saccharomyces pastorianus
aacgaatcatacatttttgatagac

SEQ ID NO: 179709 - DNA, 25 bp, Saccharomyces pastorianus
gtactgttttatggcgcttatgtgt

SEQ ID NO: 179710 - DNA, 25 bp, Saccharomyces pastorianus
atcatacatttttgatagacttcgt

SEQ ID NO: 179711 - DNA, 25 bp, Saccharomyces pastorianus
acgaatcatacatttttgatagact

SEQ ID NO: 179712 - DNA, 25 bp, Saccharomyces pastorianus
gtccaaggccctcaatggcatggat

SEQ ID NO: 179713 - DNA, 25 bp, Saccharomyces pastorianus
atcggacgccggatgtgttgttcag

SEQ ID NO: 179714 - DNA, 25 bp, Saccharomyces pastorianus
tgccgggcatgatcgccgccaagac

SEQ ID NO: 179715 - DNA, 25 bp, Saccharomyces pastorianus
gattcgctgctgtcgatcgtgcaga

SEQ ID NO: 179716 - DNA, 25 bp, Saccharomyces pastorianus
tccgttcgaagtgaaggtggtgtcc

SEQ ID NO: 179717 - DNA, 25 bp, Saccharomyces pastorianus
aagcttgaagccctgggtgttccgt

SEQ ID NO: 179718 - DNA, 25 bp, Saccharomyces pastorianus
aatggcatggattcgctgctgtcga

SEQ ID NO: 179719 - DNA, 25 bp, Saccharomyces pastorianus
tcgatcgtgcagatgccggccggca

SEQ ID NO: 179720 - DNA, 25 bp, Saccharomyces pastorianus
cctgggtgttccgttcgaagtgaag

SEQ ID NO: 179721 - DNA, 25 bp, Saccharomyces pastorianus
gcgtgccggtgcagtccaaggccct

SEQ ID NO: 179722 - DNA, 25 bp, Saccharomyces pastorianus
tgttgttcagttacgccgagcaggc

SEQ ID NO: 179723 - DNA, 25 bp, Saccharomyces pastorianus
aagattaccatcatgtcccttcatt

SEQ ID NO: 179724 - DNA, 25 bp, Saccharomyces pastorianus
ccgccgttatcttcaatgtcattta

SEQ ID NO: 179725 - DNA, 25 bp, Saccharomyces pastorianus
atttcatccttacaatcctcgcaat

SEQ ID NO: 179726 - DNA, 25 bp, Saccharomyces pastorianus
atttcagtataccacaaagcccgcc

SEQ ID NO: 179727 - DNA, 25 bp, Saccharomyces pastorianus
gaaatttcagtacaaccgcaaccgc

SEQ ID NO: 179728 - DNA, 25 bp, Saccharomyces pastorianus
gatagttcggtaagcttgccagcga

SEQ ID NO: 179729 - DNA, 25 bp, Saccharomyces pastorianus
gatatcaaactctcgtgtgggcgaa

SEQ ID NO: 179730 - DNA, 25 bp, Saccharomyces pastorianus
gacctattaggccattcaaaacgaa

SEQ ID NO: 179731 - DNA, 25 bp, Saccharomyces pastorianus
aaacaactctgtgggtcttgaccta

SEQ ID NO: 179732 - DNA, 25 bp, Saccharomyces pastorianus
aaagctctttggtctacgattggcc

SEQ ID NO: 179733 - DNA, 25 bp, Saccharomyces pastorianus
cagcgaaagctgattcacgtcttaa

SEQ ID NO: 179734 - DNA, 25 bp, Saccharomyces pastorianus
tattcctcattccgttttatatgtt

SEQ ID NO: 179735 - DNA, 25 bp, Saccharomyces pastorianus
tcaatccttgcacttcagcttcctc

SEQ ID NO: 179736 - DNA, 25 bp, Saccharomyces pastorianus
attattcctcattccgttttatatg

SEQ ID NO: 179737 - DNA, 25 bp, Saccharomyces pastorianus
attcctcattccgttttatatgttt

SEQ ID NO: 179738 - DNA, 25 bp, Saccharomyces pastorianus
ttcctcattccgttttatatgtttc

SEQ ID NO: 179739 - DNA, 25 bp, Saccharomyces pastorianus
cctcattccgttttatatgtttcat

SEQ ID NO: 179740 - DNA, 25 bp, Saccharomyces pastorianus
taacttcgatgacagcttttcatac

SEQ ID NO: 179741 - DNA, 25 bp, Saccharomyces pastorianus
ttattcctcattccgttttatatgt

SEQ ID NO: 179742 - DNA, 25 bp, Saccharomyces pastorianus
tatgtttcattatcctattgcatta

SEQ ID NO: 179743 - DNA, 25 bp, Saccharomyces pastorianus
ctcattccgttttatatgtttcatt

SEQ ID NO: 179744 - DNA, 25 bp, Saccharomyces pastorianus
tcctcattccgttttatatgtttca

SEQ ID NO: 179745 - DNA, 25 bp, Saccharomyces pastorianus
gaataagatcaaatcaagccagaag

SEQ ID NO: 179746 - DNA, 25 bp, Saccharomyces pastorianus
cgaactcagcttgccctgattataa

SEQ ID NO: 179747 - DNA, 25 bp, Saccharomyces pastorianus
tgtgaggcttcagcgaagtagaaac

SEQ ID NO: 179748 - DNA, 25 bp, Saccharomyces pastorianus
gatttgagataactgcagcgatgtg

SEQ ID NO: 179749 - DNA, 25 bp, Saccharomyces pastorianus
tcaagccagaagaactacctacaaa

SEQ ID NO: 179750 - DNA, 25 bp, Saccharomyces pastorianus
atatttgcatcgaactcagcttgcc

SEQ ID NO: 179751 - DNA, 25 bp, Saccharomyces pastorianus
agaaacgggccatataagtatatct

SEQ ID NO: 179752 - DNA, 25 bp, Saccharomyces pastorianus
gaagctatctcaagattgttctttt

SEQ ID NO: 179753 - DNA, 25 bp, Saccharomyces pastorianus
agcgaagtagaaacgggccatataa

SEQ ID NO: 179754 - DNA, 25 bp, Saccharomyces pastorianus
tttcatcacttaactattgcatcag

SEQ ID NO: 179755 - DNA, 25 bp, Saccharomyces pastorianus
tcagcttgccctgattataataaca

SEQ ID NO: 179756 - DNA, 25 bp, Saccharomyces pastorianus
gaatccataaaagggaatctgcaat

SEQ ID NO: 179757 - DNA, 25 bp, Saccharomyces pastorianus
cataaaagggaatctgcaattctac

SEQ ID NO: 179758 - DNA, 25 bp, Saccharomyces pastorianus
tccataaaagggaatctgcaattct

SEQ ID NO: 179759 - DNA, 25 bp, Saccharomyces pastorianus
atccataaaagggaatctgcaattc

SEQ ID NO: 179760 - DNA, 25 bp, Saccharomyces pastorianus
tcctccaggatttaggaatccataa

SEQ ID NO: 179761 - DNA, 25 bp, Saccharomyces pastorianus
tctcctccaggatttaggaatccat

SEQ ID NO: 179762 - DNA, 25 bp, Saccharomyces pastorianus
aaaagggaatctgcaattctacaca

SEQ ID NO: 179763 - DNA, 25 bp, Saccharomyces pastorianus
ataaaagggaatctgcaattctaca

SEQ ID NO: 179764 - DNA, 25 bp, Saccharomyces pastorianus
taaaagggaatctgcaattctacac

SEQ ID NO: 179765 - DNA, 25 bp, Saccharomyces pastorianus
ccataaaagggaatctgcaattcta

SEQ ID NO: 179766 - DNA, 25 bp, Saccharomyces pastorianus
ctcctccaggatttaggaatccata

SEQ ID NO: 179767 - DNA, 25 bp, Saccharomyces pastorianus
atttgcgaccaaagactcgctcttt

SEQ ID NO: 179768 - DNA, 25 bp, Saccharomyces pastorianus
gttacgctcgaagtaccacagactg

SEQ ID NO: 179769 - DNA, 25 bp, Saccharomyces pastorianus
tcgctctttcccaaagtcgtatctt

SEQ ID NO: 179770 - DNA, 25 bp, Saccharomyces pastorianus
ctgtgaactgtctgcagggagtgct

SEQ ID NO: 179771 - DNA, 25 bp, Saccharomyces pastorianus
aaagaggtgccgaccttgattctcc

SEQ ID NO: 179772 - DNA, 25 bp, Saccharomyces pastorianus
gtcgtatcttccatcgagcgtataa

SEQ ID NO: 179773 - DNA, 25 bp, Saccharomyces pastorianus
gcaattgatttcctactggttagca

SEQ ID NO: 179774 - DNA, 25 bp, Saccharomyces pastorianus
tttccagtttgcgtctgctttagaa

SEQ ID NO: 179775 - DNA, 25 bp, Saccharomyces pastorianus
attccgaaggtcttctagcgggtga

SEQ ID NO: 179776 - DNA, 25 bp, Saccharomyces pastorianus
gagtgctgaatatcattcctttgca

SEQ ID NO: 179777 - DNA, 25 bp, Saccharomyces pastorianus
gagatttcctatgttcattccgaag

SEQ ID NO: 179778 - DNA, 25 bp, Saccharomyces pastorianus
acacttcttcgtcgccattaacgtt

SEQ ID NO: 179779 - DNA, 25 bp, Saccharomyces pastorianus
tggttttgctcatgacacagttatt

SEQ ID NO: 179780 - DNA, 25 bp, Saccharomyces pastorianus
gtccgtcaaggacattttagtcaaa

SEQ ID NO: 179781 - DNA, 25 bp, Saccharomyces pastorianus
gttgaccaactacgagacattttct

SEQ ID NO: 179782 - DNA, 25 bp, Saccharomyces pastorianus
ttaggcaaactgcagattcaacttt

SEQ ID NO: 179783 - DNA, 25 bp, Saccharomyces pastorianus
tgatgcatcgctagatctgccaatg

SEQ ID NO: 179784 - DNA, 25 bp, Saccharomyces pastorianus
aaaggcgataggaactcagtgactg

SEQ ID NO: 179785 - DNA, 25 bp, Saccharomyces pastorianus
gaacttccaggaggcaaggcagatt

SEQ ID NO: 179786 - DNA, 25 bp, Saccharomyces pastorianus
tctgccaatgacaagtgaacccaaa

SEQ ID NO: 179787 - DNA, 25 bp, Saccharomyces pastorianus
aggaaattcatcttctacctctgac

SEQ ID NO: 179788 - DNA, 25 bp, Saccharomyces pastorianus
atttttgttgtctagctttctacta

SEQ ID NO: 179789 - DNA, 25 bp, Saccharomyces pastorianus
ctccatggcccatctctcactaaat

SEQ ID NO: 179790 - DNA, 25 bp, Saccharomyces pastorianus
actccactccatggcccatctctca

SEQ ID NO: 179791 - DNA, 25 bp, Saccharomyces pastorianus
ctctcactaaatcagtaccaaatgc

SEQ ID NO: 179792 - DNA, 25 bp, Saccharomyces pastorianus
ataaagcccatcattatccacattt

SEQ ID NO: 179793 - DNA, 25 bp, Saccharomyces pastorianus
cataaagcccatcattatccacatt

SEQ ID NO: 179794 - DNA, 25 bp, Saccharomyces pastorianus
tcagtaccaaatgcactcacatcat

SEQ ID NO: 179795 - DNA, 25 bp, Saccharomyces pastorianus
atggcccatctctcactaaatcagt

SEQ ID NO: 179796 - DNA, 25 bp, Saccharomyces pastorianus
aaagcccatcattatccacatttta

SEQ ID NO: 179797 - DNA, 25 bp, Saccharomyces pastorianus
taaagcccatcattatccacatttt

SEQ ID NO: 179798 - DNA, 25 bp, Saccharomyces pastorianus
ccataaagcccatcattatccacat

SEQ ID NO: 179799 - DNA, 25 bp, Saccharomyces pastorianus
ccatctctcactaaatcagtaccaa

SEQ ID NO: 179800 - DNA, 25 bp, Saccharomyces pastorianus
aatatcgtgcccacgcaaacagggt

SEQ ID NO: 179801 - DNA, 25 bp, Saccharomyces pastorianus
tcctactaattctcctcagcaaaat

SEQ ID NO: 179802 - DNA, 25 bp, Saccharomyces pastorianus
taaattctcagggtacaggctacaa

SEQ ID NO: 179803 - DNA, 25 bp, Saccharomyces pastorianus
tggtaaccaacctcaaagtcctcct

SEQ ID NO: 179804 - DNA, 25 bp, Saccharomyces pastorianus
actgggaaccagtctatatcggata

SEQ ID NO: 179805 - DNA, 25 bp, Saccharomyces pastorianus
gcaagcccagttccagcaacaacaa

SEQ ID NO: 179806 - DNA, 25 bp, Saccharomyces pastorianus
caatacattcaacctcatcaacaac

SEQ ID NO: 179807 - DNA, 25 bp, Saccharomyces pastorianus
tggagaggcacgtattcctgcacaa

SEQ ID NO: 179808 - DNA, 25 bp, Saccharomyces pastorianus
actggtataagctactctcagccac

SEQ ID NO: 179809 - DNA, 25 bp, Saccharomyces pastorianus
cagcgacttgaataccttgttagca

SEQ ID NO: 179810 - DNA, 25 bp, Saccharomyces pastorianus
tcaatacgcccaaaacttccaacaa

SEQ ID NO: 179811 - DNA, 25 bp, Saccharomyces pastorianus
aaagttctactccactcaaattgaa

SEQ ID NO: 179812 - DNA, 25 bp, Saccharomyces pastorianus
agaaaagttctactccactcaaatt

SEQ ID NO: 179813 - DNA, 25 bp, Saccharomyces pastorianus
gttctactccactcaaattgaagaa

SEQ ID NO: 179814 - DNA, 25 bp, Saccharomyces pastorianus
gaaaagttctactccactcaaattg

SEQ ID NO: 179815 - DNA, 25 bp, Saccharomyces pastorianus
aagttctactccactcaaattgaag

SEQ ID NO: 179816 - DNA, 25 bp, Saccharomyces pastorianus
gaactagaaaagttctactccactc

SEQ ID NO: 179817 - DNA, 25 bp, Saccharomyces pastorianus
tctactccactcaaattgaagaatt

SEQ ID NO: 179818 - DNA, 25 bp, Saccharomyces pastorianus
tagaaaagttctactccactcaaat

SEQ ID NO: 179819 - DNA, 25 bp, Saccharomyces pastorianus
aaaagttctactccactcaaattga

SEQ ID NO: 179820 - DNA, 25 bp, Saccharomyces pastorianus
agttctactccactcaaattgaaga

SEQ ID NO: 179821 - DNA, 25 bp, Saccharomyces pastorianus
ctagaaaagttctactccactcaaa

SEQ ID NO: 179822 - DNA, 25 bp, Saccharomyces pastorianus
tattatcttgcgagcatgtgcgctc

SEQ ID NO: 179823 - DNA, 25 bp, Saccharomyces pastorianus
gattgggtgatattttgcatattat

SEQ ID NO: 179824 - DNA, 25 bp, Saccharomyces pastorianus
gcgagcatgtgcgctcaatttcggg

SEQ ID NO: 179825 - DNA, 25 bp, Saccharomyces pastorianus
ttatcttgcgagcatgtgcgctcaa

SEQ ID NO: 179826 - DNA, 25 bp, Saccharomyces pastorianus
atattatcttgcgagcatgtgcgct

SEQ ID NO: 179827 - DNA, 25 bp, Saccharomyces pastorianus
gcatattatcttgcgagcatgtgcg

SEQ ID NO: 179828 - DNA, 25 bp, Saccharomyces pastorianus
atcttgcgagcatgtgcgctcaatt

SEQ ID NO: 179829 - DNA, 25 bp, Saccharomyces pastorianus
ttgcgagcatgtgcgctcaatttcg

SEQ ID NO: 179830 - DNA, 25 bp, Saccharomyces pastorianus
attatcttgcgagcatgtgcgctca

SEQ ID NO: 179831 - DNA, 25 bp, Saccharomyces pastorianus
tatcttgcgagcatgtgcgctcaat

SEQ ID NO: 179832 - DNA, 25 bp, Saccharomyces pastorianus
tcttgcgagcatgtgcgctcaattt

SEQ ID NO: 179833 - DNA, 25 bp, Saccharomyces pastorianus
ccaccgatctggactatttgcaaca

SEQ ID NO: 179834 - DNA, 25 bp, Saccharomyces pastorianus
caccgatctggactatttgcaacaa

SEQ ID NO: 179835 - DNA, 25 bp, Saccharomyces pastorianus
gccaccgatctggactatttgcaac

SEQ ID NO: 179836 - DNA, 25 bp, Saccharomyces pastorianus
atttgcaacaacccgtccaacagca

SEQ ID NO: 179837 - DNA, 25 bp, Saccharomyces pastorianus
acttcgccaccgatctggactattt

SEQ ID NO: 179838 - DNA, 25 bp, Saccharomyces pastorianus
tatttgcaacaacccgtccaacagc

SEQ ID NO: 179839 - DNA, 25 bp, Saccharomyces pastorianus
ttcgccaccgatctggactatttgc

SEQ ID NO: 179840 - DNA, 25 bp, Saccharomyces pastorianus
cgccaccgatctggactatttgcaa

SEQ ID NO: 179841 - DNA, 25 bp, Saccharomyces pastorianus
tcgccaccgatctggactatttgca

SEQ ID NO: 179842 - DNA, 25 bp, Saccharomyces pastorianus
cttcgccaccgatctggactatttg

SEQ ID NO: 179843 - DNA, 25 bp, Saccharomyces pastorianus
ctatttgcaacaacccgtccaacag

SEQ ID NO: 179844 - DNA, 25 bp, Saccharomyces pastorianus
tatatcctttttccactgcgattgg

SEQ ID NO: 179845 - DNA, 25 bp, Saccharomyces pastorianus
gtaagccattcttctttttcaagca

SEQ ID NO: 179846 - DNA, 25 bp, Saccharomyces pastorianus
cattttccatttgtttcagctcttt

SEQ ID NO: 179847 - DNA, 25 bp, Saccharomyces pastorianus
ctgcgattggtactctgtaagccat

SEQ ID NO: 179848 - DNA, 25 bp, Saccharomyces pastorianus
gttcaacatcgttcaacatttcctg

SEQ ID NO: 179849 - DNA, 25 bp, Saccharomyces pastorianus
gttcaatttttatcttttcttcacg

SEQ ID NO: 179850 - DNA, 25 bp, Saccharomyces pastorianus
tcgtttctgttagttcatctttgag

SEQ ID NO: 179851 - DNA, 25 bp, Saccharomyces pastorianus
ggcattgattttctctttcgtttct

SEQ ID NO: 179852 - DNA, 25 bp, Saccharomyces pastorianus
cgacgctctttcattttcaaactgt

SEQ ID NO: 179853 - DNA, 25 bp, Saccharomyces pastorianus
gattttatttcttacctcttctatt

SEQ ID NO: 179854 - DNA, 25 bp, Saccharomyces pastorianus
attagatgccgctagctgctttaaa

SEQ ID NO: 179855 - DNA, 25 bp, Saccharomyces pastorianus
gcagtggcacagaaacaaccaggaa

SEQ ID NO: 179856 - DNA, 25 bp, Saccharomyces pastorianus
aacaaccaggaatactatagtcata

SEQ ID NO: 179857 - DNA, 25 bp, Saccharomyces pastorianus
gtatatattggctatgcagacccct

SEQ ID NO: 179858 - DNA, 25 bp, Saccharomyces pastorianus
gtggcacagaaacaaccaggaatac

SEQ ID NO: 179859 - DNA, 25 bp, Saccharomyces pastorianus
tagtcataggcaatacaaggtatat

SEQ ID NO: 179860 - DNA, 25 bp, Saccharomyces pastorianus
tgcagtggcacagaaacaaccagga

SEQ ID NO: 179861 - DNA, 25 bp, Saccharomyces pastorianus
cagtggcacagaaacaaccaggaat

SEQ ID NO: 179862 - DNA, 25 bp, Saccharomyces pastorianus
agtggcacagaaacaaccaggaata

SEQ ID NO: 179863 - DNA, 25 bp, Saccharomyces pastorianus
atgcagtggcacagaaacaaccagg

SEQ ID NO: 179864 - DNA, 25 bp, Saccharomyces pastorianus
atatattggctatgcagacccctcc

SEQ ID NO: 179865 - DNA, 25 bp, Saccharomyces pastorianus
ggaatactatagtcataggcaatac

SEQ ID NO: 179866 - DNA, 25 bp, Saccharomyces pastorianus
gacgtactgtgacgatttctctcat

SEQ ID NO: 179867 - DNA, 25 bp, Saccharomyces pastorianus
agtttcactctgacctgcttttgaa

SEQ ID NO: 179868 - DNA, 25 bp, Saccharomyces pastorianus
gtgttttctagtttgatgccgttga

SEQ ID NO: 179869 - DNA, 25 bp, Saccharomyces pastorianus
gtttcaccaagcagtcatggctcga

SEQ ID NO: 179870 - DNA, 25 bp, Saccharomyces pastorianus
gattaactcgctccttactgaagat

SEQ ID NO: 179871 - DNA, 25 bp, Saccharomyces pastorianus
gtttccgaaactgtctatgctctag

SEQ ID NO: 179872 - DNA, 25 bp, Saccharomyces pastorianus
aaaggcgcagggacgtctcagattg

SEQ ID NO: 179873 - DNA, 25 bp, Saccharomyces pastorianus
catggctcgatattctcgcatgcga

SEQ ID NO: 179874 - DNA, 25 bp, Saccharomyces pastorianus
gtatgattcctcaagcatctcgtag

SEQ ID NO: 179875 - DNA, 25 bp, Saccharomyces pastorianus
ttgcactctaattcttcatcatcca

SEQ ID NO: 179876 - DNA, 25 bp, Saccharomyces pastorianus
gacgtacaagccttagctcatatgg

SEQ ID NO: 179877 - DNA, 25 bp, Saccharomyces pastorianus
tccaaccgttagattatttaacttg

SEQ ID NO: 179878 - DNA, 25 bp, Saccharomyces pastorianus
cttcgtggaagaggaatagcaatct

SEQ ID NO: 179879 - DNA, 25 bp, Saccharomyces pastorianus
taataatgactgttgcttacaatca

SEQ ID NO: 179880 - DNA, 25 bp, Saccharomyces pastorianus
aatagcaatcttgttgacgaggttt

SEQ ID NO: 179881 - DNA, 25 bp, Saccharomyces pastorianus
ggtatatatccaaccgttagattat

SEQ ID NO: 179882 - DNA, 25 bp, Saccharomyces pastorianus
atttaacttggatgatattttggac

SEQ ID NO: 179883 - DNA, 25 bp, Saccharomyces pastorianus
taggcttgccgagaatccaaggtat

SEQ ID NO: 179884 - DNA, 25 bp, Saccharomyces pastorianus
tataaagggtgtcagttgcggacat

SEQ ID NO: 179885 - DNA, 25 bp, Saccharomyces pastorianus
gtccgctggtataggcttgccgaga

SEQ ID NO: 179886 - DNA, 25 bp, Saccharomyces pastorianus
gaatccaaggtatatatccaaccgt

SEQ ID NO: 179887 - DNA, 25 bp, Saccharomyces pastorianus
tattttggacgaaataacttcgtgg

SEQ ID NO: 179888 - DNA, 25 bp, Saccharomyces pastorianus
tctagcgggatcgaaccgctgatcc

SEQ ID NO: 179889 - DNA, 25 bp, Saccharomyces pastorianus
atggtctctagcgggatcgaaccgc

SEQ ID NO: 179890 - DNA, 25 bp, Saccharomyces pastorianus
cgaaccgctgatccccgcgttatta

SEQ ID NO: 179891 - DNA, 25 bp, Saccharomyces pastorianus
gtctctagcgggatcgaaccgctga

SEQ ID NO: 179892 - DNA, 25 bp, Saccharomyces pastorianus
ctagcgggatcgaaccgctgatccc

SEQ ID NO: 179893 - DNA, 25 bp, Saccharomyces pastorianus
tctctagcgggatcgaaccgctgat

SEQ ID NO: 179894 - DNA, 25 bp, Saccharomyces pastorianus
ctctagcgggatcgaaccgctgatc

SEQ ID NO: 179895 - DNA, 25 bp, Saccharomyces pastorianus
ggtctctagcgggatcgaaccgctg

SEQ ID NO: 179896 - DNA, 25 bp, Saccharomyces pastorianus
ggatcgaaccgctgatccccgcgtt

SEQ ID NO: 179897 - DNA, 25 bp, Saccharomyces pastorianus
tagcgggatcgaaccgctgatcccc

SEQ ID NO: 179898 - DNA, 25 bp, Saccharomyces pastorianus
gctgatccccgcgttattagcacgg

SEQ ID NO: 179899 - DNA, 25 bp, Saccharomyces pastorianus
tataaccaactactagtccttcctt

SEQ ID NO: 179900 - DNA, 25 bp, Saccharomyces pastorianus
aaaggtcgagtctgttgctgctgcc

SEQ ID NO: 179901 - DNA, 25 bp, Saccharomyces pastorianus
atgtgtttccttctcgagacctcgg

SEQ ID NO: 179902 - DNA, 25 bp, Saccharomyces pastorianus
gtatgaaattatccgctctattagc

SEQ ID NO: 179903 - DNA, 25 bp, Saccharomyces pastorianus
tacctcggcggctgctgatggaaag

SEQ ID NO: 179904 - DNA, 25 bp, Saccharomyces pastorianus
aacgacaagcgtgccgttgtcaccg

SEQ ID NO: 179905 - DNA, 25 bp, Saccharomyces pastorianus
agctgtccaccatagtgacaaccac

SEQ ID NO: 179906 - DNA, 25 bp, Saccharomyces pastorianus
gtgtattcattccttaaacttcgtt

SEQ ID NO: 179907 - DNA, 25 bp, Saccharomyces pastorianus
gttgtcaccgttactcagtacgtca

SEQ ID NO: 179908 - DNA, 25 bp, Saccharomyces pastorianus
agacggcgctgttgttattccagct

SEQ ID NO: 179909 - DNA, 25 bp, Saccharomyces pastorianus
tcagtacgtcaacgcagacggcgct

SEQ ID NO: 179910 - DNA, 25 bp, Saccharomyces pastorianus
cttctcctagttccagactgaatta

SEQ ID NO: 179911 - DNA, 25 bp, Saccharomyces pastorianus
gttccagactgaattatcgaaactt

SEQ ID NO: 179912 - DNA, 25 bp, Saccharomyces pastorianus
aagatgccatcgagtcagcttctcc

SEQ ID NO: 179913 - DNA, 25 bp, Saccharomyces pastorianus
attactggcgaaggcggcatcccaa

SEQ ID NO: 179914 - DNA, 25 bp, Saccharomyces pastorianus
aaattactggcgaaggcggcatccc

SEQ ID NO: 179915 - DNA, 25 bp, Saccharomyces pastorianus
cctgaagatgccatcgagtcagctt

SEQ ID NO: 179916 - DNA, 25 bp, Saccharomyces pastorianus
gaacgacaagctcaggaaaattact

SEQ ID NO: 179917 - DNA, 25 bp, Saccharomyces pastorianus
atcgagtcagcttctcctagttcca

SEQ ID NO: 179918 - DNA, 25 bp, Saccharomyces pastorianus
agatcgaacgacaagctcaggaaaa

SEQ ID NO: 179919 - DNA, 25 bp, Saccharomyces pastorianus
tcaaggcagcggagatcgaacgaca

SEQ ID NO: 179920 - DNA, 25 bp, Saccharomyces pastorianus
agcttctcctagttccagactgaat

SEQ ID NO: 179921 - DNA, 25 bp, Saccharomyces pastorianus
ggagaaggcataatgatcctacttt

SEQ ID NO: 179922 - DNA, 25 bp, Saccharomyces pastorianus
ttaatggatactgccgggagaaggc

SEQ ID NO: 179923 - DNA, 25 bp, Saccharomyces pastorianus
ctacgttgaactatttgaagctggt

SEQ ID NO: 179924 - DNA, 25 bp, Saccharomyces pastorianus
gtcgccattgaagtctttcgctgac

SEQ ID NO: 179925 - DNA, 25 bp, Saccharomyces pastorianus
gaagtctttcgctgaccaagccaag

SEQ ID NO: 179926 - DNA, 25 bp, Saccharomyces pastorianus
tggtaaccaaaattgcaaagcaagc

SEQ ID NO: 179927 - DNA, 25 bp, Saccharomyces pastorianus
aagcaagccatcaaatattctcgtg

SEQ ID NO: 179928 - DNA, 25 bp, Saccharomyces pastorianus
ggttatggtggatctgacttggtaa

SEQ ID NO: 179929 - DNA, 25 bp, Saccharomyces pastorianus
aaactggtaatgactacgttgaact

SEQ ID NO: 179930 - DNA, 25 bp, Saccharomyces pastorianus
tattctcgtgatcaaaacttcgata

SEQ ID NO: 179931 - DNA, 25 bp, Saccharomyces pastorianus
ggtggatctgacttggtaaccaaaa

SEQ ID NO: 179932 - DNA, 25 bp, Saccharomyces pastorianus
aggattatggaacaccccgtactat

SEQ ID NO: 179933 - DNA, 25 bp, Saccharomyces pastorianus
tggtgcactatcttccttcaataac

SEQ ID NO: 179934 - DNA, 25 bp, Saccharomyces pastorianus
gtactatttctactgtggtcggaca

SEQ ID NO: 179935 - DNA, 25 bp, Saccharomyces pastorianus
tgtttcggcatactggtggtttcca

SEQ ID NO: 179936 - DNA, 25 bp, Saccharomyces pastorianus
tttcatctactagccctatcatgga

SEQ ID NO: 179937 - DNA, 25 bp, Saccharomyces pastorianus
gccaccgttttttgttgaagcttct

SEQ ID NO: 179938 - DNA, 25 bp, Saccharomyces pastorianus
gaagagtttcgacgtactctcgctt

SEQ ID NO: 179939 - DNA, 25 bp, Saccharomyces pastorianus
caaccactggctcgtctaatgaaga

SEQ ID NO: 179940 - DNA, 25 bp, Saccharomyces pastorianus
cctgccgtttacactatagcttttt

SEQ ID NO: 179941 - DNA, 25 bp, Saccharomyces pastorianus
tgctgtgtggctttgatgtcttatt

SEQ ID NO: 179942 - DNA, 25 bp, Saccharomyces pastorianus
gtcctggcccagattttcgaatgtg

SEQ ID NO: 179943 - DNA, 25 bp, Saccharomyces pastorianus
acgcgattctcatgtcgtatccaaa

SEQ ID NO: 179944 - DNA, 25 bp, Saccharomyces pastorianus
ggtagctcctctggtagcgctagct

SEQ ID NO: 179945 - DNA, 25 bp, Saccharomyces pastorianus
atgcgggtgctgtattattcggcca

SEQ ID NO: 179946 - DNA, 25 bp, Saccharomyces pastorianus
gtccgtgatgcagtatatgcctttc

SEQ ID NO: 179947 - DNA, 25 bp, Saccharomyces pastorianus
actgtcaatccaggtggtagctcct

SEQ ID NO: 179948 - DNA, 25 bp, Saccharomyces pastorianus
ccaaccgttggtttgacttcaagat

SEQ ID NO: 179949 - DNA, 25 bp, Saccharomyces pastorianus
agcgctagctccgtagctgctaata

SEQ ID NO: 179950 - DNA, 25 bp, Saccharomyces pastorianus
atgctcttgggttctgtagtgccac

SEQ ID NO: 179951 - DNA, 25 bp, Saccharomyces pastorianus
gacggtagtattatcgatcctgcaa

SEQ ID NO: 179952 - DNA, 25 bp, Saccharomyces pastorianus
cgttgtccttttaatcttactgtca

SEQ ID NO: 179953 - DNA, 25 bp, Saccharomyces pastorianus
tattattcggccactctacgttaag

SEQ ID NO: 179954 - DNA, 25 bp, Saccharomyces pastorianus
ggatggagtttcacgtaaatactgc

SEQ ID NO: 179955 - DNA, 25 bp, Saccharomyces pastorianus
aatgccaatagagccgcacatgtaa

SEQ ID NO: 179956 - DNA, 25 bp, Saccharomyces pastorianus
tgatgcggttttgtttttgggcagc

SEQ ID NO: 179957 - DNA, 25 bp, Saccharomyces pastorianus
aatagagccgcacatgtaattactg

SEQ ID NO: 179958 - DNA, 25 bp, Saccharomyces pastorianus
gattcctgtgcaaagtttgacaaga

SEQ ID NO: 179959 - DNA, 25 bp, Saccharomyces pastorianus
gtaattactggttcacactcgtggg

SEQ ID NO: 179960 - DNA, 25 bp, Saccharomyces pastorianus
gagccgcacatgtaattactggttc

SEQ ID NO: 179961 - DNA, 25 bp, Saccharomyces pastorianus
gggcccacacgattcctgtgcaaag

SEQ ID NO: 179962 - DNA, 25 bp, Saccharomyces pastorianus
acacgattcctgtgcaaagtttgac

SEQ ID NO: 179963 - DNA, 25 bp, Saccharomyces pastorianus
gaacaatgccaatagagccgcacat

SEQ ID NO: 179964 - DNA, 25 bp, Saccharomyces pastorianus
atactgccaaaggtgatgcggtttt

SEQ ID NO: 179965 - DNA, 25 bp, Saccharomyces pastorianus
aatcggcgacccatttaacttaatg

SEQ ID NO: 179966 - DNA, 25 bp, Saccharomyces pastorianus
gaatggattcattccagccatatat

SEQ ID NO: 179967 - DNA, 25 bp, Saccharomyces pastorianus
aaattggccacttcattccctgaag

SEQ ID NO: 179968 - DNA, 25 bp, Saccharomyces pastorianus
ggaaaacactgcttacctgttcaaa

SEQ ID NO: 179969 - DNA, 25 bp, Saccharomyces pastorianus
gaagtggctttatgggcttattccc

SEQ ID NO: 179970 - DNA, 25 bp, Saccharomyces pastorianus
ttaatggaaactgcctacttgaatg

SEQ ID NO: 179971 - DNA, 25 bp, Saccharomyces pastorianus
ttattcccaactagccgagcaaggc

SEQ ID NO: 179972 - DNA, 25 bp, Saccharomyces pastorianus
tgaggatcctccaagaaccacagat

SEQ ID NO: 179973 - DNA, 25 bp, Saccharomyces pastorianus
gaggacagcatttgccgcattaatc

SEQ ID NO: 179974 - DNA, 25 bp, Saccharomyces pastorianus
aaacgaagctattatggcacctaaa

SEQ ID NO: 179975 - DNA, 25 bp, Saccharomyces pastorianus
gagcgtgcatagatctgggcttaat

SEQ ID NO: 179976 - DNA, 25 bp, Saccharomyces pastorianus
acatcatcagatacagcccacatta

SEQ ID NO: 179977 - DNA, 25 bp, Saccharomyces pastorianus
tgtaatgaaccttccatcggattat

SEQ ID NO: 179978 - DNA, 25 bp, Saccharomyces pastorianus
gaagtggcctacgattaacgccttc

SEQ ID NO: 179979 - DNA, 25 bp, Saccharomyces pastorianus
atttgccgtttctactccttgtaat

SEQ ID NO: 179980 - DNA, 25 bp, Saccharomyces pastorianus
agatgtaccccagaagactttgagt

SEQ ID NO: 179981 - DNA, 25 bp, Saccharomyces pastorianus
aataatggccggcttgcgctgacac

SEQ ID NO: 179982 - DNA, 25 bp, Saccharomyces pastorianus
atattgctgtatgtgctccggcaga

SEQ ID NO: 179983 - DNA, 25 bp, Saccharomyces pastorianus
atgattgccggtcttgaatatagcc

SEQ ID NO: 179984 - DNA, 25 bp, Saccharomyces pastorianus
aacgccttcctttatccttagatgt

SEQ ID NO: 179985 - DNA, 25 bp, Saccharomyces pastorianus
attctgttacttaaggcccaatggg

SEQ ID NO: 179986 - DNA, 25 bp, Saccharomyces pastorianus
gggagagacacatcgacatcatcag

SEQ ID NO: 179987 - DNA, 25 bp, Saccharomyces pastorianus
agtacaggccccaccgggctatggt

SEQ ID NO: 179988 - DNA, 25 bp, Saccharomyces pastorianus
ggcagtacaggccccaccgggctat

SEQ ID NO: 179989 - DNA, 25 bp, Saccharomyces pastorianus
gtacaggccccaccgggctatggta

SEQ ID NO: 179990 - DNA, 25 bp, Saccharomyces pastorianus
ccctctgtggcagtacaggccccac

SEQ ID NO: 179991 - DNA, 25 bp, Saccharomyces pastorianus
tggcagtacaggccccaccgggcta

SEQ ID NO: 179992 - DNA, 25 bp, Saccharomyces pastorianus
tctgtggcagtacaggccccaccgg

SEQ ID NO: 179993 - DNA, 25 bp, Saccharomyces pastorianus
ctctgtggcagtacaggccccaccg

SEQ ID NO: 179994 - DNA, 25 bp, Saccharomyces pastorianus
tgtggcagtacaggccccaccgggc

SEQ ID NO: 179995 - DNA, 25 bp, Saccharomyces pastorianus
ctgtggcagtacaggccccaccggg

SEQ ID NO: 179996 - DNA, 25 bp, Saccharomyces pastorianus
acaggccccaccgggctatggtaag

SEQ ID NO: 179997 - DNA, 25 bp, Saccharomyces pastorianus
cctctgtggcagtacaggccccacc

SEQ ID NO: 179998 - DNA, 25 bp, Saccharomyces pastorianus
aatgctactaccagctgccagacat

SEQ ID NO: 179999 - DNA, 25 bp, Saccharomyces pastorianus
agctgccagacatctactgtcagga

SEQ ID NO: 180000 - DNA, 25 bp, Saccharomyces pastorianus
accagctgccagacatctactgtca

SEQ ID NO: 180001 - DNA, 25 bp, Saccharomyces pastorianus
actaccagctgccagacatctactg

SEQ ID NO: 180002 - DNA, 25 bp, Saccharomyces pastorianus
ctgtcaggactagtaacagactacc

SEQ ID NO: 180003 - DNA, 25 bp, Saccharomyces pastorianus
gccagacatctactgtcaggactag

SEQ ID NO: 180004 - DNA, 25 bp, Saccharomyces pastorianus
ctgccagacatctactgtcaggact

SEQ ID NO: 180005 - DNA, 25 bp, Saccharomyces pastorianus
taatgctactaccagctgccagaca

SEQ ID NO: 180006 - DNA, 25 bp, Saccharomyces pastorianus
gacatctactgtcaggactagtaac

SEQ ID NO: 180007 - DNA, 25 bp, Saccharomyces pastorianus
gctactaccagctgccagacatcta

SEQ ID NO: 180008 - DNA, 25 bp, Saccharomyces pastorianus
atctactgtcaggactagtaacaga

SEQ ID NO: 180009 - DNA, 25 bp, Saccharomyces pastorianus
cagcgattgaagttaatttgaccat

SEQ ID NO: 180010 - DNA, 25 bp, Saccharomyces pastorianus
gatgtaatcttaacaagaaatagtg

SEQ ID NO: 180011 - DNA, 25 bp, Saccharomyces pastorianus
gctgatgtaatcttaacaagaaata

SEQ ID NO: 180012 - DNA, 25 bp, Saccharomyces pastorianus
tgctgatgtaatcttaacaagaaat

SEQ ID NO: 180013 - DNA, 25 bp, Saccharomyces pastorianus
tagtgctgatgtaatcttaacaaga

SEQ ID NO: 180014 - DNA, 25 bp, Saccharomyces pastorianus
ctgatgtaatcttaacaagaaatag

SEQ ID NO: 180015 - DNA, 25 bp, Saccharomyces pastorianus
ttagtgctgatgtaatcttaacaag

SEQ ID NO: 180016 - DNA, 25 bp, Saccharomyces pastorianus
ccagcagcgattgaagttaatttga

SEQ ID NO: 180017 - DNA, 25 bp, Saccharomyces pastorianus
agtgctgatgtaatcttaacaagaa

SEQ ID NO: 180018 - DNA, 25 bp, Saccharomyces pastorianus
gtgctgatgtaatcttaacaagaaa

SEQ ID NO: 180019 - DNA, 25 bp, Saccharomyces pastorianus
gttagtgctgatgtaatcttaacaa

SEQ ID NO: 180020 - DNA, 25 bp, Saccharomyces pastorianus
tatatatatggatgcatctctctgc

SEQ ID NO: 180021 - DNA, 25 bp, Saccharomyces pastorianus
atatggatgcatctctctgcatata

SEQ ID NO: 180022 - DNA, 25 bp, Saccharomyces pastorianus
gcatctctctgcatataaaattaat

SEQ ID NO: 180023 - DNA, 25 bp, Saccharomyces pastorianus
ggatgcatctctctgcatataaaat

SEQ ID NO: 180024 - DNA, 25 bp, Saccharomyces pastorianus
atggatgcatctctctgcatataaa

SEQ ID NO: 180025 - DNA, 25 bp, Saccharomyces pastorianus
atatatatggatgcatctctctgca

SEQ ID NO: 180026 - DNA, 25 bp, Saccharomyces pastorianus
atatatggatgcatctctctgcata

SEQ ID NO: 180027 - DNA, 25 bp, Saccharomyces pastorianus
tcagaaaggagagccagaattatat

SEQ ID NO: 180028 - DNA, 25 bp, Saccharomyces pastorianus
gcatataaaattaatttccctttcg

SEQ ID NO: 180029 - DNA, 25 bp, Saccharomyces pastorianus
tatggatgcatctctctgcatataa

SEQ ID NO: 180030 - DNA, 25 bp, Saccharomyces pastorianus
aaggagagccagaattatatatata

SEQ ID NO: 180031 - DNA, 25 bp, Saccharomyces pastorianus
gatatgtatacgaatacatcttaag

SEQ ID NO: 180032 - DNA, 25 bp, Saccharomyces pastorianus
caagagaccatgatatgtatacgaa

SEQ ID NO: 180033 - DNA, 25 bp, Saccharomyces pastorianus
gaccatgatatgtatacgaatacat

SEQ ID NO: 180034 - DNA, 25 bp, Saccharomyces pastorianus
agaccatgatatgtatacgaataca

SEQ ID NO: 180035 - DNA, 25 bp, Saccharomyces pastorianus
gagaccatgatatgtatacgaatac

SEQ ID NO: 180036 - DNA, 25 bp, Saccharomyces pastorianus
atgatatgtatacgaatacatctta

SEQ ID NO: 180037 - DNA, 25 bp, Saccharomyces pastorianus
accatgatatgtatacgaatacatc

SEQ ID NO: 180038 - DNA, 25 bp, Saccharomyces pastorianus
agagaccatgatatgtatacgaata

SEQ ID NO: 180039 - DNA, 25 bp, Saccharomyces pastorianus
aagagaccatgatatgtatacgaat

SEQ ID NO: 180040 - DNA, 25 bp, Saccharomyces pastorianus
catgatatgtatacgaatacatctt

SEQ ID NO: 180041 - DNA, 25 bp, Saccharomyces pastorianus
ccatgatatgtatacgaatacatct

SEQ ID NO: 180042 - DNA, 25 bp, Saccharomyces pastorianus
tacgttactagtatattatcatata

SEQ ID NO: 180043 - DNA, 25 bp, Saccharomyces pastorianus
ttacgttactagtatattatcatat

SEQ ID NO: 180044 - DNA, 25 bp, Saccharomyces pastorianus
tagtatttacgttactagtatatta

SEQ ID NO: 180045 - DNA, 25 bp, Saccharomyces pastorianus
atttacgttactagtatattatcat

SEQ ID NO: 180046 - DNA, 25 bp, Saccharomyces pastorianus
cgttactagtatattatcatatacg

SEQ ID NO: 180047 - DNA, 25 bp, Saccharomyces pastorianus
tatttacgttactagtatattatca

SEQ ID NO: 180048 - DNA, 25 bp, Saccharomyces pastorianus
tttacgttactagtatattatcata

SEQ ID NO: 180049 - DNA, 25 bp, Saccharomyces pastorianus
acgttactagtatattatcatatac

SEQ ID NO: 180050 - DNA, 25 bp, Saccharomyces pastorianus
agtatttacgttactagtatattat

SEQ ID NO: 180051 - DNA, 25 bp, Saccharomyces pastorianus
ctatcatctactaactagtatttac

SEQ ID NO: 180052 - DNA, 25 bp, Saccharomyces pastorianus
gtatttacgttactagtatattatc

SEQ ID NO: 180053 - DNA, 25 bp, Saccharomyces pastorianus
tttaccagaaaactctacgatcgat

SEQ ID NO: 180054 - DNA, 25 bp, Saccharomyces pastorianus
aaacgtaggcagacgagctcagtca

SEQ ID NO: 180055 - DNA, 25 bp, Saccharomyces pastorianus
atgacctactatccactagtgacca

SEQ ID NO: 180056 - DNA, 25 bp, Saccharomyces pastorianus
gaggagatgtgtcaatttaccagaa

SEQ ID NO: 180057 - DNA, 25 bp, Saccharomyces pastorianus
ccactagtgaccatccaggattctt

SEQ ID NO: 180058 - DNA, 25 bp, Saccharomyces pastorianus
actgtgggagtttggccaaacccag

SEQ ID NO: 180059 - DNA, 25 bp, Saccharomyces pastorianus
cagacgagctcagtcaagaggagat

SEQ ID NO: 180060 - DNA, 25 bp, Saccharomyces pastorianus
gaacatatccatcagtacatccgat

SEQ ID NO: 180061 - DNA, 25 bp, Saccharomyces pastorianus
acatccgatgagttcgatattctga

SEQ ID NO: 180062 - DNA, 25 bp, Saccharomyces pastorianus
gaaagcaaccctgaacatatccatc

SEQ ID NO: 180063 - DNA, 25 bp, Saccharomyces pastorianus
gaaaactctacgatcgataacagaa

SEQ ID NO: 180064 - DNA, 25 bp, Saccharomyces pastorianus
ttaatcccagatgctacaaaacaat

SEQ ID NO: 180065 - DNA, 25 bp, Saccharomyces pastorianus
gagaaacctttcacttgccacattt

SEQ ID NO: 180066 - DNA, 25 bp, Saccharomyces pastorianus
ggtagcacgcaaaagacccgtggaa

SEQ ID NO: 180067 - DNA, 25 bp, Saccharomyces pastorianus
acaagagcatcttaagagacatgtt

SEQ ID NO: 180068 - DNA, 25 bp, Saccharomyces pastorianus
ttacatatgtgcgagaaacctttca

SEQ ID NO: 180069 - DNA, 25 bp, Saccharomyces pastorianus
ccttctcgtctcatagtctaatatc

SEQ ID NO: 180070 - DNA, 25 bp, Saccharomyces pastorianus
tcggagattcaaaagacaagagcat

SEQ ID NO: 180071 - DNA, 25 bp, Saccharomyces pastorianus
gaaagaaggcaggtagcacgcaaaa

SEQ ID NO: 180072 - DNA, 25 bp, Saccharomyces pastorianus
agaaaaccctctttaatcccagatg

SEQ ID NO: 180073 - DNA, 25 bp, Saccharomyces pastorianus
aacctttcacttgccacatttgtaa

SEQ ID NO: 180074 - DNA, 25 bp, Saccharomyces pastorianus
ggttgtgaattttgtgatcggagat

SEQ ID NO: 180075 - DNA, 25 bp, Saccharomyces pastorianus
tattattgccttattaaaaatggaa

SEQ ID NO: 180076 - DNA, 25 bp, Saccharomyces pastorianus
tgccttattaaaaatggaatcccaa

SEQ ID NO: 180077 - DNA, 25 bp, Saccharomyces pastorianus
tattgccttattaaaaatggaatcc

SEQ ID NO: 180078 - DNA, 25 bp, Saccharomyces pastorianus
ttgtgtagaattgcagattcccttt

SEQ ID NO: 180079 - DNA, 25 bp, Saccharomyces pastorianus
tctagtacattctacatacctaata

SEQ ID NO: 180080 - DNA, 25 bp, Saccharomyces pastorianus
atattattgccttattaaaaatgga

SEQ ID NO: 180081 - DNA, 25 bp, Saccharomyces pastorianus
ttattgccttattaaaaatggaatc

SEQ ID NO: 180082 - DNA, 25 bp, Saccharomyces pastorianus
aacttctagtacattctacatacct

SEQ ID NO: 180083 - DNA, 25 bp, Saccharomyces pastorianus
attattgccttattaaaaatggaat

SEQ ID NO: 180084 - DNA, 25 bp, Saccharomyces pastorianus
tatggattcctaaatcctcgaggag

SEQ ID NO: 180085 - DNA, 25 bp, Saccharomyces pastorianus
ttgccttattaaaaatggaatccca

SEQ ID NO: 180086 - DNA, 25 bp, Saccharomyces pastorianus
tgcactcacatcattatgcacggca

SEQ ID NO: 180087 - DNA, 25 bp, Saccharomyces pastorianus
tcacatcattatgcacggcacttgc

SEQ ID NO: 180088 - DNA, 25 bp, Saccharomyces pastorianus
cacatcattatgcacggcacttgcc

SEQ ID NO: 180089 - DNA, 25 bp, Saccharomyces pastorianus
actcacatcattatgcacggcactt

SEQ ID NO: 180090 - DNA, 25 bp, Saccharomyces pastorianus
acatcattatgcacggcacttgcct

SEQ ID NO: 180091 - DNA, 25 bp, Saccharomyces pastorianus
atgcactcacatcattatgcacggc

SEQ ID NO: 180092 - DNA, 25 bp, Saccharomyces pastorianus
ctcacatcattatgcacggcacttg

SEQ ID NO: 180093 - DNA, 25 bp, Saccharomyces pastorianus
gcactcacatcattatgcacggcac

SEQ ID NO: 180094 - DNA, 25 bp, Saccharomyces pastorianus
cactcacatcattatgcacggcact

SEQ ID NO: 180095 - DNA, 25 bp, Saccharomyces pastorianus
cttgttcttatcttattatagtatt

SEQ ID NO: 180096 - DNA, 25 bp, Saccharomyces pastorianus
ccccagtatgattttcgatgataat

SEQ ID NO: 180097 - DNA, 25 bp, Saccharomyces pastorianus
atgataattatgttagggacccgga

SEQ ID NO: 180098 - DNA, 25 bp, Saccharomyces pastorianus
gggtccccagtatgattttcgatga

SEQ ID NO: 180099 - DNA, 25 bp, Saccharomyces pastorianus
gtccccagtatgattttcgatgata

SEQ ID NO: 180100 - DNA, 25 bp, Saccharomyces pastorianus
ggtccccagtatgattttcgatgat

SEQ ID NO: 180101 - DNA, 25 bp, Saccharomyces pastorianus
taattatgttagggacccggatatc

SEQ ID NO: 180102 - DNA, 25 bp, Saccharomyces pastorianus
tcttcttgttcttatcttattatag

SEQ ID NO: 180103 - DNA, 25 bp, Saccharomyces pastorianus
tatatattttatttcttcctatggg

SEQ ID NO: 180104 - DNA, 25 bp, Saccharomyces pastorianus
tccccagtatgattttcgatgataa

SEQ ID NO: 180105 - DNA, 25 bp, Saccharomyces pastorianus
ccagtatgattttcgatgataatta

SEQ ID NO: 180106 - DNA, 25 bp, Saccharomyces pastorianus
caaactatcttacgccacatgaaac

SEQ ID NO: 180107 - DNA, 25 bp, Saccharomyces pastorianus
actatcttacgccacatgaaaccgc

SEQ ID NO: 180108 - DNA, 25 bp, Saccharomyces pastorianus
caccgcaatgaaaaaagcaaggctg

SEQ ID NO: 180109 - DNA, 25 bp, Saccharomyces pastorianus
gattcaaactatcttacgccacatg

SEQ ID NO: 180110 - DNA, 25 bp, Saccharomyces pastorianus
ggttgacgattcaaactatcttacg

SEQ ID NO: 180111 - DNA, 25 bp, Saccharomyces pastorianus
tggtggccaccgcaatgaaaaaagc

SEQ ID NO: 180112 - DNA, 25 bp, Saccharomyces pastorianus
cattggcggtggtggccaccgcaat

SEQ ID NO: 180113 - DNA, 25 bp, Saccharomyces pastorianus
cacatgaaaccgcattggcggtggt

SEQ ID NO: 180114 - DNA, 25 bp, Saccharomyces pastorianus
atcttacgccacatgaaaccgcatt

SEQ ID NO: 180115 - DNA, 25 bp, Saccharomyces pastorianus
gacgattcaaactatcttacgccac

SEQ ID NO: 180116 - DNA, 25 bp, Saccharomyces pastorianus
cttacgccacatgaaaccgcattgg

SEQ ID NO: 180117 - DNA, 25 bp, Saccharomyces pastorianus
gaagtgttacccatcgtggttcaca

SEQ ID NO: 180118 - DNA, 25 bp, Saccharomyces pastorianus
gttaatgatacacaaccagcgataa

SEQ ID NO: 180119 - DNA, 25 bp, Saccharomyces pastorianus
ggaaaactttgttgactatctgtaa

SEQ ID NO: 180120 - DNA, 25 bp, Saccharomyces pastorianus
gcactagcagcgcaatcagttgaat

SEQ ID NO: 180121 - DNA, 25 bp, Saccharomyces pastorianus
cacacctttgttagacaggacgaag

SEQ ID NO: 180122 - DNA, 25 bp, Saccharomyces pastorianus
gtaagtactatgacccattggcccc

SEQ ID NO: 180123 - DNA, 25 bp, Saccharomyces pastorianus
acggacgcaacgaggacatgttcaa

SEQ ID NO: 180124 - DNA, 25 bp, Saccharomyces pastorianus
gaaacacaagacaccccaaattaga

SEQ ID NO: 180125 - DNA, 25 bp, Saccharomyces pastorianus
ggataccgtcaagaatttacctagt

SEQ ID NO: 180126 - DNA, 25 bp, Saccharomyces pastorianus
tggcggtagtagtaacacttctgaa

SEQ ID NO: 180127 - DNA, 25 bp, Saccharomyces pastorianus
gtttcattagtcttcacacctttgt

SEQ ID NO: 180128 - DNA, 25 bp, Saccharomyces pastorianus
caaggcgaagcagtcctcgttggtc

SEQ ID NO: 180129 - DNA, 25 bp, Saccharomyces pastorianus
atggcgaaatccagatagcatcggc

SEQ ID NO: 180130 - DNA, 25 bp, Saccharomyces pastorianus
aggcgaagcagtcctcgttggtccc

SEQ ID NO: 180131 - DNA, 25 bp, Saccharomyces pastorianus
agcagtcctcgttggtcccgtacgt

SEQ ID NO: 180132 - DNA, 25 bp, Saccharomyces pastorianus
gaagcagtcctcgttggtcccgtac

SEQ ID NO: 180133 - DNA, 25 bp, Saccharomyces pastorianus
aaggcgaagcagtcctcgttggtcc

SEQ ID NO: 180134 - DNA, 25 bp, Saccharomyces pastorianus
tcgttggtcccgtacgttggccaga

SEQ ID NO: 180135 - DNA, 25 bp, Saccharomyces pastorianus
cagtcctcgttggtcccgtacgttg

SEQ ID NO: 180136 - DNA, 25 bp, Saccharomyces pastorianus
tggtcccgtacgttggccagacctt

SEQ ID NO: 180137 - DNA, 25 bp, Saccharomyces pastorianus
gcgaaatccagatagcatcggcacc

SEQ ID NO: 180138 - DNA, 25 bp, Saccharomyces pastorianus
cgagtcgtagaatggcgaaatccag

SEQ ID NO: 180139 - DNA, 25 bp, Saccharomyces pastorianus
aggtatccttctaacatgtctgcgc

SEQ ID NO: 180140 - DNA, 25 bp, Saccharomyces pastorianus
atggcttgcaattgacatccgtcag

SEQ ID NO: 180141 - DNA, 25 bp, Saccharomyces pastorianus
agacagtttggttaatggcttgcaa

SEQ ID NO: 180142 - DNA, 25 bp, Saccharomyces pastorianus
tgcgcacgggttgacagccgtatac

SEQ ID NO: 180143 - DNA, 25 bp, Saccharomyces pastorianus
tctaacatgtctgcgcacgggttga

SEQ ID NO: 180144 - DNA, 25 bp, Saccharomyces pastorianus
gtagcagatcctcctgatgtcattg

SEQ ID NO: 180145 - DNA, 25 bp, Saccharomyces pastorianus
gtcacacggtgtagtcattgccgga

SEQ ID NO: 180146 - DNA, 25 bp, Saccharomyces pastorianus
gacatccgtcagtaggtatccttct

SEQ ID NO: 180147 - DNA, 25 bp, Saccharomyces pastorianus
agccgtatacgtagcagatcctcct

SEQ ID NO: 180148 - DNA, 25 bp, Saccharomyces pastorianus
gcttttttaaagtcacacggtgtag

SEQ ID NO: 180149 - DNA, 25 bp, Saccharomyces pastorianus
atcctcctgatgtcattgctttttt

SEQ ID NO: 180150 - DNA, 25 bp, Saccharomyces pastorianus
aaattcggaaccattttggcatcgt

SEQ ID NO: 180151 - DNA, 25 bp, Saccharomyces pastorianus
ttcctctgatggtaaggtctccgta

SEQ ID NO: 180152 - DNA, 25 bp, Saccharomyces pastorianus
atgccattggcgttaactctgcttc

SEQ ID NO: 180153 - DNA, 25 bp, Saccharomyces pastorianus
tctgcttctgtcaactctgttcaat

SEQ ID NO: 180154 - DNA, 25 bp, Saccharomyces pastorianus
ccttgcaacctgctcttctgacaag

SEQ ID NO: 180155 - DNA, 25 bp, Saccharomyces pastorianus
gttgactggccacgaaggcccagtt

SEQ ID NO: 180156 - DNA, 25 bp, Saccharomyces pastorianus
gactattatgggaagcgccttgcaa

SEQ ID NO: 180157 - DNA, 25 bp, Saccharomyces pastorianus
accattttggcatcgtgttcttatg

SEQ ID NO: 180158 - DNA, 25 bp, Saccharomyces pastorianus
aatcatcgatgctcatgccattggc

SEQ ID NO: 180159 - DNA, 25 bp, Saccharomyces pastorianus
gttaatagacacgttgactggccac

SEQ ID NO: 180160 - DNA, 25 bp, Saccharomyces pastorianus
gattgggcacatcctaaattcggaa

SEQ ID NO: 180161 - DNA, 25 bp, Saccharomyces pastorianus
aaagcagttatgatcttacacacct

SEQ ID NO: 180162 - DNA, 25 bp, Saccharomyces pastorianus
cacacctgcttaattgttaaatcaa

SEQ ID NO: 180163 - DNA, 25 bp, Saccharomyces pastorianus
gggatgggatccaccttcagcaaat

SEQ ID NO: 180164 - DNA, 25 bp, Saccharomyces pastorianus
ttatgatcttacacacctgcttaat

SEQ ID NO: 180165 - DNA, 25 bp, Saccharomyces pastorianus
gttatgatcttacacacctgcttaa

SEQ ID NO: 180166 - DNA, 25 bp, Saccharomyces pastorianus
atgatcttacacacctgcttaattg

SEQ ID NO: 180167 - DNA, 25 bp, Saccharomyces pastorianus
agttatgatcttacacacctgctta

SEQ ID NO: 180168 - DNA, 25 bp, Saccharomyces pastorianus
gatcttacacacctgcttaattgtt

SEQ ID NO: 180169 - DNA, 25 bp, Saccharomyces pastorianus
ttattcatctttaaagcagttatga

SEQ ID NO: 180170 - DNA, 25 bp, Saccharomyces pastorianus
gatgggatccaccttcagcaaatgc

SEQ ID NO: 180171 - DNA, 25 bp, Saccharomyces pastorianus
cttacacacctgcttaattgttaaa

SEQ ID NO: 180172 - DNA, 25 bp, Saccharomyces pastorianus
ctcacatcactattaacggcacttg

SEQ ID NO: 180173 - DNA, 25 bp, Saccharomyces pastorianus
actcacatcactattaacggcactt

SEQ ID NO: 180174 - DNA, 25 bp, Saccharomyces pastorianus
acatcactattaacggcacttgcct

SEQ ID NO: 180175 - DNA, 25 bp, Saccharomyces pastorianus
tcacatcactattaacggcacttgc

SEQ ID NO: 180176 - DNA, 25 bp, Saccharomyces pastorianus
atgcactcacatcactattaacggc

SEQ ID NO: 180177 - DNA, 25 bp, Saccharomyces pastorianus
aatgcactcacatcactattaacgg

SEQ ID NO: 180178 - DNA, 25 bp, Saccharomyces pastorianus
atcactattaacggcacttgcctca

SEQ ID NO: 180179 - DNA, 25 bp, Saccharomyces pastorianus
catcactattaacggcacttgcctc

SEQ ID NO: 180180 - DNA, 25 bp, Saccharomyces pastorianus
tctcatattgcactccactccatgg

SEQ ID NO: 180181 - DNA, 25 bp, Saccharomyces pastorianus
cactcacatcactattaacggcact

SEQ ID NO: 180182 - DNA, 25 bp, Saccharomyces pastorianus
cacatcactattaacggcacttgcc

SEQ ID NO: 180183 - DNA, 25 bp, Saccharomyces pastorianus
cgccagtcagttcgtgtaaattgta

SEQ ID NO: 180184 - DNA, 25 bp, Saccharomyces pastorianus
gccagtgtcaagctttcgagtcatt

SEQ ID NO: 180185 - DNA, 25 bp, Saccharomyces pastorianus
ggtgaagcaaatctcaaggttgttt

SEQ ID NO: 180186 - DNA, 25 bp, Saccharomyces pastorianus
tactctagccgttgtggaatggact

SEQ ID NO: 180187 - DNA, 25 bp, Saccharomyces pastorianus
cagactccattattgctatacttat

SEQ ID NO: 180188 - DNA, 25 bp, Saccharomyces pastorianus
gttaccataggtaaaagcactgcta

SEQ ID NO: 180189 - DNA, 25 bp, Saccharomyces pastorianus
tttcgagtcattcttgtgatgatca

SEQ ID NO: 180190 - DNA, 25 bp, Saccharomyces pastorianus
atgaatgtggattcagctcccgcca

SEQ ID NO: 180191 - DNA, 25 bp, Saccharomyces pastorianus
tattgttaatactctagccgttgtg

SEQ ID NO: 180192 - DNA, 25 bp, Saccharomyces pastorianus
gactgttttactttatttctcaata

SEQ ID NO: 180193 - DNA, 25 bp, Saccharomyces pastorianus
gaatgacactgtagcagactccatt

SEQ ID NO: 180194 - DNA, 25 bp, Saccharomyces pastorianus
gtacgagtggatcacgattccacaa

SEQ ID NO: 180195 - DNA, 25 bp, Saccharomyces pastorianus
aacttctccaaaagacgagagtcat

SEQ ID NO: 180196 - DNA, 25 bp, Saccharomyces pastorianus
ggatcacgattccacaaactgaatg

SEQ ID NO: 180197 - DNA, 25 bp, Saccharomyces pastorianus
tgtttcaagtaacacaacttcaata

SEQ ID NO: 180198 - DNA, 25 bp, Saccharomyces pastorianus
cacaacttcaataatgactgatgat

SEQ ID NO: 180199 - DNA, 25 bp, Saccharomyces pastorianus
gacgagagtcatagattctctaaga

SEQ ID NO: 180200 - DNA, 25 bp, Saccharomyces pastorianus
ttaagtacgagtggatcacgattcc

SEQ ID NO: 180201 - DNA, 25 bp, Saccharomyces pastorianus
gattccacaaactgaatgggcattc

SEQ ID NO: 180202 - DNA, 25 bp, Saccharomyces pastorianus
attcacaagatataagcacatccga

SEQ ID NO: 180203 - DNA, 25 bp, Saccharomyces pastorianus
aagcacatccgaagaccgcgattca

SEQ ID NO: 180204 - DNA, 25 bp, Saccharomyces pastorianus
ataagcacatccgaagaccgcgatt

SEQ ID NO: 180205 - DNA, 25 bp, Saccharomyces pastorianus
atactaaaagtctcctcgagggtag

SEQ ID NO: 180206 - DNA, 25 bp, Saccharomyces pastorianus
aaaggggaagcgatatttctacata

SEQ ID NO: 180207 - DNA, 25 bp, Saccharomyces pastorianus
taaaagtctcctcgagggtagagga

SEQ ID NO: 180208 - DNA, 25 bp, Saccharomyces pastorianus
actaaaagtctcctcgagggtagag

SEQ ID NO: 180209 - DNA, 25 bp, Saccharomyces pastorianus
aaagtctcctcgagggtagaggaat

SEQ ID NO: 180210 - DNA, 25 bp, Saccharomyces pastorianus
ctaaaagtctcctcgagggtagagg

SEQ ID NO: 180211 - DNA, 25 bp, Saccharomyces pastorianus
caaaggggaagcgatatttctacat

SEQ ID NO: 180212 - DNA, 25 bp, Saccharomyces pastorianus
ctcgagggtagaggaatcctcaaag

SEQ ID NO: 180213 - DNA, 25 bp, Saccharomyces pastorianus
aagtctcctcgagggtagaggaatc

SEQ ID NO: 180214 - DNA, 25 bp, Saccharomyces pastorianus
tcgagggtagaggaatcctcaaagg

SEQ ID NO: 180215 - DNA, 25 bp, Saccharomyces pastorianus
tactaaaagtctcctcgagggtaga

SEQ ID NO: 180216 - DNA, 25 bp, Saccharomyces pastorianus
gtacgctgtacatttaccaaggcca

SEQ ID NO: 180217 - DNA, 25 bp, Saccharomyces pastorianus
aagaatccggagatggcgcttcagt

SEQ ID NO: 180218 - DNA, 25 bp, Saccharomyces pastorianus
aagaagtttcttgagggcattgccc

SEQ ID NO: 180219 - DNA, 25 bp, Saccharomyces pastorianus
gttgatgcgtcttctaggattttga

SEQ ID NO: 180220 - DNA, 25 bp, Saccharomyces pastorianus
tacgatttccagttcatcgacttgg

SEQ ID NO: 180221 - DNA, 25 bp, Saccharomyces pastorianus
agatgctagaccctggtatttcttg

SEQ ID NO: 180222 - DNA, 25 bp, Saccharomyces pastorianus
gaaaccgaattcagcgctccaaaag

SEQ ID NO: 180223 - DNA, 25 bp, Saccharomyces pastorianus
gcgcttcagttctcaacttctggaa

SEQ ID NO: 180224 - DNA, 25 bp, Saccharomyces pastorianus
tagagtgttcgttgaccggtacgct

SEQ ID NO: 180225 - DNA, 25 bp, Saccharomyces pastorianus
agaggaacccaatgctggcttcact

SEQ ID NO: 180226 - DNA, 25 bp, Saccharomyces pastorianus
ggaaaagggccctccaagccagaag

SEQ ID NO: 180227 - DNA, 25 bp, Saccharomyces pastorianus
ttcgacctcgcgcttcgaagtaaag

SEQ ID NO: 180228 - DNA, 25 bp, Saccharomyces pastorianus
accgccacttgccacactcaccttc

SEQ ID NO: 180229 - DNA, 25 bp, Saccharomyces pastorianus
gccacttgccacactcaccttcact

SEQ ID NO: 180230 - DNA, 25 bp, Saccharomyces pastorianus
aggtattcgacctcgcgcttcgaag

SEQ ID NO: 180231 - DNA, 25 bp, Saccharomyces pastorianus
ccacttgccacactcaccttcactt

SEQ ID NO: 180232 - DNA, 25 bp, Saccharomyces pastorianus
tcgacctcgcgcttcgaagtaaagg

SEQ ID NO: 180233 - DNA, 25 bp, Saccharomyces pastorianus
acttgccacactcaccttcacttct

SEQ ID NO: 180234 - DNA, 25 bp, Saccharomyces pastorianus
ccaccgccacttgccacactcacct

SEQ ID NO: 180235 - DNA, 25 bp, Saccharomyces pastorianus
cttgccacactcaccttcacttcta

SEQ ID NO: 180236 - DNA, 25 bp, Saccharomyces pastorianus
accaccgccacttgccacactcacc

SEQ ID NO: 180237 - DNA, 25 bp, Saccharomyces pastorianus
ctctataccaccactaccaccaccg

SEQ ID NO: 180238 - DNA, 25 bp, Saccharomyces pastorianus
atgtggtcatgcgtagtccctctca

SEQ ID NO: 180239 - DNA, 25 bp, Saccharomyces pastorianus
aactcctcggatttgcctgagaaca

SEQ ID NO: 180240 - DNA, 25 bp, Saccharomyces pastorianus
attgacgttctttgcgaaacagctc

SEQ ID NO: 180241 - DNA, 25 bp, Saccharomyces pastorianus
gcatacttattttctactctaggga

SEQ ID NO: 180242 - DNA, 25 bp, Saccharomyces pastorianus
agactggttgtctgaaccggccaac

SEQ ID NO: 180243 - DNA, 25 bp, Saccharomyces pastorianus
aaagcccaattggacccatcaagaa

SEQ ID NO: 180244 - DNA, 25 bp, Saccharomyces pastorianus
gaaacagctcggttccaggaatttg

SEQ ID NO: 180245 - DNA, 25 bp, Saccharomyces pastorianus
actgtcacaacttatggctgcttct

SEQ ID NO: 180246 - DNA, 25 bp, Saccharomyces pastorianus
actggcaacatcacgcatacttatt

SEQ ID NO: 180247 - DNA, 25 bp, Saccharomyces pastorianus
aaggtgcgttggttgattactcatt

SEQ ID NO: 180248 - DNA, 25 bp, Saccharomyces pastorianus
gggatcatgcatttattactgtcac

SEQ ID NO: 180249 - DNA, 25 bp, Saccharomyces pastorianus
atctactaactagtatttatgttac

SEQ ID NO: 180250 - DNA, 25 bp, Saccharomyces pastorianus
ctactaactagtatttatgttacta

SEQ ID NO: 180251 - DNA, 25 bp, Saccharomyces pastorianus
tctactaactagtatttatgttact

SEQ ID NO: 180252 - DNA, 25 bp, Saccharomyces pastorianus
tgttactagtatattatcatatacg

SEQ ID NO: 180253 - DNA, 25 bp, Saccharomyces pastorianus
catctactaactagtatttatgtta

SEQ ID NO: 180254 - DNA, 25 bp, Saccharomyces pastorianus
tatgttactagtatattatcatata

SEQ ID NO: 180255 - DNA, 25 bp, Saccharomyces pastorianus
gaataaaaatcaactatcatctact

SEQ ID NO: 180256 - DNA, 25 bp, Saccharomyces pastorianus
gttggaataaaaatcaactatcatc

SEQ ID NO: 180257 - DNA, 25 bp, Saccharomyces pastorianus
ggaataaaaatcaactatcatctac

SEQ ID NO: 180258 - DNA, 25 bp, Saccharomyces pastorianus
aataaaaatcaactatcatctacta

SEQ ID NO: 180259 - DNA, 25 bp, Saccharomyces pastorianus
tcatctactaactagtatttatgtt

SEQ ID NO: 180260 - DNA, 25 bp, Saccharomyces pastorianus
gtggaccatccctattacattagat

SEQ ID NO: 180261 - DNA, 25 bp, Saccharomyces pastorianus
atttgctaaccaaattagacctgca

SEQ ID NO: 180262 - DNA, 25 bp, Saccharomyces pastorianus
gtatggaacttgactcctagacaac

SEQ ID NO: 180263 - DNA, 25 bp, Saccharomyces pastorianus
tggtgggttttctcctctgactggg

SEQ ID NO: 180264 - DNA, 25 bp, Saccharomyces pastorianus
ctgttgttacagattcgagattagc

SEQ ID NO: 180265 - DNA, 25 bp, Saccharomyces pastorianus
gactcctagacaactatgtgatatt

SEQ ID NO: 180266 - DNA, 25 bp, Saccharomyces pastorianus
gaatgaattgttatctgaagcgcaa

SEQ ID NO: 180267 - DNA, 25 bp, Saccharomyces pastorianus
aacgattactcctctgttgttacag

SEQ ID NO: 180268 - DNA, 25 bp, Saccharomyces pastorianus
agcagacggcacattgtggaccatc

SEQ ID NO: 180269 - DNA, 25 bp, Saccharomyces pastorianus
tctcctctgactgggtttttgaacg

SEQ ID NO: 180270 - DNA, 25 bp, Saccharomyces pastorianus
aagcgcaatcttcggacattttagt

SEQ ID NO: 180271 - DNA, 25 bp, Saccharomyces pastorianus
gggtgtctgaatttgccttacatgt

SEQ ID NO: 180272 - DNA, 25 bp, Saccharomyces pastorianus
cgctaccattaacggctgaaagtct

SEQ ID NO: 180273 - DNA, 25 bp, Saccharomyces pastorianus
tccgagcttggatgggtgtctgaat

SEQ ID NO: 180274 - DNA, 25 bp, Saccharomyces pastorianus
aaaccaagttttcagccgctaccat

SEQ ID NO: 180275 - DNA, 25 bp, Saccharomyces pastorianus
atatctttgcaatttccgagcttgg

SEQ ID NO: 180276 - DNA, 25 bp, Saccharomyces pastorianus
cctagagctgggttgtcatgttgtt

SEQ ID NO: 180277 - DNA, 25 bp, Saccharomyces pastorianus
gaaaagttattcgttgcctctatta

SEQ ID NO: 180278 - DNA, 25 bp, Saccharomyces pastorianus
ctcctctgttgataggcgtgcgaga

SEQ ID NO: 180279 - DNA, 25 bp, Saccharomyces pastorianus
gagatattcacgatcctgatactga

SEQ ID NO: 180280 - DNA, 25 bp, Saccharomyces pastorianus
catgttgttgatgtgaccagccata

SEQ ID NO: 180281 - DNA, 25 bp, Saccharomyces pastorianus
ggtgccattaattgcaattcctaca

SEQ ID NO: 180282 - DNA, 25 bp, Saccharomyces pastorianus
gtactatgccgaaactcagcgacga

SEQ ID NO: 180283 - DNA, 25 bp, Saccharomyces pastorianus
tgcgttttactgagcaagcctaaat

SEQ ID NO: 180284 - DNA, 25 bp, Saccharomyces pastorianus
tactgagcaagcctaaattagaagt

SEQ ID NO: 180285 - DNA, 25 bp, Saccharomyces pastorianus
ttaggaatgccgaaacatttgataa

SEQ ID NO: 180286 - DNA, 25 bp, Saccharomyces pastorianus
aaatttgcgttttactgagcaagcc

SEQ ID NO: 180287 - DNA, 25 bp, Saccharomyces pastorianus
taagttcgttggcaacaggcaaaag

SEQ ID NO: 180288 - DNA, 25 bp, Saccharomyces pastorianus
taaattagaagtcgaaagctaccta

SEQ ID NO: 180289 - DNA, 25 bp, Saccharomyces pastorianus
atgccgaaactcagcgacgaagaag

SEQ ID NO: 180290 - DNA, 25 bp, Saccharomyces pastorianus
gagtctattaggaatgccgaaacat

SEQ ID NO: 180291 - DNA, 25 bp, Saccharomyces pastorianus
gaaggtattcttgaagagtctatta

SEQ ID NO: 180292 - DNA, 25 bp, Saccharomyces pastorianus
gcaaaagtactatgccgaaactcag

SEQ ID NO: 180293 - DNA, 25 bp, Saccharomyces pastorianus
ctcttcgaccttcaggtattcgact

SEQ ID NO: 180294 - DNA, 25 bp, Saccharomyces pastorianus
gtcttgtatcggacccaagggaacg

SEQ ID NO: 180295 - DNA, 25 bp, Saccharomyces pastorianus
aacgactggtactgcagctgtggct

SEQ ID NO: 180296 - DNA, 25 bp, Saccharomyces pastorianus
agggaacgactggtactgcagctgt

SEQ ID NO: 180297 - DNA, 25 bp, Saccharomyces pastorianus
gctcttcgaccttcaggtattcgac

SEQ ID NO: 180298 - DNA, 25 bp, Saccharomyces pastorianus
tgtatgcgtactcgtcgtcgctgat

SEQ ID NO: 180299 - DNA, 25 bp, Saccharomyces pastorianus
gtcgtcgctgatggtcttgtatcgg

SEQ ID NO: 180300 - DNA, 25 bp, Saccharomyces pastorianus
tatcggacccaagggaacgactggt

SEQ ID NO: 180301 - DNA, 25 bp, Saccharomyces pastorianus
gctgatggtcttgtatcggacccaa

SEQ ID NO: 180302 - DNA, 25 bp, Saccharomyces pastorianus
ggacccaagggaacgactggtactg

SEQ ID NO: 180303 - DNA, 25 bp, Saccharomyces pastorianus
atggtcttgtatcggacccaaggga

SEQ ID NO: 180304 - DNA, 25 bp, Saccharomyces pastorianus
gctatcatctattaactagtattta

SEQ ID NO: 180305 - DNA, 25 bp, Saccharomyces pastorianus
aatcagctatcatctattaactagt

SEQ ID NO: 180306 - DNA, 25 bp, Saccharomyces pastorianus
tcagctatcatctattaactagtat

SEQ ID NO: 180307 - DNA, 25 bp, Saccharomyces pastorianus
aaatcagctatcatctattaactag

SEQ ID NO: 180308 - DNA, 25 bp, Saccharomyces pastorianus
cagctatcatctattaactagtatt

SEQ ID NO: 180309 - DNA, 25 bp, Saccharomyces pastorianus
agctatcatctattaactagtattt

SEQ ID NO: 180310 - DNA, 25 bp, Saccharomyces pastorianus
caaatcagctatcatctattaacta

SEQ ID NO: 180311 - DNA, 25 bp, Saccharomyces pastorianus
atcagctatcatctattaactagta

SEQ ID NO: 180312 - DNA, 25 bp, Saccharomyces pastorianus
cccactagtcctgacgttgatgctg

SEQ ID NO: 180313 - DNA, 25 bp, Saccharomyces pastorianus
agtagcattagtcctgacgttgatg

SEQ ID NO: 180314 - DNA, 25 bp, Saccharomyces pastorianus
tagtcccactagtcctgacgttgat

SEQ ID NO: 180315 - DNA, 25 bp, Saccharomyces pastorianus
tagtgctggagttgatgctggcagt

SEQ ID NO: 180316 - DNA, 25 bp, Saccharomyces pastorianus
tgctggcagtggtagtcccactagt

SEQ ID NO: 180317 - DNA, 25 bp, Saccharomyces pastorianus
ttgatgctggcagtggtagtcccac

SEQ ID NO: 180318 - DNA, 25 bp, Saccharomyces pastorianus
agcattagtcctgacgttgatgctg

SEQ ID NO: 180319 - DNA, 25 bp, Saccharomyces pastorianus
gttgatgctggcagtggtagtccca

SEQ ID NO: 180320 - DNA, 25 bp, Saccharomyces pastorianus
gatgctggcagtggtagtcccacta

SEQ ID NO: 180321 - DNA, 25 bp, Saccharomyces pastorianus
ggcagtggtagtcccactagtcctg

SEQ ID NO: 180322 - DNA, 25 bp, Saccharomyces pastorianus
ttagtcctgacgttgatgctggcag

SEQ ID NO: 180323 - DNA, 25 bp, Saccharomyces pastorianus
accggcaagccatggttctacttga

SEQ ID NO: 180324 - DNA, 25 bp, Saccharomyces pastorianus
actttgtttgcagccttgaacttta

SEQ ID NO: 180325 - DNA, 25 bp, Saccharomyces pastorianus
ctctgtgctggctttctggaaggaa

SEQ ID NO: 180326 - DNA, 25 bp, Saccharomyces pastorianus
attgctctcatctccagagaccatg

SEQ ID NO: 180327 - DNA, 25 bp, Saccharomyces pastorianus
tatgattttgagttcatcgacctgg

SEQ ID NO: 180328 - DNA, 25 bp, Saccharomyces pastorianus
aaggatccaaactctgtgctggctt

SEQ ID NO: 180329 - DNA, 25 bp, Saccharomyces pastorianus
gataacagtacctcgttcaagttgg

SEQ ID NO: 180330 - DNA, 25 bp, Saccharomyces pastorianus
atggtcgcgcgaagagccaaatgct

SEQ ID NO: 180331 - DNA, 25 bp, Saccharomyces pastorianus
actttagctctgataacgtggactt

SEQ ID NO: 180332 - DNA, 25 bp, Saccharomyces pastorianus
tgtcactgaccggtactttgtatgt

SEQ ID NO: 180333 - DNA, 25 bp, Saccharomyces pastorianus
ggactttacgattccagataacagt

SEQ ID NO: 180334 - DNA, 25 bp, Saccharomyces pastorianus
aaaacgatactctgaagcaaagaat

SEQ ID NO: 180335 - DNA, 25 bp, Saccharomyces pastorianus
gcaaagaattcaacagctagtagaa

SEQ ID NO: 180336 - DNA, 25 bp, Saccharomyces pastorianus
tgaacagaaggatcatacaaccaaa

SEQ ID NO: 180337 - DNA, 25 bp, Saccharomyces pastorianus
gaattcaacagctagtagaaatcaa

SEQ ID NO: 180338 - DNA, 25 bp, Saccharomyces pastorianus
actggaggctttccaaaagaacaat

SEQ ID NO: 180339 - DNA, 25 bp, Saccharomyces pastorianus
tacaaccaaactggaggctttccaa

SEQ ID NO: 180340 - DNA, 25 bp, Saccharomyces pastorianus
gatcatacaaccaaactggaggctt

SEQ ID NO: 180341 - DNA, 25 bp, Saccharomyces pastorianus
ttcaacagctagtagaaatcaaaga

SEQ ID NO: 180342 - DNA, 25 bp, Saccharomyces pastorianus
atacaaccaaactggaggctttcca

SEQ ID NO: 180343 - DNA, 25 bp, Saccharomyces pastorianus
gatactctgaagcaaagaattcaac

SEQ ID NO: 180344 - DNA, 25 bp, Saccharomyces pastorianus
gaaggatcatacaaccaaactggag

SEQ ID NO: 180345 - DNA, 25 bp, Saccharomyces pastorianus
gctcgcaagataatatgcaaaacat

SEQ ID NO: 180346 - DNA, 25 bp, Saccharomyces pastorianus
aacatcacccaatcggtcgggatcc

SEQ ID NO: 180347 - DNA, 25 bp, Saccharomyces pastorianus
tgcaaaacatcacccaatcggtcgg

SEQ ID NO: 180348 - DNA, 25 bp, Saccharomyces pastorianus
aaacatcacccaatcggtcgggatc

SEQ ID NO: 180349 - DNA, 25 bp, Saccharomyces pastorianus
gcaaaacatcacccaatcggtcggg

SEQ ID NO: 180350 - DNA, 25 bp, Saccharomyces pastorianus
acccgccccgaaattgagtgcacat

SEQ ID NO: 180351 - DNA, 25 bp, Saccharomyces pastorianus
caaaacatcacccaatcggtcggga

SEQ ID NO: 180352 - DNA, 25 bp, Saccharomyces pastorianus
cgccccgaaattgagtgcacatgct

SEQ ID NO: 180353 - DNA, 25 bp, Saccharomyces pastorianus
ggacccgccccgaaattgagtgcac

SEQ ID NO: 180354 - DNA, 25 bp, Saccharomyces pastorianus
aaaacatcacccaatcggtcgggat

SEQ ID NO: 180355 - DNA, 25 bp, Saccharomyces pastorianus
atgctcgcaagataatatgcaaaac

SEQ ID NO: 180356 - DNA, 25 bp, Saccharomyces pastorianus
ttgctgcagctttaaatgatgctag

SEQ ID NO: 180357 - DNA, 25 bp, Saccharomyces pastorianus
gttcttgctgcagctttaaatgatg

SEQ ID NO: 180358 - DNA, 25 bp, Saccharomyces pastorianus
tcttgctgcagctttaaatgatgct

SEQ ID NO: 180359 - DNA, 25 bp, Saccharomyces pastorianus
gctgcagctttaaatgatgctagac

SEQ ID NO: 180360 - DNA, 25 bp, Saccharomyces pastorianus
caaagttcttgctgcagctttaaat

SEQ ID NO: 180361 - DNA, 25 bp, Saccharomyces pastorianus
gcaaagttcttgctgcagctttaaa

SEQ ID NO: 180362 - DNA, 25 bp, Saccharomyces pastorianus
gcagctttaaatgatgctagacgag

SEQ ID NO: 180363 - DNA, 25 bp, Saccharomyces pastorianus
gagtctgcaagtgaagaaagcaaag

SEQ ID NO: 180364 - DNA, 25 bp, Saccharomyces pastorianus
ctgcaagtgaagaaagcaaagttct

SEQ ID NO: 180365 - DNA, 25 bp, Saccharomyces pastorianus
aagttcttgctgcagctttaaatga

SEQ ID NO: 180366 - DNA, 25 bp, Saccharomyces pastorianus
agctttaaatgatgctagacgagac

SEQ ID NO: 180367 - DNA, 25 bp, Saccharomyces pastorianus
tcttttttgagctcttcctttgata

SEQ ID NO: 180368 - DNA, 25 bp, Saccharomyces pastorianus
aactggacacttaattctctctggt

SEQ ID NO: 180369 - DNA, 25 bp, Saccharomyces pastorianus
tcacctaagtagcattctggctctc

SEQ ID NO: 180370 - DNA, 25 bp, Saccharomyces pastorianus
caccttaattcaacgcctgcagatg

SEQ ID NO: 180371 - DNA, 25 bp, Saccharomyces pastorianus
agtgacacggctcaacattctatgc

SEQ ID NO: 180372 - DNA, 25 bp, Saccharomyces pastorianus
gcattacgattcaccgaagactgtc

SEQ ID NO: 180373 - DNA, 25 bp, Saccharomyces pastorianus
ggctctcaagtattttcccgatggt

SEQ ID NO: 180374 - DNA, 25 bp, Saccharomyces pastorianus
tttgggatttctaccatgactatga

SEQ ID NO: 180375 - DNA, 25 bp, Saccharomyces pastorianus
atgactatgaatgcctacgagattt

SEQ ID NO: 180376 - DNA, 25 bp, Saccharomyces pastorianus
gtgaaaaccaggttgcaccttaatt

SEQ ID NO: 180377 - DNA, 25 bp, Saccharomyces pastorianus
agatgttgaatctcggcccactaac

SEQ ID NO: 180378 - DNA, 25 bp, Saccharomyces pastorianus
gccagcggttcctagacaacgagtg

SEQ ID NO: 180379 - DNA, 25 bp, Saccharomyces pastorianus
actttggcctctatgatggcgtcta

SEQ ID NO: 180380 - DNA, 25 bp, Saccharomyces pastorianus
aactggttctgtacctcattttttg

SEQ ID NO: 180381 - DNA, 25 bp, Saccharomyces pastorianus
gattttctcttactttggcctctat

SEQ ID NO: 180382 - DNA, 25 bp, Saccharomyces pastorianus
ccatcaagctggtaggagacgagaa

SEQ ID NO: 180383 - DNA, 25 bp, Saccharomyces pastorianus
tgtacctcattttttgccagcggtt

SEQ ID NO: 180384 - DNA, 25 bp, Saccharomyces pastorianus
tcgccacggtggaaggattttctct

SEQ ID NO: 180385 - DNA, 25 bp, Saccharomyces pastorianus
gatggcgtctataaaaactggttct

SEQ ID NO: 180386 - DNA, 25 bp, Saccharomyces pastorianus
aatattggtatatctgcgtcagtcg

SEQ ID NO: 180387 - DNA, 25 bp, Saccharomyces pastorianus
gtatggccaagcgtatacttcagaa

SEQ ID NO: 180388 - DNA, 25 bp, Saccharomyces pastorianus
atctgcgtcagtcgccacggtggaa

SEQ ID NO: 180389 - DNA, 25 bp, Saccharomyces pastorianus
atatttcgtcattgccaagtggctg

SEQ ID NO: 180390 - DNA, 25 bp, Saccharomyces pastorianus
gaggaatatttcgtcattgccaagt

SEQ ID NO: 180391 - DNA, 25 bp, Saccharomyces pastorianus
aaagaacaacggctatttggtcgat

SEQ ID NO: 180392 - DNA, 25 bp, Saccharomyces pastorianus
aacaacggctatttggtcgatgaca

SEQ ID NO: 180393 - DNA, 25 bp, Saccharomyces pastorianus
tgccaaagctgaggaatatttcgtc

SEQ ID NO: 180394 - DNA, 25 bp, Saccharomyces pastorianus
gaatatttcgtcattgccaagtggc

SEQ ID NO: 180395 - DNA, 25 bp, Saccharomyces pastorianus
gatgacaaattgagcggtactgata

SEQ ID NO: 180396 - DNA, 25 bp, Saccharomyces pastorianus
aacggctatttggtcgatgacaaat

SEQ ID NO: 180397 - DNA, 25 bp, Saccharomyces pastorianus
caaattgagcggtactgatattcta

SEQ ID NO: 180398 - DNA, 25 bp, Saccharomyces pastorianus
tcgtcattgccaagtggctggaaac

SEQ ID NO: 180399 - DNA, 25 bp, Saccharomyces pastorianus
gagtcaattagattttctagagggt

SEQ ID NO: 180400 - DNA, 25 bp, Saccharomyces pastorianus
gaaagcgtcatacatgatggccgta

SEQ ID NO: 180401 - DNA, 25 bp, Saccharomyces pastorianus
acatgatggccgtagttccgtggat

SEQ ID NO: 180402 - DNA, 25 bp, Saccharomyces pastorianus
tagttccgtggatagttggtccgaa

SEQ ID NO: 180403 - DNA, 25 bp, Saccharomyces pastorianus
atgaatctgattttgtggaggcctt

SEQ ID NO: 180404 - DNA, 25 bp, Saccharomyces pastorianus
ggtccgaaaggaatgaatctgattt

SEQ ID NO: 180405 - DNA, 25 bp, Saccharomyces pastorianus
tgattttgtggaggccttggataaa

SEQ ID NO: 180406 - DNA, 25 bp, Saccharomyces pastorianus
gctatttggtattaaactggctaac

SEQ ID NO: 180407 - DNA, 25 bp, Saccharomyces pastorianus
gatggccgtagttccgtggatagtt

SEQ ID NO: 180408 - DNA, 25 bp, Saccharomyces pastorianus
taatgctgtcttgcgaaaattagat

SEQ ID NO: 180409 - DNA, 25 bp, Saccharomyces pastorianus
ccaaatataatgctgtcttgcgaaa

SEQ ID NO: 180410 - DNA, 25 bp, Saccharomyces pastorianus
gtatatcctccctggaaggattcat

SEQ ID NO: 180411 - DNA, 25 bp, Saccharomyces pastorianus
taagtttgcgactcatttaaccaag

SEQ ID NO: 180412 - DNA, 25 bp, Saccharomyces pastorianus
agtgttattgaacgcattgacttaa

SEQ ID NO: 180413 - DNA, 25 bp, Saccharomyces pastorianus
gctaatcactggtatttctctaaat

SEQ ID NO: 180414 - DNA, 25 bp, Saccharomyces pastorianus
gggaatccgcagaaaatactttatc

SEQ ID NO: 180415 - DNA, 25 bp, Saccharomyces pastorianus
gaatctcaccgaagaatcacctcat

SEQ ID NO: 180416 - DNA, 25 bp, Saccharomyces pastorianus
ccaattctcttactccggcaaattt

SEQ ID NO: 180417 - DNA, 25 bp, Saccharomyces pastorianus
tggacatcactctcaaaccgttgga

SEQ ID NO: 180418 - DNA, 25 bp, Saccharomyces pastorianus
gttcaatctgcaaacagcacaggat

SEQ ID NO: 180419 - DNA, 25 bp, Saccharomyces pastorianus
gatttcaaaactttggcagccgtta

SEQ ID NO: 180420 - DNA, 25 bp, Saccharomyces pastorianus
aatacaggtgttacgaatccagata

SEQ ID NO: 180421 - DNA, 25 bp, Saccharomyces pastorianus
caaatatatgcttttcccttttgat

SEQ ID NO: 180422 - DNA, 25 bp, Saccharomyces pastorianus
gatattgtcgctgatgctattttcc

SEQ ID NO: 180423 - DNA, 25 bp, Saccharomyces pastorianus
ttcagtgctcaattattccaagttt

SEQ ID NO: 180424 - DNA, 25 bp, Saccharomyces pastorianus
tcacggataccccaaggcaagttat

SEQ ID NO: 180425 - DNA, 25 bp, Saccharomyces pastorianus
attgtgctattgatatgggaggcta

SEQ ID NO: 180426 - DNA, 25 bp, Saccharomyces pastorianus
tctggaatcatttaccggtttgatc

SEQ ID NO: 180427 - DNA, 25 bp, Saccharomyces pastorianus
acgggaaatatctctttgacttatg

SEQ ID NO: 180428 - DNA, 25 bp, Saccharomyces pastorianus
tgtggtcagttctcgtaacagtaaa

SEQ ID NO: 180429 - DNA, 25 bp, Saccharomyces pastorianus
gcggttgtattttagcatcgattgt

SEQ ID NO: 180430 - DNA, 25 bp, Saccharomyces pastorianus
gctattttcctttataatctgggca

SEQ ID NO: 180431 - DNA, 25 bp, Saccharomyces pastorianus
gattaatcttcacggataccccaag

SEQ ID NO: 180432 - DNA, 25 bp, Saccharomyces pastorianus
attaatggtcttacgctgtggtcag

SEQ ID NO: 180433 - DNA, 25 bp, Saccharomyces pastorianus
tcgctattgtccaaggttgcgcaat

SEQ ID NO: 180434 - DNA, 25 bp, Saccharomyces pastorianus
caaggttgcgcaatctacggaaact

SEQ ID NO: 180435 - DNA, 25 bp, Saccharomyces pastorianus
ttgcgcaatctacggaaacttccaa

SEQ ID NO: 180436 - DNA, 25 bp, Saccharomyces pastorianus
ttgtccaaggttgcgcaatctacgg

SEQ ID NO: 180437 - DNA, 25 bp, Saccharomyces pastorianus
aagcagtcagactggcagctctgaa

SEQ ID NO: 180438 - DNA, 25 bp, Saccharomyces pastorianus
ggaaacttccaaagcagtcagactg

SEQ ID NO: 180439 - DNA, 25 bp, Saccharomyces pastorianus
taatcgctattgtccaaggttgcgc

SEQ ID NO: 180440 - DNA, 25 bp, Saccharomyces pastorianus
tcagactggcagctctgaatgctct

SEQ ID NO: 180441 - DNA, 25 bp, Saccharomyces pastorianus
ggttgcgcaatctacggaaacttcc

SEQ ID NO: 180442 - DNA, 25 bp, Saccharomyces pastorianus
atcttaatcgctattgtccaaggtt

SEQ ID NO: 180443 - DNA, 25 bp, Saccharomyces pastorianus
gctattgtccaaggttgcgcaatct

SEQ ID NO: 180444 - DNA, 25 bp, Saccharomyces pastorianus
acaactgcgtagtgatatgctgcta

SEQ ID NO: 180445 - DNA, 25 bp, Saccharomyces pastorianus
ggtctactgcactgctggctaagat

SEQ ID NO: 180446 - DNA, 25 bp, Saccharomyces pastorianus
agacatgggtctcaggtctactgca

SEQ ID NO: 180447 - DNA, 25 bp, Saccharomyces pastorianus
ttggtaaggcctacagcaagatcaa

SEQ ID NO: 180448 - DNA, 25 bp, Saccharomyces pastorianus
attcaccacttgaagatcggcccat

SEQ ID NO: 180449 - DNA, 25 bp, Saccharomyces pastorianus
tatgccttcaatcccatggacagct

SEQ ID NO: 180450 - DNA, 25 bp, Saccharomyces pastorianus
tcatgatctttccaacattccacag

SEQ ID NO: 180451 - DNA, 25 bp, Saccharomyces pastorianus
ggacagcttcataccatattacgac

SEQ ID NO: 180452 - DNA, 25 bp, Saccharomyces pastorianus
tttacggatctaattcaccacttga

SEQ ID NO: 180453 - DNA, 25 bp, Saccharomyces pastorianus
gcaagatcaaagaccacgccagaag

SEQ ID NO: 180454 - DNA, 25 bp, Saccharomyces pastorianus
attgattgtttcatctatgccttca

SEQ ID NO: 180455 - DNA, 25 bp, Saccharomyces pastorianus
gatttcgttgttgtcaaaggctata

SEQ ID NO: 180456 - DNA, 25 bp, Saccharomyces pastorianus
atttcgttgttgtcaaaggctataa

SEQ ID NO: 180457 - DNA, 25 bp, Saccharomyces pastorianus
gtataccagaaagtttcctcgagga

SEQ ID NO: 180458 - DNA, 25 bp, Saccharomyces pastorianus
cctcgaggatatagaaattcacaaa

SEQ ID NO: 180459 - DNA, 25 bp, Saccharomyces pastorianus
gaattatgaaatactttttgggatt

SEQ ID NO: 180460 - DNA, 25 bp, Saccharomyces pastorianus
ggatttcgttgttgtcaaaggctat

SEQ ID NO: 180461 - DNA, 25 bp, Saccharomyces pastorianus
aagtataccagaaagtttcctcgag

SEQ ID NO: 180462 - DNA, 25 bp, Saccharomyces pastorianus
gttgttgtcaaaggctataaaattt

SEQ ID NO: 180463 - DNA, 25 bp, Saccharomyces pastorianus
ttcgttgttgtcaaaggctataaaa

SEQ ID NO: 180464 - DNA, 25 bp, Saccharomyces pastorianus
caaagtataccagaaagtttcctcg

SEQ ID NO: 180465 - DNA, 25 bp, Saccharomyces pastorianus
tatgaaatactttttgggatttcgt

SEQ ID NO: 180466 - DNA, 25 bp, Saccharomyces pastorianus
ttggcctacaaagctggtatcaaaa

SEQ ID NO: 180467 - DNA, 25 bp, Saccharomyces pastorianus
gtccagcaagagaaatcgcaagatt

SEQ ID NO: 180468 - DNA, 25 bp, Saccharomyces pastorianus
agacatgagcattatttggcctaca

SEQ ID NO: 180469 - DNA, 25 bp, Saccharomyces pastorianus
gatttggttcttgatgtcggttgcg

SEQ ID NO: 180470 - DNA, 25 bp, Saccharomyces pastorianus
ttcttctttccatttcagtagattc

SEQ ID NO: 180471 - DNA, 25 bp, Saccharomyces pastorianus
cagtagattctacaagggcgagagt

SEQ ID NO: 180472 - DNA, 25 bp, Saccharomyces pastorianus
gttacagacttctacgaatacggtt

SEQ ID NO: 180473 - DNA, 25 bp, Saccharomyces pastorianus
acgattatcaaattgccaaagccaa

SEQ ID NO: 180474 - DNA, 25 bp, Saccharomyces pastorianus
attcactggctgtaacgtcatcggt

SEQ ID NO: 180475 - DNA, 25 bp, Saccharomyces pastorianus
agggcgagagttttgctgcctcgat

SEQ ID NO: 180476 - DNA, 25 bp, Saccharomyces pastorianus
aaatcgcaagattcactggctgtaa

SEQ ID NO: 180477 - DNA, 25 bp, Saccharomyces pastorianus
acgttagactgaaggccaagcaatt

SEQ ID NO: 180478 - DNA, 25 bp, Saccharomyces pastorianus
tggacgagatatgctacggacttat

SEQ ID NO: 180479 - DNA, 25 bp, Saccharomyces pastorianus
aattactggcaacacgtaacttcca

SEQ ID NO: 180480 - DNA, 25 bp, Saccharomyces pastorianus
gattccacactgctgaagtgggaaa

SEQ ID NO: 180481 - DNA, 25 bp, Saccharomyces pastorianus
aatttcatcattacaatgcccggtg

SEQ ID NO: 180482 - DNA, 25 bp, Saccharomyces pastorianus
atacccgcatcttcaagtttctgtg

SEQ ID NO: 180483 - DNA, 25 bp, Saccharomyces pastorianus
gcgaatttccacaaacgttagactg

SEQ ID NO: 180484 - DNA, 25 bp, Saccharomyces pastorianus
taactgttttctgcccatgagtaaa

SEQ ID NO: 180485 - DNA, 25 bp, Saccharomyces pastorianus
tctgcagaaacacgatgaatccttt

SEQ ID NO: 180486 - DNA, 25 bp, Saccharomyces pastorianus
cttccagaagtgtctattaagcctt

SEQ ID NO: 180487 - DNA, 25 bp, Saccharomyces pastorianus
gaggcaaacctcgtaactgttttct

SEQ ID NO: 180488 - DNA, 25 bp, Saccharomyces pastorianus
ccagcgatttcgtatgtgttttgaa

SEQ ID NO: 180489 - DNA, 25 bp, Saccharomyces pastorianus
gaaaataacgtggtgattccagtaa

SEQ ID NO: 180490 - DNA, 25 bp, Saccharomyces pastorianus
gaaccagcaaataactcacaagatg

SEQ ID NO: 180491 - DNA, 25 bp, Saccharomyces pastorianus
gctccggaagcctttagtgggaaag

SEQ ID NO: 180492 - DNA, 25 bp, Saccharomyces pastorianus
ttccgaatgttgaagaaccagcaaa

SEQ ID NO: 180493 - DNA, 25 bp, Saccharomyces pastorianus
tcgcaggactttgagcaagctatag

SEQ ID NO: 180494 - DNA, 25 bp, Saccharomyces pastorianus
gatgagctaaactcgcaggactttg

SEQ ID NO: 180495 - DNA, 25 bp, Saccharomyces pastorianus
tggaagaaccgcaggctccggaagc

SEQ ID NO: 180496 - DNA, 25 bp, Saccharomyces pastorianus
gtgggaaagtccagcgatttcgtat

SEQ ID NO: 180497 - DNA, 25 bp, Saccharomyces pastorianus
agctataggaatgccatcagaaccc

SEQ ID NO: 180498 - DNA, 25 bp, Saccharomyces pastorianus
gctacactactcttccgaatgttga

SEQ ID NO: 180499 - DNA, 25 bp, Saccharomyces pastorianus
gatagcccctctaataatccattta

SEQ ID NO: 180500 - DNA, 25 bp, Saccharomyces pastorianus
tgagctcatcattttcatctgttga

SEQ ID NO: 180501 - DNA, 25 bp, Saccharomyces pastorianus
ttgatttatcaactccaccgccttt

SEQ ID NO: 180502 - DNA, 25 bp, Saccharomyces pastorianus
tttagactaccaaagggctcagttt

SEQ ID NO: 180503 - DNA, 25 bp, Saccharomyces pastorianus
gaagttgccgttatcaggagattca

SEQ ID NO: 180504 - DNA, 25 bp, Saccharomyces pastorianus
gtctccctcggtgatacatagtaat

SEQ ID NO: 180505 - DNA, 25 bp, Saccharomyces pastorianus
accgcctttggatgctatgtctata

SEQ ID NO: 180506 - DNA, 25 bp, Saccharomyces pastorianus
gaacatttcgtagcagatagcccct

SEQ ID NO: 180507 - DNA, 25 bp, Saccharomyces pastorianus
taattctgtcgggtctatgtcgtct

SEQ ID NO: 180508 - DNA, 25 bp, Saccharomyces pastorianus
tatgtctatacaatcgtctccctcg

SEQ ID NO: 180509 - DNA, 25 bp, Saccharomyces pastorianus
actgatgaggccttgggctgcattt

SEQ ID NO: 180510 - DNA, 25 bp, Saccharomyces pastorianus
tccccgcgttattagcacggtgcct

SEQ ID NO: 180511 - DNA, 25 bp, Saccharomyces pastorianus
gaaccgctgatccccgcgttattag

SEQ ID NO: 180512 - DNA, 25 bp, Saccharomyces pastorianus
cccgcgttattagcacggtgcctta

SEQ ID NO: 180513 - DNA, 25 bp, Saccharomyces pastorianus
ccccgcgttattagcacggtgcctt

SEQ ID NO: 180514 - DNA, 25 bp, Saccharomyces pastorianus
aaccgctgatccccgcgttattagc

SEQ ID NO: 180515 - DNA, 25 bp, Saccharomyces pastorianus
accgctgatccccgcgttattagca

SEQ ID NO: 180516 - DNA, 25 bp, Saccharomyces pastorianus
atccccgcgttattagcacggtgcc

SEQ ID NO: 180517 - DNA, 25 bp, Saccharomyces pastorianus
gatccccgcgttattagcacggtgc

SEQ ID NO: 180518 - DNA, 25 bp, Saccharomyces pastorianus
tgatccccgcgttattagcacggtg

SEQ ID NO: 180519 - DNA, 25 bp, Saccharomyces pastorianus
ctgatccccgcgttattagcacggt

SEQ ID NO: 180520 - DNA, 25 bp, Saccharomyces pastorianus
gctgatccccgcgttattagcacgg

SEQ ID NO: 180521 - DNA, 25 bp, Saccharomyces pastorianus
ttcgtacgactttttcagccaacct

SEQ ID NO: 180522 - DNA, 25 bp, Saccharomyces pastorianus
ccaacctgatttcaacagaaatttc

SEQ ID NO: 180523 - DNA, 25 bp, Saccharomyces pastorianus
ttcctagacaatgggcaaagcttaa

SEQ ID NO: 180524 - DNA, 25 bp, Saccharomyces pastorianus
atttcctagacaatgggcaaagctt

SEQ ID NO: 180525 - DNA, 25 bp, Saccharomyces pastorianus
gtacgactttttcagccaacctgat

SEQ ID NO: 180526 - DNA, 25 bp, Saccharomyces pastorianus
gactttttcagccaacctgatttca

SEQ ID NO: 180527 - DNA, 25 bp, Saccharomyces pastorianus
aacagaaatttcctagacaatgggc

SEQ ID NO: 180528 - DNA, 25 bp, Saccharomyces pastorianus
gaaatttcctagacaatgggcaaag

SEQ ID NO: 180529 - DNA, 25 bp, Saccharomyces pastorianus
cagaaatttcctagacaatgggcaa

SEQ ID NO: 180530 - DNA, 25 bp, Saccharomyces pastorianus
tcgtacgactttttcagccaacctg

SEQ ID NO: 180531 - DNA, 25 bp, Saccharomyces pastorianus
acgactttttcagccaacctgattt

SEQ ID NO: 180532 - DNA, 25 bp, Saccharomyces pastorianus
aatgtgatgttgagtccttccttgt

SEQ ID NO: 180533 - DNA, 25 bp, Saccharomyces pastorianus
taatagaattgctcgtgtaactggt

SEQ ID NO: 180534 - DNA, 25 bp, Saccharomyces pastorianus
aggtggtgatcctattagactccta

SEQ ID NO: 180535 - DNA, 25 bp, Saccharomyces pastorianus
ggtgtttcagatctagcacagcatt

SEQ ID NO: 180536 - DNA, 25 bp, Saccharomyces pastorianus
agggatccagcaatggccataccaa

SEQ ID NO: 180537 - DNA, 25 bp, Saccharomyces pastorianus
ggagtgtattccacgtactttgata

SEQ ID NO: 180538 - DNA, 25 bp, Saccharomyces pastorianus
ccaccgagatggcagtttctgtcaa

SEQ ID NO: 180539 - DNA, 25 bp, Saccharomyces pastorianus
gtgatgtcggtacaaactgtggatt

SEQ ID NO: 180540 - DNA, 25 bp, Saccharomyces pastorianus
gttaggccaacactagtcatcactg

SEQ ID NO: 180541 - DNA, 25 bp, Saccharomyces pastorianus
tgaacaaattttagccgttaggcca

SEQ ID NO: 180542 - DNA, 25 bp, Saccharomyces pastorianus
gatcgtaacctacaagatgctatgg

SEQ ID NO: 180543 - DNA, 25 bp, Saccharomyces pastorianus
gatgaaaccgacactctgagttccg

SEQ ID NO: 180544 - DNA, 25 bp, Saccharomyces pastorianus
gaggaaagtacagccgccgagatgc

SEQ ID NO: 180545 - DNA, 25 bp, Saccharomyces pastorianus
gagtgcgtcaatcgtgttcagcaaa

SEQ ID NO: 180546 - DNA, 25 bp, Saccharomyces pastorianus
acctggtgtacttggagtcgtgttt

SEQ ID NO: 180547 - DNA, 25 bp, Saccharomyces pastorianus
ttggttaattcctccataatgacag

SEQ ID NO: 180548 - DNA, 25 bp, Saccharomyces pastorianus
ttgccgaatgatcagtggtcagctt

SEQ ID NO: 180549 - DNA, 25 bp, Saccharomyces pastorianus
atcaggtacattccattgacttgaa

SEQ ID NO: 180550 - DNA, 25 bp, Saccharomyces pastorianus
gagttccgtcattcatcaggtacat

SEQ ID NO: 180551 - DNA, 25 bp, Saccharomyces pastorianus
gcagccggtgattagtaattgccga

SEQ ID NO: 180552 - DNA, 25 bp, Saccharomyces pastorianus
gaaacgtatcaagtagccaagacct

SEQ ID NO: 180553 - DNA, 25 bp, Saccharomyces pastorianus
tgggatgaaacttacgacctggtgt

SEQ ID NO: 180554 - DNA, 25 bp, Saccharomyces pastorianus
aaacagtcagtttctctggagagca

SEQ ID NO: 180555 - DNA, 25 bp, Saccharomyces pastorianus
gggctagagataatccctcgaaacc

SEQ ID NO: 180556 - DNA, 25 bp, Saccharomyces pastorianus
ttcggacccaaatgcatcaacagta

SEQ ID NO: 180557 - DNA, 25 bp, Saccharomyces pastorianus
gagcatatacacttcttgggctaga

SEQ ID NO: 180558 - DNA, 25 bp, Saccharomyces pastorianus
aagtcacaatttacagtccttcgga

SEQ ID NO: 180559 - DNA, 25 bp, Saccharomyces pastorianus
atatctgaacgacaaccaacgggaa

SEQ ID NO: 180560 - DNA, 25 bp, Saccharomyces pastorianus
ttctctggagagcagctattactct

SEQ ID NO: 180561 - DNA, 25 bp, Saccharomyces pastorianus
cgagctcaaagaaatctgtcattgt

SEQ ID NO: 180562 - DNA, 25 bp, Saccharomyces pastorianus
gaaaagctacgttctttattgtcag

SEQ ID NO: 180563 - DNA, 25 bp, Saccharomyces pastorianus
gccgatatattcattaacgagctca

SEQ ID NO: 180564 - DNA, 25 bp, Saccharomyces pastorianus
ctcgaaaccggatattgccgatata

SEQ ID NO: 180565 - DNA, 25 bp, Saccharomyces pastorianus
ggtttcttcttcttgtttactctca

SEQ ID NO: 180566 - DNA, 25 bp, Saccharomyces pastorianus
attgctaattcctcatcgtcgctat

SEQ ID NO: 180567 - DNA, 25 bp, Saccharomyces pastorianus
tggactcgccctctgctagaaagtt

SEQ ID NO: 180568 - DNA, 25 bp, Saccharomyces pastorianus
gtttactctcaatatgggccatttt

SEQ ID NO: 180569 - DNA, 25 bp, Saccharomyces pastorianus
gaagtggtatcatcggcgtccaaat

SEQ ID NO: 180570 - DNA, 25 bp, Saccharomyces pastorianus
agcccaccttttcttctaataatct

SEQ ID NO: 180571 - DNA, 25 bp, Saccharomyces pastorianus
aatcttatccaagtcaacgtccttc

SEQ ID NO: 180572 - DNA, 25 bp, Saccharomyces pastorianus
tcgtcgctatcgttttctttttcta

SEQ ID NO: 180573 - DNA, 25 bp, Saccharomyces pastorianus
atcttcctcttcattcttggcggga

SEQ ID NO: 180574 - DNA, 25 bp, Saccharomyces pastorianus
aaaagcttcggcatcgtccttattg

SEQ ID NO: 180575 - DNA, 25 bp, Saccharomyces pastorianus
aacgtccttcttcacaaaagcttcg

SEQ ID NO: 180576 - DNA, 25 bp, Saccharomyces pastorianus
aagactccttacaataggtgtgcca

SEQ ID NO: 180577 - DNA, 25 bp, Saccharomyces pastorianus
aaacaaagtcagtgaaagtacgcat

SEQ ID NO: 180578 - DNA, 25 bp, Saccharomyces pastorianus
caataggtgtgccagaaacaaagtc

SEQ ID NO: 180579 - DNA, 25 bp, Saccharomyces pastorianus
taggtgtgccagaaacaaagtcagt

SEQ ID NO: 180580 - DNA, 25 bp, Saccharomyces pastorianus
ctccttacaataggtgtgccagaaa

SEQ ID NO: 180581 - DNA, 25 bp, Saccharomyces pastorianus
gactccttacaataggtgtgccaga

SEQ ID NO: 180582 - DNA, 25 bp, Saccharomyces pastorianus
tccttacaataggtgtgccagaaac

SEQ ID NO: 180583 - DNA, 25 bp, Saccharomyces pastorianus
cttacaataggtgtgccagaaacaa

SEQ ID NO: 180584 - DNA, 25 bp, Saccharomyces pastorianus
tgcaggtctctgaagactccttaca

SEQ ID NO: 180585 - DNA, 25 bp, Saccharomyces pastorianus
tgaagactccttacaataggtgtgc

SEQ ID NO: 180586 - DNA, 25 bp, Saccharomyces pastorianus
agactccttacaataggtgtgccag

SEQ ID NO: 180587 - DNA, 25 bp, Saccharomyces pastorianus
aaacttgaatggtcctcctctttgc

SEQ ID NO: 180588 - DNA, 25 bp, Saccharomyces pastorianus
gtcctcctctttgcaggcagctggt

SEQ ID NO: 180589 - DNA, 25 bp, Saccharomyces pastorianus
acttgaatggtcctcctctttgcag

SEQ ID NO: 180590 - DNA, 25 bp, Saccharomyces pastorianus
tggtgcatggagcttattaaacatt

SEQ ID NO: 180591 - DNA, 25 bp, Saccharomyces pastorianus
tggagcttattaaacattgttctgt

SEQ ID NO: 180592 - DNA, 25 bp, Saccharomyces pastorianus
attaaacattgttctgtggttgttc

SEQ ID NO: 180593 - DNA, 25 bp, Saccharomyces pastorianus
ggaaacttgaatggtcctcctcttt

SEQ ID NO: 180594 - DNA, 25 bp, Saccharomyces pastorianus
ttttgggcttaatatttggtattag

SEQ ID NO: 180595 - DNA, 25 bp, Saccharomyces pastorianus
atggtcctcctctttgcaggcagct

SEQ ID NO: 180596 - DNA, 25 bp, Saccharomyces pastorianus
ttgaatggtcctcctctttgcaggc

SEQ ID NO: 180597 - DNA, 25 bp, Saccharomyces pastorianus
gaatggtcctcctctttgcaggcag

SEQ ID NO: 180598 - DNA, 25 bp, Saccharomyces pastorianus
gttggcgtctgcaaatttgtgaatt

SEQ ID NO: 180599 - DNA, 25 bp, Saccharomyces pastorianus
tatactgttggcgtctgcaaatttg

SEQ ID NO: 180600 - DNA, 25 bp, Saccharomyces pastorianus
actgttggcgtctgcaaatttgtga

SEQ ID NO: 180601 - DNA, 25 bp, Saccharomyces pastorianus
aatttgtgaattctccgcgaatgcc

SEQ ID NO: 180602 - DNA, 25 bp, Saccharomyces pastorianus
ctgttggcgtctgcaaatttgtgaa

SEQ ID NO: 180603 - DNA, 25 bp, Saccharomyces pastorianus
gcaaatttgtgaattctccgcgaat

SEQ ID NO: 180604 - DNA, 25 bp, Saccharomyces pastorianus
ggcgtctgcaaatttgtgaattctc

SEQ ID NO: 180605 - DNA, 25 bp, Saccharomyces pastorianus
gtctgcaaatttgtgaattctccgc

SEQ ID NO: 180606 - DNA, 25 bp, Saccharomyces pastorianus
ctgcaaatttgtgaattctccgcga

SEQ ID NO: 180607 - DNA, 25 bp, Saccharomyces pastorianus
atactgttggcgtctgcaaatttgt

SEQ ID NO: 180608 - DNA, 25 bp, Saccharomyces pastorianus
aaatttgtgaattctccgcgaatgc

SEQ ID NO: 180609 - DNA, 25 bp, Saccharomyces pastorianus
ggaaacaatcagctctgtccacaac

SEQ ID NO: 180610 - DNA, 25 bp, Saccharomyces pastorianus
attgctccaggttatatcgctctaa

SEQ ID NO: 180611 - DNA, 25 bp, Saccharomyces pastorianus
tggtttccactattgacgctgagaa

SEQ ID NO: 180612 - DNA, 25 bp, Saccharomyces pastorianus
tatactgtggcggtgagaactttaa

SEQ ID NO: 180613 - DNA, 25 bp, Saccharomyces pastorianus
acaacatcctactgcccaatattat

SEQ ID NO: 180614 - DNA, 25 bp, Saccharomyces pastorianus
gtacaatttcagtaatcccgcctac

SEQ ID NO: 180615 - DNA, 25 bp, Saccharomyces pastorianus
taaaaccctctgctttggtcgataa

SEQ ID NO: 180616 - DNA, 25 bp, Saccharomyces pastorianus
ccctcacgaggttctgtacaatttc

SEQ ID NO: 180617 - DNA, 25 bp, Saccharomyces pastorianus
tcttcgtctcttctttatactgtgg

SEQ ID NO: 180618 - DNA, 25 bp, Saccharomyces pastorianus
gtttgtccagtactccagtagacca

SEQ ID NO: 180619 - DNA, 25 bp, Saccharomyces pastorianus
tcgaatgcggcaaacgtctgcagaa

SEQ ID NO: 180620 - DNA, 25 bp, Saccharomyces pastorianus
gagaatctttatatcccaactgcag

SEQ ID NO: 180621 - DNA, 25 bp, Saccharomyces pastorianus
gattgtgggccctgacatcatgaat

SEQ ID NO: 180622 - DNA, 25 bp, Saccharomyces pastorianus
tataccagcgctatcctacatatgt

SEQ ID NO: 180623 - DNA, 25 bp, Saccharomyces pastorianus
aattgatagcactcgggttgacact

SEQ ID NO: 180624 - DNA, 25 bp, Saccharomyces pastorianus
cggacgatcctttgctattatcagc

SEQ ID NO: 180625 - DNA, 25 bp, Saccharomyces pastorianus
gatggctttcatcagctcgttagat

SEQ ID NO: 180626 - DNA, 25 bp, Saccharomyces pastorianus
acagattttctacgatggctttcat

SEQ ID NO: 180627 - DNA, 25 bp, Saccharomyces pastorianus
ggagtctcaccagatttctttaagc

SEQ ID NO: 180628 - DNA, 25 bp, Saccharomyces pastorianus
atgacatgcaaagcctgctaacttt

SEQ ID NO: 180629 - DNA, 25 bp, Saccharomyces pastorianus
taaagtgttcagttcggacgatcct

SEQ ID NO: 180630 - DNA, 25 bp, Saccharomyces pastorianus
gggttgacactactgcatgacatgc

SEQ ID NO: 180631 - DNA, 25 bp, Saccharomyces pastorianus
gaccccatcgttgtgctatttggaa

SEQ ID NO: 180632 - DNA, 25 bp, Saccharomyces pastorianus
gactatttcatttattcggctttca

SEQ ID NO: 180633 - DNA, 25 bp, Saccharomyces pastorianus
aaatcagtatgctctcgctgtgctg

SEQ ID NO: 180634 - DNA, 25 bp, Saccharomyces pastorianus
gatagagtccgatgttgccatagat

SEQ ID NO: 180635 - DNA, 25 bp, Saccharomyces pastorianus
taatattgtcttttccggcgtactt

SEQ ID NO: 180636 - DNA, 25 bp, Saccharomyces pastorianus
aacggacgatgacctccttgaaagc

SEQ ID NO: 180637 - DNA, 25 bp, Saccharomyces pastorianus
taaacgcacttctcagtctgatggt

SEQ ID NO: 180638 - DNA, 25 bp, Saccharomyces pastorianus
agcactgcatttactaccttgactt

SEQ ID NO: 180639 - DNA, 25 bp, Saccharomyces pastorianus
tagtgggcctcttgaaacggacgat

SEQ ID NO: 180640 - DNA, 25 bp, Saccharomyces pastorianus
ttcggctttcaactaaacgcacttc

SEQ ID NO: 180641 - DNA, 25 bp, Saccharomyces pastorianus
agcgactttctttttcggagcttat

SEQ ID NO: 180642 - DNA, 25 bp, Saccharomyces pastorianus
agtggcaccgtaagctcgtcaattg

SEQ ID NO: 180643 - DNA, 25 bp, Saccharomyces pastorianus
ttgcaacagcgactttatttttaag

SEQ ID NO: 180644 - DNA, 25 bp, Saccharomyces pastorianus
gccgcggtcattttgttagtatctc

SEQ ID NO: 180645 - DNA, 25 bp, Saccharomyces pastorianus
ttatttttaagagccgcggtcattt

SEQ ID NO: 180646 - DNA, 25 bp, Saccharomyces pastorianus
cagcgactttatttttaagagccgc

SEQ ID NO: 180647 - DNA, 25 bp, Saccharomyces pastorianus
aattgcaacagcgactttattttta

SEQ ID NO: 180648 - DNA, 25 bp, Saccharomyces pastorianus
attgcaacagcgactttatttttaa

SEQ ID NO: 180649 - DNA, 25 bp, Saccharomyces pastorianus
gatcatccacataagtggcaccgta

SEQ ID NO: 180650 - DNA, 25 bp, Saccharomyces pastorianus
ataagtggcaccgtaagctcgtcaa

SEQ ID NO: 180651 - DNA, 25 bp, Saccharomyces pastorianus
cacataagtggcaccgtaagctcgt

SEQ ID NO: 180652 - DNA, 25 bp, Saccharomyces pastorianus
ggcaccgtaagctcgtcaattgcaa

SEQ ID NO: 180653 - DNA, 25 bp, Saccharomyces pastorianus
ttatagccttaatcacaatggaatc

SEQ ID NO: 180654 - DNA, 25 bp, Saccharomyces pastorianus
aatattatagccttaatcacaatgg

SEQ ID NO: 180655 - DNA, 25 bp, Saccharomyces pastorianus
tctagtacattctacatacctaata

SEQ ID NO: 180656 - DNA, 25 bp, Saccharomyces pastorianus
tatagccttaatcacaatggaatcc

SEQ ID NO: 180657 - DNA, 25 bp, Saccharomyces pastorianus
ccttaatcacaatggaatcccaaca

SEQ ID NO: 180658 - DNA, 25 bp, Saccharomyces pastorianus
gccttaatcacaatggaatcccaac

SEQ ID NO: 180659 - DNA, 25 bp, Saccharomyces pastorianus
cttaatcacaatggaatcccaacaa

SEQ ID NO: 180660 - DNA, 25 bp, Saccharomyces pastorianus
atagccttaatcacaatggaatccc

SEQ ID NO: 180661 - DNA, 25 bp, Saccharomyces pastorianus
agccttaatcacaatggaatcccaa

SEQ ID NO: 180662 - DNA, 25 bp, Saccharomyces pastorianus
aacttctagtacattctacatacct

SEQ ID NO: 180663 - DNA, 25 bp, Saccharomyces pastorianus
acaattacatcaaaattcacccaat

SEQ ID NO: 180664 - DNA, 25 bp, Saccharomyces pastorianus
ttcaatttcagcaacaacaacaaca

SEQ ID NO: 180665 - DNA, 25 bp, Saccharomyces pastorianus
tcagcaacaacaacaacagcaacaa

SEQ ID NO: 180666 - DNA, 25 bp, Saccharomyces pastorianus
atttcagcaacaacaacaacagcaa

SEQ ID NO: 180667 - DNA, 25 bp, Saccharomyces pastorianus
caatttcagcaacaacaacaacagc

SEQ ID NO: 180668 - DNA, 25 bp, Saccharomyces pastorianus
tttcagcaacaacaacaacagcaac

SEQ ID NO: 180669 - DNA, 25 bp, Saccharomyces pastorianus
aatttcagcaacaacaacaacagca

SEQ ID NO: 180670 - DNA, 25 bp, Saccharomyces pastorianus
ttcagcaacaacaacaacagcaaca

SEQ ID NO: 180671 - DNA, 25 bp, Saccharomyces pastorianus
tcaatttcagcaacaacaacaacag

SEQ ID NO: 180672 - DNA, 25 bp, Saccharomyces pastorianus
aaatcgtctgccactgtctttgggt

SEQ ID NO: 180673 - DNA, 25 bp, Saccharomyces pastorianus
agtaggtctgacctgccatattcca

SEQ ID NO: 180674 - DNA, 25 bp, Saccharomyces pastorianus
atctacgtccgcatgaagtcgatct

SEQ ID NO: 180675 - DNA, 25 bp, Saccharomyces pastorianus
gtacatgtcgtgctccaaatcgtct

SEQ ID NO: 180676 - DNA, 25 bp, Saccharomyces pastorianus
gagctttctaccgttggcgtacatg

SEQ ID NO: 180677 - DNA, 25 bp, Saccharomyces pastorianus
aggtacttcatcattccattagcaa

SEQ ID NO: 180678 - DNA, 25 bp, Saccharomyces pastorianus
ggttctccggtataatgtcgtttat

SEQ ID NO: 180679 - DNA, 25 bp, Saccharomyces pastorianus
gtatcttcaaacactctgctacgtt

SEQ ID NO: 180680 - DNA, 25 bp, Saccharomyces pastorianus
gctacgttggattttgatttcggca

SEQ ID NO: 180681 - DNA, 25 bp, Saccharomyces pastorianus
gccttgatcttaacatctgcatggt

SEQ ID NO: 180682 - DNA, 25 bp, Saccharomyces pastorianus
gtcgtttattttcttgcttactggg

SEQ ID NO: 180683 - DNA, 25 bp, Saccharomyces pastorianus
ttggcacgtgtccatctgcatacta

SEQ ID NO: 180684 - DNA, 25 bp, Saccharomyces pastorianus
ttttccctacgatccattcaaggtg

SEQ ID NO: 180685 - DNA, 25 bp, Saccharomyces pastorianus
aattccgagcctatgggaagctgta

SEQ ID NO: 180686 - DNA, 25 bp, Saccharomyces pastorianus
gatctcaatgtcatcagctgcctga

SEQ ID NO: 180687 - DNA, 25 bp, Saccharomyces pastorianus
caacgctttcgggttcgtatcaaat

SEQ ID NO: 180688 - DNA, 25 bp, Saccharomyces pastorianus
cgacttcatcggtaaatcttttggt

SEQ ID NO: 180689 - DNA, 25 bp, Saccharomyces pastorianus
agttcattcgattgctgcctcactt

SEQ ID NO: 180690 - DNA, 25 bp, Saccharomyces pastorianus
catctgcatactacctgagacttca

SEQ ID NO: 180691 - DNA, 25 bp, Saccharomyces pastorianus
gtgtcatcgatagtaacagcggcta

SEQ ID NO: 180692 - DNA, 25 bp, Saccharomyces pastorianus
gggagatgcaccagttcattcgatt

SEQ ID NO: 180693 - DNA, 25 bp, Saccharomyces pastorianus
gagtatttttgcgattttccctacg

SEQ ID NO: 180694 - DNA, 25 bp, Saccharomyces pastorianus
ggttgtactggccatgcgtgtattc

SEQ ID NO: 180695 - DNA, 25 bp, Saccharomyces pastorianus
tactttgttggtggttgtactggcc

SEQ ID NO: 180696 - DNA, 25 bp, Saccharomyces pastorianus
tactggccatgcgtgtattcatcta

SEQ ID NO: 180697 - DNA, 25 bp, Saccharomyces pastorianus
ctggccatgcgtgtattcatctatt

SEQ ID NO: 180698 - DNA, 25 bp, Saccharomyces pastorianus
ttgtactggccatgcgtgtattcat

SEQ ID NO: 180699 - DNA, 25 bp, Saccharomyces pastorianus
ttgttggtggttgtactggccatgc

SEQ ID NO: 180700 - DNA, 25 bp, Saccharomyces pastorianus
tgcgtgtattcatctattatagcta

SEQ ID NO: 180701 - DNA, 25 bp, Saccharomyces pastorianus
gtattcatctattatagctaccata

SEQ ID NO: 180702 - DNA, 25 bp, Saccharomyces pastorianus
aactactttgttggtggttgtactg

SEQ ID NO: 180703 - DNA, 25 bp, Saccharomyces pastorianus
ggccatgcgtgtattcatctattat

SEQ ID NO: 180704 - DNA, 25 bp, Saccharomyces pastorianus
ctttgttggtggttgtactggccat

SEQ ID NO: 180705 - DNA, 25 bp, Saccharomyces pastorianus
tacgtttactgtagggtccaccaat

SEQ ID NO: 180706 - DNA, 25 bp, Saccharomyces pastorianus
gctacaggagactcaaacctcgcga

SEQ ID NO: 180707 - DNA, 25 bp, Saccharomyces pastorianus
aagtcaaccgtattctagtagcagc

SEQ ID NO: 180708 - DNA, 25 bp, Saccharomyces pastorianus
aattcggtattgatcttcgctgtat

SEQ ID NO: 180709 - DNA, 25 bp, Saccharomyces pastorianus
agactatcgttgaagggcctgcact

SEQ ID NO: 180710 - DNA, 25 bp, Saccharomyces pastorianus
gaagacttactactccgattatgcg

SEQ ID NO: 180711 - DNA, 25 bp, Saccharomyces pastorianus
tgaacacttgccaaaattgccacaa

SEQ ID NO: 180712 - DNA, 25 bp, Saccharomyces pastorianus
tcaaggtgtcaggtgcggcaacgaa

SEQ ID NO: 180713 - DNA, 25 bp, Saccharomyces pastorianus
ggcctgcactggaaacctcgataat

SEQ ID NO: 180714 - DNA, 25 bp, Saccharomyces pastorianus
gccacaagctggcaattcaaggtgt

SEQ ID NO: 180715 - DNA, 25 bp, Saccharomyces pastorianus
gtccaccaatcttttccaatttcaa

SEQ ID NO: 180716 - DNA, 25 bp, Saccharomyces pastorianus
gatgaccctgacatggtcgcacgaa

SEQ ID NO: 180717 - DNA, 25 bp, Saccharomyces pastorianus
attgtgaatcttataactggtgtta

SEQ ID NO: 180718 - DNA, 25 bp, Saccharomyces pastorianus
catggtcgcacgaaaaccaggtatt

SEQ ID NO: 180719 - DNA, 25 bp, Saccharomyces pastorianus
tacttggtggcattctgttcagtag

SEQ ID NO: 180720 - DNA, 25 bp, Saccharomyces pastorianus
gaaaaccaggtattgtgaatcttat

SEQ ID NO: 180721 - DNA, 25 bp, Saccharomyces pastorianus
ataactggtgttacgttcgccatag

SEQ ID NO: 180722 - DNA, 25 bp, Saccharomyces pastorianus
tagtggttcgttccttttggtagcg

SEQ ID NO: 180723 - DNA, 25 bp, Saccharomyces pastorianus
gttccttttggtagcggtgcattca

SEQ ID NO: 180724 - DNA, 25 bp, Saccharomyces pastorianus
tggtgttacgttcgccataggcctc

SEQ ID NO: 180725 - DNA, 25 bp, Saccharomyces pastorianus
gtagcggtgcattcagatgaccctg

SEQ ID NO: 180726 - DNA, 25 bp, Saccharomyces pastorianus
aattccatacttggtggcattctgt

SEQ ID NO: 180727 - DNA, 25 bp, Saccharomyces pastorianus
gtactccacattcatgatccagttg

SEQ ID NO: 180728 - DNA, 25 bp, Saccharomyces pastorianus
atagccggtgttctgacgctgtcaa

SEQ ID NO: 180729 - DNA, 25 bp, Saccharomyces pastorianus
ttgtactttctttctggtctgcata

SEQ ID NO: 180730 - DNA, 25 bp, Saccharomyces pastorianus
acccgtctgcagaatccttaggaag

SEQ ID NO: 180731 - DNA, 25 bp, Saccharomyces pastorianus
aattactctttatatcacccgtctg

SEQ ID NO: 180732 - DNA, 25 bp, Saccharomyces pastorianus
taaatgagcgtgtgtgtgcctccgt

SEQ ID NO: 180733 - DNA, 25 bp, Saccharomyces pastorianus
tatgggccaggctacgaaaacgttc

SEQ ID NO: 180734 - DNA, 25 bp, Saccharomyces pastorianus
gtggattgcgtatatccttccaata

SEQ ID NO: 180735 - DNA, 25 bp, Saccharomyces pastorianus
cgggtcaatcctatgtttcgggtga

SEQ ID NO: 180736 - DNA, 25 bp, Saccharomyces pastorianus
attgctgcatttccattccggatga

SEQ ID NO: 180737 - DNA, 25 bp, Saccharomyces pastorianus
gaactagtagcagccgcgtgcgata

SEQ ID NO: 180738 - DNA, 25 bp, Saccharomyces pastorianus
tggagcaggcggatcgtattacaga

SEQ ID NO: 180739 - DNA, 25 bp, Saccharomyces pastorianus
acaacagtgactatgagcagccgcc

SEQ ID NO: 180740 - DNA, 25 bp, Saccharomyces pastorianus
ttatagcagatactcatccactcct

SEQ ID NO: 180741 - DNA, 25 bp, Saccharomyces pastorianus
gatacaaggccgtactattcagcta

SEQ ID NO: 180742 - DNA, 25 bp, Saccharomyces pastorianus
gtcttatggcgcgagatacaacagt

SEQ ID NO: 180743 - DNA, 25 bp, Saccharomyces pastorianus
gagcgcctcgcaagaagataatgac

SEQ ID NO: 180744 - DNA, 25 bp, Saccharomyces pastorianus
cagccgccccaagagggagacttga

SEQ ID NO: 180745 - DNA, 25 bp, Saccharomyces pastorianus
cagaggcggtaatgcgtcttatggc

SEQ ID NO: 180746 - DNA, 25 bp, Saccharomyces pastorianus
agcaggcattaccaagcacaaccat

SEQ ID NO: 180747 - DNA, 25 bp, Saccharomyces pastorianus
gggttatcaccatgcgagacgaagt

SEQ ID NO: 180748 - DNA, 25 bp, Saccharomyces pastorianus
gacttgagacaaaccggagcatact

SEQ ID NO: 180749 - DNA, 25 bp, Saccharomyces pastorianus
cgtgtattcctttgatgatgatttg

SEQ ID NO: 180750 - DNA, 25 bp, Saccharomyces pastorianus
gatacgtgtattcctttgatgatga

SEQ ID NO: 180751 - DNA, 25 bp, Saccharomyces pastorianus
acagctatcagtgatgacttcgagg

SEQ ID NO: 180752 - DNA, 25 bp, Saccharomyces pastorianus
ggtacagctatcagtgatgacttcg

SEQ ID NO: 180753 - DNA, 25 bp, Saccharomyces pastorianus
cgagggatacgtgtattcctttgat

SEQ ID NO: 180754 - DNA, 25 bp, Saccharomyces pastorianus
tacgtgtattcctttgatgatgatt

SEQ ID NO: 180755 - DNA, 25 bp, Saccharomyces pastorianus
gacttcgagggatacgtgtattcct

SEQ ID NO: 180756 - DNA, 25 bp, Saccharomyces pastorianus
tgatgacttcgagggatacgtgtat

SEQ ID NO: 180757 - DNA, 25 bp, Saccharomyces pastorianus
cttcgagggatacgtgtattccttt

SEQ ID NO: 180758 - DNA, 25 bp, Saccharomyces pastorianus
tcagtgatgacttcgagggatacgt

SEQ ID NO: 180759 - DNA, 25 bp, Saccharomyces pastorianus
gctatcagtgatgacttcgagggat

SEQ ID NO: 180760 - DNA, 25 bp, Saccharomyces pastorianus
atgactcttaatcataaggttaggg

SEQ ID NO: 180761 - DNA, 25 bp, Saccharomyces pastorianus
gcgtatgactcttaatcataaggtt

SEQ ID NO: 180762 - DNA, 25 bp, Saccharomyces pastorianus
cgcgtatgactcttaatcataaggt

SEQ ID NO: 180763 - DNA, 25 bp, Saccharomyces pastorianus
tacagggctattctttttttgttct

SEQ ID NO: 180764 - DNA, 25 bp, Saccharomyces pastorianus
cgtatgactcttaatcataaggtta

SEQ ID NO: 180765 - DNA, 25 bp, Saccharomyces pastorianus
gcgcgtatgactcttaatcataagg

SEQ ID NO: 180766 - DNA, 25 bp, Saccharomyces pastorianus
tatgactcttaatcataaggttagg

SEQ ID NO: 180767 - DNA, 25 bp, Saccharomyces pastorianus
gtatgactcttaatcataaggttag

SEQ ID NO: 180768 - DNA, 25 bp, Saccharomyces pastorianus
taatcataaggttaggggttcgagc

SEQ ID NO: 180769 - DNA, 25 bp, Saccharomyces pastorianus
cagggctattctttttttgttctat

SEQ ID NO: 180770 - DNA, 25 bp, Saccharomyces pastorianus
gggctattctttttttgttctatat

SEQ ID NO: 180771 - DNA, 25 bp, Saccharomyces pastorianus
ttggtgccaacagctggtgagagat

SEQ ID NO: 180772 - DNA, 25 bp, Saccharomyces pastorianus
ccaacagctggtgagagattagcct

SEQ ID NO: 180773 - DNA, 25 bp, Saccharomyces pastorianus
aacagctggtgagagattagcctgg

SEQ ID NO: 180774 - DNA, 25 bp, Saccharomyces pastorianus
ccaaggtgacagttacataatggca

SEQ ID NO: 180775 - DNA, 25 bp, Saccharomyces pastorianus
caacagctggtgagagattagcctg

SEQ ID NO: 180776 - DNA, 25 bp, Saccharomyces pastorianus
tgccaacagctggtgagagattagc

SEQ ID NO: 180777 - DNA, 25 bp, Saccharomyces pastorianus
ggtgccaacagctggtgagagatta

SEQ ID NO: 180778 - DNA, 25 bp, Saccharomyces pastorianus
gggccaaggtgacagttacataatg

SEQ ID NO: 180779 - DNA, 25 bp, Saccharomyces pastorianus
aagttggtgccaacagctggtgaga

SEQ ID NO: 180780 - DNA, 25 bp, Saccharomyces pastorianus
gtgccaacagctggtgagagattag

SEQ ID NO: 180781 - DNA, 25 bp, Saccharomyces pastorianus
gccaacagctggtgagagattagcc

SEQ ID NO: 180782 - DNA, 25 bp, Saccharomyces pastorianus
agcgggatcgaaccgctgatccccg

SEQ ID NO: 180783 - DNA, 25 bp, Saccharomyces pastorianus
tctagcgggatcgaaccgctgatcc

SEQ ID NO: 180784 - DNA, 25 bp, Saccharomyces pastorianus
ccccgcgttattagcacggtgcctt

SEQ ID NO: 180785 - DNA, 25 bp, Saccharomyces pastorianus
cgaaccgctgatccccgcgttatta

SEQ ID NO: 180786 - DNA, 25 bp, Saccharomyces pastorianus
ctagcgggatcgaaccgctgatccc

SEQ ID NO: 180787 - DNA, 25 bp, Saccharomyces pastorianus
ggatcgaaccgctgatccccgcgtt

SEQ ID NO: 180788 - DNA, 25 bp, Saccharomyces pastorianus
tagcgggatcgaaccgctgatcccc

SEQ ID NO: 180789 - DNA, 25 bp, Saccharomyces pastorianus
tcgaaccgctgatccccgcgttatt

SEQ ID NO: 180790 - DNA, 25 bp, Saccharomyces pastorianus
gatccccgcgttattagcacggtgc

SEQ ID NO: 180791 - DNA, 25 bp, Saccharomyces pastorianus
atcgaaccgctgatccccgcgttat

SEQ ID NO: 180792 - DNA, 25 bp, Saccharomyces pastorianus
gctgatccccgcgttattagcacgg

SEQ ID NO: 180793 - DNA, 25 bp, Saccharomyces pastorianus
gaagaggccctacattccgggacca

SEQ ID NO: 180794 - DNA, 25 bp, Saccharomyces pastorianus
atatcatgcacgagtacgtaccacc

SEQ ID NO: 180795 - DNA, 25 bp, Saccharomyces pastorianus
ccttcgccgaatcacagatcaacga

SEQ ID NO: 180796 - DNA, 25 bp, Saccharomyces pastorianus
cgtcttctgtgttttctgatggttt

SEQ ID NO: 180797 - DNA, 25 bp, Saccharomyces pastorianus
ttccgggaccacagattggacaaca

SEQ ID NO: 180798 - DNA, 25 bp, Saccharomyces pastorianus
atctcattagttatgctgtccccat

SEQ ID NO: 180799 - DNA, 25 bp, Saccharomyces pastorianus
atcaggatcatcttcattagtcatt

SEQ ID NO: 180800 - DNA, 25 bp, Saccharomyces pastorianus
ccattcctcgagcaaactctcaggg

SEQ ID NO: 180801 - DNA, 25 bp, Saccharomyces pastorianus
gtcagcggctattccatagcaggca

SEQ ID NO: 180802 - DNA, 25 bp, Saccharomyces pastorianus
agatcaacgatgtactcttcttcat

SEQ ID NO: 180803 - DNA, 25 bp, Saccharomyces pastorianus
gaaaccttgtgcactcatactgatc

SEQ ID NO: 180804 - DNA, 25 bp, Saccharomyces pastorianus
cgcgggcgtcgtgttgatgttcttc

SEQ ID NO: 180805 - DNA, 25 bp, Saccharomyces pastorianus
ttcaactacgcccacgcgtgcaagt

SEQ ID NO: 180806 - DNA, 25 bp, Saccharomyces pastorianus
tcagcagaagctgcaggtcaagcag

SEQ ID NO: 180807 - DNA, 25 bp, Saccharomyces pastorianus
agcaaaaggaacaacacagctcgtt

SEQ ID NO: 180808 - DNA, 25 bp, Saccharomyces pastorianus
gcgtgcaagtgcatcgcagggttct

SEQ ID NO: 180809 - DNA, 25 bp, Saccharomyces pastorianus
agaccggaattgaccctcagcagaa

SEQ ID NO: 180810 - DNA, 25 bp, Saccharomyces pastorianus
aagtgcatcgcagggttcttcgtgg

SEQ ID NO: 180811 - DNA, 25 bp, Saccharomyces pastorianus
ggaattgaccctcagcagaagctgc

SEQ ID NO: 180812 - DNA, 25 bp, Saccharomyces pastorianus
gcatcgcagggttcttcgtggtcgc

SEQ ID NO: 180813 - DNA, 25 bp, Saccharomyces pastorianus
tcttcgagaccggaattgaccctca

SEQ ID NO: 180814 - DNA, 25 bp, Saccharomyces pastorianus
aacaacacagctcgttcaactacgc

SEQ ID NO: 180815 - DNA, 25 bp, Saccharomyces pastorianus
aggaatccgcaagaaacttttcgag

SEQ ID NO: 180816 - DNA, 25 bp, Saccharomyces pastorianus
tgatttgtttatccactttattcag

SEQ ID NO: 180817 - DNA, 25 bp, Saccharomyces pastorianus
gaatatcttcttaaggaatccgcaa

SEQ ID NO: 180818 - DNA, 25 bp, Saccharomyces pastorianus
ttgaagcaatatctttcccgccatt

SEQ ID NO: 180819 - DNA, 25 bp, Saccharomyces pastorianus
aagactttgttcaagcagctttgag

SEQ ID NO: 180820 - DNA, 25 bp, Saccharomyces pastorianus
acgtacgcttgggattctaatgata

SEQ ID NO: 180821 - DNA, 25 bp, Saccharomyces pastorianus
agcaaacaggccagagttgtttcat

SEQ ID NO: 180822 - DNA, 25 bp, Saccharomyces pastorianus
gaactcttggcaggtacgtacgctt

SEQ ID NO: 180823 - DNA, 25 bp, Saccharomyces pastorianus
gcagctttgagtctagaactcttgg

SEQ ID NO: 180824 - DNA, 25 bp, Saccharomyces pastorianus
gggattctaatgatactcttgaagc

SEQ ID NO: 180825 - DNA, 25 bp, Saccharomyces pastorianus
ttgccagagcaatcttcatttgaga

SEQ ID NO: 180826 - DNA, 25 bp, Saccharomyces pastorianus
ttacgttcgcagcaagaggccatgt

SEQ ID NO: 180827 - DNA, 25 bp, Saccharomyces pastorianus
caatgctacgtttaactccagcgaa

SEQ ID NO: 180828 - DNA, 25 bp, Saccharomyces pastorianus
gagacgcaccagcaagaccgagttc

SEQ ID NO: 180829 - DNA, 25 bp, Saccharomyces pastorianus
gaagcatcgtttattcccattacta

SEQ ID NO: 180830 - DNA, 25 bp, Saccharomyces pastorianus
ttgatctatccttctacgagacgca

SEQ ID NO: 180831 - DNA, 25 bp, Saccharomyces pastorianus
ataactcattgattccggcagacat

SEQ ID NO: 180832 - DNA, 25 bp, Saccharomyces pastorianus
aacgatcttcagctacggtgggcag

SEQ ID NO: 180833 - DNA, 25 bp, Saccharomyces pastorianus
gatgcgtcacttacgacggcattgg

SEQ ID NO: 180834 - DNA, 25 bp, Saccharomyces pastorianus
tcgcacattctgcacgatgaggaca

SEQ ID NO: 180835 - DNA, 25 bp, Saccharomyces pastorianus
agaccgagttcgcatcgataccatt

SEQ ID NO: 180836 - DNA, 25 bp, Saccharomyces pastorianus
aagcaatggatcaactcctcatcgc

SEQ ID NO: 180837 - DNA, 25 bp, Saccharomyces pastorianus
ctctaacttcgaagctttccataac

SEQ ID NO: 180838 - DNA, 25 bp, Saccharomyces pastorianus
ctaacttcgaagctttccataactt

SEQ ID NO: 180839 - DNA, 25 bp, Saccharomyces pastorianus
tctaacttcgaagctttccataact

SEQ ID NO: 180840 - DNA, 25 bp, Saccharomyces pastorianus
aacttcgaagctttccataacttct

SEQ ID NO: 180841 - DNA, 25 bp, Saccharomyces pastorianus
tcctctaacttcgaagctttccata

SEQ ID NO: 180842 - DNA, 25 bp, Saccharomyces pastorianus
cttcgaagctttccataacttctgt

SEQ ID NO: 180843 - DNA, 25 bp, Saccharomyces pastorianus
ttcctctaacttcgaagctttccat

SEQ ID NO: 180844 - DNA, 25 bp, Saccharomyces pastorianus
acttcgaagctttccataacttctg

SEQ ID NO: 180845 - DNA, 25 bp, Saccharomyces pastorianus
taacttcgaagctttccataacttc

SEQ ID NO: 180846 - DNA, 25 bp, Saccharomyces pastorianus
cctctaacttcgaagctttccataa

SEQ ID NO: 180847 - DNA, 25 bp, Saccharomyces pastorianus
gtttgtaccgtacacagtgttgctt

SEQ ID NO: 180848 - DNA, 25 bp, Saccharomyces pastorianus
agtgttgcttgctaattgcatgatc

SEQ ID NO: 180849 - DNA, 25 bp, Saccharomyces pastorianus
gtaccgtacacagtgttgcttgcta

SEQ ID NO: 180850 - DNA, 25 bp, Saccharomyces pastorianus
cacagtgttgcttgctaattgcatg

SEQ ID NO: 180851 - DNA, 25 bp, Saccharomyces pastorianus
aatatgtgtcgtttctgtttgtacc

SEQ ID NO: 180852 - DNA, 25 bp, Saccharomyces pastorianus
gtgtcgtttctgtttgtaccgtaca

SEQ ID NO: 180853 - DNA, 25 bp, Saccharomyces pastorianus
gtcgtttctgtttgtaccgtacaca

SEQ ID NO: 180854 - DNA, 25 bp, Saccharomyces pastorianus
ccgtacacagtgttgcttgctaatt

SEQ ID NO: 180855 - DNA, 25 bp, Saccharomyces pastorianus
atgtgtcgtttctgtttgtaccgta

SEQ ID NO: 180856 - DNA, 25 bp, Saccharomyces pastorianus
gtacacagtgttgcttgctaattgc

SEQ ID NO: 180857 - DNA, 25 bp, Saccharomyces pastorianus
gtttctgtttgtaccgtacacagtg

SEQ ID NO: 180858 - DNA, 25 bp, Saccharomyces pastorianus
tacattcctgtagtcgtggtaggta

SEQ ID NO: 180859 - DNA, 25 bp, Saccharomyces pastorianus
atgcaccctttctagaaacgtctgc

SEQ ID NO: 180860 - DNA, 25 bp, Saccharomyces pastorianus
cattcaatcatactttgtggacgaa

SEQ ID NO: 180861 - DNA, 25 bp, Saccharomyces pastorianus
gatgacaaagtatccattttggaca

SEQ ID NO: 180862 - DNA, 25 bp, Saccharomyces pastorianus
gagttactgtcttattatcagcaaa

SEQ ID NO: 180863 - DNA, 25 bp, Saccharomyces pastorianus
cagttgaatgcaccctttctagaaa

SEQ ID NO: 180864 - DNA, 25 bp, Saccharomyces pastorianus
ttcctttgatgagttactgtcttat

SEQ ID NO: 180865 - DNA, 25 bp, Saccharomyces pastorianus
atgaagacgggttacgcctggccaa

SEQ ID NO: 180866 - DNA, 25 bp, Saccharomyces pastorianus
ggacgaatatgaccctactatcgaa

SEQ ID NO: 180867 - DNA, 25 bp, Saccharomyces pastorianus
tattccgtcacctctagaaattcct

SEQ ID NO: 180868 - DNA, 25 bp, Saccharomyces pastorianus
ccattttggacattctagatactgc

SEQ ID NO: 180869 - DNA, 25 bp, Saccharomyces pastorianus
taatgctctctactcactttattga

SEQ ID NO: 180870 - DNA, 25 bp, Saccharomyces pastorianus
tttgatataatgctctctactcact

SEQ ID NO: 180871 - DNA, 25 bp, Saccharomyces pastorianus
ttttttgatataatgctctctactc

SEQ ID NO: 180872 - DNA, 25 bp, Saccharomyces pastorianus
aatgctctctactcactttattgag

SEQ ID NO: 180873 - DNA, 25 bp, Saccharomyces pastorianus
gatataatgctctctactcacttta

SEQ ID NO: 180874 - DNA, 25 bp, Saccharomyces pastorianus
tataatgctctctactcactttatt

SEQ ID NO: 180875 - DNA, 25 bp, Saccharomyces pastorianus
ctactcactttattgagtggcgatt

SEQ ID NO: 180876 - DNA, 25 bp, Saccharomyces pastorianus
ctcactttattgagtggcgatttgc

SEQ ID NO: 180877 - DNA, 25 bp, Saccharomyces pastorianus
actttattgagtggcgatttgctat

SEQ ID NO: 180878 - DNA, 25 bp, Saccharomyces pastorianus
tgctctctactcactttattgagtg

SEQ ID NO: 180879 - DNA, 25 bp, Saccharomyces pastorianus
tctctactcactttattgagtggcg

SEQ ID NO: 180880 - DNA, 25 bp, Saccharomyces pastorianus
aatggctagatctgtttggaaccac

SEQ ID NO: 180881 - DNA, 25 bp, Saccharomyces pastorianus
tgctaccgtgccattctttggtatt

SEQ ID NO: 180882 - DNA, 25 bp, Saccharomyces pastorianus
gtaatgatgtcgaaggtgtccttgc

SEQ ID NO: 180883 - DNA, 25 bp, Saccharomyces pastorianus
tatcattgaccctgttacaggtgtt

SEQ ID NO: 180884 - DNA, 25 bp, Saccharomyces pastorianus
tttggcaggtgctgtcccaacaaaa

SEQ ID NO: 180885 - DNA, 25 bp, Saccharomyces pastorianus
aacaaaacctggttctgctaccgtg

SEQ ID NO: 180886 - DNA, 25 bp, Saccharomyces pastorianus
acgaccgttacatggatacttactt

SEQ ID NO: 180887 - DNA, 25 bp, Saccharomyces pastorianus
aatcaccatggccatcaatggctag

SEQ ID NO: 180888 - DNA, 25 bp, Saccharomyces pastorianus
tggttctcatttaattgctcctttg

SEQ ID NO: 180889 - DNA, 25 bp, Saccharomyces pastorianus
atacttacttgaaaccttatcctgg

SEQ ID NO: 180890 - DNA, 25 bp, Saccharomyces pastorianus
tttcacaggtgatggtgctggtaga

SEQ ID NO: 180891 - DNA, 25 bp, Saccharomyces pastorianus
aatccctttgatactcctgttgata

SEQ ID NO: 180892 - DNA, 25 bp, Saccharomyces pastorianus
gaagtcgacaatccctttgatactc

SEQ ID NO: 180893 - DNA, 25 bp, Saccharomyces pastorianus
gttcttttcatagttacaacactaa

SEQ ID NO: 180894 - DNA, 25 bp, Saccharomyces pastorianus
atagcactaactgttcttttcatag

SEQ ID NO: 180895 - DNA, 25 bp, Saccharomyces pastorianus
agccagaagtcgacaatccctttga

SEQ ID NO: 180896 - DNA, 25 bp, Saccharomyces pastorianus
gggagctgcaatagcactaactgtt

SEQ ID NO: 180897 - DNA, 25 bp, Saccharomyces pastorianus
gtatgggatgcaagaaaggcttcta

SEQ ID NO: 180898 - DNA, 25 bp, Saccharomyces pastorianus
ttgatactcctgttgataagtgcga

SEQ ID NO: 180899 - DNA, 25 bp, Saccharomyces pastorianus
tatcgatacacacctagtaagggag

SEQ ID NO: 180900 - DNA, 25 bp, Saccharomyces pastorianus
tacacacctagtaagggagctgcaa

SEQ ID NO: 180901 - DNA, 25 bp, Saccharomyces pastorianus
aggcttctaagccagaagtcgacaa

SEQ ID NO: 180902 - DNA, 25 bp, Saccharomyces pastorianus
gacggttcgcataaatccggtagaa

SEQ ID NO: 180903 - DNA, 25 bp, Saccharomyces pastorianus
agtgcgcacgatgacggtctggatt

SEQ ID NO: 180904 - DNA, 25 bp, Saccharomyces pastorianus
aaagactatattccgaccccggatg

SEQ ID NO: 180905 - DNA, 25 bp, Saccharomyces pastorianus
ggtctggattcattctcaaaaggcg

SEQ ID NO: 180906 - DNA, 25 bp, Saccharomyces pastorianus
aaaggcgattcaggcgctggagcca

SEQ ID NO: 180907 - DNA, 25 bp, Saccharomyces pastorianus
catcaaattttctgccactgtggag

SEQ ID NO: 180908 - DNA, 25 bp, Saccharomyces pastorianus
tctgcctaacgatctgaaacacctg

SEQ ID NO: 180909 - DNA, 25 bp, Saccharomyces pastorianus
gtctggatctaggagtgcgcacgat

SEQ ID NO: 180910 - DNA, 25 bp, Saccharomyces pastorianus
tgggttctggtcatacaaagcacaa

SEQ ID NO: 180911 - DNA, 25 bp, Saccharomyces pastorianus
accccggatgcttctatgacttgga

SEQ ID NO: 180912 - DNA, 25 bp, Saccharomyces pastorianus
tatacgggcagtttccaggagacca

SEQ ID NO: 180913 - DNA, 25 bp, Saccharomyces pastorianus
atgaattcgccgtgagtactccatt

SEQ ID NO: 180914 - DNA, 25 bp, Saccharomyces pastorianus
gaactactgcctgcaaattccggaa

SEQ ID NO: 180915 - DNA, 25 bp, Saccharomyces pastorianus
cctgctgagctgtctttatcgttat

SEQ ID NO: 180916 - DNA, 25 bp, Saccharomyces pastorianus
ttaagttagccatccttgttacgcc

SEQ ID NO: 180917 - DNA, 25 bp, Saccharomyces pastorianus
ggattgcaatttcctacactcaacc

SEQ ID NO: 180918 - DNA, 25 bp, Saccharomyces pastorianus
agctcctcaatcttgtcacttaatg

SEQ ID NO: 180919 - DNA, 25 bp, Saccharomyces pastorianus
gagacgctttcctggcttaatgaat

SEQ ID NO: 180920 - DNA, 25 bp, Saccharomyces pastorianus
aatgctatttgcatactgccctgct

SEQ ID NO: 180921 - DNA, 25 bp, Saccharomyces pastorianus
aagcacgtcttttgtctctctttta

SEQ ID NO: 180922 - DNA, 25 bp, Saccharomyces pastorianus
gccgcattcatcagcctttaagtta

SEQ ID NO: 180923 - DNA, 25 bp, Saccharomyces pastorianus
tgttacgccgttcgttgagacgctt

SEQ ID NO: 180924 - DNA, 25 bp, Saccharomyces pastorianus
tgtttaactgttcttggcctttgtt

SEQ ID NO: 180925 - DNA, 25 bp, Saccharomyces pastorianus
ttcttggcctttgtttcattgccta

SEQ ID NO: 180926 - DNA, 25 bp, Saccharomyces pastorianus
actgttcttggcctttgtttcattg

SEQ ID NO: 180927 - DNA, 25 bp, Saccharomyces pastorianus
tggcctttgtttcattgcctacaag

SEQ ID NO: 180928 - DNA, 25 bp, Saccharomyces pastorianus
ggcctttgtttcattgcctacaagg

SEQ ID NO: 180929 - DNA, 25 bp, Saccharomyces pastorianus
cattgcctacaagggcatgcacgaa

SEQ ID NO: 180930 - DNA, 25 bp, Saccharomyces pastorianus
gtttcattgcctacaagggcatgca

SEQ ID NO: 180931 - DNA, 25 bp, Saccharomyces pastorianus
ctgttcttggcctttgtttcattgc

SEQ ID NO: 180932 - DNA, 25 bp, Saccharomyces pastorianus
ttaactgttcttggcctttgtttca

SEQ ID NO: 180933 - DNA, 25 bp, Saccharomyces pastorianus
cctttgtttcattgcctacaagggc

SEQ ID NO: 180934 - DNA, 25 bp, Saccharomyces pastorianus
ttggcctttgtttcattgcctacaa

SEQ ID NO: 180935 - DNA, 25 bp, Saccharomyces pastorianus
actccttgaccggtgaagctgctgc

SEQ ID NO: 180936 - DNA, 25 bp, Saccharomyces pastorianus
gttcactccttgaccggtgaagctg

SEQ ID NO: 180937 - DNA, 25 bp, Saccharomyces pastorianus
tgaagctgctgccaatgccttgcca

SEQ ID NO: 180938 - DNA, 25 bp, Saccharomyces pastorianus
tccttgaccggtgaagctgctgcca

SEQ ID NO: 180939 - DNA, 25 bp, Saccharomyces pastorianus
gggtactggtcgtgctgtcgcccgt

SEQ ID NO: 180940 - DNA, 25 bp, Saccharomyces pastorianus
agctgctgccaatgccttgccattg

SEQ ID NO: 180941 - DNA, 25 bp, Saccharomyces pastorianus
ggtgaagctgctgccaatgccttgc

SEQ ID NO: 180942 - DNA, 25 bp, Saccharomyces pastorianus
tgaccggtgaagctgctgccaatgc

SEQ ID NO: 180943 - DNA, 25 bp, Saccharomyces pastorianus
gaagctgctgccaatgccttgccat

SEQ ID NO: 180944 - DNA, 25 bp, Saccharomyces pastorianus
cttgaccggtgaagctgctgccaat

SEQ ID NO: 180945 - DNA, 25 bp, Saccharomyces pastorianus
accggtgaagctgctgccaatgcct

SEQ ID NO: 180946 - DNA, 25 bp, Saccharomyces pastorianus
gtggaacgactaatgcatctgtgga

SEQ ID NO: 180947 - DNA, 25 bp, Saccharomyces pastorianus
gaaggtgtgaaagcgctgactaaaa

SEQ ID NO: 180948 - DNA, 25 bp, Saccharomyces pastorianus
tacaaaccaatctagtggaacgact

SEQ ID NO: 180949 - DNA, 25 bp, Saccharomyces pastorianus
taatgcatctgtggaggtactttca

SEQ ID NO: 180950 - DNA, 25 bp, Saccharomyces pastorianus
ggtactttcagaggatggacctatg

SEQ ID NO: 180951 - DNA, 25 bp, Saccharomyces pastorianus
gcaagaaggtgtgaaagcgctgact

SEQ ID NO: 180952 - DNA, 25 bp, Saccharomyces pastorianus
gtgaaagcgctgactaaaattcttt

SEQ ID NO: 180953 - DNA, 25 bp, Saccharomyces pastorianus
acacctacaaaccaatctagtggaa

SEQ ID NO: 180954 - DNA, 25 bp, Saccharomyces pastorianus
acgactaatgcatctgtggaggtac

SEQ ID NO: 180955 - DNA, 25 bp, Saccharomyces pastorianus
ggacctatgccaataaacgttatga

SEQ ID NO: 180956 - DNA, 25 bp, Saccharomyces pastorianus
ttcagaggatggacctatgccaata

SEQ ID NO: 180957 - DNA, 25 bp, Saccharomyces pastorianus
taccttcggtatcgctgttcaaaca

SEQ ID NO: 180958 - DNA, 25 bp, Saccharomyces pastorianus
acgacggtcaaattcaggccacagc

SEQ ID NO: 180959 - DNA, 25 bp, Saccharomyces pastorianus
aattcttccagcaaaagccctactt

SEQ ID NO: 180960 - DNA, 25 bp, Saccharomyces pastorianus
gatggtccaactccacaagcaggtg

SEQ ID NO: 180961 - DNA, 25 bp, Saccharomyces pastorianus
agaacttccgtcattacagtggtaa

SEQ ID NO: 180962 - DNA, 25 bp, Saccharomyces pastorianus
aactgcttccgccaatgttaagaga

SEQ ID NO: 180963 - DNA, 25 bp, Saccharomyces pastorianus
aagcaggtgccatctatgcggctgg

SEQ ID NO: 180964 - DNA, 25 bp, Saccharomyces pastorianus
tgcggctggttggtctatcacatca

SEQ ID NO: 180965 - DNA, 25 bp, Saccharomyces pastorianus
taccttggccagtgacagtaccgaa

SEQ ID NO: 180966 - DNA, 25 bp, Saccharomyces pastorianus
ttggcccttggtgatgacgatgttt

SEQ ID NO: 180967 - DNA, 25 bp, Saccharomyces pastorianus
gctaccactgctgtgtctttagaga

SEQ ID NO: 180968 - DNA, 25 bp, Saccharomyces pastorianus
agtgttcaagatcaaccctctgttg

SEQ ID NO: 180969 - DNA, 25 bp, Saccharomyces pastorianus
agatcaaccctctgttgccgtggga

SEQ ID NO: 180970 - DNA, 25 bp, Saccharomyces pastorianus
tctgtttctgaaatcgaaattgaaa

SEQ ID NO: 180971 - DNA, 25 bp, Saccharomyces pastorianus
cctctgttgccgtgggaagtttctt

SEQ ID NO: 180972 - DNA, 25 bp, Saccharomyces pastorianus
ctgttgccgtgggaagtttcttcaa

SEQ ID NO: 180973 - DNA, 25 bp, Saccharomyces pastorianus
aagtgttcaagatcaaccctctgtt

SEQ ID NO: 180974 - DNA, 25 bp, Saccharomyces pastorianus
tcaagatcaaccctctgttgccgtg

SEQ ID NO: 180975 - DNA, 25 bp, Saccharomyces pastorianus
tgccgtgggaagtttcttcaagggc

SEQ ID NO: 180976 - DNA, 25 bp, Saccharomyces pastorianus
atcaaccctctgttgccgtgggaag

SEQ ID NO: 180977 - DNA, 25 bp, Saccharomyces pastorianus
tgttcaagatcaaccctctgttgcc

SEQ ID NO: 180978 - DNA, 25 bp, Saccharomyces pastorianus
caaccctctgttgccgtgggaagtt

SEQ ID NO: 180979 - DNA, 25 bp, Saccharomyces pastorianus
gaaaactcgctcaaacaatggatca

SEQ ID NO: 180980 - DNA, 25 bp, Saccharomyces pastorianus
caccactagatgtgttcctgataga

SEQ ID NO: 180981 - DNA, 25 bp, Saccharomyces pastorianus
atggtgattccaaaacgcagcaaaa

SEQ ID NO: 180982 - DNA, 25 bp, Saccharomyces pastorianus
atgtctacgtccacaatttggtcga

SEQ ID NO: 180983 - DNA, 25 bp, Saccharomyces pastorianus
gagtgaagctcttttaatggcgaaa

SEQ ID NO: 180984 - DNA, 25 bp, Saccharomyces pastorianus
ggaacttgctatcgaaaaccacact

SEQ ID NO: 180985 - DNA, 25 bp, Saccharomyces pastorianus
catctcttcgaaattgctgttgcta

SEQ ID NO: 180986 - DNA, 25 bp, Saccharomyces pastorianus
agatttggtagttttgcgcccgtca

SEQ ID NO: 180987 - DNA, 25 bp, Saccharomyces pastorianus
atatccatgactggtggtatcccct

SEQ ID NO: 180988 - DNA, 25 bp, Saccharomyces pastorianus
gtttcagatctttcttcaacaacac

SEQ ID NO: 180989 - DNA, 25 bp, Saccharomyces pastorianus
gcgcccgtcagaacaaattcatttt

SEQ ID NO: 180990 - DNA, 25 bp, Saccharomyces pastorianus
atgctcacaaatacttggacggtat

SEQ ID NO: 180991 - DNA, 25 bp, Saccharomyces pastorianus
tgggtatttgattctaacatcttat

SEQ ID NO: 180992 - DNA, 25 bp, Saccharomyces pastorianus
ttgttatggtactcaggctgctgct

SEQ ID NO: 180993 - DNA, 25 bp, Saccharomyces pastorianus
acttgttatggtactcaggctgctg

SEQ ID NO: 180994 - DNA, 25 bp, Saccharomyces pastorianus
aaggaatctgaagtttccggctccg

SEQ ID NO: 180995 - DNA, 25 bp, Saccharomyces pastorianus
ggctccgttgcatccggttcttcta

SEQ ID NO: 180996 - DNA, 25 bp, Saccharomyces pastorianus
tgaagtttccggctccgttgcatcc

SEQ ID NO: 180997 - DNA, 25 bp, Saccharomyces pastorianus
tgctgcttatgggtatttgattcta

SEQ ID NO: 180998 - DNA, 25 bp, Saccharomyces pastorianus
gaatctgaagtttccggctccgttg

SEQ ID NO: 180999 - DNA, 25 bp, Saccharomyces pastorianus
gctgctgctgcttatgggtatttga

SEQ ID NO: 181000 - DNA, 25 bp, Saccharomyces pastorianus
ttctatgctcacaaatacttggacg

SEQ ID NO: 181001 - DNA, 25 bp, Saccharomyces pastorianus
tgaaacctacccagttgaaatcgct

SEQ ID NO: 181002 - DNA, 25 bp, Saccharomyces pastorianus
tttccaagccgctcatccaactgaa

SEQ ID NO: 181003 - DNA, 25 bp, Saccharomyces pastorianus
ttggcccaatactactctttccaag

SEQ ID NO: 181004 - DNA, 25 bp, Saccharomyces pastorianus
aacctacccagttgaaatcgctgaa

SEQ ID NO: 181005 - DNA, 25 bp, Saccharomyces pastorianus
actactctttccaagccgctcatcc

SEQ ID NO: 181006 - DNA, 25 bp, Saccharomyces pastorianus
atactactctttccaagccgctcat

SEQ ID NO: 181007 - DNA, 25 bp, Saccharomyces pastorianus
acccagttgaaatcgctgaagccgt

SEQ ID NO: 181008 - DNA, 25 bp, Saccharomyces pastorianus
cccaatactactctttccaagccgc

SEQ ID NO: 181009 - DNA, 25 bp, Saccharomyces pastorianus
tactctttccaagccgctcatccaa

SEQ ID NO: 181010 - DNA, 25 bp, Saccharomyces pastorianus
agttgaaatcgctgaagccgttttc

SEQ ID NO: 181011 - DNA, 25 bp, Saccharomyces pastorianus
tactactctttccaagccgctcatc

SEQ ID NO: 181012 - DNA, 25 bp, Saccharomyces pastorianus
gttgccttgtgccacgcaaaacgag

SEQ ID NO: 181013 - DNA, 25 bp, Saccharomyces pastorianus
tggagcagatcaacgacatcgccgc

SEQ ID NO: 181014 - DNA, 25 bp, Saccharomyces pastorianus
gagatggcgcagaactcccagaaag

SEQ ID NO: 181015 - DNA, 25 bp, Saccharomyces pastorianus
agtacgctaccttcggcgagaacaa

SEQ ID NO: 181016 - DNA, 25 bp, Saccharomyces pastorianus
aaaggctgccaaccttggtggtgtc

SEQ ID NO: 181017 - DNA, 25 bp, Saccharomyces pastorianus
gacgcagtctggtttggaccaccaa

SEQ ID NO: 181018 - DNA, 25 bp, Saccharomyces pastorianus
gtctcggagacaggtatcactttgg

SEQ ID NO: 181019 - DNA, 25 bp, Saccharomyces pastorianus
gaacactaagatcttgccgtcactg

SEQ ID NO: 181020 - DNA, 25 bp, Saccharomyces pastorianus
tcgcagggctgcatcgtctcggaga

SEQ ID NO: 181021 - DNA, 25 bp, Saccharomyces pastorianus
gtcactggtcaagggtgccaacatt

SEQ ID NO: 181022 - DNA, 25 bp, Saccharomyces pastorianus
accaagatccacttcaagtcgctga

SEQ ID NO: 181023 - DNA, 25 bp, Saccharomyces pastorianus
tcggagctattgcaaataaaaaccc

SEQ ID NO: 181024 - DNA, 25 bp, Saccharomyces pastorianus
ccaacgcagtggaatcgctatcgga

SEQ ID NO: 181025 - DNA, 25 bp, Saccharomyces pastorianus
gcagtggaatcgctatcggagctat

SEQ ID NO: 181026 - DNA, 25 bp, Saccharomyces pastorianus
gaccagagttttataataaggccgg

SEQ ID NO: 181027 - DNA, 25 bp, Saccharomyces pastorianus
aatggaatgcggtagagaactgcta

SEQ ID NO: 181028 - DNA, 25 bp, Saccharomyces pastorianus
tcttagccaacgcagtggaatcgct

SEQ ID NO: 181029 - DNA, 25 bp, Saccharomyces pastorianus
gttttataataaggccggatatgtg

SEQ ID NO: 181030 - DNA, 25 bp, Saccharomyces pastorianus
ataaaaacccccgaagtgatcatga

SEQ ID NO: 181031 - DNA, 25 bp, Saccharomyces pastorianus
gtgatcatgaaacgaagaccagagt

SEQ ID NO: 181032 - DNA, 25 bp, Saccharomyces pastorianus
agaaccactgcattaatggaatgcg

SEQ ID NO: 181033 - DNA, 25 bp, Saccharomyces pastorianus
atcgctatcggagctattgcaaata

SEQ ID NO: 181034 - DNA, 25 bp, Saccharomyces pastorianus
acgatgataccaagagccaacagat

SEQ ID NO: 181035 - DNA, 25 bp, Saccharomyces pastorianus
aacagatccatcacagcaatatgta

SEQ ID NO: 181036 - DNA, 25 bp, Saccharomyces pastorianus
gatccatcacagcaatatgtaacac

SEQ ID NO: 181037 - DNA, 25 bp, Saccharomyces pastorianus
gcaatatgtaacactctgcgacaag

SEQ ID NO: 181038 - DNA, 25 bp, Saccharomyces pastorianus
tcgaggaacgatgataccaagagcc

SEQ ID NO: 181039 - DNA, 25 bp, Saccharomyces pastorianus
aggaacgatgataccaagagccaac

SEQ ID NO: 181040 - DNA, 25 bp, Saccharomyces pastorianus
acagcaatatgtaacactctgcgac

SEQ ID NO: 181041 - DNA, 25 bp, Saccharomyces pastorianus
ggaacgatgataccaagagccaaca

SEQ ID NO: 181042 - DNA, 25 bp, Saccharomyces pastorianus
atcacagcaatatgtaacactctgc

SEQ ID NO: 181043 - DNA, 25 bp, Saccharomyces pastorianus
gaacgatgataccaagagccaacag

SEQ ID NO: 181044 - DNA, 25 bp, Saccharomyces pastorianus
gccaacagatccatcacagcaatat

SEQ ID NO: 181045 - DNA, 25 bp, Saccharomyces pastorianus
aagggccgcgtttaatagtcacatc

SEQ ID NO: 181046 - DNA, 25 bp, Saccharomyces pastorianus
atatgtactacgcttctgttccttt

SEQ ID NO: 181047 - DNA, 25 bp, Saccharomyces pastorianus
attcgatagacttttcgcggcacgt

SEQ ID NO: 181048 - DNA, 25 bp, Saccharomyces pastorianus
atgcctattcgatagacttttcgcg

SEQ ID NO: 181049 - DNA, 25 bp, Saccharomyces pastorianus
ttctattgttctcgaatgcctattc

SEQ ID NO: 181050 - DNA, 25 bp, Saccharomyces pastorianus
gagaaaagacctcaaagggccgcgt

SEQ ID NO: 181051 - DNA, 25 bp, Saccharomyces pastorianus
gttccttttctattgttctcgaatg

SEQ ID NO: 181052 - DNA, 25 bp, Saccharomyces pastorianus
gaatacgtgtctctaaacgcagatg

SEQ ID NO: 181053 - DNA, 25 bp, Saccharomyces pastorianus
ggtgcgaaatgataataccactgaa

SEQ ID NO: 181054 - DNA, 25 bp, Saccharomyces pastorianus
aaacgggtctatgcataatatgtac

SEQ ID NO: 181055 - DNA, 25 bp, Saccharomyces pastorianus
gcagatcatacttatttgagcgaaa

SEQ ID NO: 181056 - DNA, 25 bp, Saccharomyces pastorianus
caccattgagaaatgggtgaatttt

SEQ ID NO: 181057 - DNA, 25 bp, Saccharomyces pastorianus
tacaccattgagaaatgggtgaatt

SEQ ID NO: 181058 - DNA, 25 bp, Saccharomyces pastorianus
cattgagaaatgggtgaattttgag

SEQ ID NO: 181059 - DNA, 25 bp, Saccharomyces pastorianus
agaaatgggtgaattttgagataat

SEQ ID NO: 181060 - DNA, 25 bp, Saccharomyces pastorianus
tgagaaatgggtgaattttgagata

SEQ ID NO: 181061 - DNA, 25 bp, Saccharomyces pastorianus
accattgagaaatgggtgaattttg

SEQ ID NO: 181062 - DNA, 25 bp, Saccharomyces pastorianus
acaccattgagaaatgggtgaattt

SEQ ID NO: 181063 - DNA, 25 bp, Saccharomyces pastorianus
ttgagaaatgggtgaattttgagat

SEQ ID NO: 181064 - DNA, 25 bp, Saccharomyces pastorianus
ccattgagaaatgggtgaattttga

SEQ ID NO: 181065 - DNA, 25 bp, Saccharomyces pastorianus
gaaatgggtgaattttgagataatt

SEQ ID NO: 181066 - DNA, 25 bp, Saccharomyces pastorianus
aaatgggtgaattttgagataattg

SEQ ID NO: 181067 - DNA, 25 bp, Saccharomyces pastorianus
agttgtgttgtcattcctttggatt

SEQ ID NO: 181068 - DNA, 25 bp, Saccharomyces pastorianus
tattgtgggaaacctggctgttgtc

SEQ ID NO: 181069 - DNA, 25 bp, Saccharomyces pastorianus
taactatattatttggtgcgccatt

SEQ ID NO: 181070 - DNA, 25 bp, Saccharomyces pastorianus
gttgctaagttttttgattcctaca

SEQ ID NO: 181071 - DNA, 25 bp, Saccharomyces pastorianus
ttgttggaggttatttgggcgcttt

SEQ ID NO: 181072 - DNA, 25 bp, Saccharomyces pastorianus
gaattggccaattcctattgttgtt

SEQ ID NO: 181073 - DNA, 25 bp, Saccharomyces pastorianus
attttgcatttttagcataccctgc

SEQ ID NO: 181074 - DNA, 25 bp, Saccharomyces pastorianus
gcactactttattactacgtttttg

SEQ ID NO: 181075 - DNA, 25 bp, Saccharomyces pastorianus
gttgagctttcccacaatgttatta

SEQ ID NO: 181076 - DNA, 25 bp, Saccharomyces pastorianus
gattcctacacaagttgcttattta

SEQ ID NO: 181077 - DNA, 25 bp, Saccharomyces pastorianus
ttacatttttgttgagctttcccac

SEQ ID NO: 181078 - DNA, 25 bp, Saccharomyces pastorianus
agtggttgacctacagcgatgtctt

SEQ ID NO: 181079 - DNA, 25 bp, Saccharomyces pastorianus
atgggcaccttcaatctcttatgga

SEQ ID NO: 181080 - DNA, 25 bp, Saccharomyces pastorianus
tcatggccactcttacgcaattgtt

SEQ ID NO: 181081 - DNA, 25 bp, Saccharomyces pastorianus
ggcaggaatctataccccatgcata

SEQ ID NO: 181082 - DNA, 25 bp, Saccharomyces pastorianus
gttaccaatctctggcaggaatcta

SEQ ID NO: 181083 - DNA, 25 bp, Saccharomyces pastorianus
atctcttatggattcaatgcgtaaa

SEQ ID NO: 181084 - DNA, 25 bp, Saccharomyces pastorianus
aaacagacactcacttttgaacggg

SEQ ID NO: 181085 - DNA, 25 bp, Saccharomyces pastorianus
tacgcaattgtttcacctggtaact

SEQ ID NO: 181086 - DNA, 25 bp, Saccharomyces pastorianus
gtatctttgtattcatcatgggcac

SEQ ID NO: 181087 - DNA, 25 bp, Saccharomyces pastorianus
ggtgatgcaatccatcatggccact

SEQ ID NO: 181088 - DNA, 25 bp, Saccharomyces pastorianus
acctggtaactcgtatggctatctt

SEQ ID NO: 181089 - DNA, 25 bp, Saccharomyces pastorianus
aagtcgtgaagattggctccatgca

SEQ ID NO: 181090 - DNA, 25 bp, Saccharomyces pastorianus
gcgaactgccccacttaaaaatcaa

SEQ ID NO: 181091 - DNA, 25 bp, Saccharomyces pastorianus
gagaatactatctgctaccaagtag

SEQ ID NO: 181092 - DNA, 25 bp, Saccharomyces pastorianus
gtacccgctcttcgtcaaagatata

SEQ ID NO: 181093 - DNA, 25 bp, Saccharomyces pastorianus
aacggcaccaagttgttgaatgtca

SEQ ID NO: 181094 - DNA, 25 bp, Saccharomyces pastorianus
gaaagcccagcaacaaggcatcttt

SEQ ID NO: 181095 - DNA, 25 bp, Saccharomyces pastorianus
atctactcagggtgctggcgaactg

SEQ ID NO: 181096 - DNA, 25 bp, Saccharomyces pastorianus
atccattgttgatgccagaaagccc

SEQ ID NO: 181097 - DNA, 25 bp, Saccharomyces pastorianus
aagggcttatatcctggctcaacgt

SEQ ID NO: 181098 - DNA, 25 bp, Saccharomyces pastorianus
agattctagatcatctgtacccgct

SEQ ID NO: 181099 - DNA, 25 bp, Saccharomyces pastorianus
attggctccatgcacctcaagggtg

SEQ ID NO: 181100 - DNA, 25 bp, Saccharomyces pastorianus
gacttctctgctggtcatctagtta

SEQ ID NO: 181101 - DNA, 25 bp, Saccharomyces pastorianus
tgactctcaccatgatgacgttacc

SEQ ID NO: 181102 - DNA, 25 bp, Saccharomyces pastorianus
gggaattgacgctgctgtatacata

SEQ ID NO: 181103 - DNA, 25 bp, Saccharomyces pastorianus
aaggtcatcggtagcgacttctctg

SEQ ID NO: 181104 - DNA, 25 bp, Saccharomyces pastorianus
ggcgagcgaaactgcaatcaatgat

SEQ ID NO: 181105 - DNA, 25 bp, Saccharomyces pastorianus
tagcgcctctatcgacgcggtgaaa

SEQ ID NO: 181106 - DNA, 25 bp, Saccharomyces pastorianus
agattctcgtcatggtctattggcc

SEQ ID NO: 181107 - DNA, 25 bp, Saccharomyces pastorianus
ggtcatctagttagtagcgcctcta

SEQ ID NO: 181108 - DNA, 25 bp, Saccharomyces pastorianus
aaatttcatccttctgacgtcaata

SEQ ID NO: 181109 - DNA, 25 bp, Saccharomyces pastorianus
tattggcctgtggtaccgaattgca

SEQ ID NO: 181110 - DNA, 25 bp, Saccharomyces pastorianus
aaggacgaatgaccgcattgctcaa

SEQ ID NO: 181111 - DNA, 25 bp, Saccharomyces pastorianus
agtttgccgctctgtacttcggtgg

SEQ ID NO: 181112 - DNA, 25 bp, Saccharomyces pastorianus
aacaaattgaattcagggctccaaa

SEQ ID NO: 181113 - DNA, 25 bp, Saccharomyces pastorianus
agggcgagatgcagtttgccgctct

SEQ ID NO: 181114 - DNA, 25 bp, Saccharomyces pastorianus
gcgagatgcagtttgccgctctgta

SEQ ID NO: 181115 - DNA, 25 bp, Saccharomyces pastorianus
atcactgaaaagtacgagggcgaga

SEQ ID NO: 181116 - DNA, 25 bp, Saccharomyces pastorianus
tgaattcagggctccaaaagacgat

SEQ ID NO: 181117 - DNA, 25 bp, Saccharomyces pastorianus
gagatgcagtttgccgctctgtact

SEQ ID NO: 181118 - DNA, 25 bp, Saccharomyces pastorianus
tgtacttcggtggtaaacaaattga

SEQ ID NO: 181119 - DNA, 25 bp, Saccharomyces pastorianus
cgctctgtacttcggtggtaaacaa

SEQ ID NO: 181120 - DNA, 25 bp, Saccharomyces pastorianus
aaacatttagctatcactgaaaagt

SEQ ID NO: 181121 - DNA, 25 bp, Saccharomyces pastorianus
tgccgctctgtacttcggtggtaaa

SEQ ID NO: 181122 - DNA, 25 bp, Saccharomyces pastorianus
tgaaaaacttccagtttctcgagcg

SEQ ID NO: 181123 - DNA, 25 bp, Saccharomyces pastorianus
cctctacaacgaccgtatcgtcttt

SEQ ID NO: 181124 - DNA, 25 bp, Saccharomyces pastorianus
acttccagtttctcgagcgcctcta

SEQ ID NO: 181125 - DNA, 25 bp, Saccharomyces pastorianus
gctgaaaaacttccagtttctcgag

SEQ ID NO: 181126 - DNA, 25 bp, Saccharomyces pastorianus
tccagtttctcgagcgcctctacaa

SEQ ID NO: 181127 - DNA, 25 bp, Saccharomyces pastorianus
gagcgcctctacaacgaccgtatcg

SEQ ID NO: 181128 - DNA, 25 bp, Saccharomyces pastorianus
acgctgaaaaacttccagtttctcg

SEQ ID NO: 181129 - DNA, 25 bp, Saccharomyces pastorianus
aaacttccagtttctcgagcgcctc

SEQ ID NO: 181130 - DNA, 25 bp, Saccharomyces pastorianus
aaaacttccagtttctcgagcgcct

SEQ ID NO: 181131 - DNA, 25 bp, Saccharomyces pastorianus
agcgcctctacaacgaccgtatcgt

SEQ ID NO: 181132 - DNA, 25 bp, Saccharomyces pastorianus
tcgagcgcctctacaacgaccgtat

SEQ ID NO: 181133 - DNA, 25 bp, Saccharomyces pastorianus
tattatactagagattctcctcatg

SEQ ID NO: 181134 - DNA, 25 bp, Saccharomyces pastorianus
atatattatactagagattctcctc

SEQ ID NO: 181135 - DNA, 25 bp, Saccharomyces pastorianus
atattatactagagattctcctcat

SEQ ID NO: 181136 - DNA, 25 bp, Saccharomyces pastorianus
atatatattatactagagattctcc

SEQ ID NO: 181137 - DNA, 25 bp, Saccharomyces pastorianus
gatctttgggattccattatttctt

SEQ ID NO: 181138 - DNA, 25 bp, Saccharomyces pastorianus
tatattatactagagattctcctca

SEQ ID NO: 181139 - DNA, 25 bp, Saccharomyces pastorianus
tgggattccattatttcttaatgtt

SEQ ID NO: 181140 - DNA, 25 bp, Saccharomyces pastorianus
ctttgggattccattatttcttaat

SEQ ID NO: 181141 - DNA, 25 bp, Saccharomyces pastorianus
atctttgggattccattatttctta

SEQ ID NO: 181142 - DNA, 25 bp, Saccharomyces pastorianus
tctttgggattccattatttcttaa

SEQ ID NO: 181143 - DNA, 25 bp, Saccharomyces pastorianus
tatatattatactagagattctcct

SEQ ID NO: 181144 - DNA, 25 bp, Saccharomyces pastorianus
aaaggaccatttccgtgcatccgta

SEQ ID NO: 181145 - DNA, 25 bp, Saccharomyces pastorianus
atggcgcggttccaatcttcagaaa

SEQ ID NO: 181146 - DNA, 25 bp, Saccharomyces pastorianus
atctgcatgtgctgtgtgtgatggc

SEQ ID NO: 181147 - DNA, 25 bp, Saccharomyces pastorianus
gtgatggcaagctactggacgtgtt

SEQ ID NO: 181148 - DNA, 25 bp, Saccharomyces pastorianus
gaacgggctgttctatgcaatcggc

SEQ ID NO: 181149 - DNA, 25 bp, Saccharomyces pastorianus
agacaagctgttacctctgctggat

SEQ ID NO: 181150 - DNA, 25 bp, Saccharomyces pastorianus
taacacggtcgcattggaagccaaa

SEQ ID NO: 181151 - DNA, 25 bp, Saccharomyces pastorianus
ctgttattggtggtggcgattctgc

SEQ ID NO: 181152 - DNA, 25 bp, Saccharomyces pastorianus
ggacgctataattttggccaccggt

SEQ ID NO: 181153 - DNA, 25 bp, Saccharomyces pastorianus
atcatctctaacttctgtgccaggg

SEQ ID NO: 181154 - DNA, 25 bp, Saccharomyces pastorianus
gtacattaaaactgtgcccggatca

SEQ ID NO: 181155 - DNA, 25 bp, Saccharomyces pastorianus
ggcacactaacattgaatccataat

SEQ ID NO: 181156 - DNA, 25 bp, Saccharomyces pastorianus
ataggcacactaacattgaatccat

SEQ ID NO: 181157 - DNA, 25 bp, Saccharomyces pastorianus
gaataggcacactaacattgaatcc

SEQ ID NO: 181158 - DNA, 25 bp, Saccharomyces pastorianus
attcacgacctggttcatatcgacg

SEQ ID NO: 181159 - DNA, 25 bp, Saccharomyces pastorianus
taattcacgacctggttcatatcga

SEQ ID NO: 181160 - DNA, 25 bp, Saccharomyces pastorianus
atccataattcacgacctggttcat

SEQ ID NO: 181161 - DNA, 25 bp, Saccharomyces pastorianus
gaatccataattcacgacctggttc

SEQ ID NO: 181162 - DNA, 25 bp, Saccharomyces pastorianus
tcacgacctggttcatatcgacgag

SEQ ID NO: 181163 - DNA, 25 bp, Saccharomyces pastorianus
acgacctggttcatatcgacgagga

SEQ ID NO: 181164 - DNA, 25 bp, Saccharomyces pastorianus
ccataattcacgacctggttcatat

SEQ ID NO: 181165 - DNA, 25 bp, Saccharomyces pastorianus
ttgaatccataattcacgacctggt

SEQ ID NO: 181166 - DNA, 25 bp, Saccharomyces pastorianus
atttgcttattggtacagggtccac

SEQ ID NO: 181167 - DNA, 25 bp, Saccharomyces pastorianus
accagagttttctaccttcaatatg

SEQ ID NO: 181168 - DNA, 25 bp, Saccharomyces pastorianus
gagacttagtgacattgccttcatc

SEQ ID NO: 181169 - DNA, 25 bp, Saccharomyces pastorianus
atcactgcccttgattactgctggt

SEQ ID NO: 181170 - DNA, 25 bp, Saccharomyces pastorianus
taaatgctggtggtaatcccatagt

SEQ ID NO: 181171 - DNA, 25 bp, Saccharomyces pastorianus
gctactgatcaggttcatttgctta

SEQ ID NO: 181172 - DNA, 25 bp, Saccharomyces pastorianus
gatctacccataacacaaagtcgcc

SEQ ID NO: 181173 - DNA, 25 bp, Saccharomyces pastorianus
gcgaggagatcttttggcaatgcca

SEQ ID NO: 181174 - DNA, 25 bp, Saccharomyces pastorianus
atcccatagtagtgaatccctcgtc

SEQ ID NO: 181175 - DNA, 25 bp, Saccharomyces pastorianus
ttactgctggttttgctactgatca

SEQ ID NO: 181176 - DNA, 25 bp, Saccharomyces pastorianus
gggtccacggactcagtaagcgttt

SEQ ID NO: 181177 - DNA, 25 bp, Saccharomyces pastorianus
gagcctttgaacgagcatttagaaa

SEQ ID NO: 181178 - DNA, 25 bp, Saccharomyces pastorianus
cacctcatctggttgagctggttta

SEQ ID NO: 181179 - DNA, 25 bp, Saccharomyces pastorianus
ttaatcatttccgtaaagcccaggg

SEQ ID NO: 181180 - DNA, 25 bp, Saccharomyces pastorianus
gccgtcgcggtatcacagtacatgg

SEQ ID NO: 181181 - DNA, 25 bp, Saccharomyces pastorianus
gaatacttctactctacattgcgta

SEQ ID NO: 181182 - DNA, 25 bp, Saccharomyces pastorianus
atagagtttccggtacttgctaacg

SEQ ID NO: 181183 - DNA, 25 bp, Saccharomyces pastorianus
gcgcggctttatttacaacgtagga

SEQ ID NO: 181184 - DNA, 25 bp, Saccharomyces pastorianus
acggaaggatgtcacgccacctcat

SEQ ID NO: 181185 - DNA, 25 bp, Saccharomyces pastorianus
agttcaaaccattgtacactcattt

SEQ ID NO: 181186 - DNA, 25 bp, Saccharomyces pastorianus
atatacaatatttagccgtcgcggt

SEQ ID NO: 181187 - DNA, 25 bp, Saccharomyces pastorianus
ttgctaacggcaaaaggcgcggctt

SEQ ID NO: 181188 - DNA, 25 bp, Saccharomyces pastorianus
tcatgtccgtcatggtcgggaaaaa

SEQ ID NO: 181189 - DNA, 25 bp, Saccharomyces pastorianus
gtcatgtccgtcatggtcgggaaaa

SEQ ID NO: 181190 - DNA, 25 bp, Saccharomyces pastorianus
aattgtcatgtccgtcatggtcggg

SEQ ID NO: 181191 - DNA, 25 bp, Saccharomyces pastorianus
catgtccgtcatggtcgggaaaaat

SEQ ID NO: 181192 - DNA, 25 bp, Saccharomyces pastorianus
aaattgtcatgtccgtcatggtcgg

SEQ ID NO: 181193 - DNA, 25 bp, Saccharomyces pastorianus
tgtccgtcatggtcgggaaaaatgt

SEQ ID NO: 181194 - DNA, 25 bp, Saccharomyces pastorianus
aaaattgtcatgtccgtcatggtcg

SEQ ID NO: 181195 - DNA, 25 bp, Saccharomyces pastorianus
attgtcatgtccgtcatggtcggga

SEQ ID NO: 181196 - DNA, 25 bp, Saccharomyces pastorianus
aaaaattgtcatgtccgtcatggtc

SEQ ID NO: 181197 - DNA, 25 bp, Saccharomyces pastorianus
tgtcatgtccgtcatggtcgggaaa

SEQ ID NO: 181198 - DNA, 25 bp, Saccharomyces pastorianus
ttgtcatgtccgtcatggtcgggaa

SEQ ID NO: 181199 - DNA, 25 bp, Saccharomyces pastorianus
gagagtaatagattccgtccagtca

SEQ ID NO: 181200 - DNA, 25 bp, Saccharomyces pastorianus
gtgccaacgaggacgccaatacagg

SEQ ID NO: 181201 - DNA, 25 bp, Saccharomyces pastorianus
attccgtccagtcactgacattaat

SEQ ID NO: 181202 - DNA, 25 bp, Saccharomyces pastorianus
tacaggtggcaatgctgagagtaat

SEQ ID NO: 181203 - DNA, 25 bp, Saccharomyces pastorianus
catcttttccttgtatggatcgata

SEQ ID NO: 181204 - DNA, 25 bp, Saccharomyces pastorianus
aaacatcttttccttgtatggatcg

SEQ ID NO: 181205 - DNA, 25 bp, Saccharomyces pastorianus
gtaatagattccgtccagtcactga

SEQ ID NO: 181206 - DNA, 25 bp, Saccharomyces pastorianus
caccactgatagttccaacgtcagg

SEQ ID NO: 181207 - DNA, 25 bp, Saccharomyces pastorianus
cgaggacgccaatacaggtggcaat

SEQ ID NO: 181208 - DNA, 25 bp, Saccharomyces pastorianus
gtcactgacattaataaagagccat

SEQ ID NO: 181209 - DNA, 25 bp, Saccharomyces pastorianus
tgtatggatcgatatattcttctgt

SEQ ID NO: 181210 - DNA, 25 bp, Saccharomyces pastorianus
acaaagcatgcgagaggccctgggt

SEQ ID NO: 181211 - DNA, 25 bp, Saccharomyces pastorianus
caggaagacaaagcatgcgagaggc

SEQ ID NO: 181212 - DNA, 25 bp, Saccharomyces pastorianus
agctcgccccattataatttttcca

SEQ ID NO: 181213 - DNA, 25 bp, Saccharomyces pastorianus
ggaagacaaagcatgcgagaggccc

SEQ ID NO: 181214 - DNA, 25 bp, Saccharomyces pastorianus
agacaaagcatgcgagaggccctgg

SEQ ID NO: 181215 - DNA, 25 bp, Saccharomyces pastorianus
gacaaagcatgcgagaggccctggg

SEQ ID NO: 181216 - DNA, 25 bp, Saccharomyces pastorianus
gagaggccctgggttcaattcccag

SEQ ID NO: 181217 - DNA, 25 bp, Saccharomyces pastorianus
gaagacaaagcatgcgagaggccct

SEQ ID NO: 181218 - DNA, 25 bp, Saccharomyces pastorianus
cagctcgccccattataatttttcc

SEQ ID NO: 181219 - DNA, 25 bp, Saccharomyces pastorianus
aagacaaagcatgcgagaggccctg

SEQ ID NO: 181220 - DNA, 25 bp, Saccharomyces pastorianus
aaagcatgcgagaggccctgggttc

SEQ ID NO: 181221 - DNA, 25 bp, Saccharomyces pastorianus
aaacataccttacctgcttagaaag

SEQ ID NO: 181222 - DNA, 25 bp, Saccharomyces pastorianus
tctacgcaaggtttttccagttaat

SEQ ID NO: 181223 - DNA, 25 bp, Saccharomyces pastorianus
gcggtggagataatttggcttcttc

SEQ ID NO: 181224 - DNA, 25 bp, Saccharomyces pastorianus
agaataccttctatcgcagaccaat

SEQ ID NO: 181225 - DNA, 25 bp, Saccharomyces pastorianus
gggttatatctaactcagcttatac

SEQ ID NO: 181226 - DNA, 25 bp, Saccharomyces pastorianus
cagcttatactgaacgcgggtttgt

SEQ ID NO: 181227 - DNA, 25 bp, Saccharomyces pastorianus
atcacccagcttgccgttattaatg

SEQ ID NO: 181228 - DNA, 25 bp, Saccharomyces pastorianus
gggatgcagccgatttgaaaacatt

SEQ ID NO: 181229 - DNA, 25 bp, Saccharomyces pastorianus
tgcgctaagagctttatcacatact

SEQ ID NO: 181230 - DNA, 25 bp, Saccharomyces pastorianus
ccagttaatgcaatcacccagcttg

SEQ ID NO: 181231 - DNA, 25 bp, Saccharomyces pastorianus
tttgcaaatgcatctgacggatatt

SEQ ID NO: 181232 - DNA, 25 bp, Saccharomyces pastorianus
ccttgatgatttttgaccgtgctat

SEQ ID NO: 181233 - DNA, 25 bp, Saccharomyces pastorianus
cacatattttgctggctgctgttat

SEQ ID NO: 181234 - DNA, 25 bp, Saccharomyces pastorianus
attggtcacacgctttttacacata

SEQ ID NO: 181235 - DNA, 25 bp, Saccharomyces pastorianus
tgttttactatgatggacctttcca

SEQ ID NO: 181236 - DNA, 25 bp, Saccharomyces pastorianus
gaagagatggatggccctacgttgt

SEQ ID NO: 181237 - DNA, 25 bp, Saccharomyces pastorianus
ggacctttccaattcactgacgatg

SEQ ID NO: 181238 - DNA, 25 bp, Saccharomyces pastorianus
tgtgatatcactattaccacccgct

SEQ ID NO: 181239 - DNA, 25 bp, Saccharomyces pastorianus
gcggtcctatctgtggttggattca

SEQ ID NO: 181240 - DNA, 25 bp, Saccharomyces pastorianus
caatcaagagcgctatttcccaata

SEQ ID NO: 181241 - DNA, 25 bp, Saccharomyces pastorianus
cctacgttgttgcatcctgggaaaa

SEQ ID NO: 181242 - DNA, 25 bp, Saccharomyces pastorianus
ggtttgttagccctgatgttttact

SEQ ID NO: 181243 - DNA, 25 bp, Saccharomyces pastorianus
cattaattattgaaccaaaaccaag

SEQ ID NO: 181244 - DNA, 25 bp, Saccharomyces pastorianus
gaaaaacatccactaagaaagacag

SEQ ID NO: 181245 - DNA, 25 bp, Saccharomyces pastorianus
gaaacaataccaactatcattaatt

SEQ ID NO: 181246 - DNA, 25 bp, Saccharomyces pastorianus
gaaagtcgttccgaattccaattcg

SEQ ID NO: 181247 - DNA, 25 bp, Saccharomyces pastorianus
aatccagggatgaccaaaccgatga

SEQ ID NO: 181248 - DNA, 25 bp, Saccharomyces pastorianus
aaaatccagggatgaccaaaccgat

SEQ ID NO: 181249 - DNA, 25 bp, Saccharomyces pastorianus
agacagattttcaaaattccaatta

SEQ ID NO: 181250 - DNA, 25 bp, Saccharomyces pastorianus
ataaatcacaagaaaaatccaggga

SEQ ID NO: 181251 - DNA, 25 bp, Saccharomyces pastorianus
gaccaaaccgatgaaggaaaaacat

SEQ ID NO: 181252 - DNA, 25 bp, Saccharomyces pastorianus
acatccactaagaaagacagatttt

SEQ ID NO: 181253 - DNA, 25 bp, Saccharomyces pastorianus
aacatcccccatattgagaaacaat

SEQ ID NO: 181254 - DNA, 25 bp, Saccharomyces pastorianus
tactttagtggctatccagctgagc

SEQ ID NO: 181255 - DNA, 25 bp, Saccharomyces pastorianus
cttgaacgcctctccattaaagttt

SEQ ID NO: 181256 - DNA, 25 bp, Saccharomyces pastorianus
cttggctaacgggtatcatgctgtt

SEQ ID NO: 181257 - DNA, 25 bp, Saccharomyces pastorianus
ggttcatgttccttccattgagaac

SEQ ID NO: 181258 - DNA, 25 bp, Saccharomyces pastorianus
acattattatctttggtggccaagc

SEQ ID NO: 181259 - DNA, 25 bp, Saccharomyces pastorianus
agtctttgaactcttcttcttcatg

SEQ ID NO: 181260 - DNA, 25 bp, Saccharomyces pastorianus
ttgtttttgcacacttaccatcacg

SEQ ID NO: 181261 - DNA, 25 bp, Saccharomyces pastorianus
ccagctgagcaattcgagtttattc

SEQ ID NO: 181262 - DNA, 25 bp, Saccharomyces pastorianus
ttgccgaccagttccagtctttgaa

SEQ ID NO: 181263 - DNA, 25 bp, Saccharomyces pastorianus
tcacaacggtctattctggtctatc

SEQ ID NO: 181264 - DNA, 25 bp, Saccharomyces pastorianus
ggttcctatggtttatcacaacggt

SEQ ID NO: 181265 - DNA, 25 bp, Saccharomyces pastorianus
acgagaagacatggccttggtgaca

SEQ ID NO: 181266 - DNA, 25 bp, Saccharomyces pastorianus
aagacatggccttggtgacaactct

SEQ ID NO: 181267 - DNA, 25 bp, Saccharomyces pastorianus
gacatggccttggtgacaactctct

SEQ ID NO: 181268 - DNA, 25 bp, Saccharomyces pastorianus
acatggccttggtgacaactctctt

SEQ ID NO: 181269 - DNA, 25 bp, Saccharomyces pastorianus
tgacaactctcttcaaaccaacttc

SEQ ID NO: 181270 - DNA, 25 bp, Saccharomyces pastorianus
atggccttggtgacaactctcttca

SEQ ID NO: 181271 - DNA, 25 bp, Saccharomyces pastorianus
agaagacatggccttggtgacaact

SEQ ID NO: 181272 - DNA, 25 bp, Saccharomyces pastorianus
gtgacaactctcttcaaaccaactt

SEQ ID NO: 181273 - DNA, 25 bp, Saccharomyces pastorianus
gaagacatggccttggtgacaactc

SEQ ID NO: 181274 - DNA, 25 bp, Saccharomyces pastorianus
aacgagaagacatggccttggtgac

SEQ ID NO: 181275 - DNA, 25 bp, Saccharomyces pastorianus
agacatggccttggtgacaactctc

SEQ ID NO: 181276 - DNA, 25 bp, Saccharomyces pastorianus
ggaagtttgccctttagcattaaga

SEQ ID NO: 181277 - DNA, 25 bp, Saccharomyces pastorianus
aggcgccgagaaggacattcaagtt

SEQ ID NO: 181278 - DNA, 25 bp, Saccharomyces pastorianus
ggcctgctcctttaatgatcggtat

SEQ ID NO: 181279 - DNA, 25 bp, Saccharomyces pastorianus
aatcttcgcctctggtattatgaaa

SEQ ID NO: 181280 - DNA, 25 bp, Saccharomyces pastorianus
ttacaatggatttggcctgctcctt

SEQ ID NO: 181281 - DNA, 25 bp, Saccharomyces pastorianus
gaattttgagtggtaaaggcgccga

SEQ ID NO: 181282 - DNA, 25 bp, Saccharomyces pastorianus
gcacttggtttgttaactgcttata

SEQ ID NO: 181283 - DNA, 25 bp, Saccharomyces pastorianus
gggtcgctgaggcaagaaaatcttt

SEQ ID NO: 181284 - DNA, 25 bp, Saccharomyces pastorianus
atatctttatcctctactactgtaa

SEQ ID NO: 181285 - DNA, 25 bp, Saccharomyces pastorianus
tatgcttcggaagtttgccctttag

SEQ ID NO: 181286 - DNA, 25 bp, Saccharomyces pastorianus
ttatttggtcaaatcttcgcctctg

SEQ ID NO: 181287 - DNA, 25 bp, Saccharomyces pastorianus
gcaagccgtccatttcttagtaata

SEQ ID NO: 181288 - DNA, 25 bp, Saccharomyces pastorianus
aagccgtccatttcttagtaataag

SEQ ID NO: 181289 - DNA, 25 bp, Saccharomyces pastorianus
caagcaagccgtccatttcttagta

SEQ ID NO: 181290 - DNA, 25 bp, Saccharomyces pastorianus
caagccgtccatttcttagtaataa

SEQ ID NO: 181291 - DNA, 25 bp, Saccharomyces pastorianus
acaagcaagccgtccatttcttagt

SEQ ID NO: 181292 - DNA, 25 bp, Saccharomyces pastorianus
agcaagccgtccatttcttagtaat

SEQ ID NO: 181293 - DNA, 25 bp, Saccharomyces pastorianus
tacaagcaagccgtccatttcttag

SEQ ID NO: 181294 - DNA, 25 bp, Saccharomyces pastorianus
cagtacaagcaagccgtccatttct

SEQ ID NO: 181295 - DNA, 25 bp, Saccharomyces pastorianus
aagcaagccgtccatttcttagtaa

SEQ ID NO: 181296 - DNA, 25 bp, Saccharomyces pastorianus
acagtacaagcaagccgtccatttc

SEQ ID NO: 181297 - DNA, 25 bp, Saccharomyces pastorianus
agccgtccatttcttagtaataaga

SEQ ID NO: 181298 - DNA, 25 bp, Saccharomyces pastorianus
atctattacattatgggtggtatgt

SEQ ID NO: 181299 - DNA, 25 bp, Saccharomyces pastorianus
ctattacattatgggtggtatgttg

SEQ ID NO: 181300 - DNA, 25 bp, Saccharomyces pastorianus
cattatgggtggtatgttggaataa

SEQ ID NO: 181301 - DNA, 25 bp, Saccharomyces pastorianus
tctattacattatgggtggtatgtt

SEQ ID NO: 181302 - DNA, 25 bp, Saccharomyces pastorianus
cattagatctattacattatgggtg

SEQ ID NO: 181303 - DNA, 25 bp, Saccharomyces pastorianus
ttagatctattacattatgggtggt

SEQ ID NO: 181304 - DNA, 25 bp, Saccharomyces pastorianus
attatgggtggtatgttggaataaa

SEQ ID NO: 181305 - DNA, 25 bp, Saccharomyces pastorianus
tcattagatctattacattatgggt

SEQ ID NO: 181306 - DNA, 25 bp, Saccharomyces pastorianus
gatctattacattatgggtggtatg

SEQ ID NO: 181307 - DNA, 25 bp, Saccharomyces pastorianus
ttcattagatctattacattatggg

SEQ ID NO: 181308 - DNA, 25 bp, Saccharomyces pastorianus
attagatctattacattatgggtgg

SEQ ID NO: 181309 - DNA, 25 bp, Saccharomyces pastorianus
gcataggaagccaagaaactagaaa

SEQ ID NO: 181310 - DNA, 25 bp, Saccharomyces pastorianus
cataggaagccaagaaactagaaaa

SEQ ID NO: 181311 - DNA, 25 bp, Saccharomyces pastorianus
aagaaataaagattgcagcacctga

SEQ ID NO: 181312 - DNA, 25 bp, Saccharomyces pastorianus
aaaagaaataaagattgcagcacct

SEQ ID NO: 181313 - DNA, 25 bp, Saccharomyces pastorianus
tttagcataggaagccaagaaacta

SEQ ID NO: 181314 - DNA, 25 bp, Saccharomyces pastorianus
atttagcataggaagccaagaaact

SEQ ID NO: 181315 - DNA, 25 bp, Saccharomyces pastorianus
gatttagcataggaagccaagaaac

SEQ ID NO: 181316 - DNA, 25 bp, Saccharomyces pastorianus
ggatttagcataggaagccaagaaa

SEQ ID NO: 181317 - DNA, 25 bp, Saccharomyces pastorianus
tagcataggaagccaagaaactaga

SEQ ID NO: 181318 - DNA, 25 bp, Saccharomyces pastorianus
agcataggaagccaagaaactagaa

SEQ ID NO: 181319 - DNA, 25 bp, Saccharomyces pastorianus
ttagcataggaagccaagaaactag

SEQ ID NO: 181320 - DNA, 25 bp, Saccharomyces pastorianus
cattcacaacgatctttgcagcaac

SEQ ID NO: 181321 - DNA, 25 bp, Saccharomyces pastorianus
tcacaacgatctttgcagcaacaac

SEQ ID NO: 181322 - DNA, 25 bp, Saccharomyces pastorianus
attcacaacgatctttgcagcaaca

SEQ ID NO: 181323 - DNA, 25 bp, Saccharomyces pastorianus
taaccattcacaacgatctttgcag

SEQ ID NO: 181324 - DNA, 25 bp, Saccharomyces pastorianus
caacgatctttgcagcaacaacagc

SEQ ID NO: 181325 - DNA, 25 bp, Saccharomyces pastorianus
ccattcacaacgatctttgcagcaa

SEQ ID NO: 181326 - DNA, 25 bp, Saccharomyces pastorianus
accattcacaacgatctttgcagca

SEQ ID NO: 181327 - DNA, 25 bp, Saccharomyces pastorianus
ttcacaacgatctttgcagcaacaa

SEQ ID NO: 181328 - DNA, 25 bp, Saccharomyces pastorianus
ctaaccattcacaacgatctttgca

SEQ ID NO: 181329 - DNA, 25 bp, Saccharomyces pastorianus
acaacgatctttgcagcaacaacag

SEQ ID NO: 181330 - DNA, 25 bp, Saccharomyces pastorianus
aaccattcacaacgatctttgcagc

SEQ ID NO: 181331 - DNA, 25 bp, Saccharomyces pastorianus
catgcaaatcgttcttttgttctga

SEQ ID NO: 181332 - DNA, 25 bp, Saccharomyces pastorianus
agaatcccttaatctattgctaaaa

SEQ ID NO: 181333 - DNA, 25 bp, Saccharomyces pastorianus
cttcagtaatggtcacactgccctt

SEQ ID NO: 181334 - DNA, 25 bp, Saccharomyces pastorianus
gcagctttcacattcactttctgaa

SEQ ID NO: 181335 - DNA, 25 bp, Saccharomyces pastorianus
atttagcttcttttcagacgcggca

SEQ ID NO: 181336 - DNA, 25 bp, Saccharomyces pastorianus
agcttgatatgcgaccctttattaa

SEQ ID NO: 181337 - DNA, 25 bp, Saccharomyces pastorianus
agacgcggcaagtccttcagtaatg

SEQ ID NO: 181338 - DNA, 25 bp, Saccharomyces pastorianus
tgaaaactcccctcatttagattac

SEQ ID NO: 181339 - DNA, 25 bp, Saccharomyces pastorianus
cagctgctcagttgggatgggtaat

SEQ ID NO: 181340 - DNA, 25 bp, Saccharomyces pastorianus
tgatgtggatgctgcgcagctttca

SEQ ID NO: 181341 - DNA, 25 bp, Saccharomyces pastorianus
gattaccaccaaccagtaaacagtt

SEQ ID NO: 181342 - DNA, 25 bp, Saccharomyces pastorianus
ggagaacttctagtactttctacat

SEQ ID NO: 181343 - DNA, 25 bp, Saccharomyces pastorianus
tattattgccttattaaaaatggaa

SEQ ID NO: 181344 - DNA, 25 bp, Saccharomyces pastorianus
tgccttattaaaaatggaatcccaa

SEQ ID NO: 181345 - DNA, 25 bp, Saccharomyces pastorianus
tattgccttattaaaaatggaatcc

SEQ ID NO: 181346 - DNA, 25 bp, Saccharomyces pastorianus
tctagtactttctacatacctaata

SEQ ID NO: 181347 - DNA, 25 bp, Saccharomyces pastorianus
atattattgccttattaaaaatgga

SEQ ID NO: 181348 - DNA, 25 bp, Saccharomyces pastorianus
ttattgccttattaaaaatggaatc

SEQ ID NO: 181349 - DNA, 25 bp, Saccharomyces pastorianus
aacttctagtactttctacatacct

SEQ ID NO: 181350 - DNA, 25 bp, Saccharomyces pastorianus
attattgccttattaaaaatggaat

SEQ ID NO: 181351 - DNA, 25 bp, Saccharomyces pastorianus
cttttatggattcctaaatcctcga

SEQ ID NO: 181352 - DNA, 25 bp, Saccharomyces pastorianus
ttgccttattaaaaatggaatccca

SEQ ID NO: 181353 - DNA, 25 bp, Saccharomyces pastorianus
aattggcaagcatctcacaaaggga

SEQ ID NO: 181354 - DNA, 25 bp, Saccharomyces pastorianus
gagcttttataccactcatggagat

SEQ ID NO: 181355 - DNA, 25 bp, Saccharomyces pastorianus
caaagctatttggtgcagtgaaaaa

SEQ ID NO: 181356 - DNA, 25 bp, Saccharomyces pastorianus
gcggtatcggcagtacgtttagttt

SEQ ID NO: 181357 - DNA, 25 bp, Saccharomyces pastorianus
ttaagagacgccagcggtatcggca

SEQ ID NO: 181358 - DNA, 25 bp, Saccharomyces pastorianus
cgctgccttttcagttggtcttata

SEQ ID NO: 181359 - DNA, 25 bp, Saccharomyces pastorianus
ccatgcttttggatactacaggaga

SEQ ID NO: 181360 - DNA, 25 bp, Saccharomyces pastorianus
gaaatattgttttaccgctgccttt

SEQ ID NO: 181361 - DNA, 25 bp, Saccharomyces pastorianus
gaccatgatcgggacgttcaatatc

SEQ ID NO: 181362 - DNA, 25 bp, Saccharomyces pastorianus
gcgtcgttacatgagcttttatacc

SEQ ID NO: 181363 - DNA, 25 bp, Saccharomyces pastorianus
gaatagacattcttcatgctggtaa

SEQ ID NO: 181364 - DNA, 25 bp, Saccharomyces pastorianus
ttattgagctcattcaaggcgtagg

SEQ ID NO: 181365 - DNA, 25 bp, Saccharomyces pastorianus
gagctcattcaaggcgtagggagac

SEQ ID NO: 181366 - DNA, 25 bp, Saccharomyces pastorianus
aggcgtagggagactaagagatggg

SEQ ID NO: 181367 - DNA, 25 bp, Saccharomyces pastorianus
ttgagctcattcaaggcgtagggag

SEQ ID NO: 181368 - DNA, 25 bp, Saccharomyces pastorianus
catattattgagctcattcaaggcg

SEQ ID NO: 181369 - DNA, 25 bp, Saccharomyces pastorianus
cctctgttatctattatctagaaaa

SEQ ID NO: 181370 - DNA, 25 bp, Saccharomyces pastorianus
ctcattcaaggcgtagggagactaa

SEQ ID NO: 181371 - DNA, 25 bp, Saccharomyces pastorianus
attgagctcattcaaggcgtaggga

SEQ ID NO: 181372 - DNA, 25 bp, Saccharomyces pastorianus
cattcaaggcgtagggagactaaga

SEQ ID NO: 181373 - DNA, 25 bp, Saccharomyces pastorianus
tattgagctcattcaaggcgtaggg

SEQ ID NO: 181374 - DNA, 25 bp, Saccharomyces pastorianus
gggcctctgttatctattatctaga

SEQ ID NO: 181375 - DNA, 25 bp, Saccharomyces pastorianus
aatattctatgattccaagggcggt

SEQ ID NO: 181376 - DNA, 25 bp, Saccharomyces pastorianus
gcgcccaagtcgttttgcattgtat

SEQ ID NO: 181377 - DNA, 25 bp, Saccharomyces pastorianus
tgcattgtattctaggtcactcgga

SEQ ID NO: 181378 - DNA, 25 bp, Saccharomyces pastorianus
atgcagcgatggatgtcctgactgt

SEQ ID NO: 181379 - DNA, 25 bp, Saccharomyces pastorianus
taagtacgggtctggcttgtgtgtt

SEQ ID NO: 181380 - DNA, 25 bp, Saccharomyces pastorianus
aagcgaccagctagattaatattct

SEQ ID NO: 181381 - DNA, 25 bp, Saccharomyces pastorianus
gtatgttaccgcgatttatagtggc

SEQ ID NO: 181382 - DNA, 25 bp, Saccharomyces pastorianus
ggtccagagccaaatatgccagaga

SEQ ID NO: 181383 - DNA, 25 bp, Saccharomyces pastorianus
gagactgttattcctgtgtcagagc

SEQ ID NO: 181384 - DNA, 25 bp, Saccharomyces pastorianus
gaatagaagaatgcccatgcagcga

SEQ ID NO: 181385 - DNA, 25 bp, Saccharomyces pastorianus
ggaaaacagcctggtcctgtcgaaa

SEQ ID NO: 181386 - DNA, 25 bp, Saccharomyces pastorianus
tatatatctgagagagtttacggtg

SEQ ID NO: 181387 - DNA, 25 bp, Saccharomyces pastorianus
gcagcagactccttcttttctgtta

SEQ ID NO: 181388 - DNA, 25 bp, Saccharomyces pastorianus
cagactccttcttttctgttatgct

SEQ ID NO: 181389 - DNA, 25 bp, Saccharomyces pastorianus
acggcaatgctaacgactggtccat

SEQ ID NO: 181390 - DNA, 25 bp, Saccharomyces pastorianus
gatctttactttgtctgttcttcca

SEQ ID NO: 181391 - DNA, 25 bp, Saccharomyces pastorianus
taacgactggtccattgtctaccgc

SEQ ID NO: 181392 - DNA, 25 bp, Saccharomyces pastorianus
ggtccattgtctaccgcagcagact

SEQ ID NO: 181393 - DNA, 25 bp, Saccharomyces pastorianus
gcacaaatatgcgatgtacatgcta

SEQ ID NO: 181394 - DNA, 25 bp, Saccharomyces pastorianus
ttgtctgttcttccattagccacga

SEQ ID NO: 181395 - DNA, 25 bp, Saccharomyces pastorianus
ttccattagccacgacggcaatgct

SEQ ID NO: 181396 - DNA, 25 bp, Saccharomyces pastorianus
ggaattcaattcttgtatcacagat

SEQ ID NO: 181397 - DNA, 25 bp, Saccharomyces pastorianus
ttatcaaactgagccttgcatgcaa

SEQ ID NO: 181398 - DNA, 25 bp, Saccharomyces pastorianus
atcaaactgagccttgcatgcaaag

SEQ ID NO: 181399 - DNA, 25 bp, Saccharomyces pastorianus
gcatgcaaagtaaaagccgcggaca

SEQ ID NO: 181400 - DNA, 25 bp, Saccharomyces pastorianus
catgcaaagtaaaagccgcggacat

SEQ ID NO: 181401 - DNA, 25 bp, Saccharomyces pastorianus
ggttatcaaactgagccttgcatgc

SEQ ID NO: 181402 - DNA, 25 bp, Saccharomyces pastorianus
cttgcatgcaaagtaaaagccgcgg

SEQ ID NO: 181403 - DNA, 25 bp, Saccharomyces pastorianus
gccttgcatgcaaagtaaaagccgc

SEQ ID NO: 181404 - DNA, 25 bp, Saccharomyces pastorianus
tgagccttgcatgcaaagtaaaagc

SEQ ID NO: 181405 - DNA, 25 bp, Saccharomyces pastorianus
ttgcatgcaaagtaaaagccgcgga

SEQ ID NO: 181406 - DNA, 25 bp, Saccharomyces pastorianus
aactgagccttgcatgcaaagtaaa

SEQ ID NO: 181407 - DNA, 25 bp, Saccharomyces pastorianus
actgagccttgcatgcaaagtaaaa

SEQ ID NO: 181408 - DNA, 25 bp, Saccharomyces pastorianus
tggtgtggctggctaactcttccct

SEQ ID NO: 181409 - DNA, 25 bp, Saccharomyces pastorianus
acgacttggtgtggctggctaactc

SEQ ID NO: 181410 - DNA, 25 bp, Saccharomyces pastorianus
acttggtgtggctggctaactcttc

SEQ ID NO: 181411 - DNA, 25 bp, Saccharomyces pastorianus
cttatacgacttggtgtggctggct

SEQ ID NO: 181412 - DNA, 25 bp, Saccharomyces pastorianus
tacgacttggtgtggctggctaact

SEQ ID NO: 181413 - DNA, 25 bp, Saccharomyces pastorianus
tgtggctggctaactcttccctgtt

SEQ ID NO: 181414 - DNA, 25 bp, Saccharomyces pastorianus
ttatacgacttggtgtggctggcta

SEQ ID NO: 181415 - DNA, 25 bp, Saccharomyces pastorianus
cttggtgtggctggctaactcttcc

SEQ ID NO: 181416 - DNA, 25 bp, Saccharomyces pastorianus
atacgacttggtgtggctggctaac

SEQ ID NO: 181417 - DNA, 25 bp, Saccharomyces pastorianus
tggctaactcttccctgttcccttt

SEQ ID NO: 181418 - DNA, 25 bp, Saccharomyces pastorianus
gacttggtgtggctggctaactctt

SEQ ID NO: 181419 - DNA, 25 bp, Saccharomyces pastorianus
tcgaagtaaaggagctacgcactct

SEQ ID NO: 181420 - DNA, 25 bp, Saccharomyces pastorianus
ggagctacgcactctataccaccag

SEQ ID NO: 181421 - DNA, 25 bp, Saccharomyces pastorianus
aaggagctacgcactctataccacc

SEQ ID NO: 181422 - DNA, 25 bp, Saccharomyces pastorianus
gtaaaggagctacgcactctatacc

SEQ ID NO: 181423 - DNA, 25 bp, Saccharomyces pastorianus
cgaagtaaaggagctacgcactcta

SEQ ID NO: 181424 - DNA, 25 bp, Saccharomyces pastorianus
acgcactctataccaccagtaccac

SEQ ID NO: 181425 - DNA, 25 bp, Saccharomyces pastorianus
agctacgcactctataccaccagta

SEQ ID NO: 181426 - DNA, 25 bp, Saccharomyces pastorianus
agtaaaggagctacgcactctatac

SEQ ID NO: 181427 - DNA, 25 bp, Saccharomyces pastorianus
gagctacgcactctataccaccagt

SEQ ID NO: 181428 - DNA, 25 bp, Saccharomyces pastorianus
tacgcactctataccaccagtacca

SEQ ID NO: 181429 - DNA, 25 bp, Saccharomyces pastorianus
aggagctacgcactctataccacca

SEQ ID NO: 181430 - DNA, 25 bp, Saccharomyces pastorianus
tggttagtttttgtcttcaggctgc

SEQ ID NO: 181431 - DNA, 25 bp, Saccharomyces pastorianus
gaatatttcatctacgtctttgacg

SEQ ID NO: 181432 - DNA, 25 bp, Saccharomyces pastorianus
tcgtttcctctcgttttgggactag

SEQ ID NO: 181433 - DNA, 25 bp, Saccharomyces pastorianus
gagcagtatcatcgtctaacacaaa

SEQ ID NO: 181434 - DNA, 25 bp, Saccharomyces pastorianus
attactgcgggcctggttattcaaa

SEQ ID NO: 181435 - DNA, 25 bp, Saccharomyces pastorianus
ggagatagcgccgtacgtcatacaa

SEQ ID NO: 181436 - DNA, 25 bp, Saccharomyces pastorianus
atacagtgttgcgagggtttgcccc

SEQ ID NO: 181437 - DNA, 25 bp, Saccharomyces pastorianus
gcctatgcttttagctgccattgta

SEQ ID NO: 181438 - DNA, 25 bp, Saccharomyces pastorianus
agcagtgctgctgttaattgcgcct

SEQ ID NO: 181439 - DNA, 25 bp, Saccharomyces pastorianus
gtgaatcccttatgatcgtttcctc

SEQ ID NO: 181440 - DNA, 25 bp, Saccharomyces pastorianus
gaccggttcgaatcttattactgcg

SEQ ID NO: 181441 - DNA, 25 bp, Saccharomyces pastorianus
gcgccgctgaatgcaactcgataga

SEQ ID NO: 181442 - DNA, 25 bp, Saccharomyces pastorianus
gtatggccaaggtccagcaacactg

SEQ ID NO: 181443 - DNA, 25 bp, Saccharomyces pastorianus
aactgagtttgatcttgcccatctt

SEQ ID NO: 181444 - DNA, 25 bp, Saccharomyces pastorianus
attagtttccacaacgctgatccaa

SEQ ID NO: 181445 - DNA, 25 bp, Saccharomyces pastorianus
cattctcgggtctttttatgcccta

SEQ ID NO: 181446 - DNA, 25 bp, Saccharomyces pastorianus
atcgctataccctgattatgtcgtt

SEQ ID NO: 181447 - DNA, 25 bp, Saccharomyces pastorianus
atgccgctcatgactgctttgaaaa

SEQ ID NO: 181448 - DNA, 25 bp, Saccharomyces pastorianus
atcttgcccatcttgggtatggcca

SEQ ID NO: 181449 - DNA, 25 bp, Saccharomyces pastorianus
tatgtcgttaatgctcctgactgcc

SEQ ID NO: 181450 - DNA, 25 bp, Saccharomyces pastorianus
aagaaggctatgacaccgccattct

SEQ ID NO: 181451 - DNA, 25 bp, Saccharomyces pastorianus
tatactcgacactgtgcaggatgct

SEQ ID NO: 181452 - DNA, 25 bp, Saccharomyces pastorianus
ggtcaggaaagaagttgactacaaa

SEQ ID NO: 181453 - DNA, 25 bp, Saccharomyces pastorianus
caggaaagaagttgactacaaagac

SEQ ID NO: 181454 - DNA, 25 bp, Saccharomyces pastorianus
attgagggtcaggaaagaagttgac

SEQ ID NO: 181455 - DNA, 25 bp, Saccharomyces pastorianus
aattgagggtcaggaaagaagttga

SEQ ID NO: 181456 - DNA, 25 bp, Saccharomyces pastorianus
agggtcaggaaagaagttgactaca

SEQ ID NO: 181457 - DNA, 25 bp, Saccharomyces pastorianus
tcaggaaagaagttgactacaaaga

SEQ ID NO: 181458 - DNA, 25 bp, Saccharomyces pastorianus
gagggtcaggaaagaagttgactac

SEQ ID NO: 181459 - DNA, 25 bp, Saccharomyces pastorianus
ttgagggtcaggaaagaagttgact

SEQ ID NO: 181460 - DNA, 25 bp, Saccharomyces pastorianus
agaaattgagggtcaggaaagaagt

SEQ ID NO: 181461 - DNA, 25 bp, Saccharomyces pastorianus
gtcaggaaagaagttgactacaaag

SEQ ID NO: 181462 - DNA, 25 bp, Saccharomyces pastorianus
gggtcaggaaagaagttgactacaa

SEQ ID NO: 181463 - DNA, 25 bp, Saccharomyces pastorianus
tttgattcttactcactttctgcag

SEQ ID NO: 181464 - DNA, 25 bp, Saccharomyces pastorianus
ttaacagcggtgatgatggccattt

SEQ ID NO: 181465 - DNA, 25 bp, Saccharomyces pastorianus
tttggcaaacctctcttaacagcgg

SEQ ID NO: 181466 - DNA, 25 bp, Saccharomyces pastorianus
gatatatggattcccatttttggaa

SEQ ID NO: 181467 - DNA, 25 bp, Saccharomyces pastorianus
tcccatttttggaaggtggagtaat

SEQ ID NO: 181468 - DNA, 25 bp, Saccharomyces pastorianus
aagtagcagtcgttgaagtaccggc

SEQ ID NO: 181469 - DNA, 25 bp, Saccharomyces pastorianus
gaagtaccggctgctactgaagtag

SEQ ID NO: 181470 - DNA, 25 bp, Saccharomyces pastorianus
ggtgatgatggccatttttgcttat

SEQ ID NO: 181471 - DNA, 25 bp, Saccharomyces pastorianus
ggcaacagatgttatagaactgact

SEQ ID NO: 181472 - DNA, 25 bp, Saccharomyces pastorianus
ggccatttttgcttatatttttgat

SEQ ID NO: 181473 - DNA, 25 bp, Saccharomyces pastorianus
cagcggatgtggttaactttggcaa

SEQ ID NO: 181474 - DNA, 25 bp, Saccharomyces pastorianus
cagcgattgaagttaatttgaccat

SEQ ID NO: 181475 - DNA, 25 bp, Saccharomyces pastorianus
gctgatgtaatcttaacaagaaata

SEQ ID NO: 181476 - DNA, 25 bp, Saccharomyces pastorianus
gatgtaatcttaacaagaaatagtg

SEQ ID NO: 181477 - DNA, 25 bp, Saccharomyces pastorianus
tagtgctgatgtaatcttaacaaga

SEQ ID NO: 181478 - DNA, 25 bp, Saccharomyces pastorianus
tgctgatgtaatcttaacaagaaat

SEQ ID NO: 181479 - DNA, 25 bp, Saccharomyces pastorianus
ctgatgtaatcttaacaagaaatag

SEQ ID NO: 181480 - DNA, 25 bp, Saccharomyces pastorianus
ttagtgctgatgtaatcttaacaag

SEQ ID NO: 181481 - DNA, 25 bp, Saccharomyces pastorianus
ccagcagcgattgaagttaatttga

SEQ ID NO: 181482 - DNA, 25 bp, Saccharomyces pastorianus
agtgctgatgtaatcttaacaagaa

SEQ ID NO: 181483 - DNA, 25 bp, Saccharomyces pastorianus
gtgctgatgtaatcttaacaagaaa

SEQ ID NO: 181484 - DNA, 25 bp, Saccharomyces pastorianus
gttagtgctgatgtaatcttaacaa

SEQ ID NO: 181485 - DNA, 25 bp, Saccharomyces pastorianus
acgcataatcgcatgtacacacttt

SEQ ID NO: 181486 - DNA, 25 bp, Saccharomyces pastorianus
agcaatgtggaaatctgaccgaaaa

SEQ ID NO: 181487 - DNA, 25 bp, Saccharomyces pastorianus
taacgagaatgtactcacagagcat

SEQ ID NO: 181488 - DNA, 25 bp, Saccharomyces pastorianus
agaggtgatgacgtagttcagcaat

SEQ ID NO: 181489 - DNA, 25 bp, Saccharomyces pastorianus
atcttttagaaacagcacatgtcgg

SEQ ID NO: 181490 - DNA, 25 bp, Saccharomyces pastorianus
aactacaacaacttccgagaatctc

SEQ ID NO: 181491 - DNA, 25 bp, Saccharomyces pastorianus
gcagtcatttggcatatattgcgca

SEQ ID NO: 181492 - DNA, 25 bp, Saccharomyces pastorianus
gggaatcacattcctattcaaagta

SEQ ID NO: 181493 - DNA, 25 bp, Saccharomyces pastorianus
gggctgaagaactatctcgcatgat

SEQ ID NO: 181494 - DNA, 25 bp, Saccharomyces pastorianus
acattactgcactgatatacttatc

SEQ ID NO: 181495 - DNA, 25 bp, Saccharomyces pastorianus
aaatgtccacgcataatcgcatgta

SEQ ID NO: 181496 - DNA, 25 bp, Saccharomyces pastorianus
atgcgcctattgtgttttttcggta

SEQ ID NO: 181497 - DNA, 25 bp, Saccharomyces pastorianus
gcttccagatcagcagtgttctttt

SEQ ID NO: 181498 - DNA, 25 bp, Saccharomyces pastorianus
ggagtcatgcaagtaccatctctaa

SEQ ID NO: 181499 - DNA, 25 bp, Saccharomyces pastorianus
cattccttgaaatggcgccaggcta

SEQ ID NO: 181500 - DNA, 25 bp, Saccharomyces pastorianus
atttcacccaatttggcttcggcta

SEQ ID NO: 181501 - DNA, 25 bp, Saccharomyces pastorianus
gtttgccatggttagcgtctactac

SEQ ID NO: 181502 - DNA, 25 bp, Saccharomyces pastorianus
ttcggctactattcttctcagtatg

SEQ ID NO: 181503 - DNA, 25 bp, Saccharomyces pastorianus
gtgtatttgacacagccgcagtaag

SEQ ID NO: 181504 - DNA, 25 bp, Saccharomyces pastorianus
gaattttggcttctactgggtatac

SEQ ID NO: 181505 - DNA, 25 bp, Saccharomyces pastorianus
gtggaagttatctccttacacatac

SEQ ID NO: 181506 - DNA, 25 bp, Saccharomyces pastorianus
ctaatgcctggattttggaccttta

SEQ ID NO: 181507 - DNA, 25 bp, Saccharomyces pastorianus
ttaacaacagaaatgcaaagcatgc

SEQ ID NO: 181508 - DNA, 25 bp, Saccharomyces pastorianus
gggcaattatctgcttaacaacaga

SEQ ID NO: 181509 - DNA, 25 bp, Saccharomyces pastorianus
tttgggcaattatctgcttaacaac

SEQ ID NO: 181510 - DNA, 25 bp, Saccharomyces pastorianus
gcaattatctgcttaacaacagaaa

SEQ ID NO: 181511 - DNA, 25 bp, Saccharomyces pastorianus
ctttgggcaattatctgcttaacaa

SEQ ID NO: 181512 - DNA, 25 bp, Saccharomyces pastorianus
ttgggcaattatctgcttaacaaca

SEQ ID NO: 181513 - DNA, 25 bp, Saccharomyces pastorianus
atctgcttaacaacagaaatgcaaa

SEQ ID NO: 181514 - DNA, 25 bp, Saccharomyces pastorianus
gctttgggcaattatctgcttaaca

SEQ ID NO: 181515 - DNA, 25 bp, Saccharomyces pastorianus
taacaacagaaatgcaaagcatgcg

SEQ ID NO: 181516 - DNA, 25 bp, Saccharomyces pastorianus
ggcaattatctgcttaacaacagaa

SEQ ID NO: 181517 - DNA, 25 bp, Saccharomyces pastorianus
tgggcaattatctgcttaacaacag

SEQ ID NO: 181518 - DNA, 25 bp, Saccharomyces pastorianus
tggtgattactttgggctcttatgc

SEQ ID NO: 181519 - DNA, 25 bp, Saccharomyces pastorianus
gataacttggcctacgcattagctt

SEQ ID NO: 181520 - DNA, 25 bp, Saccharomyces pastorianus
tttgccggctttctacgatattggt

SEQ ID NO: 181521 - DNA, 25 bp, Saccharomyces pastorianus
gtatactcctcctacaggtactgta

SEQ ID NO: 181522 - DNA, 25 bp, Saccharomyces pastorianus
tggatattcccgtcgtgaacagttt

SEQ ID NO: 181523 - DNA, 25 bp, Saccharomyces pastorianus
aaaactcctgcaccttatattctga

SEQ ID NO: 181524 - DNA, 25 bp, Saccharomyces pastorianus
ggacattgccatgcctattttgtat

SEQ ID NO: 181525 - DNA, 25 bp, Saccharomyces pastorianus
gctttcccattaatcgtcttattcg

SEQ ID NO: 181526 - DNA, 25 bp, Saccharomyces pastorianus
atgccacattgtttccgccttaata

SEQ ID NO: 181527 - DNA, 25 bp, Saccharomyces pastorianus
atatccggcttttgtggcactttaa

SEQ ID NO: 181528 - DNA, 25 bp, Saccharomyces pastorianus
gatcggattctcttactgtttattg

SEQ ID NO: 181529 - DNA, 25 bp, Saccharomyces pastorianus
aagccaatggtctgttttctttaca

SEQ ID NO: 181530 - DNA, 25 bp, Saccharomyces pastorianus
caaagttcccttagatatccgtaag

SEQ ID NO: 181531 - DNA, 25 bp, Saccharomyces pastorianus
ggaggtattttcagattcagggatt

SEQ ID NO: 181532 - DNA, 25 bp, Saccharomyces pastorianus
gacttagttatacatcttcttcctg

SEQ ID NO: 181533 - DNA, 25 bp, Saccharomyces pastorianus
tatagcgatgtgatacctgaatact

SEQ ID NO: 181534 - DNA, 25 bp, Saccharomyces pastorianus
gttttctgtaccactcaatgactta

SEQ ID NO: 181535 - DNA, 25 bp, Saccharomyces pastorianus
ataggaatgatcaacggcgacagaa

SEQ ID NO: 181536 - DNA, 25 bp, Saccharomyces pastorianus
tattcgacgtttcatgtatagctaa

SEQ ID NO: 181537 - DNA, 25 bp, Saccharomyces pastorianus
atcttcttcctgaagccgatgagga

SEQ ID NO: 181538 - DNA, 25 bp, Saccharomyces pastorianus
gcattatcattttcacgtagcaaat

SEQ ID NO: 181539 - DNA, 25 bp, Saccharomyces pastorianus
gtaatcagatgcaaccgaacggaag

SEQ ID NO: 181540 - DNA, 25 bp, Saccharomyces pastorianus
accgggtttatgtgagcgtttcgag

SEQ ID NO: 181541 - DNA, 25 bp, Saccharomyces pastorianus
ctccattggccaggtactcaaaaga

SEQ ID NO: 181542 - DNA, 25 bp, Saccharomyces pastorianus
ttggccaggtactcaaaagaacaac

SEQ ID NO: 181543 - DNA, 25 bp, Saccharomyces pastorianus
ggccaggtactcaaaagaacaaccg

SEQ ID NO: 181544 - DNA, 25 bp, Saccharomyces pastorianus
gtctccattggccaggtactcaaaa

SEQ ID NO: 181545 - DNA, 25 bp, Saccharomyces pastorianus
tccattggccaggtactcaaaagaa

SEQ ID NO: 181546 - DNA, 25 bp, Saccharomyces pastorianus
attggccaggtactcaaaagaacaa

SEQ ID NO: 181547 - DNA, 25 bp, Saccharomyces pastorianus
ccattggccaggtactcaaaagaac

SEQ ID NO: 181548 - DNA, 25 bp, Saccharomyces pastorianus
tctccattggccaggtactcaaaag

SEQ ID NO: 181549 - DNA, 25 bp, Saccharomyces pastorianus
cattggccaggtactcaaaagaaca

SEQ ID NO: 181550 - DNA, 25 bp, Saccharomyces pastorianus
aagaacaaccgggtttatgtgagcg

SEQ ID NO: 181551 - DNA, 25 bp, Saccharomyces pastorianus
aactggcttccggagggtccatatc

SEQ ID NO: 181552 - DNA, 25 bp, Saccharomyces pastorianus
gcccattaccttttgtccttggata

SEQ ID NO: 181553 - DNA, 25 bp, Saccharomyces pastorianus
tggataatcaaccagaggccgcctt

SEQ ID NO: 181554 - DNA, 25 bp, Saccharomyces pastorianus
gatgtcttgagactgtacaaccgat

SEQ ID NO: 181555 - DNA, 25 bp, Saccharomyces pastorianus
aacacggagtccagcaagccaaaga

SEQ ID NO: 181556 - DNA, 25 bp, Saccharomyces pastorianus
gatacagatccaactggcttccgga

SEQ ID NO: 181557 - DNA, 25 bp, Saccharomyces pastorianus
aagccaaagagttggcccattacct

SEQ ID NO: 181558 - DNA, 25 bp, Saccharomyces pastorianus
ggagggtccatatcctgacccactt

SEQ ID NO: 181559 - DNA, 25 bp, Saccharomyces pastorianus
gactgtacaaccgatagctaagctg

SEQ ID NO: 181560 - DNA, 25 bp, Saccharomyces pastorianus
gccttcgcttctccattttatagat

SEQ ID NO: 181561 - DNA, 25 bp, Saccharomyces pastorianus
tatcgcaaggcatggatacagatcc

SEQ ID NO: 181562 - DNA, 25 bp, Saccharomyces pastorianus
ttcgcgcccacaggcaattgtaaca

SEQ ID NO: 181563 - DNA, 25 bp, Saccharomyces pastorianus
aaattcgcgcccacaggcaattgta

SEQ ID NO: 181564 - DNA, 25 bp, Saccharomyces pastorianus
ggcaattgtaacaggtagtcaggaa

SEQ ID NO: 181565 - DNA, 25 bp, Saccharomyces pastorianus
attgtaacaggtagtcaggaagacc

SEQ ID NO: 181566 - DNA, 25 bp, Saccharomyces pastorianus
aaaattcgcgcccacaggcaattgt

SEQ ID NO: 181567 - DNA, 25 bp, Saccharomyces pastorianus
cacaggcaattgtaacaggtagtca

SEQ ID NO: 181568 - DNA, 25 bp, Saccharomyces pastorianus
gcccacaggcaattgtaacaggtag

SEQ ID NO: 181569 - DNA, 25 bp, Saccharomyces pastorianus
gtaccgaaaattcgcgcccacaggc

SEQ ID NO: 181570 - DNA, 25 bp, Saccharomyces pastorianus
ttgtaccgaaaattcgcgcccacag

SEQ ID NO: 181571 - DNA, 25 bp, Saccharomyces pastorianus
gcgcccacaggcaattgtaacaggt

SEQ ID NO: 181572 - DNA, 25 bp, Saccharomyces pastorianus
aattcgcgcccacaggcaattgtaa

SEQ ID NO: 181573 - DNA, 25 bp, Saccharomyces pastorianus
tagaatgcagcggatccttgggatt

SEQ ID NO: 181574 - DNA, 25 bp, Saccharomyces pastorianus
atggccacagaatctcaggtacttg

SEQ ID NO: 181575 - DNA, 25 bp, Saccharomyces pastorianus
tatccgatgccatctctggcagaaa

SEQ ID NO: 181576 - DNA, 25 bp, Saccharomyces pastorianus
gaatatttgtgtttctcccaagctg

SEQ ID NO: 181577 - DNA, 25 bp, Saccharomyces pastorianus
tgacttgactatagccatactggaa

SEQ ID NO: 181578 - DNA, 25 bp, Saccharomyces pastorianus
agtcgctgatttggtagtctctttg

SEQ ID NO: 181579 - DNA, 25 bp, Saccharomyces pastorianus
acgcatttatcttttcccagatcgt

SEQ ID NO: 181580 - DNA, 25 bp, Saccharomyces pastorianus
ggctgccctgcctaaagaatatttg

SEQ ID NO: 181581 - DNA, 25 bp, Saccharomyces pastorianus
actgttctaagtggtgcttttctga

SEQ ID NO: 181582 - DNA, 25 bp, Saccharomyces pastorianus
aatttctttgcagctcatggttgat

SEQ ID NO: 181583 - DNA, 25 bp, Saccharomyces pastorianus
tagaccatgtcttcacgtactgtgc

SEQ ID NO: 181584 - DNA, 25 bp, Saccharomyces pastorianus
ggcactgacacaaagacctctgcaa

SEQ ID NO: 181585 - DNA, 25 bp, Saccharomyces pastorianus
aaggctgctagtggcaacgctgatt

SEQ ID NO: 181586 - DNA, 25 bp, Saccharomyces pastorianus
gaacaaggctgcatccgctattaag

SEQ ID NO: 181587 - DNA, 25 bp, Saccharomyces pastorianus
aaacctgcacccgaaagagcgagga

SEQ ID NO: 181588 - DNA, 25 bp, Saccharomyces pastorianus
ggaaactagtacctgcaccaacaat

SEQ ID NO: 181589 - DNA, 25 bp, Saccharomyces pastorianus
gagcgattctaatggcaactctaat

SEQ ID NO: 181590 - DNA, 25 bp, Saccharomyces pastorianus
gcaatattaccgaagccagctaaca

SEQ ID NO: 181591 - DNA, 25 bp, Saccharomyces pastorianus
gaaagaaccgaacacaagctccaaa

SEQ ID NO: 181592 - DNA, 25 bp, Saccharomyces pastorianus
gacattccgttgtaccaaactgaca

SEQ ID NO: 181593 - DNA, 25 bp, Saccharomyces pastorianus
ctgcaccaacaatcaattcacctaa

SEQ ID NO: 181594 - DNA, 25 bp, Saccharomyces pastorianus
gaaacaagctcaaaatctcccagga

SEQ ID NO: 181595 - DNA, 25 bp, Saccharomyces pastorianus
gtattcgtggttttagcataggtaa

SEQ ID NO: 181596 - DNA, 25 bp, Saccharomyces pastorianus
gttatggaacactaagtacaacatt

SEQ ID NO: 181597 - DNA, 25 bp, Saccharomyces pastorianus
aggtaaaccagtagagtccgatcgt

SEQ ID NO: 181598 - DNA, 25 bp, Saccharomyces pastorianus
gatggatgcctctagttggcgtttt

SEQ ID NO: 181599 - DNA, 25 bp, Saccharomyces pastorianus
gagtccgatcgtttagagaaagctt

SEQ ID NO: 181600 - DNA, 25 bp, Saccharomyces pastorianus
gggacctgtggcacataccaatttt

SEQ ID NO: 181601 - DNA, 25 bp, Saccharomyces pastorianus
gaaagctttgcatttagctgaaagg

SEQ ID NO: 181602 - DNA, 25 bp, Saccharomyces pastorianus
cctctagttggcgtttttggactat

SEQ ID NO: 181603 - DNA, 25 bp, Saccharomyces pastorianus
aaaccctcatttgaacatagagaag

SEQ ID NO: 181604 - DNA, 25 bp, Saccharomyces pastorianus
aaatctgtggacgataacgttgtat

SEQ ID NO: 181605 - DNA, 25 bp, Saccharomyces pastorianus
tatgactatagggtttttggaaaat

SEQ ID NO: 181606 - DNA, 25 bp, Saccharomyces pastorianus
ggaggtcgtccttaagcaaatttgg

SEQ ID NO: 181607 - DNA, 25 bp, Saccharomyces pastorianus
gaccgaagaccaggaggtcgtcctt

SEQ ID NO: 181608 - DNA, 25 bp, Saccharomyces pastorianus
atgtcctttgatagacagttgaccg

SEQ ID NO: 181609 - DNA, 25 bp, Saccharomyces pastorianus
ttgatagacagttgaccgaagacca

SEQ ID NO: 181610 - DNA, 25 bp, Saccharomyces pastorianus
taagcaaatttggacacaccttttc

SEQ ID NO: 181611 - DNA, 25 bp, Saccharomyces pastorianus
gacagttgaccgaagaccaggaggt

SEQ ID NO: 181612 - DNA, 25 bp, Saccharomyces pastorianus
agaccaggaggtcgtccttaagcaa

SEQ ID NO: 181613 - DNA, 25 bp, Saccharomyces pastorianus
accaggaggtcgtccttaagcaaat

SEQ ID NO: 181614 - DNA, 25 bp, Saccharomyces pastorianus
gtcctttgatagacagttgaccgaa

SEQ ID NO: 181615 - DNA, 25 bp, Saccharomyces pastorianus
aatttggacacaccttttccatctg

SEQ ID NO: 181616 - DNA, 25 bp, Saccharomyces pastorianus
atagacagttgaccgaagaccagga

SEQ ID NO: 181617 - DNA, 25 bp, Saccharomyces pastorianus
gggactccaaattatatggcaccag

SEQ ID NO: 181618 - DNA, 25 bp, Saccharomyces pastorianus
gttgctgtgcattaaggtagttcat

SEQ ID NO: 181619 - DNA, 25 bp, Saccharomyces pastorianus
aagcggcatgccactggattttaat

SEQ ID NO: 181620 - DNA, 25 bp, Saccharomyces pastorianus
gcgggcatagttcattcggatttaa

SEQ ID NO: 181621 - DNA, 25 bp, Saccharomyces pastorianus
ccatctgatatgtggtcatgcggtt

SEQ ID NO: 181622 - DNA, 25 bp, Saccharomyces pastorianus
ggcagtttccaaggccaaaataggc

SEQ ID NO: 181623 - DNA, 25 bp, Saccharomyces pastorianus
tatggcaccagaagcactagttgct

SEQ ID NO: 181624 - DNA, 25 bp, Saccharomyces pastorianus
tggtcatgcggttgtattatatatc

SEQ ID NO: 181625 - DNA, 25 bp, Saccharomyces pastorianus
gtgaaactcaaattgggactccaaa

SEQ ID NO: 181626 - DNA, 25 bp, Saccharomyces pastorianus
atagcaaacgcggtaccggaacata

SEQ ID NO: 181627 - DNA, 25 bp, Saccharomyces pastorianus
aaggtagttcatgatgcgggcatag

SEQ ID NO: 181628 - DNA, 25 bp, Saccharomyces pastorianus
gcaaacggtttggatgatttattga

SEQ ID NO: 181629 - DNA, 25 bp, Saccharomyces pastorianus
tggtgagcctttgccgatcaaaaca

SEQ ID NO: 181630 - DNA, 25 bp, Saccharomyces pastorianus
gatttctggcgtaaacttgactagc

SEQ ID NO: 181631 - DNA, 25 bp, Saccharomyces pastorianus
tgactagcaaaaaggcaaacggttt

SEQ ID NO: 181632 - DNA, 25 bp, Saccharomyces pastorianus
ggacccaatccaaacaattctccat

SEQ ID NO: 181633 - DNA, 25 bp, Saccharomyces pastorianus
tattccgaacaatccaatcactggt

SEQ ID NO: 181634 - DNA, 25 bp, Saccharomyces pastorianus
aggaggacccaaaccagcaagtacg

SEQ ID NO: 181635 - DNA, 25 bp, Saccharomyces pastorianus
tttgccgatcaaaacatccccttct

SEQ ID NO: 181636 - DNA, 25 bp, Saccharomyces pastorianus
caatcactggtgagcctttgccgat

SEQ ID NO: 181637 - DNA, 25 bp, Saccharomyces pastorianus
tttattgagtttggcaggaggaccc

SEQ ID NO: 181638 - DNA, 25 bp, Saccharomyces pastorianus
catcctctcccatatcaaggatttc

SEQ ID NO: 181639 - DNA, 25 bp, Saccharomyces pastorianus
atctcctccggttctggaattggca

SEQ ID NO: 181640 - DNA, 25 bp, Saccharomyces pastorianus
ttgcctgctccaaatgcgtacagat

SEQ ID NO: 181641 - DNA, 25 bp, Saccharomyces pastorianus
gttccttagccgctgttattgtaga

SEQ ID NO: 181642 - DNA, 25 bp, Saccharomyces pastorianus
aatgcctggtaacttggtcttgcct

SEQ ID NO: 181643 - DNA, 25 bp, Saccharomyces pastorianus
ttgagcactggttccgaggcaaatg

SEQ ID NO: 181644 - DNA, 25 bp, Saccharomyces pastorianus
gattgatgctgcctctgttggttcc

SEQ ID NO: 181645 - DNA, 25 bp, Saccharomyces pastorianus
tgccatgtttgggttcgaagcctac

SEQ ID NO: 181646 - DNA, 25 bp, Saccharomyces pastorianus
gtacagatccatctttcggaagcaa

SEQ ID NO: 181647 - DNA, 25 bp, Saccharomyces pastorianus
ggattatcattatcgtggcacggta

SEQ ID NO: 181648 - DNA, 25 bp, Saccharomyces pastorianus
ggaactacctaccaagatggccgta

SEQ ID NO: 181649 - DNA, 25 bp, Saccharomyces pastorianus
cactggtttacttccaaatggctta

SEQ ID NO: 181650 - DNA, 25 bp, Saccharomyces pastorianus
attgactcactatccactctaggag

SEQ ID NO: 181651 - DNA, 25 bp, Saccharomyces pastorianus
agcctggaaacatacttatacactg

SEQ ID NO: 181652 - DNA, 25 bp, Saccharomyces pastorianus
ttttgctatgagatgcgcggatgtt

SEQ ID NO: 181653 - DNA, 25 bp, Saccharomyces pastorianus
ctggataacccttttcagaacatta

SEQ ID NO: 181654 - DNA, 25 bp, Saccharomyces pastorianus
tctaggagagttttgcttgcaagcc

SEQ ID NO: 181655 - DNA, 25 bp, Saccharomyces pastorianus
ttggcgccagcgattcatatcaaga

SEQ ID NO: 181656 - DNA, 25 bp, Saccharomyces pastorianus
aatatccttccatagttctgagatt

SEQ ID NO: 181657 - DNA, 25 bp, Saccharomyces pastorianus
attgatgccaaaaccgcccattgac

SEQ ID NO: 181658 - DNA, 25 bp, Saccharomyces pastorianus
gatactcccagttgcaaatcttact

SEQ ID NO: 181659 - DNA, 25 bp, Saccharomyces pastorianus
gcggttattacccttgaactggata

SEQ ID NO: 181660 - DNA, 25 bp, Saccharomyces pastorianus
tatcttatactgtctttgccagtgg

SEQ ID NO: 181661 - DNA, 25 bp, Saccharomyces pastorianus
aaagaatctcagttcaatccttact

SEQ ID NO: 181662 - DNA, 25 bp, Saccharomyces pastorianus
atggatcgttctagattagctggta

SEQ ID NO: 181663 - DNA, 25 bp, Saccharomyces pastorianus
tttggcctttgggaaacagtctgct

SEQ ID NO: 181664 - DNA, 25 bp, Saccharomyces pastorianus
atcctgcctacgatgggcctattta

SEQ ID NO: 181665 - DNA, 25 bp, Saccharomyces pastorianus
gcctctgtaacgcatgtggactttt

SEQ ID NO: 181666 - DNA, 25 bp, Saccharomyces pastorianus
acgcatgtggacttttctatagaaa

SEQ ID NO: 181667 - DNA, 25 bp, Saccharomyces pastorianus
aacagtctgctaaacgatacttgga

SEQ ID NO: 181668 - DNA, 25 bp, Saccharomyces pastorianus
aggaatgcaagacctatcctgccta

SEQ ID NO: 181669 - DNA, 25 bp, Saccharomyces pastorianus
aagaaccgatgccaaccccaacaat

SEQ ID NO: 181670 - DNA, 25 bp, Saccharomyces pastorianus
aattacgaaaacctgcggccaatgc

SEQ ID NO: 181671 - DNA, 25 bp, Saccharomyces pastorianus
caaccggtggatcgtgcctctgtaa

SEQ ID NO: 181672 - DNA, 25 bp, Saccharomyces pastorianus
gtaacaactcctcagcactaattag

SEQ ID NO: 181673 - DNA, 25 bp, Saccharomyces pastorianus
agtaacaatcgtgcccatatcttca

SEQ ID NO: 181674 - DNA, 25 bp, Saccharomyces pastorianus
atcctaccaggtggccatctaagaa

SEQ ID NO: 181675 - DNA, 25 bp, Saccharomyces pastorianus
cagtttccctattgacggtagtaca

SEQ ID NO: 181676 - DNA, 25 bp, Saccharomyces pastorianus
aacatccctttaccatagccagtat

SEQ ID NO: 181677 - DNA, 25 bp, Saccharomyces pastorianus
ttctcatttaatacccttccaacat

SEQ ID NO: 181678 - DNA, 25 bp, Saccharomyces pastorianus
gggcatttccttcggtttaccattg

SEQ ID NO: 181679 - DNA, 25 bp, Saccharomyces pastorianus
tcattatctgttctggagttcccat

SEQ ID NO: 181680 - DNA, 25 bp, Saccharomyces pastorianus
gagttcccattagttgatttgccca

SEQ ID NO: 181681 - DNA, 25 bp, Saccharomyces pastorianus
gctgaacttcgtcatcaaggcacaa

SEQ ID NO: 181682 - DNA, 25 bp, Saccharomyces pastorianus
ggtcatcgaagaacccattccgtaa

SEQ ID NO: 181683 - DNA, 25 bp, Saccharomyces pastorianus
ggcgccttatttactacatttgcta

SEQ ID NO: 181684 - DNA, 25 bp, Saccharomyces pastorianus
ttgccttgtttgaccttcaacaaaa

SEQ ID NO: 181685 - DNA, 25 bp, Saccharomyces pastorianus
atactttcagcttttatcttgtttg

SEQ ID NO: 181686 - DNA, 25 bp, Saccharomyces pastorianus
atgcttgttggctatttggtagcta

SEQ ID NO: 181687 - DNA, 25 bp, Saccharomyces pastorianus
taacggctccatttttactgctgaa

SEQ ID NO: 181688 - DNA, 25 bp, Saccharomyces pastorianus
tgttttaggtgccacgggcgcctta

SEQ ID NO: 181689 - DNA, 25 bp, Saccharomyces pastorianus
gggctcatatttgcgggtttctttc

SEQ ID NO: 181690 - DNA, 25 bp, Saccharomyces pastorianus
gcgggtttctttccaaatatatcag

SEQ ID NO: 181691 - DNA, 25 bp, Saccharomyces pastorianus
gatttacctattgcctatattcaga

SEQ ID NO: 181692 - DNA, 25 bp, Saccharomyces pastorianus
acatttgctacgactgtgcccaaaa

SEQ ID NO: 181693 - DNA, 25 bp, Saccharomyces pastorianus
ggttgttaacgctattttgccttgt

SEQ ID NO: 181694 - DNA, 25 bp, Saccharomyces pastorianus
cagtgattgtgatggccggtattgc

SEQ ID NO: 181695 - DNA, 25 bp, Saccharomyces pastorianus
tttgctgcaaggattcatatgggac

SEQ ID NO: 181696 - DNA, 25 bp, Saccharomyces pastorianus
cgttgatttaaggtggttccggatg

SEQ ID NO: 181697 - DNA, 25 bp, Saccharomyces pastorianus
acaccgagcggctttgctgcaagga

SEQ ID NO: 181698 - DNA, 25 bp, Saccharomyces pastorianus
ttttattattggctgtcagctcaag

SEQ ID NO: 181699 - DNA, 25 bp, Saccharomyces pastorianus
ggctgtcagctcaagaaggaaatta

SEQ ID NO: 181700 - DNA, 25 bp, Saccharomyces pastorianus
tatgaataaagaacaccgagcggct

SEQ ID NO: 181701 - DNA, 25 bp, Saccharomyces pastorianus
gttccggatgttttgtctgatctta

SEQ ID NO: 181702 - DNA, 25 bp, Saccharomyces pastorianus
gactatagattaatgaggttgctta

SEQ ID NO: 181703 - DNA, 25 bp, Saccharomyces pastorianus
ggctgccgaaacagtgattgtgatg

SEQ ID NO: 181704 - DNA, 25 bp, Saccharomyces pastorianus
gattcatatgggacgttgatttaag

SEQ ID NO: 181705 - DNA, 25 bp, Saccharomyces pastorianus
gaaaatgacctaaataatcacagta

SEQ ID NO: 181706 - DNA, 25 bp, Saccharomyces pastorianus
ggaagtagcagaaaatgacctaaat

SEQ ID NO: 181707 - DNA, 25 bp, Saccharomyces pastorianus
tgaggaagtagcagaaaatgaccta

SEQ ID NO: 181708 - DNA, 25 bp, Saccharomyces pastorianus
tgcaactaaatgaggaagtagcaga

SEQ ID NO: 181709 - DNA, 25 bp, Saccharomyces pastorianus
atgcaactaaatgaggaagtagcag

SEQ ID NO: 181710 - DNA, 25 bp, Saccharomyces pastorianus
aaatgacctaaataatcacagtaac

SEQ ID NO: 181711 - DNA, 25 bp, Saccharomyces pastorianus
caactaaatgaggaagtagcagaaa

SEQ ID NO: 181712 - DNA, 25 bp, Saccharomyces pastorianus
aatgaggaagtagcagaaaatgacc

SEQ ID NO: 181713 - DNA, 25 bp, Saccharomyces pastorianus
gaagtagcagaaaatgacctaaata

SEQ ID NO: 181714 - DNA, 25 bp, Saccharomyces pastorianus
gcaactaaatgaggaagtagcagaa

SEQ ID NO: 181715 - DNA, 25 bp, Saccharomyces pastorianus
gaggaagtagcagaaaatgacctaa

SEQ ID NO: 181716 - DNA, 25 bp, Saccharomyces pastorianus
ctacacgctgaaagggacttggcat

SEQ ID NO: 181717 - DNA, 25 bp, Saccharomyces pastorianus
aaagttgcaacacttgaggagccgt

SEQ ID NO: 181718 - DNA, 25 bp, Saccharomyces pastorianus
ggtcaccaaggatacaaagaaatac

SEQ ID NO: 181719 - DNA, 25 bp, Saccharomyces pastorianus
gggacttggcattggctgaaacttt

SEQ ID NO: 181720 - DNA, 25 bp, Saccharomyces pastorianus
gttttgattttactacacgctgaaa

SEQ ID NO: 181721 - DNA, 25 bp, Saccharomyces pastorianus
tgaggagccgttgccatttggtcac

SEQ ID NO: 181722 - DNA, 25 bp, Saccharomyces pastorianus
gccacctatggtaatcgtgcagaac

SEQ ID NO: 181723 - DNA, 25 bp, Saccharomyces pastorianus
atcattgccacctatggtaatcgtg

SEQ ID NO: 181724 - DNA, 25 bp, Saccharomyces pastorianus
gccgttgccatttggtcaccaagga

SEQ ID NO: 181725 - DNA, 25 bp, Saccharomyces pastorianus
aacacttgaggagccgttgccattt

SEQ ID NO: 181726 - DNA, 25 bp, Saccharomyces pastorianus
gtatggcgaaattaactccgaggat

SEQ ID NO: 181727 - DNA, 25 bp, Saccharomyces pastorianus
gcggcagacacgtatgggcatatcg

SEQ ID NO: 181728 - DNA, 25 bp, Saccharomyces pastorianus
gggcatatcgcggtaatcatccagc

SEQ ID NO: 181729 - DNA, 25 bp, Saccharomyces pastorianus
acacgtatgggcatatcgcggtaat

SEQ ID NO: 181730 - DNA, 25 bp, Saccharomyces pastorianus
ttaagggttgatgtggctcgttccg

SEQ ID NO: 181731 - DNA, 25 bp, Saccharomyces pastorianus
gttgatgtggctcgttccggcggca

SEQ ID NO: 181732 - DNA, 25 bp, Saccharomyces pastorianus
gtatgggcatatcgcggtaatcatc

SEQ ID NO: 181733 - DNA, 25 bp, Saccharomyces pastorianus
ttccggcggcagacacgtatgggca

SEQ ID NO: 181734 - DNA, 25 bp, Saccharomyces pastorianus
ccggcggcagacacgtatgggcata

SEQ ID NO: 181735 - DNA, 25 bp, Saccharomyces pastorianus
gcagacacgtatgggcatatcgcgg

SEQ ID NO: 181736 - DNA, 25 bp, Saccharomyces pastorianus
ggcggcagacacgtatgggcatatc

SEQ ID NO: 181737 - DNA, 25 bp, Saccharomyces pastorianus
acgtatgggcatatcgcggtaatca

SEQ ID NO: 181738 - DNA, 25 bp, Saccharomyces pastorianus
aagagcgtccaattatttatgcaga

SEQ ID NO: 181739 - DNA, 25 bp, Saccharomyces pastorianus
gaaggtccgcacgatggttgtattt

SEQ ID NO: 181740 - DNA, 25 bp, Saccharomyces pastorianus
ggttgtatttcgctgagaactgcat

SEQ ID NO: 181741 - DNA, 25 bp, Saccharomyces pastorianus
gacttctttgatactgctatttgtg

SEQ ID NO: 181742 - DNA, 25 bp, Saccharomyces pastorianus
gtcgagacgccttacccaaatttgg

SEQ ID NO: 181743 - DNA, 25 bp, Saccharomyces pastorianus
gggctctttcaggtcattgattcag

SEQ ID NO: 181744 - DNA, 25 bp, Saccharomyces pastorianus
tattagggccatcagacgacttctt

SEQ ID NO: 181745 - DNA, 25 bp, Saccharomyces pastorianus
gatttacaccatatttctccaacgt

SEQ ID NO: 181746 - DNA, 25 bp, Saccharomyces pastorianus
gcttccgcgtatttctctcaaaaat

SEQ ID NO: 181747 - DNA, 25 bp, Saccharomyces pastorianus
gagttagacgatggtagtttgcccc

SEQ ID NO: 181748 - DNA, 25 bp, Saccharomyces pastorianus
ttgtcttttacatgggctctttcag

SEQ ID NO: 181749 - DNA, 25 bp, Saccharomyces pastorianus
taatattacgatcgttcctcattcc

SEQ ID NO: 181750 - DNA, 25 bp, Saccharomyces pastorianus
atattacgatcgttcctcattccgt

SEQ ID NO: 181751 - DNA, 25 bp, Saccharomyces pastorianus
tactaatattacgatcgttcctcat

SEQ ID NO: 181752 - DNA, 25 bp, Saccharomyces pastorianus
aatattacgatcgttcctcattccg

SEQ ID NO: 181753 - DNA, 25 bp, Saccharomyces pastorianus
actaatattacgatcgttcctcatt

SEQ ID NO: 181754 - DNA, 25 bp, Saccharomyces pastorianus
atactaatattacgatcgttcctca

SEQ ID NO: 181755 - DNA, 25 bp, Saccharomyces pastorianus
cgttttatacgtttcattatcctat

SEQ ID NO: 181756 - DNA, 25 bp, Saccharomyces pastorianus
tacgatcgttcctcattccgtttta

SEQ ID NO: 181757 - DNA, 25 bp, Saccharomyces pastorianus
attacgatcgttcctcattccgttt

SEQ ID NO: 181758 - DNA, 25 bp, Saccharomyces pastorianus
tccgttttatacgtttcattatcct

SEQ ID NO: 181759 - DNA, 25 bp, Saccharomyces pastorianus
ttacgatcgttcctcattccgtttt

SEQ ID NO: 181760 - DNA, 25 bp, Saccharomyces pastorianus
tctcaaggatataggaattctcaaa

SEQ ID NO: 181761 - DNA, 25 bp, Saccharomyces pastorianus
cccaatcttcaattatgtatacaga

SEQ ID NO: 181762 - DNA, 25 bp, Saccharomyces pastorianus
ttcttctcaaggatataggaattct

SEQ ID NO: 181763 - DNA, 25 bp, Saccharomyces pastorianus
tcacccaatcttcaattatgtatac

SEQ ID NO: 181764 - DNA, 25 bp, Saccharomyces pastorianus
acccaatcttcaattatgtatacag

SEQ ID NO: 181765 - DNA, 25 bp, Saccharomyces pastorianus
ccaatcttcaattatgtatacagaa

SEQ ID NO: 181766 - DNA, 25 bp, Saccharomyces pastorianus
cttctcaaggatataggaattctca

SEQ ID NO: 181767 - DNA, 25 bp, Saccharomyces pastorianus
agttcttctcaaggatataggaatt

SEQ ID NO: 181768 - DNA, 25 bp, Saccharomyces pastorianus
ttctcaaggatataggaattctcaa

SEQ ID NO: 181769 - DNA, 25 bp, Saccharomyces pastorianus
tcttctcaaggatataggaattctc

SEQ ID NO: 181770 - DNA, 25 bp, Saccharomyces pastorianus
cacccaatcttcaattatgtataca

SEQ ID NO: 181771 - DNA, 25 bp, Saccharomyces pastorianus
atctattacattatgggtggtatgt

SEQ ID NO: 181772 - DNA, 25 bp, Saccharomyces pastorianus
ctattacattatgggtggtatgttg

SEQ ID NO: 181773 - DNA, 25 bp, Saccharomyces pastorianus
cattatgggtggtatgttggaataa

SEQ ID NO: 181774 - DNA, 25 bp, Saccharomyces pastorianus
cattagatctattacattatgggtg

SEQ ID NO: 181775 - DNA, 25 bp, Saccharomyces pastorianus
tctattacattatgggtggtatgtt

SEQ ID NO: 181776 - DNA, 25 bp, Saccharomyces pastorianus
ttagatctattacattatgggtggt

SEQ ID NO: 181777 - DNA, 25 bp, Saccharomyces pastorianus
attatgggtggtatgttggaataaa

SEQ ID NO: 181778 - DNA, 25 bp, Saccharomyces pastorianus
tcattagatctattacattatgggt

SEQ ID NO: 181779 - DNA, 25 bp, Saccharomyces pastorianus
gatctattacattatgggtggtatg

SEQ ID NO: 181780 - DNA, 25 bp, Saccharomyces pastorianus
ttcattagatctattacattatggg

SEQ ID NO: 181781 - DNA, 25 bp, Saccharomyces pastorianus
attagatctattacattatgggtgg

SEQ ID NO: 181782 - DNA, 25 bp, Saccharomyces pastorianus
ttacctcccgtgttattgatcaaat

SEQ ID NO: 181783 - DNA, 25 bp, Saccharomyces pastorianus
tattgatcaaattcgaagcagcttt

SEQ ID NO: 181784 - DNA, 25 bp, Saccharomyces pastorianus
atttgcttatgtgtgtgtcttggaa

SEQ ID NO: 181785 - DNA, 25 bp, Saccharomyces pastorianus
ttcaattttacctcccgtgttattg

SEQ ID NO: 181786 - DNA, 25 bp, Saccharomyces pastorianus
gcaaatttgcttatgtgtgtgtctt

SEQ ID NO: 181787 - DNA, 25 bp, Saccharomyces pastorianus
gctttaagagcaggcccaagtgcaa

SEQ ID NO: 181788 - DNA, 25 bp, Saccharomyces pastorianus
acctcccgtgttattgatcaaattc

SEQ ID NO: 181789 - DNA, 25 bp, Saccharomyces pastorianus
gtgtgtgtcttggaaaacttcaggt

SEQ ID NO: 181790 - DNA, 25 bp, Saccharomyces pastorianus
aagcagctttaagagcaggcccaag

SEQ ID NO: 181791 - DNA, 25 bp, Saccharomyces pastorianus
gcaggcccaagtgcaaatttgctta

SEQ ID NO: 181792 - DNA, 25 bp, Saccharomyces pastorianus
attttacctcccgtgttattgatca

SEQ ID NO: 181793 - DNA, 25 bp, Saccharomyces pastorianus
aaggatgtattggtttgagtcaaac

SEQ ID NO: 181794 - DNA, 25 bp, Saccharomyces pastorianus
agttcgtcctactcccggtgaggtg

SEQ ID NO: 181795 - DNA, 25 bp, Saccharomyces pastorianus
tattcacggatgtactaaaaagtca

SEQ ID NO: 181796 - DNA, 25 bp, Saccharomyces pastorianus
aagtcaagcaaatacagaaccagaa

SEQ ID NO: 181797 - DNA, 25 bp, Saccharomyces pastorianus
aaagctattgttcaaatggcgaaga

SEQ ID NO: 181798 - DNA, 25 bp, Saccharomyces pastorianus
aggctccttttcctgaagagaatat

SEQ ID NO: 181799 - DNA, 25 bp, Saccharomyces pastorianus
gaagagaatatcatcgacgcaaaga

SEQ ID NO: 181800 - DNA, 25 bp, Saccharomyces pastorianus
aaatgaggctccttttcctgaagag

SEQ ID NO: 181801 - DNA, 25 bp, Saccharomyces pastorianus
tcccggtgaggtggcttctaaagct

SEQ ID NO: 181802 - DNA, 25 bp, Saccharomyces pastorianus
tttatcacttgctacagaaggatgt

SEQ ID NO: 181803 - DNA, 25 bp, Saccharomyces pastorianus
gagcaaactaccatccaaactgaaa

SEQ ID NO: 181804 - DNA, 25 bp, Saccharomyces pastorianus
gaaagtgttgagacaaagggccaaa

SEQ ID NO: 181805 - DNA, 25 bp, Saccharomyces pastorianus
agcccgcaattcaggaaagtgttga

SEQ ID NO: 181806 - DNA, 25 bp, Saccharomyces pastorianus
atgtcccagtcgaaccctatcttac

SEQ ID NO: 181807 - DNA, 25 bp, Saccharomyces pastorianus
tatcaaagaagaaatagcccgcaat

SEQ ID NO: 181808 - DNA, 25 bp, Saccharomyces pastorianus
ggcctcgctattacaacagccatag

SEQ ID NO: 181809 - DNA, 25 bp, Saccharomyces pastorianus
atcttacgtggcctcgctattacaa

SEQ ID NO: 181810 - DNA, 25 bp, Saccharomyces pastorianus
agtcgaaccctatcttacgtggcct

SEQ ID NO: 181811 - DNA, 25 bp, Saccharomyces pastorianus
cggttatgctatctactttgactat

SEQ ID NO: 181812 - DNA, 25 bp, Saccharomyces pastorianus
tatgctatctactttgactatcaaa

SEQ ID NO: 181813 - DNA, 25 bp, Saccharomyces pastorianus
aaatagcccgcaattcaggaaagtg

SEQ ID NO: 181814 - DNA, 25 bp, Saccharomyces pastorianus
gctattacaacagccatagctgctc

SEQ ID NO: 181815 - DNA, 25 bp, Saccharomyces pastorianus
cagccactaatgaaggcggtgtcga

SEQ ID NO: 181816 - DNA, 25 bp, Saccharomyces pastorianus
gagtgaagttgcaccagaggagatc

SEQ ID NO: 181817 - DNA, 25 bp, Saccharomyces pastorianus
aagttggcggagctggttccatccc

SEQ ID NO: 181818 - DNA, 25 bp, Saccharomyces pastorianus
aatatggctctgaaaaagggtctcc

SEQ ID NO: 181819 - DNA, 25 bp, Saccharomyces pastorianus
ttagaagacccagccactaatgaag

SEQ ID NO: 181820 - DNA, 25 bp, Saccharomyces pastorianus
aaaactggcataaatatggctctga

SEQ ID NO: 181821 - DNA, 25 bp, Saccharomyces pastorianus
gaccatgaactgtccattcaagaca

SEQ ID NO: 181822 - DNA, 25 bp, Saccharomyces pastorianus
aagacggtgtcaagtataagattac

SEQ ID NO: 181823 - DNA, 25 bp, Saccharomyces pastorianus
ggatctagatctatcattacataca

SEQ ID NO: 181824 - DNA, 25 bp, Saccharomyces pastorianus
ggttccatcccagggcagtatgttc

SEQ ID NO: 181825 - DNA, 25 bp, Saccharomyces pastorianus
tgaaaaagggtctccagcaggtcca

SEQ ID NO: 181826 - DNA, 25 bp, Saccharomyces pastorianus
ttgatatctgctgtcgttacctcag

SEQ ID NO: 181827 - DNA, 25 bp, Saccharomyces pastorianus
atatctgctgtcgttacctcagtaa

SEQ ID NO: 181828 - DNA, 25 bp, Saccharomyces pastorianus
gtcttaacaatttcaagcttattca

SEQ ID NO: 181829 - DNA, 25 bp, Saccharomyces pastorianus
atggtacgctggcatgtcttaacaa

SEQ ID NO: 181830 - DNA, 25 bp, Saccharomyces pastorianus
gcgaaatactatggtacgctggcat

SEQ ID NO: 181831 - DNA, 25 bp, Saccharomyces pastorianus
ggcatgtcttaacaatttcaagctt

SEQ ID NO: 181832 - DNA, 25 bp, Saccharomyces pastorianus
actatggtacgctggcatgtcttaa

SEQ ID NO: 181833 - DNA, 25 bp, Saccharomyces pastorianus
cgttacctcagtaaagcgaaatact

SEQ ID NO: 181834 - DNA, 25 bp, Saccharomyces pastorianus
gctgtcgttacctcagtaaagcgaa

SEQ ID NO: 181835 - DNA, 25 bp, Saccharomyces pastorianus
atctgctgtcgttacctcagtaaag

SEQ ID NO: 181836 - DNA, 25 bp, Saccharomyces pastorianus
gtacgctggcatgtcttaacaattt

SEQ ID NO: 181837 - DNA, 25 bp, Saccharomyces pastorianus
atagtggtcctggtcacggtatttt

SEQ ID NO: 181838 - DNA, 25 bp, Saccharomyces pastorianus
ccaattactgtgatagccaagggaa

SEQ ID NO: 181839 - DNA, 25 bp, Saccharomyces pastorianus
ggtcacggtattttacaagctggta

SEQ ID NO: 181840 - DNA, 25 bp, Saccharomyces pastorianus
attcatagtggtcctggtcacggta

SEQ ID NO: 181841 - DNA, 25 bp, Saccharomyces pastorianus
tggtcctggtcacggtattttacaa

SEQ ID NO: 181842 - DNA, 25 bp, Saccharomyces pastorianus
gtattattcatagtggtcctggtca

SEQ ID NO: 181843 - DNA, 25 bp, Saccharomyces pastorianus
tactgtgatagccaagggaaccttg

SEQ ID NO: 181844 - DNA, 25 bp, Saccharomyces pastorianus
ttaataagtgaaacattcgaagctg

SEQ ID NO: 181845 - DNA, 25 bp, Saccharomyces pastorianus
gggaaccttggtggtattattcata

SEQ ID NO: 181846 - DNA, 25 bp, Saccharomyces pastorianus
tacaagctggtaaaaatgacgatga

SEQ ID NO: 181847 - DNA, 25 bp, Saccharomyces pastorianus
gacagttttcagtgcccccaattac

SEQ ID NO: 181848 - DNA, 25 bp, Saccharomyces pastorianus
ggcaccgtagttctgtgagcgcaat

SEQ ID NO: 181849 - DNA, 25 bp, Saccharomyces pastorianus
tgtagagccaggaccgtgttcgcga

SEQ ID NO: 181850 - DNA, 25 bp, Saccharomyces pastorianus
taggcgtcggactaccagttgatgt

SEQ ID NO: 181851 - DNA, 25 bp, Saccharomyces pastorianus
atctggccgcgaagacataactgga

SEQ ID NO: 181852 - DNA, 25 bp, Saccharomyces pastorianus
gaccgtgttcgcgaggaagttctat

SEQ ID NO: 181853 - DNA, 25 bp, Saccharomyces pastorianus
ttcggcggcttttcacaagtacatg

SEQ ID NO: 181854 - DNA, 25 bp, Saccharomyces pastorianus
gtggatgacgattcggcggcttttc

SEQ ID NO: 181855 - DNA, 25 bp, Saccharomyces pastorianus
gcgagacctatccaaggctctagat

SEQ ID NO: 181856 - DNA, 25 bp, Saccharomyces pastorianus
aggtgtttgctaggcgtcggactac

SEQ ID NO: 181857 - DNA, 25 bp, Saccharomyces pastorianus
agttctatagatggtctgctgccct

SEQ ID NO: 181858 - DNA, 25 bp, Saccharomyces pastorianus
gaagccttagcgttccggcagaaca

SEQ ID NO: 181859 - DNA, 25 bp, Saccharomyces pastorianus
atgtcttcctcggtcatttcttctt

SEQ ID NO: 181860 - DNA, 25 bp, Saccharomyces pastorianus
ctcggtcatttcttcttctgcaacg

SEQ ID NO: 181861 - DNA, 25 bp, Saccharomyces pastorianus
tcggtcatttcttcttctgcaacga

SEQ ID NO: 181862 - DNA, 25 bp, Saccharomyces pastorianus
atcatccgtcattcaaaccagtagt

SEQ ID NO: 181863 - DNA, 25 bp, Saccharomyces pastorianus
tgaatcatctaaatcatccgtcatt

SEQ ID NO: 181864 - DNA, 25 bp, Saccharomyces pastorianus
gacctccacttctatattctctgaa

SEQ ID NO: 181865 - DNA, 25 bp, Saccharomyces pastorianus
tgcaacgacctccacttctatattc

SEQ ID NO: 181866 - DNA, 25 bp, Saccharomyces pastorianus
ggtcatttcttcttctgcaacgacc

SEQ ID NO: 181867 - DNA, 25 bp, Saccharomyces pastorianus
ttctgcaacgacctccacttctata

SEQ ID NO: 181868 - DNA, 25 bp, Saccharomyces pastorianus
cggtcatttcttcttctgcaacgac

SEQ ID NO: 181869 - DNA, 25 bp, Saccharomyces pastorianus
gcaacgacctccacttctatattct

SEQ ID NO: 181870 - DNA, 25 bp, Saccharomyces pastorianus
gtcaatatcacagaaaaatcacctc

SEQ ID NO: 181871 - DNA, 25 bp, Saccharomyces pastorianus
aatatcacagaaaaatcacctccaa

SEQ ID NO: 181872 - DNA, 25 bp, Saccharomyces pastorianus
caatatcacagaaaaatcacctcca

SEQ ID NO: 181873 - DNA, 25 bp, Saccharomyces pastorianus
cagaaaaatcacctccaaaatcacc

SEQ ID NO: 181874 - DNA, 25 bp, Saccharomyces pastorianus
tgctcttaatatatgcgttatacca

SEQ ID NO: 181875 - DNA, 25 bp, Saccharomyces pastorianus
tatcacagaaaaatcacctccaaaa

SEQ ID NO: 181876 - DNA, 25 bp, Saccharomyces pastorianus
cacagaaaaatcacctccaaaatca

SEQ ID NO: 181877 - DNA, 25 bp, Saccharomyces pastorianus
atatcacagaaaaatcacctccaaa

SEQ ID NO: 181878 - DNA, 25 bp, Saccharomyces pastorianus
tcaatatcacagaaaaatcacctcc

SEQ ID NO: 181879 - DNA, 25 bp, Saccharomyces pastorianus
atcacagaaaaatcacctccaaaat

SEQ ID NO: 181880 - DNA, 25 bp, Saccharomyces pastorianus
tcacagaaaaatcacctccaaaatc

SEQ ID NO: 181881 - DNA, 25 bp, Saccharomyces pastorianus
cccaatccaaattaaaccagtgaga

SEQ ID NO: 181882 - DNA, 25 bp, Saccharomyces pastorianus
ttcatccaaagaaacatccaaattt

SEQ ID NO: 181883 - DNA, 25 bp, Saccharomyces pastorianus
tgacgacctagagttaaccaaccct

SEQ ID NO: 181884 - DNA, 25 bp, Saccharomyces pastorianus
atcatcaaatgacgacctagagtta

SEQ ID NO: 181885 - DNA, 25 bp, Saccharomyces pastorianus
ttaacgatgagttcgatctttcttc

SEQ ID NO: 181886 - DNA, 25 bp, Saccharomyces pastorianus
gtaagtcaagaattaattcatccaa

SEQ ID NO: 181887 - DNA, 25 bp, Saccharomyces pastorianus
gttcgatctttcttcatcatcaaat

SEQ ID NO: 181888 - DNA, 25 bp, Saccharomyces pastorianus
ctaaggtggatcatataagtaagtc

SEQ ID NO: 181889 - DNA, 25 bp, Saccharomyces pastorianus
gatctttcttcatcatcaaatgacg

SEQ ID NO: 181890 - DNA, 25 bp, Saccharomyces pastorianus
gagttcgatctttcttcatcatcaa

SEQ ID NO: 181891 - DNA, 25 bp, Saccharomyces pastorianus
ttccccaatccaaattaaaccagtg

SEQ ID NO: 181892 - DNA, 25 bp, Saccharomyces pastorianus
gaacgccacgtgtactacatagatt

SEQ ID NO: 181893 - DNA, 25 bp, Saccharomyces pastorianus
tctggtagaaggtttggtttactca

SEQ ID NO: 181894 - DNA, 25 bp, Saccharomyces pastorianus
actacatagatttacggtcaccaaa

SEQ ID NO: 181895 - DNA, 25 bp, Saccharomyces pastorianus
tgaagttactgatacctctgaggac

SEQ ID NO: 181896 - DNA, 25 bp, Saccharomyces pastorianus
acggtgtctatgatgtgtccttttc

SEQ ID NO: 181897 - DNA, 25 bp, Saccharomyces pastorianus
gtggacttccattctcgtaaagcag

SEQ ID NO: 181898 - DNA, 25 bp, Saccharomyces pastorianus
gaaagagttcaaccgaacgccacgt

SEQ ID NO: 181899 - DNA, 25 bp, Saccharomyces pastorianus
gatacctctgaggacggtgtctatg

SEQ ID NO: 181900 - DNA, 25 bp, Saccharomyces pastorianus
gcgccaaaggtaatgttttaggcaa

SEQ ID NO: 181901 - DNA, 25 bp, Saccharomyces pastorianus
tacttcatttctacacgaaagagtt

SEQ ID NO: 181902 - DNA, 25 bp, Saccharomyces pastorianus
gatgtgtccttttcttctggtagaa

SEQ ID NO: 181903 - DNA, 25 bp, Saccharomyces pastorianus
tggtgcacgggctttctgtatattg

SEQ ID NO: 181904 - DNA, 25 bp, Saccharomyces pastorianus
gtcgcttttcggagctacaattccc

SEQ ID NO: 181905 - DNA, 25 bp, Saccharomyces pastorianus
gcacgggctttctgtatattgaact

SEQ ID NO: 181906 - DNA, 25 bp, Saccharomyces pastorianus
tgaactttccgtcgcttttcggagc

SEQ ID NO: 181907 - DNA, 25 bp, Saccharomyces pastorianus
gcttttcggagctacaattccccta

SEQ ID NO: 181908 - DNA, 25 bp, Saccharomyces pastorianus
gtgcacgggctttctgtatattgaa

SEQ ID NO: 181909 - DNA, 25 bp, Saccharomyces pastorianus
cctacccggcttgtcggcattaagt

SEQ ID NO: 181910 - DNA, 25 bp, Saccharomyces pastorianus
tgtatattgaactttccgtcgcttt

SEQ ID NO: 181911 - DNA, 25 bp, Saccharomyces pastorianus
atattgaactttccgtcgcttttcg

SEQ ID NO: 181912 - DNA, 25 bp, Saccharomyces pastorianus
tttccgtcgcttttcggagctacaa

SEQ ID NO: 181913 - DNA, 25 bp, Saccharomyces pastorianus
gggctttctgtatattgaactttcc

SEQ ID NO: 181914 - DNA, 25 bp, Saccharomyces pastorianus
aagaaattggaagccgccgcccaag

SEQ ID NO: 181915 - DNA, 25 bp, Saccharomyces pastorianus
gaaggtgttgcaaaccccattatga

SEQ ID NO: 181916 - DNA, 25 bp, Saccharomyces pastorianus
attttacggagctgcaggtggtgcc

SEQ ID NO: 181917 - DNA, 25 bp, Saccharomyces pastorianus
tagatgcttcgcaagcggcctccac

SEQ ID NO: 181918 - DNA, 25 bp, Saccharomyces pastorianus
gaagctcaacgtgttcaagctaaga

SEQ ID NO: 181919 - DNA, 25 bp, Saccharomyces pastorianus
ttctgggtgctggagcaggccccac

SEQ ID NO: 181920 - DNA, 25 bp, Saccharomyces pastorianus
gaatcagctagaatcgtacgcgttt

SEQ ID NO: 181921 - DNA, 25 bp, Saccharomyces pastorianus
gctagaatcgtacgcgtttactttg

SEQ ID NO: 181922 - DNA, 25 bp, Saccharomyces pastorianus
ccgccgcccaagatgctataaattg

SEQ ID NO: 181923 - DNA, 25 bp, Saccharomyces pastorianus
tggtgccccaggagcaggcccagtt

SEQ ID NO: 181924 - DNA, 25 bp, Saccharomyces pastorianus
gcggcctccaccgaggaatacaagg

SEQ ID NO: 181925 - DNA, 25 bp, Saccharomyces pastorianus
gtgtacaccatcacgtggtttgttt

SEQ ID NO: 181926 - DNA, 25 bp, Saccharomyces pastorianus
cgtggtttgtttgaaggcatcggtc

SEQ ID NO: 181927 - DNA, 25 bp, Saccharomyces pastorianus
caacgtgtacaccatcacgtggttt

SEQ ID NO: 181928 - DNA, 25 bp, Saccharomyces pastorianus
ggtttgtttgaaggcatcggtccgc

SEQ ID NO: 181929 - DNA, 25 bp, Saccharomyces pastorianus
cacgtggtttgtttgaaggcatcgg

SEQ ID NO: 181930 - DNA, 25 bp, Saccharomyces pastorianus
gtggtttgtttgaaggcatcggtcc

SEQ ID NO: 181931 - DNA, 25 bp, Saccharomyces pastorianus
ccatcacgtggtttgtttgaaggca

SEQ ID NO: 181932 - DNA, 25 bp, Saccharomyces pastorianus
gaaacaacgtgtacaccatcacgtg

SEQ ID NO: 181933 - DNA, 25 bp, Saccharomyces pastorianus
accatcacgtggtttgtttgaaggc

SEQ ID NO: 181934 - DNA, 25 bp, Saccharomyces pastorianus
gtacaccatcacgtggtttgtttga

SEQ ID NO: 181935 - DNA, 25 bp, Saccharomyces pastorianus
atcacgtggtttgtttgaaggcatc

SEQ ID NO: 181936 - DNA, 25 bp, Saccharomyces pastorianus
gttctcagctagtgtcctttgcctt

SEQ ID NO: 181937 - DNA, 25 bp, Saccharomyces pastorianus
ctcctcttctttttcattctgtaat

SEQ ID NO: 181938 - DNA, 25 bp, Saccharomyces pastorianus
tgtaatttttcttgttccagtctct

SEQ ID NO: 181939 - DNA, 25 bp, Saccharomyces pastorianus
ttttgcagtctctctttttcttcct

SEQ ID NO: 181940 - DNA, 25 bp, Saccharomyces pastorianus
tctttttgtcttagcgcgttctcag

SEQ ID NO: 181941 - DNA, 25 bp, Saccharomyces pastorianus
ttctctacgctgttgctcttctaac

SEQ ID NO: 181942 - DNA, 25 bp, Saccharomyces pastorianus
gccaattgttgtaatctcttctttt

SEQ ID NO: 181943 - DNA, 25 bp, Saccharomyces pastorianus
ttgcgcttttgttcttctttctgtt

SEQ ID NO: 181944 - DNA, 25 bp, Saccharomyces pastorianus
gtcttttcatttcacgctcttctaa

SEQ ID NO: 181945 - DNA, 25 bp, Saccharomyces pastorianus
agtctcttttcttctctaacacgtt

SEQ ID NO: 181946 - DNA, 25 bp, Saccharomyces pastorianus
gctcttctaattccttttgcagtct

SEQ ID NO: 181947 - DNA, 25 bp, Saccharomyces pastorianus
agcccgtgtattcggttatgagata

SEQ ID NO: 181948 - DNA, 25 bp, Saccharomyces pastorianus
tcacaacgaacaaccagccaaaatt

SEQ ID NO: 181949 - DNA, 25 bp, Saccharomyces pastorianus
ggtaaggaagtacatctactctcta

SEQ ID NO: 181950 - DNA, 25 bp, Saccharomyces pastorianus
tcgtgtagtcatcaactcggtaagg

SEQ ID NO: 181951 - DNA, 25 bp, Saccharomyces pastorianus
taaaagggctgttgggttagctcgt

SEQ ID NO: 181952 - DNA, 25 bp, Saccharomyces pastorianus
tctctagcccgtgtattcggttatg

SEQ ID NO: 181953 - DNA, 25 bp, Saccharomyces pastorianus
tacatctactctctagcccgtgtat

SEQ ID NO: 181954 - DNA, 25 bp, Saccharomyces pastorianus
gatgacatcacaacgaacaaccagc

SEQ ID NO: 181955 - DNA, 25 bp, Saccharomyces pastorianus
tagctcgtgtagtcatcaactcggt

SEQ ID NO: 181956 - DNA, 25 bp, Saccharomyces pastorianus
aggaagtacatctactctctagccc

SEQ ID NO: 181957 - DNA, 25 bp, Saccharomyces pastorianus
gttgggttagctcgtgtagtcatca

SEQ ID NO: 181958 - DNA, 25 bp, Saccharomyces pastorianus
gacgattctacaacgttcgaagcat

SEQ ID NO: 181959 - DNA, 25 bp, Saccharomyces pastorianus
aaaagtctgtggaaggcgcttacat

SEQ ID NO: 181960 - DNA, 25 bp, Saccharomyces pastorianus
aggcgcttacattgacgattctaca

SEQ ID NO: 181961 - DNA, 25 bp, Saccharomyces pastorianus
gtggaaggcgcttacattgacgatt

SEQ ID NO: 181962 - DNA, 25 bp, Saccharomyces pastorianus
gttcgaagcatttcatctcgactct

SEQ ID NO: 181963 - DNA, 25 bp, Saccharomyces pastorianus
gtacccaacattaatcaatcacatg

SEQ ID NO: 181964 - DNA, 25 bp, Saccharomyces pastorianus
tacaacgttcgaagcatttcatctc

SEQ ID NO: 181965 - DNA, 25 bp, Saccharomyces pastorianus
tttcagtacccaacattaatcaatc

SEQ ID NO: 181966 - DNA, 25 bp, Saccharomyces pastorianus
gaagcatttcatctcgactctcgtt

SEQ ID NO: 181967 - DNA, 25 bp, Saccharomyces pastorianus
agaatataggatttcagtacccaac

SEQ ID NO: 181968 - DNA, 25 bp, Saccharomyces pastorianus
gcatttcatctcgactctcgtttat

SEQ ID NO: 181969 - DNA, 25 bp, Saccharomyces pastorianus
caattatagacttaccgaggtgcct

SEQ ID NO: 181970 - DNA, 25 bp, Saccharomyces pastorianus
ttttggcgcctatgtgtgttcgtat

SEQ ID NO: 181971 - DNA, 25 bp, Saccharomyces pastorianus
gaatgccaattatagacttaccgag

SEQ ID NO: 181972 - DNA, 25 bp, Saccharomyces pastorianus
ttggcgcctatgtgtgttcgtatgc

SEQ ID NO: 181973 - DNA, 25 bp, Saccharomyces pastorianus
tttggcgcctatgtgtgttcgtatg

SEQ ID NO: 181974 - DNA, 25 bp, Saccharomyces pastorianus
ccaattatagacttaccgaggtgcc

SEQ ID NO: 181975 - DNA, 25 bp, Saccharomyces pastorianus
gccaattatagacttaccgaggtgc

SEQ ID NO: 181976 - DNA, 25 bp, Saccharomyces pastorianus
tttttggcgcctatgtgtgttcgta

SEQ ID NO: 181977 - DNA, 25 bp, Saccharomyces pastorianus
atgccaattatagacttaccgaggt

SEQ ID NO: 181978 - DNA, 25 bp, Saccharomyces pastorianus
aatgccaattatagacttaccgagg

SEQ ID NO: 181979 - DNA, 25 bp, Saccharomyces pastorianus
gtcgtcactggagcgattggttttt

SEQ ID NO: 181980 - DNA, 25 bp, Saccharomyces pastorianus
agcctattctttatcattcttctat

SEQ ID NO: 181981 - DNA, 25 bp, Saccharomyces pastorianus
ggtgtcatcccagcgagaagcctat

SEQ ID NO: 181982 - DNA, 25 bp, Saccharomyces pastorianus
atctgcattatgttgtgtcgtcact

SEQ ID NO: 181983 - DNA, 25 bp, Saccharomyces pastorianus
tttgcacattcttcaggtgtcatcc

SEQ ID NO: 181984 - DNA, 25 bp, Saccharomyces pastorianus
gacaacctcattagttaccatcttg

SEQ ID NO: 181985 - DNA, 25 bp, Saccharomyces pastorianus
agttattactgtcgtgctctatctc

SEQ ID NO: 181986 - DNA, 25 bp, Saccharomyces pastorianus
gttcaatctatacgttcatccactc

SEQ ID NO: 181987 - DNA, 25 bp, Saccharomyces pastorianus
tgagctgtacttcatttactccagt

SEQ ID NO: 181988 - DNA, 25 bp, Saccharomyces pastorianus
gattccatatcaaccctggtacttg

SEQ ID NO: 181989 - DNA, 25 bp, Saccharomyces pastorianus
ttccgttgtcgtttgtgggttcaat

SEQ ID NO: 181990 - DNA, 25 bp, Saccharomyces pastorianus
ccctatattattttgtctctttcct

SEQ ID NO: 181991 - DNA, 25 bp, Saccharomyces pastorianus
tggttatacccgagtcattactttt

SEQ ID NO: 181992 - DNA, 25 bp, Saccharomyces pastorianus
taccggtgccttttctagtgatttt

SEQ ID NO: 181993 - DNA, 25 bp, Saccharomyces pastorianus
gaaaaatcaggcatcatcatcttat

SEQ ID NO: 181994 - DNA, 25 bp, Saccharomyces pastorianus
tagttccgtcggctgaaagttcaat

SEQ ID NO: 181995 - DNA, 25 bp, Saccharomyces pastorianus
ttcagtgcccatcaattgtgtacgt

SEQ ID NO: 181996 - DNA, 25 bp, Saccharomyces pastorianus
ctttctgccttctttcaggatagaa

SEQ ID NO: 181997 - DNA, 25 bp, Saccharomyces pastorianus
cgtcgctgctcttggttccaaaata

SEQ ID NO: 181998 - DNA, 25 bp, Saccharomyces pastorianus
atcttataacaacctagccgttcca

SEQ ID NO: 181999 - DNA, 25 bp, Saccharomyces pastorianus
atagagaggcacttctttctgcctt

SEQ ID NO: 182000 - DNA, 25 bp, Saccharomyces pastorianus
gtacgtatagccgtgccacaggaaa

SEQ ID NO: 182001 - DNA, 25 bp, Saccharomyces pastorianus
ttttgtgggagaccgagtctgattt

SEQ ID NO: 182002 - DNA, 25 bp, Saccharomyces pastorianus
gggtcaataatcttttgtgggagac

SEQ ID NO: 182003 - DNA, 25 bp, Saccharomyces pastorianus
ctgatttggtcagcgcaggtgcaga

SEQ ID NO: 182004 - DNA, 25 bp, Saccharomyces pastorianus
ttaagtcattgaacgcacataagga

SEQ ID NO: 182005 - DNA, 25 bp, Saccharomyces pastorianus
ataatcttttgtgggagaccgagtc

SEQ ID NO: 182006 - DNA, 25 bp, Saccharomyces pastorianus
ttggtcagcgcaggtgcagacgctt

SEQ ID NO: 182007 - DNA, 25 bp, Saccharomyces pastorianus
accgagtctgatttggtcagcgcag

SEQ ID NO: 182008 - DNA, 25 bp, Saccharomyces pastorianus
agtctgatttggtcagcgcaggtgc

SEQ ID NO: 182009 - DNA, 25 bp, Saccharomyces pastorianus
gtcattgaacgcacataaggacggg

SEQ ID NO: 182010 - DNA, 25 bp, Saccharomyces pastorianus
atcttttgtgggagaccgagtctga

SEQ ID NO: 182011 - DNA, 25 bp, Saccharomyces pastorianus
gattattaagtcattgaacgcacat

SEQ ID NO: 182012 - DNA, 25 bp, Saccharomyces pastorianus
atttgctggccacccatggtaatga

SEQ ID NO: 182013 - DNA, 25 bp, Saccharomyces pastorianus
aaaattcgagctctttggcggcaac

SEQ ID NO: 182014 - DNA, 25 bp, Saccharomyces pastorianus
gatcagcgagttggtttcatgcgaa

SEQ ID NO: 182015 - DNA, 25 bp, Saccharomyces pastorianus
aagtggactggcatacccgttggcg

SEQ ID NO: 182016 - DNA, 25 bp, Saccharomyces pastorianus
aacttttaatgtgccttcctccgag

SEQ ID NO: 182017 - DNA, 25 bp, Saccharomyces pastorianus
tcaggtgcccgaatctcaggtgaaa

SEQ ID NO: 182018 - DNA, 25 bp, Saccharomyces pastorianus
gagctctacgaaacgttccttgata

SEQ ID NO: 182019 - DNA, 25 bp, Saccharomyces pastorianus
ttaccgaaatcaaggactccgcttc

SEQ ID NO: 182020 - DNA, 25 bp, Saccharomyces pastorianus
ggaccagatcagcacaatttttcaa

SEQ ID NO: 182021 - DNA, 25 bp, Saccharomyces pastorianus
tcgcgtgcgcgctaattttgaagaa

SEQ ID NO: 182022 - DNA, 25 bp, Saccharomyces pastorianus
aagcaacgcatattggcctggacca

SEQ ID NO: 182023 - DNA, 25 bp, Saccharomyces pastorianus
ttaacaacagaaatgcaaagcatgc

SEQ ID NO: 182024 - DNA, 25 bp, Saccharomyces pastorianus
gggcaattatctgcttaacaacaga

SEQ ID NO: 182025 - DNA, 25 bp, Saccharomyces pastorianus
tttgggcaattatctgcttaacaac

SEQ ID NO: 182026 - DNA, 25 bp, Saccharomyces pastorianus
gcaattatctgcttaacaacagaaa

SEQ ID NO: 182027 - DNA, 25 bp, Saccharomyces pastorianus
ctttgggcaattatctgcttaacaa

SEQ ID NO: 182028 - DNA, 25 bp, Saccharomyces pastorianus
ttgggcaattatctgcttaacaaca

SEQ ID NO: 182029 - DNA, 25 bp, Saccharomyces pastorianus
atctgcttaacaacagaaatgcaaa

SEQ ID NO: 182030 - DNA, 25 bp, Saccharomyces pastorianus
gctttgggcaattatctgcttaaca

SEQ ID NO: 182031 - DNA, 25 bp, Saccharomyces pastorianus
taacaacagaaatgcaaagcatgcg

SEQ ID NO: 182032 - DNA, 25 bp, Saccharomyces pastorianus
ggcaattatctgcttaacaacagaa

SEQ ID NO: 182033 - DNA, 25 bp, Saccharomyces pastorianus
tgggcaattatctgcttaacaacag

SEQ ID NO: 182034 - DNA, 25 bp, Saccharomyces pastorianus
aaatccacattcttatcagatatca

SEQ ID NO: 182035 - DNA, 25 bp, Saccharomyces pastorianus
acataccatattatagccttaatca

SEQ ID NO: 182036 - DNA, 25 bp, Saccharomyces pastorianus
catattatagccttaatcacaatgg

SEQ ID NO: 182037 - DNA, 25 bp, Saccharomyces pastorianus
taccatattatagccttaatcacaa

SEQ ID NO: 182038 - DNA, 25 bp, Saccharomyces pastorianus
gtatatctacataccatattatagc

SEQ ID NO: 182039 - DNA, 25 bp, Saccharomyces pastorianus
cataccatattatagccttaatcac

SEQ ID NO: 182040 - DNA, 25 bp, Saccharomyces pastorianus
tatatctacataccatattatagcc

SEQ ID NO: 182041 - DNA, 25 bp, Saccharomyces pastorianus
tctacataccatattatagccttaa

SEQ ID NO: 182042 - DNA, 25 bp, Saccharomyces pastorianus
ataccatattatagccttaatcaca

SEQ ID NO: 182043 - DNA, 25 bp, Saccharomyces pastorianus
atctacataccatattatagcctta

SEQ ID NO: 182044 - DNA, 25 bp, Saccharomyces pastorianus
aaaatccacattcttatcagatatc

SEQ ID NO: 182045 - DNA, 25 bp, Saccharomyces pastorianus
attcggatccgattccaatagcgat

SEQ ID NO: 182046 - DNA, 25 bp, Saccharomyces pastorianus
ttacaagcgtatctatcgtccctga

SEQ ID NO: 182047 - DNA, 25 bp, Saccharomyces pastorianus
atcctcaaacttccaatatgctacc

SEQ ID NO: 182048 - DNA, 25 bp, Saccharomyces pastorianus
gtatttcaacagcaggcctttctac

SEQ ID NO: 182049 - DNA, 25 bp, Saccharomyces pastorianus
aggcctttctacaacagcaactagc

SEQ ID NO: 182050 - DNA, 25 bp, Saccharomyces pastorianus
acaacagcgggagcagccacaacaa

SEQ ID NO: 182051 - DNA, 25 bp, Saccharomyces pastorianus
tcgtccctgaacaccgatactatga

SEQ ID NO: 182052 - DNA, 25 bp, Saccharomyces pastorianus
gcaacagcatgtatcacgaccactg

SEQ ID NO: 182053 - DNA, 25 bp, Saccharomyces pastorianus
tagcgatgacgcaaagcccaactcc

SEQ ID NO: 182054 - DNA, 25 bp, Saccharomyces pastorianus
gccacaacaacatattacttctcca

SEQ ID NO: 182055 - DNA, 25 bp, Saccharomyces pastorianus
aaatggctcttcttcgggcgatata

SEQ ID NO: 182056 - DNA, 25 bp, Saccharomyces pastorianus
tgaaagtgctattgggttttggtta

SEQ ID NO: 182057 - DNA, 25 bp, Saccharomyces pastorianus
aaaggcaatctgtgaaagtgctatt

SEQ ID NO: 182058 - DNA, 25 bp, Saccharomyces pastorianus
ggtagatgcatattgcagaaaggca

SEQ ID NO: 182059 - DNA, 25 bp, Saccharomyces pastorianus
gtaaagtcgaattgggtagatgcat

SEQ ID NO: 182060 - DNA, 25 bp, Saccharomyces pastorianus
gtttatttgcaagttgtaaagtcga

SEQ ID NO: 182061 - DNA, 25 bp, Saccharomyces pastorianus
tttggttaaaccacggagtagatgg

SEQ ID NO: 182062 - DNA, 25 bp, Saccharomyces pastorianus
cgaattgggtagatgcatattgcag

SEQ ID NO: 182063 - DNA, 25 bp, Saccharomyces pastorianus
atctgtgaaagtgctattgggtttt

SEQ ID NO: 182064 - DNA, 25 bp, Saccharomyces pastorianus
tacctacgtttatttgcaagttgta

SEQ ID NO: 182065 - DNA, 25 bp, Saccharomyces pastorianus
tatacctacgtttatttgcaagttg

SEQ ID NO: 182066 - DNA, 25 bp, Saccharomyces pastorianus
gaactatacctacgtttatttgcaa

SEQ ID NO: 182067 - DNA, 25 bp, Saccharomyces pastorianus
aggtatgagaagctttcatcgaagg

SEQ ID NO: 182068 - DNA, 25 bp, Saccharomyces pastorianus
gtagtcacactaccaatatattatc

SEQ ID NO: 182069 - DNA, 25 bp, Saccharomyces pastorianus
tgttagaagatgacataaggtatga

SEQ ID NO: 182070 - DNA, 25 bp, Saccharomyces pastorianus
gtgttagaagatgacataaggtatg

SEQ ID NO: 182071 - DNA, 25 bp, Saccharomyces pastorianus
gtcacactaccaatatattatcata

SEQ ID NO: 182072 - DNA, 25 bp, Saccharomyces pastorianus
gttagaagatgacataaggtatgag

SEQ ID NO: 182073 - DNA, 25 bp, Saccharomyces pastorianus
actagtagtcacactaccaatatat

SEQ ID NO: 182074 - DNA, 25 bp, Saccharomyces pastorianus
ggtatgagaagctttcatcgaaggt

SEQ ID NO: 182075 - DNA, 25 bp, Saccharomyces pastorianus
ctagtagtcacactaccaatatatt

SEQ ID NO: 182076 - DNA, 25 bp, Saccharomyces pastorianus
gtatgagaagctttcatcgaaggta

SEQ ID NO: 182077 - DNA, 25 bp, Saccharomyces pastorianus
aactagtagtcacactaccaatata

SEQ ID NO: 182078 - DNA, 25 bp, Saccharomyces pastorianus
gagcgacctggtaaaatcaccctaa

SEQ ID NO: 182079 - DNA, 25 bp, Saccharomyces pastorianus
aatcatcaggaatagtggccctcat

SEQ ID NO: 182080 - DNA, 25 bp, Saccharomyces pastorianus
atcaccctaactaatgtcagcatcc

SEQ ID NO: 182081 - DNA, 25 bp, Saccharomyces pastorianus
gtaatcatccagatcaaggcgacag

SEQ ID NO: 182082 - DNA, 25 bp, Saccharomyces pastorianus
acacctccctttgatgggaccttga

SEQ ID NO: 182083 - DNA, 25 bp, Saccharomyces pastorianus
atagggtggcacttgagcccggaat

SEQ ID NO: 182084 - DNA, 25 bp, Saccharomyces pastorianus
gcgggtcagatatccattactatac

SEQ ID NO: 182085 - DNA, 25 bp, Saccharomyces pastorianus
atacctgacaggttttcaccggaga

SEQ ID NO: 182086 - DNA, 25 bp, Saccharomyces pastorianus
tttaaaatttgctgcgacacctccc

SEQ ID NO: 182087 - DNA, 25 bp, Saccharomyces pastorianus
ggcagatacaacctggaccccaatt

SEQ ID NO: 182088 - DNA, 25 bp, Saccharomyces pastorianus
gaagctattgttctagagcgacctg

SEQ ID NO: 182089 - DNA, 25 bp, Saccharomyces pastorianus
tacgcataacgcccatcattatcca

SEQ ID NO: 182090 - DNA, 25 bp, Saccharomyces pastorianus
actctcacattccactccatcaccc

SEQ ID NO: 182091 - DNA, 25 bp, Saccharomyces pastorianus
gcatatgcacacggatgctacagta

SEQ ID NO: 182092 - DNA, 25 bp, Saccharomyces pastorianus
tccatcacccatctctcaccatcag

SEQ ID NO: 182093 - DNA, 25 bp, Saccharomyces pastorianus
acgcataacgcccatcattatccac

SEQ ID NO: 182094 - DNA, 25 bp, Saccharomyces pastorianus
tactctcacattccactccatcacc

SEQ ID NO: 182095 - DNA, 25 bp, Saccharomyces pastorianus
catcacccatctctcaccatcagta

SEQ ID NO: 182096 - DNA, 25 bp, Saccharomyces pastorianus
ttacgcataacgcccatcattatcc

SEQ ID NO: 182097 - DNA, 25 bp, Saccharomyces pastorianus
ccatcacccatctctcaccatcagt

SEQ ID NO: 182098 - DNA, 25 bp, Saccharomyces pastorianus
atctctcaccatcagtaccaaatgc

SEQ ID NO: 182099 - DNA, 25 bp, Saccharomyces pastorianus
cgcataacgcccatcattatccaca

SEQ ID NO: 182100 - DNA, 25 bp, Saccharomyces pastorianus
accagctgcaagttttagcgggaat

SEQ ID NO: 182101 - DNA, 25 bp, Saccharomyces pastorianus
tagtaacaacataccagctgcaagt

SEQ ID NO: 182102 - DNA, 25 bp, Saccharomyces pastorianus
tacataccgtattacccgttagcac

SEQ ID NO: 182103 - DNA, 25 bp, Saccharomyces pastorianus
taccgatatacagtcccaacaatta

SEQ ID NO: 182104 - DNA, 25 bp, Saccharomyces pastorianus
gcgggaataacactaccgatataca

SEQ ID NO: 182105 - DNA, 25 bp, Saccharomyces pastorianus
ccgttagcacaccaagccatagtaa

SEQ ID NO: 182106 - DNA, 25 bp, Saccharomyces pastorianus
tatgtcaaacaccaattaatcccgt

SEQ ID NO: 182107 - DNA, 25 bp, Saccharomyces pastorianus
gaggacattcctgatagtatattag

SEQ ID NO: 182108 - DNA, 25 bp, Saccharomyces pastorianus
attagagctgaagatcctgatcgat

SEQ ID NO: 182109 - DNA, 25 bp, Saccharomyces pastorianus
ttaatcccgttactcctgtgctaga

SEQ ID NO: 182110 - DNA, 25 bp, Saccharomyces pastorianus
cgagagttactagtttacataccgt

SEQ ID NO: 182111 - DNA, 25 bp, Saccharomyces pastorianus
tggagcctgtactgggattttggca

SEQ ID NO: 182112 - DNA, 25 bp, Saccharomyces pastorianus
gccttgcatttatttccgccaaaaa

SEQ ID NO: 182113 - DNA, 25 bp, Saccharomyces pastorianus
gtgacgatacagatgcgttgcccat

SEQ ID NO: 182114 - DNA, 25 bp, Saccharomyces pastorianus
gatctcctgtcgttgaagtaccagt

SEQ ID NO: 182115 - DNA, 25 bp, Saccharomyces pastorianus
tttcgatatctgagctaggtaccgg

SEQ ID NO: 182116 - DNA, 25 bp, Saccharomyces pastorianus
ctaggtaccggagctgacatcattg

SEQ ID NO: 182117 - DNA, 25 bp, Saccharomyces pastorianus
gaagtaccagtaactgtcccttgct

SEQ ID NO: 182118 - DNA, 25 bp, Saccharomyces pastorianus
aatcttttcagatcgatctcctgtc

SEQ ID NO: 182119 - DNA, 25 bp, Saccharomyces pastorianus
gatgcgttgcccataggtggtttag

SEQ ID NO: 182120 - DNA, 25 bp, Saccharomyces pastorianus
attggtgcacgtgaagctgccttaa

SEQ ID NO: 182121 - DNA, 25 bp, Saccharomyces pastorianus
tgctcagatcgccttgcatttattt

SEQ ID NO: 182122 - DNA, 25 bp, Saccharomyces pastorianus
gttttcgagctttgagggtacgcaa

SEQ ID NO: 182123 - DNA, 25 bp, Saccharomyces pastorianus
aaagcatcacgttttcaataggcag

SEQ ID NO: 182124 - DNA, 25 bp, Saccharomyces pastorianus
gggtgcacaagacgcatatgtatca

SEQ ID NO: 182125 - DNA, 25 bp, Saccharomyces pastorianus
gagggtacgcaagtactcccagata

SEQ ID NO: 182126 - DNA, 25 bp, Saccharomyces pastorianus
tcaataggcagtcgtgggtgcacaa

SEQ ID NO: 182127 - DNA, 25 bp, Saccharomyces pastorianus
agagcaccttcctacatttgatgtt

SEQ ID NO: 182128 - DNA, 25 bp, Saccharomyces pastorianus
gatgtagacaaacgttttcgagctt

SEQ ID NO: 182129 - DNA, 25 bp, Saccharomyces pastorianus
caatcattacagttgtgtttggcat

SEQ ID NO: 182130 - DNA, 25 bp, Saccharomyces pastorianus
aggcgtaacagggatctcttggaaa

SEQ ID NO: 182131 - DNA, 25 bp, Saccharomyces pastorianus
gtgtttggcatgtttattttacttc

SEQ ID NO: 182132 - DNA, 25 bp, Saccharomyces pastorianus
gtactcccagatatgtcttttactt

SEQ ID NO: 182133 - DNA, 25 bp, Saccharomyces pastorianus
aaagaggatcgcatagatttgaaga

SEQ ID NO: 182134 - DNA, 25 bp, Saccharomyces pastorianus
gaaagtgccctaaaagagcctatta

SEQ ID NO: 182135 - DNA, 25 bp, Saccharomyces pastorianus
gatttgaagaatacaccgcctcaga

SEQ ID NO: 182136 - DNA, 25 bp, Saccharomyces pastorianus
atcactacgttcaatcatgcccagg

SEQ ID NO: 182137 - DNA, 25 bp, Saccharomyces pastorianus
gacatgcagatgagtgaacaacgat

SEQ ID NO: 182138 - DNA, 25 bp, Saccharomyces pastorianus
gaattcgtgcagaaaagcccgaccc

SEQ ID NO: 182139 - DNA, 25 bp, Saccharomyces pastorianus
gggtgattccgatttatacaatcca

SEQ ID NO: 182140 - DNA, 25 bp, Saccharomyces pastorianus
acaccgcctcagaagaagtcaaaaa

SEQ ID NO: 182141 - DNA, 25 bp, Saccharomyces pastorianus
gtataggatccaaaaagttgctttt

SEQ ID NO: 182142 - DNA, 25 bp, Saccharomyces pastorianus
gaatacaccgcctcagaagaagtca

SEQ ID NO: 182143 - DNA, 25 bp, Saccharomyces pastorianus
aagcccgacccatcaacaatgaatg

SEQ ID NO: 182144 - DNA, 25 bp, Saccharomyces pastorianus
aaacaagacgcatccaactgtacac

SEQ ID NO: 182145 - DNA, 25 bp, Saccharomyces pastorianus
atacgtcgacgataaaacaagacgc

SEQ ID NO: 182146 - DNA, 25 bp, Saccharomyces pastorianus
cgataaaacaagacgcatccaactg

SEQ ID NO: 182147 - DNA, 25 bp, Saccharomyces pastorianus
aaaacaagacgcatccaactgtaca

SEQ ID NO: 182148 - DNA, 25 bp, Saccharomyces pastorianus
agacgcatccaactgtacactgatc

SEQ ID NO: 182149 - DNA, 25 bp, Saccharomyces pastorianus
tcgacgataaaacaagacgcatcca

SEQ ID NO: 182150 - DNA, 25 bp, Saccharomyces pastorianus
taaaacaagacgcatccaactgtac

SEQ ID NO: 182151 - DNA, 25 bp, Saccharomyces pastorianus
gataaaacaagacgcatccaactgt

SEQ ID NO: 182152 - DNA, 25 bp, Saccharomyces pastorianus
cgacgataaaacaagacgcatccaa

SEQ ID NO: 182153 - DNA, 25 bp, Saccharomyces pastorianus
gacgataaaacaagacgcatccaac

SEQ ID NO: 182154 - DNA, 25 bp, Saccharomyces pastorianus
gtcgacgataaaacaagacgcatcc

SEQ ID NO: 182155 - DNA, 25 bp, Saccharomyces pastorianus
gctgatgtaatcttaacaagaaata

SEQ ID NO: 182156 - DNA, 25 bp, Saccharomyces pastorianus
gatgtaatcttaacaagaaatagtg

SEQ ID NO: 182157 - DNA, 25 bp, Saccharomyces pastorianus
tagtgctgatgtaatcttaacaaga

SEQ ID NO: 182158 - DNA, 25 bp, Saccharomyces pastorianus
tgctgatgtaatcttaacaagaaat

SEQ ID NO: 182159 - DNA, 25 bp, Saccharomyces pastorianus
ctgatgtaatcttaacaagaaatag

SEQ ID NO: 182160 - DNA, 25 bp, Saccharomyces pastorianus
ttagtgctgatgtaatcttaacaag

SEQ ID NO: 182161 - DNA, 25 bp, Saccharomyces pastorianus
ccagcagcgattgaagttaatttga

SEQ ID NO: 182162 - DNA, 25 bp, Saccharomyces pastorianus
agtgctgatgtaatcttaacaagaa

SEQ ID NO: 182163 - DNA, 25 bp, Saccharomyces pastorianus
gtgctgatgtaatcttaacaagaaa

SEQ ID NO: 182164 - DNA, 25 bp, Saccharomyces pastorianus
gttagtgctgatgtaatcttaacaa

SEQ ID NO: 182165 - DNA, 25 bp, Saccharomyces pastorianus
cagcgattgaagttaatttgaccat

SEQ ID NO: 182166 - DNA, 25 bp, Saccharomyces pastorianus
gaatccttacaatggacttgatatt

SEQ ID NO: 182167 - DNA, 25 bp, Saccharomyces pastorianus
ttagaatccttacaatggacttgat

SEQ ID NO: 182168 - DNA, 25 bp, Saccharomyces pastorianus
gatattagaatccttacaatggact

SEQ ID NO: 182169 - DNA, 25 bp, Saccharomyces pastorianus
tcctcgaggatattagaatccttac

SEQ ID NO: 182170 - DNA, 25 bp, Saccharomyces pastorianus
tccttacaatggacttgatatttct

SEQ ID NO: 182171 - DNA, 25 bp, Saccharomyces pastorianus
agaatccttacaatggacttgatat

SEQ ID NO: 182172 - DNA, 25 bp, Saccharomyces pastorianus
tctcctcgaggatattagaatcctt

SEQ ID NO: 182173 - DNA, 25 bp, Saccharomyces pastorianus
ttacaatggacttgatatttctaca

SEQ ID NO: 182174 - DNA, 25 bp, Saccharomyces pastorianus
attagaatccttacaatggacttga

SEQ ID NO: 182175 - DNA, 25 bp, Saccharomyces pastorianus
tacaatggacttgatatttctacat

SEQ ID NO: 182176 - DNA, 25 bp, Saccharomyces pastorianus
cttacaatggacttgatatttctac

SEQ ID NO: 182177 - DNA, 25 bp, Saccharomyces pastorianus
aacagtgattgatgaccaagtcggt

SEQ ID NO: 182178 - DNA, 25 bp, Saccharomyces pastorianus
gtcggtgatgaatttcataccaagc

SEQ ID NO: 182179 - DNA, 25 bp, Saccharomyces pastorianus
ttcgctggaacagtgattgatgacc

SEQ ID NO: 182180 - DNA, 25 bp, Saccharomyces pastorianus
agtcggtgatgaatttcataccaag

SEQ ID NO: 182181 - DNA, 25 bp, Saccharomyces pastorianus
cggtgatgaatttcataccaagctt

SEQ ID NO: 182182 - DNA, 25 bp, Saccharomyces pastorianus
ggtgatgaatttcataccaagctta

SEQ ID NO: 182183 - DNA, 25 bp, Saccharomyces pastorianus
tcggtgatgaatttcataccaagct

SEQ ID NO: 182184 - DNA, 25 bp, Saccharomyces pastorianus
caagtcggtgatgaatttcatacca

SEQ ID NO: 182185 - DNA, 25 bp, Saccharomyces pastorianus
aagtcggtgatgaatttcataccaa

SEQ ID NO: 182186 - DNA, 25 bp, Saccharomyces pastorianus
tgaatttcataccaagcttatgtgt

SEQ ID NO: 182187 - DNA, 25 bp, Saccharomyces pastorianus
taccaagcttatgtgtcttttcgat

SEQ ID NO: 182188 - DNA, 25 bp, Saccharomyces pastorianus
ctcttctgcattttcatcgttttca

SEQ ID NO: 182189 - DNA, 25 bp, Saccharomyces pastorianus
agcatcttgctttaactcttcttca

SEQ ID NO: 182190 - DNA, 25 bp, Saccharomyces pastorianus
aggttcgtcgttttcattatcactt

SEQ ID NO: 182191 - DNA, 25 bp, Saccharomyces pastorianus
tccaacctcttccttgtttaaatca

SEQ ID NO: 182192 - DNA, 25 bp, Saccharomyces pastorianus
tgttttcttccatagcagcatcttg

SEQ ID NO: 182193 - DNA, 25 bp, Saccharomyces pastorianus
aacatcttcgtctgattcttcatgc

SEQ ID NO: 182194 - DNA, 25 bp, Saccharomyces pastorianus
accggattcttgtttgacttcttcg

SEQ ID NO: 182195 - DNA, 25 bp, Saccharomyces pastorianus
atcttcaggtgcatttgggtcctca

SEQ ID NO: 182196 - DNA, 25 bp, Saccharomyces pastorianus
atcaagaccttctgtattctgctca

SEQ ID NO: 182197 - DNA, 25 bp, Saccharomyces pastorianus
tcctttccctcatcattagtcatat

SEQ ID NO: 182198 - DNA, 25 bp, Saccharomyces pastorianus
ttcttcatcagacatggcttgctct

SEQ ID NO: 182199 - DNA, 25 bp, Saccharomyces pastorianus
aaccattggacttcacatccgaaca

SEQ ID NO: 182200 - DNA, 25 bp, Saccharomyces pastorianus
aacagcagcaaccattggacttcac

SEQ ID NO: 182201 - DNA, 25 bp, Saccharomyces pastorianus
agcaaccattggacttcacatccga

SEQ ID NO: 182202 - DNA, 25 bp, Saccharomyces pastorianus
aatccttgagcaatgccaggaagag

SEQ ID NO: 182203 - DNA, 25 bp, Saccharomyces pastorianus
agaacaatccttgagcaatgccagg

SEQ ID NO: 182204 - DNA, 25 bp, Saccharomyces pastorianus
tggacttcacatccgaacacacatt

SEQ ID NO: 182205 - DNA, 25 bp, Saccharomyces pastorianus
gccgaaatggaacagcaagtggaaa

SEQ ID NO: 182206 - DNA, 25 bp, Saccharomyces pastorianus
gaagatgatcattcgacttcgcaac

SEQ ID NO: 182207 - DNA, 25 bp, Saccharomyces pastorianus
gatcattcgacttcgcaacagcagc

SEQ ID NO: 182208 - DNA, 25 bp, Saccharomyces pastorianus
gaagttagaacaatccttgagcaat

SEQ ID NO: 182209 - DNA, 25 bp, Saccharomyces pastorianus
gatgatcattcgacttcgcaacagc

SEQ ID NO: 182210 - DNA, 25 bp, Saccharomyces pastorianus
gcttccaaatggaggatcttgttac

SEQ ID NO: 182211 - DNA, 25 bp, Saccharomyces pastorianus
gaatgtccgtttcaatggagcacaa

SEQ ID NO: 182212 - DNA, 25 bp, Saccharomyces pastorianus
tagaggctggaatgtccgtttcaat

SEQ ID NO: 182213 - DNA, 25 bp, Saccharomyces pastorianus
gacaaagctgcggaagattctcaca

SEQ ID NO: 182214 - DNA, 25 bp, Saccharomyces pastorianus
gtgacgaccaagaggaggcttccga

SEQ ID NO: 182215 - DNA, 25 bp, Saccharomyces pastorianus
ggcttccgagattttgggcttccaa

SEQ ID NO: 182216 - DNA, 25 bp, Saccharomyces pastorianus
atattaatgagtacactggcggccc

SEQ ID NO: 182217 - DNA, 25 bp, Saccharomyces pastorianus
actgtagtgcagaatggagctaacc

SEQ ID NO: 182218 - DNA, 25 bp, Saccharomyces pastorianus
gattctcacaaacacagaactgtag

SEQ ID NO: 182219 - DNA, 25 bp, Saccharomyces pastorianus
aatggtaaccggcagcaagagcaac

SEQ ID NO: 182220 - DNA, 25 bp, Saccharomyces pastorianus
gatcttgttacgatgggatgtatct

SEQ ID NO: 182221 - DNA, 25 bp, Saccharomyces pastorianus
gttgctactaaagttcctcaatttt

SEQ ID NO: 182222 - DNA, 25 bp, Saccharomyces pastorianus
agctgttttcaatttagcctccaag

SEQ ID NO: 182223 - DNA, 25 bp, Saccharomyces pastorianus
accatgaacttccatgtaccactac

SEQ ID NO: 182224 - DNA, 25 bp, Saccharomyces pastorianus
tatagttccaccagaagtccgttcc

SEQ ID NO: 182225 - DNA, 25 bp, Saccharomyces pastorianus
atctcatgacgttatagttccacca

SEQ ID NO: 182226 - DNA, 25 bp, Saccharomyces pastorianus
atacatctcgagaatacttgggcca

SEQ ID NO: 182227 - DNA, 25 bp, Saccharomyces pastorianus
attgattttgctatcccattgttca

SEQ ID NO: 182228 - DNA, 25 bp, Saccharomyces pastorianus
agcctccaagagagctgagagcact

SEQ ID NO: 182229 - DNA, 25 bp, Saccharomyces pastorianus
tcaatgaacctcaaacggctttgtt

SEQ ID NO: 182230 - DNA, 25 bp, Saccharomyces pastorianus
ttggactgctattcaaagtaccatg

SEQ ID NO: 182231 - DNA, 25 bp, Saccharomyces pastorianus
gagagcactgacgatgttgactata

SEQ ID NO: 182232 - DNA, 25 bp, Saccharomyces pastorianus
atctatatttctacaacctaatatt

SEQ ID NO: 182233 - DNA, 25 bp, Saccharomyces pastorianus
tatatttctacaacctaatattacg

SEQ ID NO: 182234 - DNA, 25 bp, Saccharomyces pastorianus
caacctaatattacgattattcctc

SEQ ID NO: 182235 - DNA, 25 bp, Saccharomyces pastorianus
aatctatatttctacaacctaatat

SEQ ID NO: 182236 - DNA, 25 bp, Saccharomyces pastorianus
ttctacaacctaatattacgattat

SEQ ID NO: 182237 - DNA, 25 bp, Saccharomyces pastorianus
gaatctatatttctacaacctaata

SEQ ID NO: 182238 - DNA, 25 bp, Saccharomyces pastorianus
ctatatttctacaacctaatattac

SEQ ID NO: 182239 - DNA, 25 bp, Saccharomyces pastorianus
tctacaacctaatattacgattatt

SEQ ID NO: 182240 - DNA, 25 bp, Saccharomyces pastorianus
acaacctaatattacgattattcct

SEQ ID NO: 182241 - DNA, 25 bp, Saccharomyces pastorianus
ctacaacctaatattacgattattc

SEQ ID NO: 182242 - DNA, 25 bp, Saccharomyces pastorianus
tacaacctaatattacgattattcc

SEQ ID NO: 182243 - DNA, 25 bp, Saccharomyces pastorianus
tctgctgcgttttgttagctttgtc

SEQ ID NO: 182244 - DNA, 25 bp, Saccharomyces pastorianus
attctgctgcgttttgttagctttg

SEQ ID NO: 182245 - DNA, 25 bp, Saccharomyces pastorianus
ttgttagctttgtccactattgcaa

SEQ ID NO: 182246 - DNA, 25 bp, Saccharomyces pastorianus
gttttgttagctttgtccactattg

SEQ ID NO: 182247 - DNA, 25 bp, Saccharomyces pastorianus
ctgcgttttgttagctttgtccact

SEQ ID NO: 182248 - DNA, 25 bp, Saccharomyces pastorianus
tgctgcgttttgttagctttgtcca

SEQ ID NO: 182249 - DNA, 25 bp, Saccharomyces pastorianus
gttagctttgtccactattgcaaat

SEQ ID NO: 182250 - DNA, 25 bp, Saccharomyces pastorianus
tttgttagctttgtccactattgca

SEQ ID NO: 182251 - DNA, 25 bp, Saccharomyces pastorianus
gcgttttgttagctttgtccactat

SEQ ID NO: 182252 - DNA, 25 bp, Saccharomyces pastorianus
tgcgttttgttagctttgtccacta

SEQ ID NO: 182253 - DNA, 25 bp, Saccharomyces pastorianus
caattctgctgcgttttgttagctt

SEQ ID NO: 182254 - DNA, 25 bp, Saccharomyces pastorianus
caatttgtaaaaaatgccatcggtt

SEQ ID NO: 182255 - DNA, 25 bp, Saccharomyces pastorianus
atgccatcggttgttatggacccca

SEQ ID NO: 182256 - DNA, 25 bp, Saccharomyces pastorianus
cactgcttcctacgataaagagaac

SEQ ID NO: 182257 - DNA, 25 bp, Saccharomyces pastorianus
aaactggaaatcacatccgacggag

SEQ ID NO: 182258 - DNA, 25 bp, Saccharomyces pastorianus
taatgtgtgggtgcggtaccgttaa

SEQ ID NO: 182259 - DNA, 25 bp, Saccharomyces pastorianus
cgttttaatattggcgccgatccta

SEQ ID NO: 182260 - DNA, 25 bp, Saccharomyces pastorianus
atattggcgccgatcctaattacag

SEQ ID NO: 182261 - DNA, 25 bp, Saccharomyces pastorianus
gccatcggttgttatggaccccaaa

SEQ ID NO: 182262 - DNA, 25 bp, Saccharomyces pastorianus
taaacgttttaatattggcgccgat

SEQ ID NO: 182263 - DNA, 25 bp, Saccharomyces pastorianus
gaaaaccaagacatcactgcttcct

SEQ ID NO: 182264 - DNA, 25 bp, Saccharomyces pastorianus
gacatcactgcttcctacgataaag

SEQ ID NO: 182265 - DNA, 25 bp, Saccharomyces pastorianus
gatctgtcattgtatttcaaaccaa

SEQ ID NO: 182266 - DNA, 25 bp, Saccharomyces pastorianus
gttagcggcgacttggttctttgca

SEQ ID NO: 182267 - DNA, 25 bp, Saccharomyces pastorianus
gacttggttctttgcagcatcacca

SEQ ID NO: 182268 - DNA, 25 bp, Saccharomyces pastorianus
aaccaatcaatctcttaatgtcgaa

SEQ ID NO: 182269 - DNA, 25 bp, Saccharomyces pastorianus
atcaccaatcaacctttcgtcgtcg

SEQ ID NO: 182270 - DNA, 25 bp, Saccharomyces pastorianus
attctattaccttgttcattggcaa

SEQ ID NO: 182271 - DNA, 25 bp, Saccharomyces pastorianus
tcgtcgtcggtaaaagccacgtaag

SEQ ID NO: 182272 - DNA, 25 bp, Saccharomyces pastorianus
ggagttattctattaccttgttcat

SEQ ID NO: 182273 - DNA, 25 bp, Saccharomyces pastorianus
gccacgtaagatggagttattctat

SEQ ID NO: 182274 - DNA, 25 bp, Saccharomyces pastorianus
atatctttttgaacagatctgtcat

SEQ ID NO: 182275 - DNA, 25 bp, Saccharomyces pastorianus
gcaagaatttcagtcttaccgttct

SEQ ID NO: 182276 - DNA, 25 bp, Saccharomyces pastorianus
tcttgggtgactctaactcttccat

SEQ ID NO: 182277 - DNA, 25 bp, Saccharomyces pastorianus
gttgaacaaggaaaccacctacgat

SEQ ID NO: 182278 - DNA, 25 bp, Saccharomyces pastorianus
gctgaaggtaagttgaagggtgtct

SEQ ID NO: 182279 - DNA, 25 bp, Saccharomyces pastorianus
agaaggttgtcaaggctgccgctga

SEQ ID NO: 182280 - DNA, 25 bp, Saccharomyces pastorianus
gtcaagttgaacaaggaaaccacct

SEQ ID NO: 182281 - DNA, 25 bp, Saccharomyces pastorianus
gaacaaggaaaccacctacgatgaa

SEQ ID NO: 182282 - DNA, 25 bp, Saccharomyces pastorianus
cctctgacttcttgggtgactctaa

SEQ ID NO: 182283 - DNA, 25 bp, Saccharomyces pastorianus
ttgactgtcaagttgaacaaggaaa

SEQ ID NO: 182284 - DNA, 25 bp, Saccharomyces pastorianus
cgctgaaggtaagttgaagggtgtc

SEQ ID NO: 182285 - DNA, 25 bp, Saccharomyces pastorianus
gttgtcaaggctgccgctgaaggta

SEQ ID NO: 182286 - DNA, 25 bp, Saccharomyces pastorianus
ctacgatgaaatcaagaaggttgtc

SEQ ID NO: 182287 - DNA, 25 bp, Saccharomyces pastorianus
caagttcttgaattccaggagctcg

SEQ ID NO: 182288 - DNA, 25 bp, Saccharomyces pastorianus
ttcatcttcgtcagaggaggagtac

SEQ ID NO: 182289 - DNA, 25 bp, Saccharomyces pastorianus
ttccttcaagacatcttcatcctca

SEQ ID NO: 182290 - DNA, 25 bp, Saccharomyces pastorianus
agacattttccttcaagacatcttc

SEQ ID NO: 182291 - DNA, 25 bp, Saccharomyces pastorianus
ttcttcaaagtcatccaagttcttg

SEQ ID NO: 182292 - DNA, 25 bp, Saccharomyces pastorianus
tagcatccttttcttcattttgttc

SEQ ID NO: 182293 - DNA, 25 bp, Saccharomyces pastorianus
ggagtacgaagctgcactcaactct

SEQ ID NO: 182294 - DNA, 25 bp, Saccharomyces pastorianus
tcaactctccttcttcaaagtcatc

SEQ ID NO: 182295 - DNA, 25 bp, Saccharomyces pastorianus
atcctcgtccttgttgtcatcattt

SEQ ID NO: 182296 - DNA, 25 bp, Saccharomyces pastorianus
ttcattttgttcatcttcgtcagag

SEQ ID NO: 182297 - DNA, 25 bp, Saccharomyces pastorianus
gtcatcatttgaattagcatccttt

SEQ ID NO: 182298 - DNA, 25 bp, Saccharomyces pastorianus
gatgggtacagaaacttcgttacgt

SEQ ID NO: 182299 - DNA, 25 bp, Saccharomyces pastorianus
aggtgtcgcagaacttattccaggt

SEQ ID NO: 182300 - DNA, 25 bp, Saccharomyces pastorianus
ggtgtgccacctgatttgatcgata

SEQ ID NO: 182301 - DNA, 25 bp, Saccharomyces pastorianus
gaagagctaccgttgaaagattgca

SEQ ID NO: 182302 - DNA, 25 bp, Saccharomyces pastorianus
gacgagatccgtaccattatagaga

SEQ ID NO: 182303 - DNA, 25 bp, Saccharomyces pastorianus
attccaggtgttttgttcattgatg

SEQ ID NO: 182304 - DNA, 25 bp, Saccharomyces pastorianus
atgggccagttgctcaaacctaaga

SEQ ID NO: 182305 - DNA, 25 bp, Saccharomyces pastorianus
aagtagcgcattggaccttttagcc

SEQ ID NO: 182306 - DNA, 25 bp, Saccharomyces pastorianus
ggaccttttagccacgatgggtaca

SEQ ID NO: 182307 - DNA, 25 bp, Saccharomyces pastorianus
gcatgactacagtccgtggcactga

SEQ ID NO: 182308 - DNA, 25 bp, Saccharomyces pastorianus
tggcactgaggatgtgatatcacca

SEQ ID NO: 182309 - DNA, 25 bp, Saccharomyces pastorianus
atgcatttgagtaacactgctaatc

SEQ ID NO: 182310 - DNA, 25 bp, Saccharomyces pastorianus
gagtaacactgctaatccatataga

SEQ ID NO: 182311 - DNA, 25 bp, Saccharomyces pastorianus
agcattcttgtttacatatttgaag

SEQ ID NO: 182312 - DNA, 25 bp, Saccharomyces pastorianus
actgctaatccatatagagacattg

SEQ ID NO: 182313 - DNA, 25 bp, Saccharomyces pastorianus
attgcagcattcttgtttacatatt

SEQ ID NO: 182314 - DNA, 25 bp, Saccharomyces pastorianus
atccatatagagacattgcagcatt

SEQ ID NO: 182315 - DNA, 25 bp, Saccharomyces pastorianus
gagacattgcagcattcttgtttac

SEQ ID NO: 182316 - DNA, 25 bp, Saccharomyces pastorianus
ttgagtaacactgctaatccatata

SEQ ID NO: 182317 - DNA, 25 bp, Saccharomyces pastorianus
gcagcattcttgtttacatatttga

SEQ ID NO: 182318 - DNA, 25 bp, Saccharomyces pastorianus
gacattgcagcattcttgtttacat

SEQ ID NO: 182319 - DNA, 25 bp, Saccharomyces pastorianus
gtaacactgctaatccatatagaga

SEQ ID NO: 182320 - DNA, 25 bp, Saccharomyces pastorianus
caagccaaagcaggcaatgcatttt

SEQ ID NO: 182321 - DNA, 25 bp, Saccharomyces pastorianus
ggaacctaacactattgaacaagat

SEQ ID NO: 182322 - DNA, 25 bp, Saccharomyces pastorianus
taacgatggcgatgactctttgata

SEQ ID NO: 182323 - DNA, 25 bp, Saccharomyces pastorianus
gatttgccatcttcacccatcaagg

SEQ ID NO: 182324 - DNA, 25 bp, Saccharomyces pastorianus
attgctactgattccactttatccg

SEQ ID NO: 182325 - DNA, 25 bp, Saccharomyces pastorianus
gataacaattcaaggcaacaccaat

SEQ ID NO: 182326 - DNA, 25 bp, Saccharomyces pastorianus
gagaaaatggtctctgacgatttga

SEQ ID NO: 182327 - DNA, 25 bp, Saccharomyces pastorianus
ttatccgcatatgctctcagagcta

SEQ ID NO: 182328 - DNA, 25 bp, Saccharomyces pastorianus
ctcagagctaagtctggtgctccaa

SEQ ID NO: 182329 - DNA, 25 bp, Saccharomyces pastorianus
cccatcaaggcacccaacgttgaaa

SEQ ID NO: 182330 - DNA, 25 bp, Saccharomyces pastorianus
ggtgctccaagagacggcgtagtac

SEQ ID NO: 182331 - DNA, 25 bp, Saccharomyces pastorianus
ggatccctgggttttattcgaatat

SEQ ID NO: 182332 - DNA, 25 bp, Saccharomyces pastorianus
tagaggatccctgggttttattcga

SEQ ID NO: 182333 - DNA, 25 bp, Saccharomyces pastorianus
tcgttgggtgagcactgttttatac

SEQ ID NO: 182334 - DNA, 25 bp, Saccharomyces pastorianus
gatccctgggttttattcgaatatt

SEQ ID NO: 182335 - DNA, 25 bp, Saccharomyces pastorianus
cgaatattcgttgggtgagcactgt

SEQ ID NO: 182336 - DNA, 25 bp, Saccharomyces pastorianus
gaggatccctgggttttattcgaat

SEQ ID NO: 182337 - DNA, 25 bp, Saccharomyces pastorianus
cgttgggtgagcactgttttatacc

SEQ ID NO: 182338 - DNA, 25 bp, Saccharomyces pastorianus
gttgggtgagcactgttttatacca

SEQ ID NO: 182339 - DNA, 25 bp, Saccharomyces pastorianus
attcgttgggtgagcactgttttat

SEQ ID NO: 182340 - DNA, 25 bp, Saccharomyces pastorianus
atattcgttgggtgagcactgtttt

SEQ ID NO: 182341 - DNA, 25 bp, Saccharomyces pastorianus
ttcgaatattcgttgggtgagcact

SEQ ID NO: 182342 - DNA, 25 bp, Saccharomyces pastorianus
tagaagataagctggagactgatga

SEQ ID NO: 182343 - DNA, 25 bp, Saccharomyces pastorianus
gcctgattctgtggcagaagataag

SEQ ID NO: 182344 - DNA, 25 bp, Saccharomyces pastorianus
atgttaactcagtgagagagctcga

SEQ ID NO: 182345 - DNA, 25 bp, Saccharomyces pastorianus
aatagagctcgagacttcagaggac

SEQ ID NO: 182346 - DNA, 25 bp, Saccharomyces pastorianus
caatggtgctcgagacttcggtgga

SEQ ID NO: 182347 - DNA, 25 bp, Saccharomyces pastorianus
attcagtggcggaggatgagcctga

SEQ ID NO: 182348 - DNA, 25 bp, Saccharomyces pastorianus
ggcagaagataagctggagactgat

SEQ ID NO: 182349 - DNA, 25 bp, Saccharomyces pastorianus
gatggagcaatggtgctcgagactt

SEQ ID NO: 182350 - DNA, 25 bp, Saccharomyces pastorianus
acttcggtggaggatgatgttaact

SEQ ID NO: 182351 - DNA, 25 bp, Saccharomyces pastorianus
attctgtggcggaggatgagcctga

SEQ ID NO: 182352 - DNA, 25 bp, Saccharomyces pastorianus
cgagacttcagaggacgaggttgat

SEQ ID NO: 182353 - DNA, 25 bp, Saccharomyces pastorianus
agatatgcaattgaccgcgttccaa

SEQ ID NO: 182354 - DNA, 25 bp, Saccharomyces pastorianus
ggtgcggagatcatcctggagtatt

SEQ ID NO: 182355 - DNA, 25 bp, Saccharomyces pastorianus
aggaagatgccaagccaggctctga

SEQ ID NO: 182356 - DNA, 25 bp, Saccharomyces pastorianus
atcctctttttgaagccgattgccc

SEQ ID NO: 182357 - DNA, 25 bp, Saccharomyces pastorianus
ttcacccattcgaggtattacctgc

SEQ ID NO: 182358 - DNA, 25 bp, Saccharomyces pastorianus
ggaagtcagctttaatcctcttttt

SEQ ID NO: 182359 - DNA, 25 bp, Saccharomyces pastorianus
aatacgttcaaggtgcggagatcat

SEQ ID NO: 182360 - DNA, 25 bp, Saccharomyces pastorianus
gccaagccaggctctgatgtggaga

SEQ ID NO: 182361 - DNA, 25 bp, Saccharomyces pastorianus
gaccgcgttccaacagaaatacgtt

SEQ ID NO: 182362 - DNA, 25 bp, Saccharomyces pastorianus
gaggtattacctgcctaagaaatca

SEQ ID NO: 182363 - DNA, 25 bp, Saccharomyces pastorianus
ggagtatttagaattcacccattcg

SEQ ID NO: 182364 - DNA, 25 bp, Saccharomyces pastorianus
atggcaggttttaaagacgacacta

SEQ ID NO: 182365 - DNA, 25 bp, Saccharomyces pastorianus
aggaaatagcccaagctgccaaatt

SEQ ID NO: 182366 - DNA, 25 bp, Saccharomyces pastorianus
tcaacagcgcgacagaaccttcaaa

SEQ ID NO: 182367 - DNA, 25 bp, Saccharomyces pastorianus
gaatgacagactaaggaccccgagt

SEQ ID NO: 182368 - DNA, 25 bp, Saccharomyces pastorianus
ctgttcaagaactgtatggcgattt

SEQ ID NO: 182369 - DNA, 25 bp, Saccharomyces pastorianus
agcggtaagccggacgatttgaaag

SEQ ID NO: 182370 - DNA, 25 bp, Saccharomyces pastorianus
gaaatgcttacttctaccgatgaac

SEQ ID NO: 182371 - DNA, 25 bp, Saccharomyces pastorianus
tctaccgatgaacccgacctagaaa

SEQ ID NO: 182372 - DNA, 25 bp, Saccharomyces pastorianus
aaggaccccgagtgagctacaagaa

SEQ ID NO: 182373 - DNA, 25 bp, Saccharomyces pastorianus
ggcgatttaaaatctgcgcagccaa

SEQ ID NO: 182374 - DNA, 25 bp, Saccharomyces pastorianus
gaactggtgctccaactgttagaga

SEQ ID NO: 182375 - DNA, 25 bp, Saccharomyces pastorianus
acgacatctgatttactttctgtag

SEQ ID NO: 182376 - DNA, 25 bp, Saccharomyces pastorianus
actttctgtagtacagccccagttt

SEQ ID NO: 182377 - DNA, 25 bp, Saccharomyces pastorianus
gccccagtttctacggatattcata

SEQ ID NO: 182378 - DNA, 25 bp, Saccharomyces pastorianus
attaacttccctgtactggttgcta

SEQ ID NO: 182379 - DNA, 25 bp, Saccharomyces pastorianus
gtatttattgctctaacccttttcg

SEQ ID NO: 182380 - DNA, 25 bp, Saccharomyces pastorianus
tccttaagattgacgctagcagagc

SEQ ID NO: 182381 - DNA, 25 bp, Saccharomyces pastorianus
ctgtggctatgctgtatgaaacgac

SEQ ID NO: 182382 - DNA, 25 bp, Saccharomyces pastorianus
attggcgctcctattcagattattg

SEQ ID NO: 182383 - DNA, 25 bp, Saccharomyces pastorianus
aggatccagcggtttttcgaaaatg

SEQ ID NO: 182384 - DNA, 25 bp, Saccharomyces pastorianus
gaaacatcttctaaatatcctcctt

SEQ ID NO: 182385 - DNA, 25 bp, Saccharomyces pastorianus
ggagggttggttactatggctatta

SEQ ID NO: 182386 - DNA, 25 bp, Saccharomyces pastorianus
taccatgaatgcatgtgtcgctgtc

SEQ ID NO: 182387 - DNA, 25 bp, Saccharomyces pastorianus
actaccatgaatgcatgtgtcgctg

SEQ ID NO: 182388 - DNA, 25 bp, Saccharomyces pastorianus
ctggagttggtagtcgcattggtac

SEQ ID NO: 182389 - DNA, 25 bp, Saccharomyces pastorianus
agtcgcattggtactggcattagca

SEQ ID NO: 182390 - DNA, 25 bp, Saccharomyces pastorianus
ttagcactaccatgaatgcatgtgt

SEQ ID NO: 182391 - DNA, 25 bp, Saccharomyces pastorianus
gaatgcatgtgtcgctgtcctcatc

SEQ ID NO: 182392 - DNA, 25 bp, Saccharomyces pastorianus
actgctgcaatactttctgtacctg

SEQ ID NO: 182393 - DNA, 25 bp, Saccharomyces pastorianus
atgaatgcatgtgtcgctgtcctca

SEQ ID NO: 182394 - DNA, 25 bp, Saccharomyces pastorianus
agcactaccatgaatgcatgtgtcg

SEQ ID NO: 182395 - DNA, 25 bp, Saccharomyces pastorianus
gcactaccatgaatgcatgtgtcgc

SEQ ID NO: 182396 - DNA, 25 bp, Saccharomyces pastorianus
ggtagtcgcattggtactggcatta

SEQ ID NO: 182397 - DNA, 25 bp, Saccharomyces pastorianus
gttccaatgttctaatgacacttac

SEQ ID NO: 182398 - DNA, 25 bp, Saccharomyces pastorianus
tttcagcaaagatgagttggtccgt

SEQ ID NO: 182399 - DNA, 25 bp, Saccharomyces pastorianus
atccgttggttctaacttgttcaat

SEQ ID NO: 182400 - DNA, 25 bp, Saccharomyces pastorianus
ccgttactcttacggccaagatttg

SEQ ID NO: 182401 - DNA, 25 bp, Saccharomyces pastorianus
ggccaagatttggagacgttctatc

SEQ ID NO: 182402 - DNA, 25 bp, Saccharomyces pastorianus
acgccgttatcccaattgaaacctg

SEQ ID NO: 182403 - DNA, 25 bp, Saccharomyces pastorianus
ggtgtgcatacgaaattaacgtcag

SEQ ID NO: 182404 - DNA, 25 bp, Saccharomyces pastorianus
agatacgccattaacgacgccgtta

SEQ ID NO: 182405 - DNA, 25 bp, Saccharomyces pastorianus
tgacacttacgtcagatacgccatt

SEQ ID NO: 182406 - DNA, 25 bp, Saccharomyces pastorianus
cgtcagcaacgtcactgaattgacc

SEQ ID NO: 182407 - DNA, 25 bp, Saccharomyces pastorianus
gacgttctatcaagaaggacctggt

SEQ ID NO: 182408 - DNA, 25 bp, Saccharomyces pastorianus
ctttgggacctctgcggtatggaaa

SEQ ID NO: 182409 - DNA, 25 bp, Saccharomyces pastorianus
gtcaaatttcaatgcctgtcgcttt

SEQ ID NO: 182410 - DNA, 25 bp, Saccharomyces pastorianus
aatatgtcccgaattacgcgtcagt

SEQ ID NO: 182411 - DNA, 25 bp, Saccharomyces pastorianus
gttgctaccacctgcttaggaatta

SEQ ID NO: 182412 - DNA, 25 bp, Saccharomyces pastorianus
tgatgatcccgtcattccgtataag

SEQ ID NO: 182413 - DNA, 25 bp, Saccharomyces pastorianus
ttaacagcacctctgttgttgctac

SEQ ID NO: 182414 - DNA, 25 bp, Saccharomyces pastorianus
attgaggaacaccagcattagcata

SEQ ID NO: 182415 - DNA, 25 bp, Saccharomyces pastorianus
aaaaatgacgcagcccgattaggtg

SEQ ID NO: 182416 - DNA, 25 bp, Saccharomyces pastorianus
taggagatcattaccagctaccgcc

SEQ ID NO: 182417 - DNA, 25 bp, Saccharomyces pastorianus
ataaggtccatcctgacacgcaaaa

SEQ ID NO: 182418 - DNA, 25 bp, Saccharomyces pastorianus
gggaaacgcgtgcttttgacatcat

SEQ ID NO: 182419 - DNA, 25 bp, Saccharomyces pastorianus
gctagttccaacttgagcactgtct

SEQ ID NO: 182420 - DNA, 25 bp, Saccharomyces pastorianus
gtatcttcgatttcgggatctggtt

SEQ ID NO: 182421 - DNA, 25 bp, Saccharomyces pastorianus
aaatggtgcttcttccgtgttggca

SEQ ID NO: 182422 - DNA, 25 bp, Saccharomyces pastorianus
ctagaaatgtccacctacgctggta

SEQ ID NO: 182423 - DNA, 25 bp, Saccharomyces pastorianus
acaccgaggtacttgctagttccaa

SEQ ID NO: 182424 - DNA, 25 bp, Saccharomyces pastorianus
gcaacggcaatggtgtatcttcgat

SEQ ID NO: 182425 - DNA, 25 bp, Saccharomyces pastorianus
gaaggacatactaccgctaccaatg

SEQ ID NO: 182426 - DNA, 25 bp, Saccharomyces pastorianus
gtactactacagttagcgccagtgt

SEQ ID NO: 182427 - DNA, 25 bp, Saccharomyces pastorianus
tgccattcctgaagcaaccgaaacg

SEQ ID NO: 182428 - DNA, 25 bp, Saccharomyces pastorianus
tcgtagcacttccacaagcggcatg

SEQ ID NO: 182429 - DNA, 25 bp, Saccharomyces pastorianus
gtattgccaacggactactagccaa

SEQ ID NO: 182430 - DNA, 25 bp, Saccharomyces pastorianus
cagttatatcctttacactaccggt

SEQ ID NO: 182431 - DNA, 25 bp, Saccharomyces pastorianus
aagatgttgaacaggctttccgccg

SEQ ID NO: 182432 - DNA, 25 bp, Saccharomyces pastorianus
acactaccggtaatcacacgttatt

SEQ ID NO: 182433 - DNA, 25 bp, Saccharomyces pastorianus
tggtatgtacattctatcgacgata

SEQ ID NO: 182434 - DNA, 25 bp, Saccharomyces pastorianus
cgccgtactttcacatctattatat

SEQ ID NO: 182435 - DNA, 25 bp, Saccharomyces pastorianus
tacaacgcaatgaccgtggttcttg

SEQ ID NO: 182436 - DNA, 25 bp, Saccharomyces pastorianus
gacagggaacgctttcgtttttgat

SEQ ID NO: 182437 - DNA, 25 bp, Saccharomyces pastorianus
gagacagcattatccttgttgaagg

SEQ ID NO: 182438 - DNA, 25 bp, Saccharomyces pastorianus
atcgacgatattgcatagcttagcc

SEQ ID NO: 182439 - DNA, 25 bp, Saccharomyces pastorianus
attacgatccagtgttgtttctaaa

SEQ ID NO: 182440 - DNA, 25 bp, Saccharomyces pastorianus
ggactttgattttaccactactgaa

SEQ ID NO: 182441 - DNA, 25 bp, Saccharomyces pastorianus
ctcacagtctacttgggcttaaacc

SEQ ID NO: 182442 - DNA, 25 bp, Saccharomyces pastorianus
ggtgtcatttatggtttaccgacat

SEQ ID NO: 182443 - DNA, 25 bp, Saccharomyces pastorianus
agtcgcctcgtttcattgccggtta

SEQ ID NO: 182444 - DNA, 25 bp, Saccharomyces pastorianus
gttcagtcacttactgttcagtcgc

SEQ ID NO: 182445 - DNA, 25 bp, Saccharomyces pastorianus
gtttcattgccggttacacggcaaa

SEQ ID NO: 182446 - DNA, 25 bp, Saccharomyces pastorianus
aagcctactgttcagtcacttactg

SEQ ID NO: 182447 - DNA, 25 bp, Saccharomyces pastorianus
ttactgttcagtcgcctcgtttcat

SEQ ID NO: 182448 - DNA, 25 bp, Saccharomyces pastorianus
atggcctactgtttagttgcctcaa

SEQ ID NO: 182449 - DNA, 25 bp, Saccharomyces pastorianus
acggcaaatttgttatttggtgtca

SEQ ID NO: 182450 - DNA, 25 bp, Saccharomyces pastorianus
ccacttgggcatggcctactgttta

SEQ ID NO: 182451 - DNA, 25 bp, Saccharomyces pastorianus
tgtttagttgcctcaagcctactgt

SEQ ID NO: 182452 - DNA, 25 bp, Saccharomyces pastorianus
aaagaaataaagattgcagcacctg

SEQ ID NO: 182453 - DNA, 25 bp, Saccharomyces pastorianus
ataaagattgcagcacctgagtttc

SEQ ID NO: 182454 - DNA, 25 bp, Saccharomyces pastorianus
aagaaataaagattgcagcacctga

SEQ ID NO: 182455 - DNA, 25 bp, Saccharomyces pastorianus
aaagattgcagcacctgagtttcgc

SEQ ID NO: 182456 - DNA, 25 bp, Saccharomyces pastorianus
agaaataaagattgcagcacctgag

SEQ ID NO: 182457 - DNA, 25 bp, Saccharomyces pastorianus
gaaataaagattgcagcacctgagt

SEQ ID NO: 182458 - DNA, 25 bp, Saccharomyces pastorianus
aaaagaaataaagattgcagcacct

SEQ ID NO: 182459 - DNA, 25 bp, Saccharomyces pastorianus
aaaaagaaataaagattgcagcacc

SEQ ID NO: 182460 - DNA, 25 bp, Saccharomyces pastorianus
aaaaaagaaataaagattgcagcac

SEQ ID NO: 182461 - DNA, 25 bp, Saccharomyces pastorianus
aataaagattgcagcacctgagttt

SEQ ID NO: 182462 - DNA, 25 bp, Saccharomyces pastorianus
aaataaagattgcagcacctgagtt

SEQ ID NO: 182463 - DNA, 25 bp, Saccharomyces pastorianus
tctgtcgggaggaagggaattctta

SEQ ID NO: 182464 - DNA, 25 bp, Saccharomyces pastorianus
gatgatcgtaaaggtgaaactaaga

SEQ ID NO: 182465 - DNA, 25 bp, Saccharomyces pastorianus
atctgtcgggaggaagggaattctt

SEQ ID NO: 182466 - DNA, 25 bp, Saccharomyces pastorianus
ataattgcggatggcgatctgtcgg

SEQ ID NO: 182467 - DNA, 25 bp, Saccharomyces pastorianus
agataattgcggatggcgatctgtc

SEQ ID NO: 182468 - DNA, 25 bp, Saccharomyces pastorianus
ctcgatgatcgtaaaggtgaaacta

SEQ ID NO: 182469 - DNA, 25 bp, Saccharomyces pastorianus
actaagataattgcggatggcgatc

SEQ ID NO: 182470 - DNA, 25 bp, Saccharomyces pastorianus
attgcggatggcgatctgtcgggag

SEQ ID NO: 182471 - DNA, 25 bp, Saccharomyces pastorianus
gataattgcggatggcgatctgtcg

SEQ ID NO: 182472 - DNA, 25 bp, Saccharomyces pastorianus
aaactaagataattgcggatggcga

SEQ ID NO: 182473 - DNA, 25 bp, Saccharomyces pastorianus
catgtattactcgatgatcgtaaag

SEQ ID NO: 182474 - DNA, 25 bp, Saccharomyces pastorianus
gtctgctgacacagtggaactgata

SEQ ID NO: 182475 - DNA, 25 bp, Saccharomyces pastorianus
gattaaggaaggctgtataaccgaa

SEQ ID NO: 182476 - DNA, 25 bp, Saccharomyces pastorianus
ctgtctgctgacacagtggaactga

SEQ ID NO: 182477 - DNA, 25 bp, Saccharomyces pastorianus
tgtctgctgacacagtggaactgat

SEQ ID NO: 182478 - DNA, 25 bp, Saccharomyces pastorianus
cctgtctgctgacacagtggaactg

SEQ ID NO: 182479 - DNA, 25 bp, Saccharomyces pastorianus
tgttggatgctgtggctccaggaca

SEQ ID NO: 182480 - DNA, 25 bp, Saccharomyces pastorianus
ataaccgaacaggtacgcgagttct

SEQ ID NO: 182481 - DNA, 25 bp, Saccharomyces pastorianus
acctgtctgctgacacagtggaact

SEQ ID NO: 182482 - DNA, 25 bp, Saccharomyces pastorianus
agacctgtctgctgacacagtggaa

SEQ ID NO: 182483 - DNA, 25 bp, Saccharomyces pastorianus
gacctgtctgctgacacagtggaac

SEQ ID NO: 182484 - DNA, 25 bp, Saccharomyces pastorianus
aacaggtacgcgagttctatggact

SEQ ID NO: 182485 - DNA, 25 bp, Saccharomyces pastorianus
gactggtaactacgttaaacatcca

SEQ ID NO: 182486 - DNA, 25 bp, Saccharomyces pastorianus
tatctctttgactggtaactacgtt

SEQ ID NO: 182487 - DNA, 25 bp, Saccharomyces pastorianus
agtgcgttcttctaactttatctcc

SEQ ID NO: 182488 - DNA, 25 bp, Saccharomyces pastorianus
cgacgaagagttgagttctggtgac

SEQ ID NO: 182489 - DNA, 25 bp, Saccharomyces pastorianus
agacaactcttctgattccgatgac

SEQ ID NO: 182490 - DNA, 25 bp, Saccharomyces pastorianus
aaacatccattcgatacacctttag

SEQ ID NO: 182491 - DNA, 25 bp, Saccharomyces pastorianus
gatacacctttagaagacaactctt

SEQ ID NO: 182492 - DNA, 25 bp, Saccharomyces pastorianus
ttctggtgacgatgaacttgatgat

SEQ ID NO: 182493 - DNA, 25 bp, Saccharomyces pastorianus
caacgagttcgaagagtgcgttctt

SEQ ID NO: 182494 - DNA, 25 bp, Saccharomyces pastorianus
ctaactttatctccaaaaggtcaat

SEQ ID NO: 182495 - DNA, 25 bp, Saccharomyces pastorianus
ttctgattccgatgacgacgaagag

SEQ ID NO: 182496 - DNA, 25 bp, Saccharomyces pastorianus
gcccgaagttgcacatttgctttta

SEQ ID NO: 182497 - DNA, 25 bp, Saccharomyces pastorianus
gcgcgctacgacactatcaagattg

SEQ ID NO: 182498 - DNA, 25 bp, Saccharomyces pastorianus
ggctaccgcgttgttaattcttggc

SEQ ID NO: 182499 - DNA, 25 bp, Saccharomyces pastorianus
aagtcttcacctctgcatctttaaa

SEQ ID NO: 182500 - DNA, 25 bp, Saccharomyces pastorianus
ataccgctattacatcatcaccaga

SEQ ID NO: 182501 - DNA, 25 bp, Saccharomyces pastorianus
caaggcttacttattatggtccaga

SEQ ID NO: 182502 - DNA, 25 bp, Saccharomyces pastorianus
gatctcggtgagtacagcaggctaa

SEQ ID NO: 182503 - DNA, 25 bp, Saccharomyces pastorianus
gattttcttgatatggctaccgcgt

SEQ ID NO: 182504 - DNA, 25 bp, Saccharomyces pastorianus
atttggtgtctcatttgccatggat

SEQ ID NO: 182505 - DNA, 25 bp, Saccharomyces pastorianus
atgatattgtgcacatcccgttcga

SEQ ID NO: 182506 - DNA, 25 bp, Saccharomyces pastorianus
tggtgcaccagcgtcattgatatat

SEQ ID NO: 182507 - DNA, 25 bp, Saccharomyces pastorianus
aacgtccaatgggtatactgtcaac

SEQ ID NO: 182508 - DNA, 25 bp, Saccharomyces pastorianus
aatgggtatactgtcaaccacaaca

SEQ ID NO: 182509 - DNA, 25 bp, Saccharomyces pastorianus
tttcacaacgtccaatgggtatact

SEQ ID NO: 182510 - DNA, 25 bp, Saccharomyces pastorianus
tcacaacgtccaatgggtatactgt

SEQ ID NO: 182511 - DNA, 25 bp, Saccharomyces pastorianus
tgggtatactgtcaaccacaacatt

SEQ ID NO: 182512 - DNA, 25 bp, Saccharomyces pastorianus
tccaatgggtatactgtcaaccaca

SEQ ID NO: 182513 - DNA, 25 bp, Saccharomyces pastorianus
gatttcacaacgtccaatgggtata

SEQ ID NO: 182514 - DNA, 25 bp, Saccharomyces pastorianus
cgtccaatgggtatactgtcaacca

SEQ ID NO: 182515 - DNA, 25 bp, Saccharomyces pastorianus
ggatttcacaacgtccaatgggtat

SEQ ID NO: 182516 - DNA, 25 bp, Saccharomyces pastorianus
ttgtataatggatttcacaacgtcc

SEQ ID NO: 182517 - DNA, 25 bp, Saccharomyces pastorianus
aaatgcaccaaataagcataatttc

SEQ ID NO: 182518 - DNA, 25 bp, Saccharomyces pastorianus
gttactatagtatcttgttgcacga

SEQ ID NO: 182519 - DNA, 25 bp, Saccharomyces pastorianus
agccagcgaattgccatctagtttt

SEQ ID NO: 182520 - DNA, 25 bp, Saccharomyces pastorianus
acctaggcacaatatcatgttacta

SEQ ID NO: 182521 - DNA, 25 bp, Saccharomyces pastorianus
tagcacaatcacgtctgcattctaa

SEQ ID NO: 182522 - DNA, 25 bp, Saccharomyces pastorianus
aaacatcatcaatgcctgaagctga

SEQ ID NO: 182523 - DNA, 25 bp, Saccharomyces pastorianus
ctgagattgctgatgtggacgcaca

SEQ ID NO: 182524 - DNA, 25 bp, Saccharomyces pastorianus
gcacttggaagttacctaggcacaa

SEQ ID NO: 182525 - DNA, 25 bp, Saccharomyces pastorianus
catctatgaagggacatccggtcat

SEQ ID NO: 182526 - DNA, 25 bp, Saccharomyces pastorianus
gaaaccgcaaacattgaggccttta

SEQ ID NO: 182527 - DNA, 25 bp, Saccharomyces pastorianus
atttgctccactttcaaaagaattc

SEQ ID NO: 182528 - DNA, 25 bp, Saccharomyces pastorianus
gtatcttgttgcacgaactccataa

SEQ ID NO: 182529 - DNA, 25 bp, Saccharomyces pastorianus
aatagcagcttcaacaaccgtacca

SEQ ID NO: 182530 - DNA, 25 bp, Saccharomyces pastorianus
gaattcagcgctcacggagattcaa

SEQ ID NO: 182531 - DNA, 25 bp, Saccharomyces pastorianus
taacttagcgttgtccacattgggc

SEQ ID NO: 182532 - DNA, 25 bp, Saccharomyces pastorianus
cacattgggctttttctctgcttct

SEQ ID NO: 182533 - DNA, 25 bp, Saccharomyces pastorianus
gttcctctgatattcttggcttatt

SEQ ID NO: 182534 - DNA, 25 bp, Saccharomyces pastorianus
ttatctttgctagtggttcctctga

SEQ ID NO: 182535 - DNA, 25 bp, Saccharomyces pastorianus
gatatgcattgtcgtctttctatta

SEQ ID NO: 182536 - DNA, 25 bp, Saccharomyces pastorianus
atggattttagtaccgggcgctgct

SEQ ID NO: 182537 - DNA, 25 bp, Saccharomyces pastorianus
tattttatcctcacgttacctggtg

SEQ ID NO: 182538 - DNA, 25 bp, Saccharomyces pastorianus
gaatgctgctgaacgacccatatcc

SEQ ID NO: 182539 - DNA, 25 bp, Saccharomyces pastorianus
tatccaggctcagcggccgaaagat

SEQ ID NO: 182540 - DNA, 25 bp, Saccharomyces pastorianus
tattatcctcagcattgccatcttt

SEQ ID NO: 182541 - DNA, 25 bp, Saccharomyces pastorianus
tttcagtggcagtagcattagtgct

SEQ ID NO: 182542 - DNA, 25 bp, Saccharomyces pastorianus
agtcccactagtcctgacgttgatg

SEQ ID NO: 182543 - DNA, 25 bp, Saccharomyces pastorianus
tgctggcagtggtagtcccactagt

SEQ ID NO: 182544 - DNA, 25 bp, Saccharomyces pastorianus
ttgatgctggcagtggtagtcccac

SEQ ID NO: 182545 - DNA, 25 bp, Saccharomyces pastorianus
agcatttgtgctggagttggtactt

SEQ ID NO: 182546 - DNA, 25 bp, Saccharomyces pastorianus
attatcctcagcattgccatcttta

SEQ ID NO: 182547 - DNA, 25 bp, Saccharomyces pastorianus
gcatttgtgctggagttggtacttt

SEQ ID NO: 182548 - DNA, 25 bp, Saccharomyces pastorianus
actttcagtggcagtagcattagtg

SEQ ID NO: 182549 - DNA, 25 bp, Saccharomyces pastorianus
ggcagtggtagtcccactagtcctg

SEQ ID NO: 182550 - DNA, 25 bp, Saccharomyces pastorianus
tctattatcctcagcattgccatct

SEQ ID NO: 182551 - DNA, 25 bp, Saccharomyces pastorianus
ggtccgacattagagccgttcgata

SEQ ID NO: 182552 - DNA, 25 bp, Saccharomyces pastorianus
ttggcaaaccgcattcagttgtgga

SEQ ID NO: 182553 - DNA, 25 bp, Saccharomyces pastorianus
ggtacctctcttgttgttgatggaa

SEQ ID NO: 182554 - DNA, 25 bp, Saccharomyces pastorianus
agatgttctaattttcgcagccgtc

SEQ ID NO: 182555 - DNA, 25 bp, Saccharomyces pastorianus
tacgctagcgacatttcctacgtta

SEQ ID NO: 182556 - DNA, 25 bp, Saccharomyces pastorianus
ataagatggcgcagggtccgacatt

SEQ ID NO: 182557 - DNA, 25 bp, Saccharomyces pastorianus
gcagccgtcccaagtatcgaagaaa

SEQ ID NO: 182558 - DNA, 25 bp, Saccharomyces pastorianus
aaggacttcacgttgatgttttctg

SEQ ID NO: 182559 - DNA, 25 bp, Saccharomyces pastorianus
gtatagtctgcgaattccccaaatc

SEQ ID NO: 182560 - DNA, 25 bp, Saccharomyces pastorianus
agtgaatatcactcctctagctctt

SEQ ID NO: 182561 - DNA, 25 bp, Saccharomyces pastorianus
gaggcactagccgtagtattggcaa

SEQ ID NO: 182562 - DNA, 25 bp, Saccharomyces pastorianus
tggtggtgacactttaggccttgac

SEQ ID NO: 182563 - DNA, 25 bp, Saccharomyces pastorianus
aagtacgtacttccatcaaatcaga

SEQ ID NO: 182564 - DNA, 25 bp, Saccharomyces pastorianus
aaaatagtatccctgcagctcttgg

SEQ ID NO: 182565 - DNA, 25 bp, Saccharomyces pastorianus
gaagatgccgtacctggtaccgatg

SEQ ID NO: 182566 - DNA, 25 bp, Saccharomyces pastorianus
tatggctgctcaatccaaggatgct

SEQ ID NO: 182567 - DNA, 25 bp, Saccharomyces pastorianus
tcatgtcatttttgcccggtttgaa

SEQ ID NO: 182568 - DNA, 25 bp, Saccharomyces pastorianus
aattgctcttggtgttactttaggg

SEQ ID NO: 182569 - DNA, 25 bp, Saccharomyces pastorianus
ttattcccaccgaaccatttggatg

SEQ ID NO: 182570 - DNA, 25 bp, Saccharomyces pastorianus
ttggaacctccactaatcgatttcg

SEQ ID NO: 182571 - DNA, 25 bp, Saccharomyces pastorianus
ctaataccgttgacccttatgttgt

SEQ ID NO: 182572 - DNA, 25 bp, Saccharomyces pastorianus
attgggcctatgttattcccaccga

SEQ ID NO: 182573 - DNA, 25 bp, Saccharomyces pastorianus
atctactaactagtatttatgttac

SEQ ID NO: 182574 - DNA, 25 bp, Saccharomyces pastorianus
ctactaactagtatttatgttacta

SEQ ID NO: 182575 - DNA, 25 bp, Saccharomyces pastorianus
tctactaactagtatttatgttact

SEQ ID NO: 182576 - DNA, 25 bp, Saccharomyces pastorianus
tgttactagtatattatcatatacg

SEQ ID NO: 182577 - DNA, 25 bp, Saccharomyces pastorianus
catctactaactagtatttatgtta

SEQ ID NO: 182578 - DNA, 25 bp, Saccharomyces pastorianus
tatgttactagtatattatcatata

SEQ ID NO: 182579 - DNA, 25 bp, Saccharomyces pastorianus
gaataaaaatcaactatcatctact

SEQ ID NO: 182580 - DNA, 25 bp, Saccharomyces pastorianus
ggaataaaaatcaactatcatctac

SEQ ID NO: 182581 - DNA, 25 bp, Saccharomyces pastorianus
aataaaaatcaactatcatctacta

SEQ ID NO: 182582 - DNA, 25 bp, Saccharomyces pastorianus
tcatctactaactagtatttatgtt

SEQ ID NO: 182583 - DNA, 25 bp, Saccharomyces pastorianus
gttggaataaaaatcaactatcatc

SEQ ID NO: 182584 - DNA, 25 bp, Saccharomyces pastorianus
ctcccccctggtttgatatcataaa

SEQ ID NO: 182585 - DNA, 25 bp, Saccharomyces pastorianus
gtatatcttatcacaccagtttatc

SEQ ID NO: 182586 - DNA, 25 bp, Saccharomyces pastorianus
gaaatacatacaattacttcccaat

SEQ ID NO: 182587 - DNA, 25 bp, Saccharomyces pastorianus
gtttatccaaagatagatgcagttt

SEQ ID NO: 182588 - DNA, 25 bp, Saccharomyces pastorianus
gatgcagttttgaaattggttactt

SEQ ID NO: 182589 - DNA, 25 bp, Saccharomyces pastorianus
tcccaattacttcccaaatattctc

SEQ ID NO: 182590 - DNA, 25 bp, Saccharomyces pastorianus
ggacatcagcattcaatgtatatct

SEQ ID NO: 182591 - DNA, 25 bp, Saccharomyces pastorianus
tgatatcataaaagcaccttatggc

SEQ ID NO: 182592 - DNA, 25 bp, Saccharomyces pastorianus
atcacaccagtttatccaaagatag

SEQ ID NO: 182593 - DNA, 25 bp, Saccharomyces pastorianus
tacttcccaattacttcccaaatat

SEQ ID NO: 182594 - DNA, 25 bp, Saccharomyces pastorianus
gaatatttctactacatttcgataa

SEQ ID NO: 182595 - DNA, 25 bp, Saccharomyces pastorianus
ggttttgcaagggttatttctctgt

SEQ ID NO: 182596 - DNA, 25 bp, Saccharomyces pastorianus
gtgtaccataaggttttgcaagggt

SEQ ID NO: 182597 - DNA, 25 bp, Saccharomyces pastorianus
gcctgttcgtgtaccataaggtttt

SEQ ID NO: 182598 - DNA, 25 bp, Saccharomyces pastorianus
gaaggaagacgatagaaactgccaa

SEQ ID NO: 182599 - DNA, 25 bp, Saccharomyces pastorianus
gaaactgccaagaaacttttagagg

SEQ ID NO: 182600 - DNA, 25 bp, Saccharomyces pastorianus
gggcctgttcgtgtaccataaggtt

SEQ ID NO: 182601 - DNA, 25 bp, Saccharomyces pastorianus
tttgcaagggttatttctctgtaaa

SEQ ID NO: 182602 - DNA, 25 bp, Saccharomyces pastorianus
gttcgtgtaccataaggttttgcaa

SEQ ID NO: 182603 - DNA, 25 bp, Saccharomyces pastorianus
gcaagggttatttctctgtaaatat

SEQ ID NO: 182604 - DNA, 25 bp, Saccharomyces pastorianus
atgctatggccggaaaagaaggaag

SEQ ID NO: 182605 - DNA, 25 bp, Saccharomyces pastorianus
gacgatagaaactgccaagaaactt

SEQ ID NO: 182606 - DNA, 25 bp, Saccharomyces pastorianus
tgaagccacaaccactactgtttct

SEQ ID NO: 182607 - DNA, 25 bp, Saccharomyces pastorianus
gactgtcacctctgaggcccctgaa

SEQ ID NO: 182608 - DNA, 25 bp, Saccharomyces pastorianus
agcaactactacttctccaaaatca

SEQ ID NO: 182609 - DNA, 25 bp, Saccharomyces pastorianus
cttctgaatgtcctgaagaaacttc

SEQ ID NO: 182610 - DNA, 25 bp, Saccharomyces pastorianus
gcaactactacttctccaaaatcat

SEQ ID NO: 182611 - DNA, 25 bp, Saccharomyces pastorianus
aaacttcagcaactactacttctcc

SEQ ID NO: 182612 - DNA, 25 bp, Saccharomyces pastorianus
ttcagcaactactacttctccaaaa

SEQ ID NO: 182613 - DNA, 25 bp, Saccharomyces pastorianus
caactactacttctccaaaatcata

SEQ ID NO: 182614 - DNA, 25 bp, Saccharomyces pastorianus
gaagaaacttcagcaactactactt

SEQ ID NO: 182615 - DNA, 25 bp, Saccharomyces pastorianus
tcagcaactactacttctccaaaat

SEQ ID NO: 182616 - DNA, 25 bp, Saccharomyces pastorianus
gaagccacaaccactactgtttctc

SEQ ID NO: 182617 - DNA, 25 bp, Saccharomyces pastorianus
gctgatttctttagccatcaatgcc

SEQ ID NO: 182618 - DNA, 25 bp, Saccharomyces pastorianus
aatccggtgctgatttctttagcca

SEQ ID NO: 182619 - DNA, 25 bp, Saccharomyces pastorianus
gttttgtatgatagatttcacgaca

SEQ ID NO: 182620 - DNA, 25 bp, Saccharomyces pastorianus
tggatacaccgtcaaccacaacatt

SEQ ID NO: 182621 - DNA, 25 bp, Saccharomyces pastorianus
ggtgctgatttctttagccatcaat

SEQ ID NO: 182622 - DNA, 25 bp, Saccharomyces pastorianus
aatagacacagtttccaaggaggaa

SEQ ID NO: 182623 - DNA, 25 bp, Saccharomyces pastorianus
tttcgtttcttgttaatccggtgct

SEQ ID NO: 182624 - DNA, 25 bp, Saccharomyces pastorianus
atccaatggatacaccgtcaaccac

SEQ ID NO: 182625 - DNA, 25 bp, Saccharomyces pastorianus
gatagatttcacgacatccaatgga

SEQ ID NO: 182626 - DNA, 25 bp, Saccharomyces pastorianus
aatgcaccaaatagacacagtttcc

SEQ ID NO: 182627 - DNA, 25 bp, Saccharomyces pastorianus
cgtttcttgttaatccggtgctgat

SEQ ID NO: 182628 - DNA, 25 bp, Saccharomyces pastorianus
tcggtttctctgtgatgttttctat

SEQ ID NO: 182629 - DNA, 25 bp, Saccharomyces pastorianus
cagccagatgtgtagtgatgtggtt

SEQ ID NO: 182630 - DNA, 25 bp, Saccharomyces pastorianus
atctcaccagccagatgtgtagtga

SEQ ID NO: 182631 - DNA, 25 bp, Saccharomyces pastorianus
gtttcggtttctctgtgatgttttc

SEQ ID NO: 182632 - DNA, 25 bp, Saccharomyces pastorianus
gggctttgaacccagccgtttctct

SEQ ID NO: 182633 - DNA, 25 bp, Saccharomyces pastorianus
ttctctctctttgtgtttggccaga

SEQ ID NO: 182634 - DNA, 25 bp, Saccharomyces pastorianus
tttctctgtgatgttttctatctgg

SEQ ID NO: 182635 - DNA, 25 bp, Saccharomyces pastorianus
ttgtgtttggccagagccatctcac

SEQ ID NO: 182636 - DNA, 25 bp, Saccharomyces pastorianus
tctctttgtgtttggccagagccat

SEQ ID NO: 182637 - DNA, 25 bp, Saccharomyces pastorianus
agagccatctcaccagccagatgtg

SEQ ID NO: 182638 - DNA, 25 bp, Saccharomyces pastorianus
agccgtttctctctctttgtgtttg

SEQ ID NO: 182639 - DNA, 25 bp, Saccharomyces pastorianus
tcattataatctctgctctttgtgc

SEQ ID NO: 182640 - DNA, 25 bp, Saccharomyces pastorianus
cattataatctctgctctttgtgct

SEQ ID NO: 182641 - DNA, 25 bp, Saccharomyces pastorianus
gcctctatcattataatctctgctc

SEQ ID NO: 182642 - DNA, 25 bp, Saccharomyces pastorianus
gagagaactgccgaacgaatgtgga

SEQ ID NO: 182643 - DNA, 25 bp, Saccharomyces pastorianus
gataacgcctctatcattataatct

SEQ ID NO: 182644 - DNA, 25 bp, Saccharomyces pastorianus
gaactgccgaacgaatgtggattca

SEQ ID NO: 182645 - DNA, 25 bp, Saccharomyces pastorianus
gattcactagtgataacgcctctat

SEQ ID NO: 182646 - DNA, 25 bp, Saccharomyces pastorianus
ggtcttcaaccgaaaactggtgtag

SEQ ID NO: 182647 - DNA, 25 bp, Saccharomyces pastorianus
gccgaacgaatgtggattcactagt

SEQ ID NO: 182648 - DNA, 25 bp, Saccharomyces pastorianus
cgaaaactggtgtagaagccgatat

SEQ ID NO: 182649 - DNA, 25 bp, Saccharomyces pastorianus
tcactagtgataacgcctctatcat

SEQ ID NO: 182650 - DNA, 25 bp, Saccharomyces pastorianus
atggctagctgctttgtctattcaa

SEQ ID NO: 182651 - DNA, 25 bp, Saccharomyces pastorianus
aatggctagctgctttgtctattca

SEQ ID NO: 182652 - DNA, 25 bp, Saccharomyces pastorianus
ggctagctgctttgtctattcaaga

SEQ ID NO: 182653 - DNA, 25 bp, Saccharomyces pastorianus
gtctattcaagaagttggtccctct

SEQ ID NO: 182654 - DNA, 25 bp, Saccharomyces pastorianus
gctgggttgactaaaggtgaagatt

SEQ ID NO: 182655 - DNA, 25 bp, Saccharomyces pastorianus
ttgtctattcaagaagttggtccct

SEQ ID NO: 182656 - DNA, 25 bp, Saccharomyces pastorianus
tggctagctgctttgtctattcaag

SEQ ID NO: 182657 - DNA, 25 bp, Saccharomyces pastorianus
ctagctgctttgtctattcaagaag

SEQ ID NO: 182658 - DNA, 25 bp, Saccharomyces pastorianus
gctagctgctttgtctattcaagaa

SEQ ID NO: 182659 - DNA, 25 bp, Saccharomyces pastorianus
tcaatggctagctgctttgtctatt

SEQ ID NO: 182660 - DNA, 25 bp, Saccharomyces pastorianus
aggtgaagatttggaaacctctatt

SEQ ID NO: 182661 - DNA, 25 bp, Saccharomyces pastorianus
ctcaaaacagtagccagtcgcgtac

SEQ ID NO: 182662 - DNA, 25 bp, Saccharomyces pastorianus
gataatggcacaaccgacagcgtcc

SEQ ID NO: 182663 - DNA, 25 bp, Saccharomyces pastorianus
gatcttctcagccttgatctggata

SEQ ID NO: 182664 - DNA, 25 bp, Saccharomyces pastorianus
tgtttcttcagcatcggcttcacta

SEQ ID NO: 182665 - DNA, 25 bp, Saccharomyces pastorianus
ggcttcactacaacctgtcagaact

SEQ ID NO: 182666 - DNA, 25 bp, Saccharomyces pastorianus
ggttctctgatatcggatcttctca

SEQ ID NO: 182667 - DNA, 25 bp, Saccharomyces pastorianus
ataaatctgtatcagcacctgctcc

SEQ ID NO: 182668 - DNA, 25 bp, Saccharomyces pastorianus
atgattagcgaccatcggccagttt

SEQ ID NO: 182669 - DNA, 25 bp, Saccharomyces pastorianus
aactgcatcgttgtcatctgtgact

SEQ ID NO: 182670 - DNA, 25 bp, Saccharomyces pastorianus
aagctcttctgaaagttctctactt

SEQ ID NO: 182671 - DNA, 25 bp, Saccharomyces pastorianus
catcggccagtttacgcagcatata

SEQ ID NO: 182672 - DNA, 25 bp, Saccharomyces pastorianus
gctattaaatgggacggctcttctg

SEQ ID NO: 182673 - DNA, 25 bp, Saccharomyces pastorianus
gacggctcttctggcggtgtcatca

SEQ ID NO: 182674 - DNA, 25 bp, Saccharomyces pastorianus
cggtgtcatcagaatggttgttttg

SEQ ID NO: 182675 - DNA, 25 bp, Saccharomyces pastorianus
ggacggctcttctggcggtgtcatc

SEQ ID NO: 182676 - DNA, 25 bp, Saccharomyces pastorianus
ctcttctggcggtgtcatcagaatg

SEQ ID NO: 182677 - DNA, 25 bp, Saccharomyces pastorianus
ggcggtgtcatcagaatggttgttt

SEQ ID NO: 182678 - DNA, 25 bp, Saccharomyces pastorianus
ctggcggtgtcatcagaatggttgt

SEQ ID NO: 182679 - DNA, 25 bp, Saccharomyces pastorianus
cttctggcggtgtcatcagaatggt

SEQ ID NO: 182680 - DNA, 25 bp, Saccharomyces pastorianus
gctcttctggcggtgtcatcagaat

SEQ ID NO: 182681 - DNA, 25 bp, Saccharomyces pastorianus
ctattaaatgggacggctcttctgg

SEQ ID NO: 182682 - DNA, 25 bp, Saccharomyces pastorianus
tattaaatgggacggctcttctggc

SEQ ID NO: 182683 - DNA, 25 bp, Saccharomyces pastorianus
gaaagcgggttgagaatcgtcaaaa

SEQ ID NO: 182684 - DNA, 25 bp, Saccharomyces pastorianus
gatcgtttctgctccattagatgtc

SEQ ID NO: 182685 - DNA, 25 bp, Saccharomyces pastorianus
ggtccaaaactggttttctcatttg

SEQ ID NO: 182686 - DNA, 25 bp, Saccharomyces pastorianus
tgcttgctcctctctgatcgtttct

SEQ ID NO: 182687 - DNA, 25 bp, Saccharomyces pastorianus
ggttttctcatttgcgttagctcaa

SEQ ID NO: 182688 - DNA, 25 bp, Saccharomyces pastorianus
tcaagggcttaacacctaaattact

SEQ ID NO: 182689 - DNA, 25 bp, Saccharomyces pastorianus
tgtaactgcgtttttcaagggctta

SEQ ID NO: 182690 - DNA, 25 bp, Saccharomyces pastorianus
atttgcgttagctcaatctttgata

SEQ ID NO: 182691 - DNA, 25 bp, Saccharomyces pastorianus
attttgataatcctgaaagcgggtt

SEQ ID NO: 182692 - DNA, 25 bp, Saccharomyces pastorianus
atgcattcgccaaggagtatatctt

SEQ ID NO: 182693 - DNA, 25 bp, Saccharomyces pastorianus
attattctcaagctacttggtccca

SEQ ID NO: 182694 - DNA, 25 bp, Saccharomyces pastorianus
atgatcatgttttcgctaggaaccg

SEQ ID NO: 182695 - DNA, 25 bp, Saccharomyces pastorianus
aggattctactggacctatggctag

SEQ ID NO: 182696 - DNA, 25 bp, Saccharomyces pastorianus
tttaggttcagtagtgccacgagat

SEQ ID NO: 182697 - DNA, 25 bp, Saccharomyces pastorianus
ggcgctgtattgtttggtcactcca

SEQ ID NO: 182698 - DNA, 25 bp, Saccharomyces pastorianus
gatgctatttcaattgctcaggaga

SEQ ID NO: 182699 - DNA, 25 bp, Saccharomyces pastorianus
tgtcctttcaatcttactaccaatc

SEQ ID NO: 182700 - DNA, 25 bp, Saccharomyces pastorianus
cacgagatgctcatgttgtatccaa

SEQ ID NO: 182701 - DNA, 25 bp, Saccharomyces pastorianus
ggctagaactgtccgcgacgcaata

SEQ ID NO: 182702 - DNA, 25 bp, Saccharomyces pastorianus
tggacactacttgcggttcatggat

SEQ ID NO: 182703 - DNA, 25 bp, Saccharomyces pastorianus
gtagtgccagttctgtagctgccaa

SEQ ID NO: 182704 - DNA, 25 bp, Saccharomyces pastorianus
ggaggtagttcatctggtagtgcca

SEQ ID NO: 182705 - DNA, 25 bp, Saccharomyces pastorianus
gaaggcgatcctctggtagatttag

SEQ ID NO: 182706 - DNA, 25 bp, Saccharomyces pastorianus
agggccttcgccaatgatgaaaccc

SEQ ID NO: 182707 - DNA, 25 bp, Saccharomyces pastorianus
attcgctcttccaatgtagggcctt

SEQ ID NO: 182708 - DNA, 25 bp, Saccharomyces pastorianus
gcgatcctctggtagatttagcgat

SEQ ID NO: 182709 - DNA, 25 bp, Saccharomyces pastorianus
tcttccaatgtagggccttcgccaa

SEQ ID NO: 182710 - DNA, 25 bp, Saccharomyces pastorianus
cctctggtagatttagcgatatttc

SEQ ID NO: 182711 - DNA, 25 bp, Saccharomyces pastorianus
tcgccaatgatgaaacccgcacatt

SEQ ID NO: 182712 - DNA, 25 bp, Saccharomyces pastorianus
ggagagatcgcagggcattcgctct

SEQ ID NO: 182713 - DNA, 25 bp, Saccharomyces pastorianus
agggcattcgctcttccaatgtagg

SEQ ID NO: 182714 - DNA, 25 bp, Saccharomyces pastorianus
aacgtggagagatcgcagggcattc

SEQ ID NO: 182715 - DNA, 25 bp, Saccharomyces pastorianus
aatgtagggccttcgccaatgatga

SEQ ID NO: 182716 - DNA, 25 bp, Saccharomyces pastorianus
ctggacaaattgaacgcgagaaacg

SEQ ID NO: 182717 - DNA, 25 bp, Saccharomyces pastorianus
gaaagcttatcgaaagacctgaaaa

SEQ ID NO: 182718 - DNA, 25 bp, Saccharomyces pastorianus
gggttagagcaagatatcaacagat

SEQ ID NO: 182719 - DNA, 25 bp, Saccharomyces pastorianus
ggagtacaggatacgcgaagccaat

SEQ ID NO: 182720 - DNA, 25 bp, Saccharomyces pastorianus
aaaggaggtcgatcagaacgcagaa

SEQ ID NO: 182721 - DNA, 25 bp, Saccharomyces pastorianus
ggtcaatcaagaattagttcaacta

SEQ ID NO: 182722 - DNA, 25 bp, Saccharomyces pastorianus
gggaggttccaaaaggtcaatcaag

SEQ ID NO: 182723 - DNA, 25 bp, Saccharomyces pastorianus
agaaaagttcagtactcaatttttg

SEQ ID NO: 182724 - DNA, 25 bp, Saccharomyces pastorianus
gatacgcgaagccaataaatttgaa

SEQ ID NO: 182725 - DNA, 25 bp, Saccharomyces pastorianus
gttcaactaggctctaaactggaca

SEQ ID NO: 182726 - DNA, 25 bp, Saccharomyces pastorianus
caattgaaaactctcactgaaaaag

SEQ ID NO: 182727 - DNA, 25 bp, Saccharomyces pastorianus
atataggaagaactctacagctcga

SEQ ID NO: 182728 - DNA, 25 bp, Saccharomyces pastorianus
aagcagtcgctctcgttctattgtg

SEQ ID NO: 182729 - DNA, 25 bp, Saccharomyces pastorianus
atcaagcagtcgctctcgttctatt

SEQ ID NO: 182730 - DNA, 25 bp, Saccharomyces pastorianus
agtcgctctcgttctattgtgtgtt

SEQ ID NO: 182731 - DNA, 25 bp, Saccharomyces pastorianus
catcaaatcaatcaagcagtcgctc

SEQ ID NO: 182732 - DNA, 25 bp, Saccharomyces pastorianus
aatcaatcaagcagtcgctctcgtt

SEQ ID NO: 182733 - DNA, 25 bp, Saccharomyces pastorianus
ggaagaactctacagctcgaacaat

SEQ ID NO: 182734 - DNA, 25 bp, Saccharomyces pastorianus
tacagctcgaacaatacatcaaatc

SEQ ID NO: 182735 - DNA, 25 bp, Saccharomyces pastorianus
cgttctattgtgtgtttctcaccac

SEQ ID NO: 182736 - DNA, 25 bp, Saccharomyces pastorianus
gctctcgttctattgtgtgtttctc

SEQ ID NO: 182737 - DNA, 25 bp, Saccharomyces pastorianus
gaactctacagctcgaacaatacat

SEQ ID NO: 182738 - DNA, 25 bp, Saccharomyces pastorianus
gctcctcacggtacttacaacggtt

SEQ ID NO: 182739 - DNA, 25 bp, Saccharomyces pastorianus
aatggcacaccaagggcatcagtag

SEQ ID NO: 182740 - DNA, 25 bp, Saccharomyces pastorianus
aagccaacctggtactaggtgcgat

SEQ ID NO: 182741 - DNA, 25 bp, Saccharomyces pastorianus
gtgcaagcagtttcgctcgtacctt

SEQ ID NO: 182742 - DNA, 25 bp, Saccharomyces pastorianus
agataaagatctcggcattgctcaa

SEQ ID NO: 182743 - DNA, 25 bp, Saccharomyces pastorianus
gttcctaatacgagttacgcacccg

SEQ ID NO: 182744 - DNA, 25 bp, Saccharomyces pastorianus
gtgcgatttcccaccaaagattatc

SEQ ID NO: 182745 - DNA, 25 bp, Saccharomyces pastorianus
aagaagctcctaccaacggatcaag

SEQ ID NO: 182746 - DNA, 25 bp, Saccharomyces pastorianus
gactatgacccatcagttcctaata

SEQ ID NO: 182747 - DNA, 25 bp, Saccharomyces pastorianus
tcaagagcaggttctcgtgcaagca

SEQ ID NO: 182748 - DNA, 25 bp, Saccharomyces pastorianus
gctcaaattaacttgggcgacccac

SEQ ID NO: 182749 - DNA, 25 bp, Saccharomyces pastorianus
tttacgccatatgctaaccactcaa

SEQ ID NO: 182750 - DNA, 25 bp, Saccharomyces pastorianus
taccacttttacgccatatgctaac

SEQ ID NO: 182751 - DNA, 25 bp, Saccharomyces pastorianus
acttttacgccatatgctaaccact

SEQ ID NO: 182752 - DNA, 25 bp, Saccharomyces pastorianus
cacttttacgccatatgctaaccac

SEQ ID NO: 182753 - DNA, 25 bp, Saccharomyces pastorianus
ttttacgccatatgctaaccactca

SEQ ID NO: 182754 - DNA, 25 bp, Saccharomyces pastorianus
ataccacttttacgccatatgctaa

SEQ ID NO: 182755 - DNA, 25 bp, Saccharomyces pastorianus
tataccacttttacgccatatgcta

SEQ ID NO: 182756 - DNA, 25 bp, Saccharomyces pastorianus
acgccatatgctaaccactcaattt

SEQ ID NO: 182757 - DNA, 25 bp, Saccharomyces pastorianus
ttataccacttttacgccatatgct

SEQ ID NO: 182758 - DNA, 25 bp, Saccharomyces pastorianus
tacgccatatgctaaccactcaatt

SEQ ID NO: 182759 - DNA, 25 bp, Saccharomyces pastorianus
cttttacgccatatgctaaccactc

SEQ ID NO: 182760 - DNA, 25 bp, Saccharomyces pastorianus
ggctctccggacttggatttactag

SEQ ID NO: 182761 - DNA, 25 bp, Saccharomyces pastorianus
gaattactggatattgctctgctca

SEQ ID NO: 182762 - DNA, 25 bp, Saccharomyces pastorianus
tcccttccattgtctctagaaatta

SEQ ID NO: 182763 - DNA, 25 bp, Saccharomyces pastorianus
aggaaacgtttcctcgatgctccac

SEQ ID NO: 182764 - DNA, 25 bp, Saccharomyces pastorianus
tatagcgccaacatacagcacaacg

SEQ ID NO: 182765 - DNA, 25 bp, Saccharomyces pastorianus
tggattttatcaacattaacccgca

SEQ ID NO: 182766 - DNA, 25 bp, Saccharomyces pastorianus
tattgggttgccgaaggtttctagg

SEQ ID NO: 182767 - DNA, 25 bp, Saccharomyces pastorianus
atattgctctgctcaactctgggtc

SEQ ID NO: 182768 - DNA, 25 bp, Saccharomyces pastorianus
atacagcacaacgatggctctccgg

SEQ ID NO: 182769 - DNA, 25 bp, Saccharomyces pastorianus
gaccctggtttattgagtctgaacc

SEQ ID NO: 182770 - DNA, 25 bp, Saccharomyces pastorianus
ttcggattagaaacgcacatgcaag

SEQ ID NO: 182771 - DNA, 25 bp, Saccharomyces pastorianus
tactaaagcccaaaaccctatgcgt

SEQ ID NO: 182772 - DNA, 25 bp, Saccharomyces pastorianus
gtcttgaacatctccgtcggtgaat

SEQ ID NO: 182773 - DNA, 25 bp, Saccharomyces pastorianus
gcccaaaaccctatgcgtgatttga

SEQ ID NO: 182774 - DNA, 25 bp, Saccharomyces pastorianus
gtctactaaagcccaaaaccctatg

SEQ ID NO: 182775 - DNA, 25 bp, Saccharomyces pastorianus
tctactaaagcccaaaaccctatgc

SEQ ID NO: 182776 - DNA, 25 bp, Saccharomyces pastorianus
agaacaattgtctggtcaaactcca

SEQ ID NO: 182777 - DNA, 25 bp, Saccharomyces pastorianus
ccaaaaccctatgcgtgatttgaag

SEQ ID NO: 182778 - DNA, 25 bp, Saccharomyces pastorianus
aagcccaaaaccctatgcgtgattt

SEQ ID NO: 182779 - DNA, 25 bp, Saccharomyces pastorianus
agcctccaaggttttagaacaattg

SEQ ID NO: 182780 - DNA, 25 bp, Saccharomyces pastorianus
ctactaaagcccaaaaccctatgcg

SEQ ID NO: 182781 - DNA, 25 bp, Saccharomyces pastorianus
taaagcccaaaaccctatgcgtgat

SEQ ID NO: 182782 - DNA, 25 bp, Saccharomyces pastorianus
cactgctgcaatactttctgcacct

SEQ ID NO: 182783 - DNA, 25 bp, Saccharomyces pastorianus
atcactgctgcaatactttctgcac

SEQ ID NO: 182784 - DNA, 25 bp, Saccharomyces pastorianus
actgctgcaatactttctgcacctg

SEQ ID NO: 182785 - DNA, 25 bp, Saccharomyces pastorianus
catcactgctgcaatactttctgca

SEQ ID NO: 182786 - DNA, 25 bp, Saccharomyces pastorianus
atgaatgcacgtgtcgctgtcctca

SEQ ID NO: 182787 - DNA, 25 bp, Saccharomyces pastorianus
cgctgtcctcatcactgctgcaata

SEQ ID NO: 182788 - DNA, 25 bp, Saccharomyces pastorianus
ctgctgcaatactttctgcacctgt

SEQ ID NO: 182789 - DNA, 25 bp, Saccharomyces pastorianus
tcatcactgctgcaatactttctgc

SEQ ID NO: 182790 - DNA, 25 bp, Saccharomyces pastorianus
tgctgcaatactttctgcacctgtc

SEQ ID NO: 182791 - DNA, 25 bp, Saccharomyces pastorianus
tgaatgcacgtgtcgctgtcctcat

SEQ ID NO: 182792 - DNA, 25 bp, Saccharomyces pastorianus
tcactgctgcaatactttctgcacc

SEQ ID NO: 182793 - DNA, 25 bp, Saccharomyces pastorianus
attcatgttaattgcgctcgccaac

SEQ ID NO: 182794 - DNA, 25 bp, Saccharomyces pastorianus
gcaatggttccattttacggccaag

SEQ ID NO: 182795 - DNA, 25 bp, Saccharomyces pastorianus
aacagtgacggctcgttcacttcaa

SEQ ID NO: 182796 - DNA, 25 bp, Saccharomyces pastorianus
acatcccgcctactgaggaattcaa

SEQ ID NO: 182797 - DNA, 25 bp, Saccharomyces pastorianus
atttgcacatttggcctcgtcataa

SEQ ID NO: 182798 - DNA, 25 bp, Saccharomyces pastorianus
ttttgcaatagctcctgaccatttg

SEQ ID NO: 182799 - DNA, 25 bp, Saccharomyces pastorianus
ggaagatttgaaaaccccacatact

SEQ ID NO: 182800 - DNA, 25 bp, Saccharomyces pastorianus
gacggagcatactctgcgacgagat

SEQ ID NO: 182801 - DNA, 25 bp, Saccharomyces pastorianus
tgtaccaggcggaaaggccatccta

SEQ ID NO: 182802 - DNA, 25 bp, Saccharomyces pastorianus
gttacattgaactttacatcccgcc

SEQ ID NO: 182803 - DNA, 25 bp, Saccharomyces pastorianus
ataacttccaagtcacgtgtgaggg

SEQ ID NO: 182804 - DNA, 25 bp, Saccharomyces pastorianus
cccagcagcagatatagtgttcgaa

SEQ ID NO: 182805 - DNA, 25 bp, Saccharomyces pastorianus
ttacggatagattacctaacgctgg

SEQ ID NO: 182806 - DNA, 25 bp, Saccharomyces pastorianus
gggattgaaccaagctgcggccatt

SEQ ID NO: 182807 - DNA, 25 bp, Saccharomyces pastorianus
caagctgcggccattggtaaattaa

SEQ ID NO: 182808 - DNA, 25 bp, Saccharomyces pastorianus
gattacctaacgctggagaaacttt

SEQ ID NO: 182809 - DNA, 25 bp, Saccharomyces pastorianus
agggctaaccacttcgaaacacatg

SEQ ID NO: 182810 - DNA, 25 bp, Saccharomyces pastorianus
acatgctggtggtaagggattgaac

SEQ ID NO: 182811 - DNA, 25 bp, Saccharomyces pastorianus
acttcgaaacacatgctggtggtaa

SEQ ID NO: 182812 - DNA, 25 bp, Saccharomyces pastorianus
tagtgttcgaatgattggtaatgtt

SEQ ID NO: 182813 - DNA, 25 bp, Saccharomyces pastorianus
gagaaactttcagggctaaccactt

SEQ ID NO: 182814 - DNA, 25 bp, Saccharomyces pastorianus
gctaaccacttcgaaacacatgctg

SEQ ID NO: 182815 - DNA, 25 bp, Saccharomyces pastorianus
tggtggcctgataccgcagtggaaa

SEQ ID NO: 182816 - DNA, 25 bp, Saccharomyces pastorianus
tatttgataagttcatctctgtcga

SEQ ID NO: 182817 - DNA, 25 bp, Saccharomyces pastorianus
aaaggattttggctatgtgtgttaa

SEQ ID NO: 182818 - DNA, 25 bp, Saccharomyces pastorianus
taatagatctttgccatgacttccc

SEQ ID NO: 182819 - DNA, 25 bp, Saccharomyces pastorianus
aactttactgaaattggtggcctga

SEQ ID NO: 182820 - DNA, 25 bp, Saccharomyces pastorianus
taaggctaatctctcatcaaatgtt

SEQ ID NO: 182821 - DNA, 25 bp, Saccharomyces pastorianus
gaagagtatggctaccttattcagg

SEQ ID NO: 182822 - DNA, 25 bp, Saccharomyces pastorianus
gagttacataaggtctcctcgcagt

SEQ ID NO: 182823 - DNA, 25 bp, Saccharomyces pastorianus
gaacctgtgacgaaggtatcatcac

SEQ ID NO: 182824 - DNA, 25 bp, Saccharomyces pastorianus
tcccgcacttaacaccgaaattaca

SEQ ID NO: 182825 - DNA, 25 bp, Saccharomyces pastorianus
gatagtgcaaacgtcgagctgttta

SEQ ID NO: 182826 - DNA, 25 bp, Saccharomyces pastorianus
tgttgttgttggtcgggctcgtctt

SEQ ID NO: 182827 - DNA, 25 bp, Saccharomyces pastorianus
ttgttgttgttgctgttgttgttgt

SEQ ID NO: 182828 - DNA, 25 bp, Saccharomyces pastorianus
gtcgggctcgtcttggaacccattt

SEQ ID NO: 182829 - DNA, 25 bp, Saccharomyces pastorianus
cggttgttgttgttgctgttgttgt

SEQ ID NO: 182830 - DNA, 25 bp, Saccharomyces pastorianus
tgttggtcgggctcgtcttggaacc

SEQ ID NO: 182831 - DNA, 25 bp, Saccharomyces pastorianus
ctgttgttgttgttgttgttgttgt

SEQ ID NO: 182832 - DNA, 25 bp, Saccharomyces pastorianus
ggtcgggctcgtcttggaacccatt

SEQ ID NO: 182833 - DNA, 25 bp, Saccharomyces pastorianus
tggtcgggctcgtcttggaacccat

SEQ ID NO: 182834 - DNA, 25 bp, Saccharomyces pastorianus
ttggtcgggctcgtcttggaaccca

SEQ ID NO: 182835 - DNA, 25 bp, Saccharomyces pastorianus
ggcggttgttgttgttgctgttgtt

SEQ ID NO: 182836 - DNA, 25 bp, Saccharomyces pastorianus
ttgttgttgttggtcgggctcgtct

SEQ ID NO: 182837 - DNA, 25 bp, Saccharomyces pastorianus
actggctatagttgttggatggata

SEQ ID NO: 182838 - DNA, 25 bp, Saccharomyces pastorianus
ctggctatagttgttggatggatat

SEQ ID NO: 182839 - DNA, 25 bp, Saccharomyces pastorianus
tatgtagaccatattattaagaaga

SEQ ID NO: 182840 - DNA, 25 bp, Saccharomyces pastorianus
gatattcattattatgtagaccata

SEQ ID NO: 182841 - DNA, 25 bp, Saccharomyces pastorianus
gtttcaataaatgcgtgactggcta

SEQ ID NO: 182842 - DNA, 25 bp, Saccharomyces pastorianus
taagaagaatgcaattaggcccgac

SEQ ID NO: 182843 - DNA, 25 bp, Saccharomyces pastorianus
ggatattcattattatgtagaccat

SEQ ID NO: 182844 - DNA, 25 bp, Saccharomyces pastorianus
tgtagaccatattattaagaagaat

SEQ ID NO: 182845 - DNA, 25 bp, Saccharomyces pastorianus
gctatagttgttggatggatattca

SEQ ID NO: 182846 - DNA, 25 bp, Saccharomyces pastorianus
gttgttggatggatattcattatta

SEQ ID NO: 182847 - DNA, 25 bp, Saccharomyces pastorianus
gttggatggatattcattattatgt

SEQ ID NO: 182848 - DNA, 25 bp, Saccharomyces pastorianus
aacaacaggtcccattgctttgcaa

SEQ ID NO: 182849 - DNA, 25 bp, Saccharomyces pastorianus
gtcccattgctttgcaagagctttc

SEQ ID NO: 182850 - DNA, 25 bp, Saccharomyces pastorianus
caggtcccattgctttgcaagagct

SEQ ID NO: 182851 - DNA, 25 bp, Saccharomyces pastorianus
tcccattgctttgcaagagctttct

SEQ ID NO: 182852 - DNA, 25 bp, Saccharomyces pastorianus
caacaggtcccattgctttgcaaga

SEQ ID NO: 182853 - DNA, 25 bp, Saccharomyces pastorianus
aacaggtcccattgctttgcaagag

SEQ ID NO: 182854 - DNA, 25 bp, Saccharomyces pastorianus
ggtcccattgctttgcaagagcttt

SEQ ID NO: 182855 - DNA, 25 bp, Saccharomyces pastorianus
aggtcccattgctttgcaagagctt

SEQ ID NO: 182856 - DNA, 25 bp, Saccharomyces pastorianus
cccattgctttgcaagagctttcta

SEQ ID NO: 182857 - DNA, 25 bp, Saccharomyces pastorianus
acaacaggtcccattgctttgcaag

SEQ ID NO: 182858 - DNA, 25 bp, Saccharomyces pastorianus
acaggtcccattgctttgcaagagc

SEQ ID NO: 182859 - DNA, 25 bp, Saccharomyces pastorianus
agaacttgcctctgagcaaactcca

SEQ ID NO: 182860 - DNA, 25 bp, Saccharomyces pastorianus
attttgtttctctaggccattcagg

SEQ ID NO: 182861 - DNA, 25 bp, Saccharomyces pastorianus
ttacccattaccaaaggcgacggat

SEQ ID NO: 182862 - DNA, 25 bp, Saccharomyces pastorianus
tacaaaccgggtgtaccgctggtag

SEQ ID NO: 182863 - DNA, 25 bp, Saccharomyces pastorianus
gagcgcaagagttcgttcatctacg

SEQ ID NO: 182864 - DNA, 25 bp, Saccharomyces pastorianus
ttcgtcaaaattgcccggatgcttt

SEQ ID NO: 182865 - DNA, 25 bp, Saccharomyces pastorianus
aagcaatcctttcctctttgttgag

SEQ ID NO: 182866 - DNA, 25 bp, Saccharomyces pastorianus
gattccgcccctaagtcagttaaag

SEQ ID NO: 182867 - DNA, 25 bp, Saccharomyces pastorianus
gttattggcattggcatctccacaa

SEQ ID NO: 182868 - DNA, 25 bp, Saccharomyces pastorianus
aaagcattgagaacgattccgcccc

SEQ ID NO: 182869 - DNA, 25 bp, Saccharomyces pastorianus
accgctggtagctttcaaattgtcc

SEQ ID NO: 182870 - DNA, 25 bp, Saccharomyces pastorianus
atcggcaacactgaacacttggctt

SEQ ID NO: 182871 - DNA, 25 bp, Saccharomyces pastorianus
tggctacgaaggaggtcaggaaaac

SEQ ID NO: 182872 - DNA, 25 bp, Saccharomyces pastorianus
gaatatattgataggtccaccagag

SEQ ID NO: 182873 - DNA, 25 bp, Saccharomyces pastorianus
ggtccaccagagttgagattttcta

SEQ ID NO: 182874 - DNA, 25 bp, Saccharomyces pastorianus
aaagctgcctttcttcttgcagaaa

SEQ ID NO: 182875 - DNA, 25 bp, Saccharomyces pastorianus
cacaaaattatggatggctacgaag

SEQ ID NO: 182876 - DNA, 25 bp, Saccharomyces pastorianus
gcagaaaagaagacccgactaaatc

SEQ ID NO: 182877 - DNA, 25 bp, Saccharomyces pastorianus
aagcatggtaacaattcaggatcaa

SEQ ID NO: 182878 - DNA, 25 bp, Saccharomyces pastorianus
tttgccgaagcagtcatctagtaat

SEQ ID NO: 182879 - DNA, 25 bp, Saccharomyces pastorianus
ggtaatagttctttatcggcaacac

SEQ ID NO: 182880 - DNA, 25 bp, Saccharomyces pastorianus
gattttgcagaaattttgccgaagc

SEQ ID NO: 182881 - DNA, 25 bp, Saccharomyces pastorianus
attcaacggatgatgatttggctga

SEQ ID NO: 182882 - DNA, 25 bp, Saccharomyces pastorianus
atttggctgaagatgatgtagctga

SEQ ID NO: 182883 - DNA, 25 bp, Saccharomyces pastorianus
tggatgatgatttggctgatgatgt

SEQ ID NO: 182884 - DNA, 25 bp, Saccharomyces pastorianus
gctgaagatgaagtggatgatgatt

SEQ ID NO: 182885 - DNA, 25 bp, Saccharomyces pastorianus
atgatgtagcggatgatgattcaac

SEQ ID NO: 182886 - DNA, 25 bp, Saccharomyces pastorianus
atttggctgatgatgtagccgaaga

SEQ ID NO: 182887 - DNA, 25 bp, Saccharomyces pastorianus
gaagaactaacggaacttgaagaag

SEQ ID NO: 182888 - DNA, 25 bp, Saccharomyces pastorianus
ttgttggaagaactaacggaacttg

SEQ ID NO: 182889 - DNA, 25 bp, Saccharomyces pastorianus
gtagcggatgatgattcaacggatg

SEQ ID NO: 182890 - DNA, 25 bp, Saccharomyces pastorianus
aacggatgatgatttggctgaagat

SEQ ID NO: 182891 - DNA, 25 bp, Saccharomyces pastorianus
aagaaacggatgtagcggatgatga

SEQ ID NO: 182892 - DNA, 25 bp, Saccharomyces pastorianus
aaagaactttcacttcttcctctgt

SEQ ID NO: 182893 - DNA, 25 bp, Saccharomyces pastorianus
cctataggacttgtgcggtggcaga

SEQ ID NO: 182894 - DNA, 25 bp, Saccharomyces pastorianus
gaagcacctaagtctgtcattgaac

SEQ ID NO: 182895 - DNA, 25 bp, Saccharomyces pastorianus
aagggttctgactggctcggagacc

SEQ ID NO: 182896 - DNA, 25 bp, Saccharomyces pastorianus
ttacggtatgcccttttcgaggact

SEQ ID NO: 182897 - DNA, 25 bp, Saccharomyces pastorianus
gagcagctttcggtttggctgaagc

SEQ ID NO: 182898 - DNA, 25 bp, Saccharomyces pastorianus
gaaatctgaatcgaaaccgccggcc

SEQ ID NO: 182899 - DNA, 25 bp, Saccharomyces pastorianus
aaaccgccggccaaatatcatatta

SEQ ID NO: 182900 - DNA, 25 bp, Saccharomyces pastorianus
aaggtcacatactgtggctgctcag

SEQ ID NO: 182901 - DNA, 25 bp, Saccharomyces pastorianus
cttcctctgttgttcgtcaaattgg

SEQ ID NO: 182902 - DNA, 25 bp, Saccharomyces pastorianus
gaacaggtcacgcaatgcttcatac

SEQ ID NO: 182903 - DNA, 25 bp, Saccharomyces pastorianus
ttttacaccgtatactaaccactca

SEQ ID NO: 182904 - DNA, 25 bp, Saccharomyces pastorianus
cacttatgccaatattacagaaaaa

SEQ ID NO: 182905 - DNA, 25 bp, Saccharomyces pastorianus
acttatgccaatattacagaaaaat

SEQ ID NO: 182906 - DNA, 25 bp, Saccharomyces pastorianus
tattacagaaaaatcaccactaaaa

SEQ ID NO: 182907 - DNA, 25 bp, Saccharomyces pastorianus
tacagaaaaatcaccactaaaatca

SEQ ID NO: 182908 - DNA, 25 bp, Saccharomyces pastorianus
tgccaatattacagaaaaatcacca

SEQ ID NO: 182909 - DNA, 25 bp, Saccharomyces pastorianus
ttacagaaaaatcaccactaaaatc

SEQ ID NO: 182910 - DNA, 25 bp, Saccharomyces pastorianus
cagaaaaatcaccactaaaatcacc

SEQ ID NO: 182911 - DNA, 25 bp, Saccharomyces pastorianus
attacagaaaaatcaccactaaaat

SEQ ID NO: 182912 - DNA, 25 bp, Saccharomyces pastorianus
aatattacagaaaaatcaccactaa

SEQ ID NO: 182913 - DNA, 25 bp, Saccharomyces pastorianus
atattacagaaaaatcaccactaaa

SEQ ID NO: 182914 - DNA, 25 bp, Saccharomyces pastorianus
acaggtttgctgactgtctgcgtag

SEQ ID NO: 182915 - DNA, 25 bp, Saccharomyces pastorianus
agtagatgttgttaggcccctcaag

SEQ ID NO: 182916 - DNA, 25 bp, Saccharomyces pastorianus
ggtctttctatctcgctatgcagta

SEQ ID NO: 182917 - DNA, 25 bp, Saccharomyces pastorianus
gataggcgaatcagttcccttagaa

SEQ ID NO: 182918 - DNA, 25 bp, Saccharomyces pastorianus
tgggacatatttgcctcgaacttta

SEQ ID NO: 182919 - DNA, 25 bp, Saccharomyces pastorianus
tgtctgcgtagctacggtgcgcaag

SEQ ID NO: 182920 - DNA, 25 bp, Saccharomyces pastorianus
gaaacgttcttcgtagtcgatgctg

SEQ ID NO: 182921 - DNA, 25 bp, Saccharomyces pastorianus
agtgctgtccgatctgaaagccatt

SEQ ID NO: 182922 - DNA, 25 bp, Saccharomyces pastorianus
ttaagcagacttcgccggaaacgtt

SEQ ID NO: 182923 - DNA, 25 bp, Saccharomyces pastorianus
gtatccactgggacattttctgaca

SEQ ID NO: 182924 - DNA, 25 bp, Saccharomyces pastorianus
gttgacacttcaacggcagtgctgt

SEQ ID NO: 182925 - DNA, 25 bp, Saccharomyces pastorianus
gatgttgttcatttcttcgacctta

SEQ ID NO: 182926 - DNA, 25 bp, Saccharomyces pastorianus
gtgacgacgagaagcagcaatgatg

SEQ ID NO: 182927 - DNA, 25 bp, Saccharomyces pastorianus
gaagcagcaatgatgttgttcattt

SEQ ID NO: 182928 - DNA, 25 bp, Saccharomyces pastorianus
gaccttagccttggctctggtgaaa

SEQ ID NO: 182929 - DNA, 25 bp, Saccharomyces pastorianus
gacgacgagaagcagcaatgatgtt

SEQ ID NO: 182930 - DNA, 25 bp, Saccharomyces pastorianus
aaagaacccaatctcttcttggcga

SEQ ID NO: 182931 - DNA, 25 bp, Saccharomyces pastorianus
cgagaagcagcaatgatgttgttca

SEQ ID NO: 182932 - DNA, 25 bp, Saccharomyces pastorianus
gccttggctctggtgaaagaaccca

SEQ ID NO: 182933 - DNA, 25 bp, Saccharomyces pastorianus
agcagcaatgatgttgttcatttct

SEQ ID NO: 182934 - DNA, 25 bp, Saccharomyces pastorianus
ttcatttcttcgaccttagccttgg

SEQ ID NO: 182935 - DNA, 25 bp, Saccharomyces pastorianus
gacgagaagcagcaatgatgttgtt

SEQ ID NO: 182936 - DNA, 25 bp, Saccharomyces pastorianus
acacgcgttccttggagtttttgca

SEQ ID NO: 182937 - DNA, 25 bp, Saccharomyces pastorianus
atttcccaatgcgttgtacttcaag

SEQ ID NO: 182938 - DNA, 25 bp, Saccharomyces pastorianus
gaaatttcaaattccctagctacga

SEQ ID NO: 182939 - DNA, 25 bp, Saccharomyces pastorianus
ggaagattccaattataaccaaatg

SEQ ID NO: 182940 - DNA, 25 bp, Saccharomyces pastorianus
atgttaaattcaagcagtcacctgg

SEQ ID NO: 182941 - DNA, 25 bp, Saccharomyces pastorianus
agtgacagtggaaacctgcctaaaa

SEQ ID NO: 182942 - DNA, 25 bp, Saccharomyces pastorianus
gctacgaattgtcttatcactggtt

SEQ ID NO: 182943 - DNA, 25 bp, Saccharomyces pastorianus
gcaatctcgattttagccgtatcaa

SEQ ID NO: 182944 - DNA, 25 bp, Saccharomyces pastorianus
gggacaacgattacgggcgacacgc

SEQ ID NO: 182945 - DNA, 25 bp, Saccharomyces pastorianus
gtttttgcacaacttcttcgtagag

SEQ ID NO: 182946 - DNA, 25 bp, Saccharomyces pastorianus
tacgacgaagcattgcacgtgtatg

SEQ ID NO: 182947 - DNA, 25 bp, Saccharomyces pastorianus
ggcaccctacatgtttttgttacta

SEQ ID NO: 182948 - DNA, 25 bp, Saccharomyces pastorianus
ctgactttgtttctggcgcacctat

SEQ ID NO: 182949 - DNA, 25 bp, Saccharomyces pastorianus
tttcactgactttgtttctggcgca

SEQ ID NO: 182950 - DNA, 25 bp, Saccharomyces pastorianus
ctttcactgactttgtttctggcgc

SEQ ID NO: 182951 - DNA, 25 bp, Saccharomyces pastorianus
ttcactgactttgtttctggcgcac

SEQ ID NO: 182952 - DNA, 25 bp, Saccharomyces pastorianus
gtacaatttggcaccctacatgttt

SEQ ID NO: 182953 - DNA, 25 bp, Saccharomyces pastorianus
tgtttctggcgcacctattgtaagg

SEQ ID NO: 182954 - DNA, 25 bp, Saccharomyces pastorianus
tggcgcacctattgtaaggagtctt

SEQ ID NO: 182955 - DNA, 25 bp, Saccharomyces pastorianus
cactgactttgtttctggcgcacct

SEQ ID NO: 182956 - DNA, 25 bp, Saccharomyces pastorianus
actgactttgtttctggcgcaccta

SEQ ID NO: 182957 - DNA, 25 bp, Saccharomyces pastorianus
tcactgactttgtttctggcgcacc

SEQ ID NO: 182958 - DNA, 25 bp, Saccharomyces pastorianus
gaagacctccaaacggtattagact

SEQ ID NO: 182959 - DNA, 25 bp, Saccharomyces pastorianus
ggtaagacgctatagaggcctcatt

SEQ ID NO: 182960 - DNA, 25 bp, Saccharomyces pastorianus
gaggttcccttatttggcttttgcg

SEQ ID NO: 182961 - DNA, 25 bp, Saccharomyces pastorianus
gggaccttggactctaatggtttat

SEQ ID NO: 182962 - DNA, 25 bp, Saccharomyces pastorianus
aaggcaatcaccatgacaaggatca

SEQ ID NO: 182963 - DNA, 25 bp, Saccharomyces pastorianus
tccacatttcccagaacctttaaga

SEQ ID NO: 182964 - DNA, 25 bp, Saccharomyces pastorianus
tcgtgatttctttcaaacttgcagg

SEQ ID NO: 182965 - DNA, 25 bp, Saccharomyces pastorianus
cggtggatcccgtcttttcagattt

SEQ ID NO: 182966 - DNA, 25 bp, Saccharomyces pastorianus
aggtcgttacctgccggaatatcac

SEQ ID NO: 182967 - DNA, 25 bp, Saccharomyces pastorianus
gatatcttagttattccgcaagcca

SEQ ID NO: 182968 - DNA, 25 bp, Saccharomyces pastorianus
gttattccgcaagccatgggtatga

SEQ ID NO: 182969 - DNA, 25 bp, Saccharomyces pastorianus
tacagattatgcttggaccagttgg

SEQ ID NO: 182970 - DNA, 25 bp, Saccharomyces pastorianus
gtccggatgccgaaagatcagggtc

SEQ ID NO: 182971 - DNA, 25 bp, Saccharomyces pastorianus
cactgtggcagtgacgacgattaca

SEQ ID NO: 182972 - DNA, 25 bp, Saccharomyces pastorianus
taactctttggtgcggtccggatgc

SEQ ID NO: 182973 - DNA, 25 bp, Saccharomyces pastorianus
gtcgttgattttgaccaggtctcac

SEQ ID NO: 182974 - DNA, 25 bp, Saccharomyces pastorianus
atactaaatgatgttggcacgccaa

SEQ ID NO: 182975 - DNA, 25 bp, Saccharomyces pastorianus
ggaaactgataactgccactgcact

SEQ ID NO: 182976 - DNA, 25 bp, Saccharomyces pastorianus
caatatgttgttgtcgtgggagcag

SEQ ID NO: 182977 - DNA, 25 bp, Saccharomyces pastorianus
gaccaggtctcactaagttcactaa

SEQ ID NO: 182978 - DNA, 25 bp, Saccharomyces pastorianus
ttggatcttgggtggttaactcttt

SEQ ID NO: 182979 - DNA, 25 bp, Saccharomyces pastorianus
aactgccactgcactattcactgtg

SEQ ID NO: 182980 - DNA, 25 bp, Saccharomyces pastorianus
gccaagcgaaagttatttgaacaat

SEQ ID NO: 182981 - DNA, 25 bp, Saccharomyces pastorianus
ggtatcgatggtggtaatgccaagc

SEQ ID NO: 182982 - DNA, 25 bp, Saccharomyces pastorianus
cattggtatcgatggtggtaatgcc

SEQ ID NO: 182983 - DNA, 25 bp, Saccharomyces pastorianus
ttaggcggagaaatattcatcgatt

SEQ ID NO: 182984 - DNA, 25 bp, Saccharomyces pastorianus
agttatttgaacaattaggcggaga

SEQ ID NO: 182985 - DNA, 25 bp, Saccharomyces pastorianus
tggtaatgccaagcgaaagttattt

SEQ ID NO: 182986 - DNA, 25 bp, Saccharomyces pastorianus
ggttacagggtcattggtatcgatg

SEQ ID NO: 182987 - DNA, 25 bp, Saccharomyces pastorianus
tggtggtaatgccaagcgaaagtta

SEQ ID NO: 182988 - DNA, 25 bp, Saccharomyces pastorianus
tacagggtcattggtatcgatggtg

SEQ ID NO: 182989 - DNA, 25 bp, Saccharomyces pastorianus
agaaatattcatcgatttcacggaa

SEQ ID NO: 182990 - DNA, 25 bp, Saccharomyces pastorianus
atcgatggtggtaatgccaagcgaa

SEQ ID NO: 182991 - DNA, 25 bp, Saccharomyces pastorianus
gagaaggtttttctacacaccctcg

SEQ ID NO: 182992 - DNA, 25 bp, Saccharomyces pastorianus
agacgcactaacttcctttaatttg

SEQ ID NO: 182993 - DNA, 25 bp, Saccharomyces pastorianus
aacttgattcgactgtggcgagaac

SEQ ID NO: 182994 - DNA, 25 bp, Saccharomyces pastorianus
tacacaccctcgtttgagatatatg

SEQ ID NO: 182995 - DNA, 25 bp, Saccharomyces pastorianus
cgggtcctgagttgaatctcgtcat

SEQ ID NO: 182996 - DNA, 25 bp, Saccharomyces pastorianus
tgctaactccttacgatgtgttgaa

SEQ ID NO: 182997 - DNA, 25 bp, Saccharomyces pastorianus
gatgtgccgaaatcctaagactggg

SEQ ID NO: 182998 - DNA, 25 bp, Saccharomyces pastorianus
aacatgcttcaggttgatgggccaa

SEQ ID NO: 182999 - DNA, 25 bp, Saccharomyces pastorianus
tgatgggccaatgctaactccttac

SEQ ID NO: 183000 - DNA, 25 bp, Saccharomyces pastorianus
gggaatactacagagcagaccattt

SEQ ID NO: 183001 - DNA, 25 bp, Saccharomyces pastorianus
gcctccgggttgtcagttgcaaaat

SEQ ID NO: 183002 - DNA, 25 bp, Saccharomyces pastorianus
tctttgagttgtcttttccttctgt

SEQ ID NO: 183003 - DNA, 25 bp, Saccharomyces pastorianus
atcatcgtcatcaaattcaccctct

SEQ ID NO: 183004 - DNA, 25 bp, Saccharomyces pastorianus
cttctgtctcttaggatttggcttt

SEQ ID NO: 183005 - DNA, 25 bp, Saccharomyces pastorianus
gggagctctgttttctgaatgcagt

SEQ ID NO: 183006 - DNA, 25 bp, Saccharomyces pastorianus
ttaagtttcttaagcgtgccgcatt

SEQ ID NO: 183007 - DNA, 25 bp, Saccharomyces pastorianus
ttcgtactcgtttcttctggtggct

SEQ ID NO: 183008 - DNA, 25 bp, Saccharomyces pastorianus
attgtcttcgtcgacttcttcttct

SEQ ID NO: 183009 - DNA, 25 bp, Saccharomyces pastorianus
tgccgcaccttctctttttaagttt

SEQ ID NO: 183010 - DNA, 25 bp, Saccharomyces pastorianus
ttggctttgtttcttttccagttct

SEQ ID NO: 183011 - DNA, 25 bp, Saccharomyces pastorianus
taaaaagtcgtcttcttcgtactcg

SEQ ID NO: 183012 - DNA, 25 bp, Saccharomyces pastorianus
tcttctggtggctccatatgcagta

SEQ ID NO: 183013 - DNA, 25 bp, Saccharomyces pastorianus
tgctgtcctcatcactgctgcaata

SEQ ID NO: 183014 - DNA, 25 bp, Saccharomyces pastorianus
gttgctgtcctcatcactgctgcaa

SEQ ID NO: 183015 - DNA, 25 bp, Saccharomyces pastorianus
atcactgctgcaatactttctgtac

SEQ ID NO: 183016 - DNA, 25 bp, Saccharomyces pastorianus
actgctgcaatactttctgtacctg

SEQ ID NO: 183017 - DNA, 25 bp, Saccharomyces pastorianus
acgtgttgctgtcctcatcactgct

SEQ ID NO: 183018 - DNA, 25 bp, Saccharomyces pastorianus
ctgcaatactttctgtacctgtcac

SEQ ID NO: 183019 - DNA, 25 bp, Saccharomyces pastorianus
gcacgtgttgctgtcctcatcactg

SEQ ID NO: 183020 - DNA, 25 bp, Saccharomyces pastorianus
cgtgttgctgtcctcatcactgctg

SEQ ID NO: 183021 - DNA, 25 bp, Saccharomyces pastorianus
tgcacgtgttgctgtcctcatcact

SEQ ID NO: 183022 - DNA, 25 bp, Saccharomyces pastorianus
ttgctgtcctcatcactgctgcaat

SEQ ID NO: 183023 - DNA, 25 bp, Saccharomyces pastorianus
tgttgctgtcctcatcactgctgca

SEQ ID NO: 183024 - DNA, 25 bp, Saccharomyces pastorianus
ggccaagaacaactgaatgatcaaa

SEQ ID NO: 183025 - DNA, 25 bp, Saccharomyces pastorianus
ggaacttgttgaaatatcactgtga

SEQ ID NO: 183026 - DNA, 25 bp, Saccharomyces pastorianus
ttttcttgaagatttggacctttgc

SEQ ID NO: 183027 - DNA, 25 bp, Saccharomyces pastorianus
gaagatttggacctttgcaactgat

SEQ ID NO: 183028 - DNA, 25 bp, Saccharomyces pastorianus
gagcattcctagaacaagttttttc

SEQ ID NO: 183029 - DNA, 25 bp, Saccharomyces pastorianus
acgtggccaagaacaactgaatgat

SEQ ID NO: 183030 - DNA, 25 bp, Saccharomyces pastorianus
aattgcgccaatttgctactgatca

SEQ ID NO: 183031 - DNA, 25 bp, Saccharomyces pastorianus
ggacctttgcaactgatgtaactaa

SEQ ID NO: 183032 - DNA, 25 bp, Saccharomyces pastorianus
gatgtaactaagatggaacgtggcc

SEQ ID NO: 183033 - DNA, 25 bp, Saccharomyces pastorianus
gcgccaatttgctactgatcaagat

SEQ ID NO: 183034 - DNA, 25 bp, Saccharomyces pastorianus
gatttggacctttgcaactgatgta

SEQ ID NO: 183035 - DNA, 25 bp, Saccharomyces pastorianus
ggcctccgaacgtgcgcaagaaaac

SEQ ID NO: 183036 - DNA, 25 bp, Saccharomyces pastorianus
gtaaggcctggctctattgctgcag

SEQ ID NO: 183037 - DNA, 25 bp, Saccharomyces pastorianus
aagattttggtagctctccttcaaa

SEQ ID NO: 183038 - DNA, 25 bp, Saccharomyces pastorianus
gaaaacactttgaactctgcgaaaa

SEQ ID NO: 183039 - DNA, 25 bp, Saccharomyces pastorianus
gaccaatgacacagtgattactata

SEQ ID NO: 183040 - DNA, 25 bp, Saccharomyces pastorianus
ctctgcgaaaaatcctgtgttagtg

SEQ ID NO: 183041 - DNA, 25 bp, Saccharomyces pastorianus
caaagtgaagtctgccccggtgatc

SEQ ID NO: 183042 - DNA, 25 bp, Saccharomyces pastorianus
gctgggagcaatagctctaatgcta

SEQ ID NO: 183043 - DNA, 25 bp, Saccharomyces pastorianus
tgctgcagccgctttacaagcaaat

SEQ ID NO: 183044 - DNA, 25 bp, Saccharomyces pastorianus
gatcgcacccgctaaagttggacag

SEQ ID NO: 183045 - DNA, 25 bp, Saccharomyces pastorianus
ggaccctctactggctaatttgaac

SEQ ID NO: 183046 - DNA, 25 bp, Saccharomyces pastorianus
gtagtacttaagcaaacggccgaag

SEQ ID NO: 183047 - DNA, 25 bp, Saccharomyces pastorianus
ctccggcacaaggtttagatgatat

SEQ ID NO: 183048 - DNA, 25 bp, Saccharomyces pastorianus
agatgatggcagctcaacgtcaatc

SEQ ID NO: 183049 - DNA, 25 bp, Saccharomyces pastorianus
ataaccgcatgatacagggtacgaa

SEQ ID NO: 183050 - DNA, 25 bp, Saccharomyces pastorianus
taggttgtctcgagttcattgcttc

SEQ ID NO: 183051 - DNA, 25 bp, Saccharomyces pastorianus
aaagcctggagattcagcaaggtgt

SEQ ID NO: 183052 - DNA, 25 bp, Saccharomyces pastorianus
aactttacaaccattgcctgacagc

SEQ ID NO: 183053 - DNA, 25 bp, Saccharomyces pastorianus
aagcatgtatgaatctccggcacaa

SEQ ID NO: 183054 - DNA, 25 bp, Saccharomyces pastorianus
gagttcattgcttcattttcaaaaa

SEQ ID NO: 183055 - DNA, 25 bp, Saccharomyces pastorianus
ttggtattgccacaccggaactaat

SEQ ID NO: 183056 - DNA, 25 bp, Saccharomyces pastorianus
actacaggtctgtttaacgagggat

SEQ ID NO: 183057 - DNA, 25 bp, Saccharomyces pastorianus
gcagccgccatttcacagattaata

SEQ ID NO: 183058 - DNA, 25 bp, Saccharomyces pastorianus
aaggcaggcattgatttttgtaaaa

SEQ ID NO: 183059 - DNA, 25 bp, Saccharomyces pastorianus
gaaggtagttatctgtacctcgata

SEQ ID NO: 183060 - DNA, 25 bp, Saccharomyces pastorianus
gtggaattactcataaggcaggcat

SEQ ID NO: 183061 - DNA, 25 bp, Saccharomyces pastorianus
tgtacctcgataatggcaccagggt

SEQ ID NO: 183062 - DNA, 25 bp, Saccharomyces pastorianus
tttgtaaaaaagttgctcgccttat

SEQ ID NO: 183063 - DNA, 25 bp, Saccharomyces pastorianus
aatcagagactaaatgcagccgcca

SEQ ID NO: 183064 - DNA, 25 bp, Saccharomyces pastorianus
atggcaagctggtggtgcgtccaac

SEQ ID NO: 183065 - DNA, 25 bp, Saccharomyces pastorianus
catgtgatgtttggtggaattactc

SEQ ID NO: 183066 - DNA, 25 bp, Saccharomyces pastorianus
tggcacccgtacacatcaataagta

SEQ ID NO: 183067 - DNA, 25 bp, Saccharomyces pastorianus
ggtggtgcgtccaacaacgatacaa

SEQ ID NO: 183068 - DNA, 25 bp, Saccharomyces pastorianus
atctattacattatgggtggtatgt

SEQ ID NO: 183069 - DNA, 25 bp, Saccharomyces pastorianus
ctattacattatgggtggtatgttg

SEQ ID NO: 183070 - DNA, 25 bp, Saccharomyces pastorianus
cattatgggtggtatgttggaataa

SEQ ID NO: 183071 - DNA, 25 bp, Saccharomyces pastorianus
tctattacattatgggtggtatgtt

SEQ ID NO: 183072 - DNA, 25 bp, Saccharomyces pastorianus
cattagatctattacattatgggtg

SEQ ID NO: 183073 - DNA, 25 bp, Saccharomyces pastorianus
ttagatctattacattatgggtggt

SEQ ID NO: 183074 - DNA, 25 bp, Saccharomyces pastorianus
attatgggtggtatgttggaataaa

SEQ ID NO: 183075 - DNA, 25 bp, Saccharomyces pastorianus
tcattagatctattacattatgggt

SEQ ID NO: 183076 - DNA, 25 bp, Saccharomyces pastorianus
gatctattacattatgggtggtatg

SEQ ID NO: 183077 - DNA, 25 bp, Saccharomyces pastorianus
ttcattagatctattacattatggg

SEQ ID NO: 183078 - DNA, 25 bp, Saccharomyces pastorianus
attagatctattacattatgggtgg

SEQ ID NO: 183079 - DNA, 25 bp, Saccharomyces pastorianus
gcccatccacgattactttacaagg

SEQ ID NO: 183080 - DNA, 25 bp, Saccharomyces pastorianus
tatcttggtgtaactcttcgcctga

SEQ ID NO: 183081 - DNA, 25 bp, Saccharomyces pastorianus
taatggcagttctactatcttggtg

SEQ ID NO: 183082 - DNA, 25 bp, Saccharomyces pastorianus
aaggtcaacctcagtatcgctatca

SEQ ID NO: 183083 - DNA, 25 bp, Saccharomyces pastorianus
atatcagatcccaacagccttcgat

SEQ ID NO: 183084 - DNA, 25 bp, Saccharomyces pastorianus
aatgagctgggcaacctctacgaga

SEQ ID NO: 183085 - DNA, 25 bp, Saccharomyces pastorianus
ctttcagtaacgtttattgtgccga

SEQ ID NO: 183086 - DNA, 25 bp, Saccharomyces pastorianus
aaaacggcgtcccatgcatctcata

SEQ ID NO: 183087 - DNA, 25 bp, Saccharomyces pastorianus
ttgtgccgagcttatttcatatcat

SEQ ID NO: 183088 - DNA, 25 bp, Saccharomyces pastorianus
aacgtggcccatatatcagatccca

SEQ ID NO: 183089 - DNA, 25 bp, Saccharomyces pastorianus
tatgtgcatccgattttctttgccc

SEQ ID NO: 183090 - DNA, 25 bp, Saccharomyces pastorianus
gcactgaggtttttctcaaccgtta

SEQ ID NO: 183091 - DNA, 25 bp, Saccharomyces pastorianus
gacgacgcttctgcactgaggtttt

SEQ ID NO: 183092 - DNA, 25 bp, Saccharomyces pastorianus
tcaagttactggacgacgcttctgc

SEQ ID NO: 183093 - DNA, 25 bp, Saccharomyces pastorianus
ctgaggtttttctcaaccgttagct

SEQ ID NO: 183094 - DNA, 25 bp, Saccharomyces pastorianus
ggtttttctcaaccgttagcttgag

SEQ ID NO: 183095 - DNA, 25 bp, Saccharomyces pastorianus
catcaagttactggacgacgcttct

SEQ ID NO: 183096 - DNA, 25 bp, Saccharomyces pastorianus
ctgcactgaggtttttctcaaccgt

SEQ ID NO: 183097 - DNA, 25 bp, Saccharomyces pastorianus
gcttctgcactgaggtttttctcaa

SEQ ID NO: 183098 - DNA, 25 bp, Saccharomyces pastorianus
gacgcttctgcactgaggtttttct

SEQ ID NO: 183099 - DNA, 25 bp, Saccharomyces pastorianus
tttctcaaccgttagcttgaggtgg

SEQ ID NO: 183100 - DNA, 25 bp, Saccharomyces pastorianus
gaggtttttctcaaccgttagcttg

SEQ ID NO: 183101 - DNA, 25 bp, Saccharomyces pastorianus
gtaggtggcagaggaaccggcatcg

SEQ ID NO: 183102 - DNA, 25 bp, Saccharomyces pastorianus
accggcatcggcagtttcaaaggtg

SEQ ID NO: 183103 - DNA, 25 bp, Saccharomyces pastorianus
taggtggcagaggaaccggcatcgg

SEQ ID NO: 183104 - DNA, 25 bp, Saccharomyces pastorianus
taatgacaacgaaaccaccctttct

SEQ ID NO: 183105 - DNA, 25 bp, Saccharomyces pastorianus
accaccctttctcaaagcagaacat

SEQ ID NO: 183106 - DNA, 25 bp, Saccharomyces pastorianus
gaaaccaccctttctcaaagcagaa

SEQ ID NO: 183107 - DNA, 25 bp, Saccharomyces pastorianus
aggaaccggcatcggcagtttcaaa

SEQ ID NO: 183108 - DNA, 25 bp, Saccharomyces pastorianus
ggtaggtggcagaggaaccggcatc

SEQ ID NO: 183109 - DNA, 25 bp, Saccharomyces pastorianus
agaggaaccggcatcggcagtttca

SEQ ID NO: 183110 - DNA, 25 bp, Saccharomyces pastorianus
cagaggaaccggcatcggcagtttc

SEQ ID NO: 183111 - DNA, 25 bp, Saccharomyces pastorianus
gtgaccatgcttaccggtcttggaa

SEQ ID NO: 183112 - DNA, 25 bp, Saccharomyces pastorianus
tcacataaaaaaaccggcataccaa

SEQ ID NO: 183113 - DNA, 25 bp, Saccharomyces pastorianus
aaagtggaaggtaagcgtatagcaa

SEQ ID NO: 183114 - DNA, 25 bp, Saccharomyces pastorianus
gaacaagacctctaaatcacataaa

SEQ ID NO: 183115 - DNA, 25 bp, Saccharomyces pastorianus
atcaagaacaagacctctaaatcac

SEQ ID NO: 183116 - DNA, 25 bp, Saccharomyces pastorianus
gttgttttaatattattcgtccact

SEQ ID NO: 183117 - DNA, 25 bp, Saccharomyces pastorianus
atccaagttgttttaatattattcg

SEQ ID NO: 183118 - DNA, 25 bp, Saccharomyces pastorianus
aggtaagcgtatagcaaaactgata

SEQ ID NO: 183119 - DNA, 25 bp, Saccharomyces pastorianus
acaagacctctaaatcacataaaaa

SEQ ID NO: 183120 - DNA, 25 bp, Saccharomyces pastorianus
tgttttaatattattcgtccactaa

SEQ ID NO: 183121 - DNA, 25 bp, Saccharomyces pastorianus
gcgtatagcaaaactgataaatcca

SEQ ID NO: 183122 - DNA, 25 bp, Saccharomyces pastorianus
agcaaaactgataaatccaagttgt

SEQ ID NO: 183123 - DNA, 25 bp, Saccharomyces pastorianus
ggaggtttcttgttatggttacagc

SEQ ID NO: 183124 - DNA, 25 bp, Saccharomyces pastorianus
gagacatgctatgacaggctgttat

SEQ ID NO: 183125 - DNA, 25 bp, Saccharomyces pastorianus
aaaaagaattctgctcctggagttg

SEQ ID NO: 183126 - DNA, 25 bp, Saccharomyces pastorianus
ggtcagactattccacactgttaca

SEQ ID NO: 183127 - DNA, 25 bp, Saccharomyces pastorianus
caggctgttatttgttttcccacga

SEQ ID NO: 183128 - DNA, 25 bp, Saccharomyces pastorianus
ataagccacccgtttcagaaagcag

SEQ ID NO: 183129 - DNA, 25 bp, Saccharomyces pastorianus
tagattacactctcatgaccataag

SEQ ID NO: 183130 - DNA, 25 bp, Saccharomyces pastorianus
attcgacggtgatgctaatgatgac

SEQ ID NO: 183131 - DNA, 25 bp, Saccharomyces pastorianus
tttcccacgaagtcaagttgccagc

SEQ ID NO: 183132 - DNA, 25 bp, Saccharomyces pastorianus
gaacgggtcatagctttggacacaa

SEQ ID NO: 183133 - DNA, 25 bp, Saccharomyces pastorianus
agcgtatttcctataaacctgcaag

SEQ ID NO: 183134 - DNA, 25 bp, Saccharomyces pastorianus
cagagcagcattcacatatttgatt

SEQ ID NO: 183135 - DNA, 25 bp, Saccharomyces pastorianus
acgatgctgaactttcaaaggtgtt

SEQ ID NO: 183136 - DNA, 25 bp, Saccharomyces pastorianus
caaaggtgttgaaaactcgctactt

SEQ ID NO: 183137 - DNA, 25 bp, Saccharomyces pastorianus
atttgattaacgatgctgaactttc

SEQ ID NO: 183138 - DNA, 25 bp, Saccharomyces pastorianus
taggttttgaaaccggcaggatcaa

SEQ ID NO: 183139 - DNA, 25 bp, Saccharomyces pastorianus
gagcagcattcacatatttgattaa

SEQ ID NO: 183140 - DNA, 25 bp, Saccharomyces pastorianus
aaaccggcaggatcaagaagtggga

SEQ ID NO: 183141 - DNA, 25 bp, Saccharomyces pastorianus
tgaaaactcgctacttattaaaggt

SEQ ID NO: 183142 - DNA, 25 bp, Saccharomyces pastorianus
ggagattagacctgccaaaccacta

SEQ ID NO: 183143 - DNA, 25 bp, Saccharomyces pastorianus
gggtgttttacaggagattagacct

SEQ ID NO: 183144 - DNA, 25 bp, Saccharomyces pastorianus
ggtgttgaaaactcgctacttatta

SEQ ID NO: 183145 - DNA, 25 bp, Saccharomyces pastorianus
gaattgaaaacttctcttccccacg

SEQ ID NO: 183146 - DNA, 25 bp, Saccharomyces pastorianus
gagagacctcgaatctcaagtacaa

SEQ ID NO: 183147 - DNA, 25 bp, Saccharomyces pastorianus
gcagaggaacgatttaaactacttt

SEQ ID NO: 183148 - DNA, 25 bp, Saccharomyces pastorianus
ctcgtatctcgcaaattactaggga

SEQ ID NO: 183149 - DNA, 25 bp, Saccharomyces pastorianus
aagacttgcaaactcgtatctcgca

SEQ ID NO: 183150 - DNA, 25 bp, Saccharomyces pastorianus
tactttcgaatacgttagatctaac

SEQ ID NO: 183151 - DNA, 25 bp, Saccharomyces pastorianus
acagcaagagcgacatatccattaa

SEQ ID NO: 183152 - DNA, 25 bp, Saccharomyces pastorianus
ttccccacgaagatgcgtcatacag

SEQ ID NO: 183153 - DNA, 25 bp, Saccharomyces pastorianus
atacaggacctgtatgacagcaaga

SEQ ID NO: 183154 - DNA, 25 bp, Saccharomyces pastorianus
agctgagaacgaccaactgcgcaaa

SEQ ID NO: 183155 - DNA, 25 bp, Saccharomyces pastorianus
gatgcgtcatacagcaatgtaacta

SEQ ID NO: 183156 - DNA, 25 bp, Saccharomyces pastorianus
tcgtattctttgtcactgtccatgg

SEQ ID NO: 183157 - DNA, 25 bp, Saccharomyces pastorianus
tctacttcccagttagcctctgcat

SEQ ID NO: 183158 - DNA, 25 bp, Saccharomyces pastorianus
gtcactgtccatggtgacccattca

SEQ ID NO: 183159 - DNA, 25 bp, Saccharomyces pastorianus
agctttatccttttcttcgtcacta

SEQ ID NO: 183160 - DNA, 25 bp, Saccharomyces pastorianus
atggtgacccattcaccatcgactt

SEQ ID NO: 183161 - DNA, 25 bp, Saccharomyces pastorianus
atttctttttcgtcagctttatcct

SEQ ID NO: 183162 - DNA, 25 bp, Saccharomyces pastorianus
tttatcttcatcgtcgccgcttagt

SEQ ID NO: 183163 - DNA, 25 bp, Saccharomyces pastorianus
atcttccatattgacctcgtattct

SEQ ID NO: 183164 - DNA, 25 bp, Saccharomyces pastorianus
caagtcggaatctatttctttttcg

SEQ ID NO: 183165 - DNA, 25 bp, Saccharomyces pastorianus
gtcgccgcttagttccaagtcggaa

SEQ ID NO: 183166 - DNA, 25 bp, Saccharomyces pastorianus
ttttcttcgtcactatcttccatat

SEQ ID NO: 183167 - DNA, 25 bp, Saccharomyces pastorianus
gatctggccagataaaacaattcaa

SEQ ID NO: 183168 - DNA, 25 bp, Saccharomyces pastorianus
gaaaatccattctacctgtaaagtt

SEQ ID NO: 183169 - DNA, 25 bp, Saccharomyces pastorianus
acgttggttatccaccgacttgaga

SEQ ID NO: 183170 - DNA, 25 bp, Saccharomyces pastorianus
agaacatgctaagggatccatccga

SEQ ID NO: 183171 - DNA, 25 bp, Saccharomyces pastorianus
tggttatccaccgacttgagagacg

SEQ ID NO: 183172 - DNA, 25 bp, Saccharomyces pastorianus
gagacggtaaccaagctttgccaga

SEQ ID NO: 183173 - DNA, 25 bp, Saccharomyces pastorianus
gatgaccaaaaggatctggccagat

SEQ ID NO: 183174 - DNA, 25 bp, Saccharomyces pastorianus
ggagtatttccataaactgatcaat

SEQ ID NO: 183175 - DNA, 25 bp, Saccharomyces pastorianus
aaatataaggcattcgtcccaccaa

SEQ ID NO: 183176 - DNA, 25 bp, Saccharomyces pastorianus
attcgtcccaccaaagatgaccaaa

SEQ ID NO: 183177 - DNA, 25 bp, Saccharomyces pastorianus
aagctttgccagacccaatgtctgt

SEQ ID NO: 183178 - DNA, 25 bp, Saccharomyces pastorianus
tcgggttgacctccatgaggaccat

SEQ ID NO: 183179 - DNA, 25 bp, Saccharomyces pastorianus
aattgatgcgatttgccgggtacta

SEQ ID NO: 183180 - DNA, 25 bp, Saccharomyces pastorianus
gggtactacccagctatgaggagat

SEQ ID NO: 183181 - DNA, 25 bp, Saccharomyces pastorianus
ttacggctcgtctaatgaatggaat

SEQ ID NO: 183182 - DNA, 25 bp, Saccharomyces pastorianus
aagtatttcactactgcttggagta

SEQ ID NO: 183183 - DNA, 25 bp, Saccharomyces pastorianus
aagggagcccagtgtatgcaagaaa

SEQ ID NO: 183184 - DNA, 25 bp, Saccharomyces pastorianus
gtgaagggccctcctagtactagag

SEQ ID NO: 183185 - DNA, 25 bp, Saccharomyces pastorianus
tattcgcgacttggaggcatgcttc

SEQ ID NO: 183186 - DNA, 25 bp, Saccharomyces pastorianus
gagtaaacccactttgcgatgtcaa

SEQ ID NO: 183187 - DNA, 25 bp, Saccharomyces pastorianus
gaggaccatgtttcacttacactgt

SEQ ID NO: 183188 - DNA, 25 bp, Saccharomyces pastorianus
tagaacagttgccttcgggttgacc

SEQ ID NO: 183189 - DNA, 25 bp, Saccharomyces pastorianus
aaccattctttctcaaggcagaaca

SEQ ID NO: 183190 - DNA, 25 bp, Saccharomyces pastorianus
cattctttctcaaggcagaacattg

SEQ ID NO: 183191 - DNA, 25 bp, Saccharomyces pastorianus
aacgaaaccattctttctcaaggca

SEQ ID NO: 183192 - DNA, 25 bp, Saccharomyces pastorianus
ggaggcaccagcgtcagcattttca

SEQ ID NO: 183193 - DNA, 25 bp, Saccharomyces pastorianus
ccagcgtcagcattttcaaaggtgt

SEQ ID NO: 183194 - DNA, 25 bp, Saccharomyces pastorianus
aggcaccagcgtcagcattttcaaa

SEQ ID NO: 183195 - DNA, 25 bp, Saccharomyces pastorianus
ggcggaggcaccagcgtcagcattt

SEQ ID NO: 183196 - DNA, 25 bp, Saccharomyces pastorianus
cattgggtaggtggcggaggcacca

SEQ ID NO: 183197 - DNA, 25 bp, Saccharomyces pastorianus
gcaccagcgtcagcattttcaaagg

SEQ ID NO: 183198 - DNA, 25 bp, Saccharomyces pastorianus
gaaaccattctttctcaaggcagaa

SEQ ID NO: 183199 - DNA, 25 bp, Saccharomyces pastorianus
gcgtcagcattttcaaaggtgtgtt

SEQ ID NO: 183200 - DNA, 25 bp, Saccharomyces pastorianus
tggacaggccgccaacttatttggg

SEQ ID NO: 183201 - DNA, 25 bp, Saccharomyces pastorianus
gatgatgatgcacctcagaatcccc

SEQ ID NO: 183202 - DNA, 25 bp, Saccharomyces pastorianus
acctcgatgaggatgactctgatga

SEQ ID NO: 183203 - DNA, 25 bp, Saccharomyces pastorianus
actttccaatggtttcttgtttgca

SEQ ID NO: 183204 - DNA, 25 bp, Saccharomyces pastorianus
ttaggaacactctacaaccgcaggg

SEQ ID NO: 183205 - DNA, 25 bp, Saccharomyces pastorianus
ggccaagaagaatacctccaacaga

SEQ ID NO: 183206 - DNA, 25 bp, Saccharomyces pastorianus
ggacctcaatttgatggagctacta

SEQ ID NO: 183207 - DNA, 25 bp, Saccharomyces pastorianus
gtggcggagtacgtgattttttcca

SEQ ID NO: 183208 - DNA, 25 bp, Saccharomyces pastorianus
cgaatttcgagtgactatactttcc

SEQ ID NO: 183209 - DNA, 25 bp, Saccharomyces pastorianus
caatattgcagttcttaggacctca

SEQ ID NO: 183210 - DNA, 25 bp, Saccharomyces pastorianus
gatgaaactggacaggccgccaact

SEQ ID NO: 183211 - DNA, 25 bp, Saccharomyces pastorianus
cagccgcagaaagtattgcagcagt

SEQ ID NO: 183212 - DNA, 25 bp, Saccharomyces pastorianus
actaatgccactaccctgaaagtac

SEQ ID NO: 183213 - DNA, 25 bp, Saccharomyces pastorianus
acagccgcagaaagtattgcagcag

SEQ ID NO: 183214 - DNA, 25 bp, Saccharomyces pastorianus
gacagccgcagaaagtattgcagca

SEQ ID NO: 183215 - DNA, 25 bp, Saccharomyces pastorianus
tgccactaccctgaaagtaccaacg

SEQ ID NO: 183216 - DNA, 25 bp, Saccharomyces pastorianus
ctaatgccagtaccaatgcgactac

SEQ ID NO: 183217 - DNA, 25 bp, Saccharomyces pastorianus
ctaatgccactaccctgaaagtacc

SEQ ID NO: 183218 - DNA, 25 bp, Saccharomyces pastorianus
agccgcagaaagtattgcagcagtg

SEQ ID NO: 183219 - DNA, 25 bp, Saccharomyces pastorianus
actaccctgaaagtaccaacgctag

SEQ ID NO: 183220 - DNA, 25 bp, Saccharomyces pastorianus
atgccactaccctgaaagtaccaac

SEQ ID NO: 183221 - DNA, 25 bp, Saccharomyces pastorianus
tgctaatgccagtaccaatgcgact

SEQ ID NO: 183222 - DNA, 25 bp, Saccharomyces pastorianus
tgcaagttaatgaaagatggctgag

SEQ ID NO: 183223 - DNA, 25 bp, Saccharomyces pastorianus
ttctccagtgaagaagttgctgaac

SEQ ID NO: 183224 - DNA, 25 bp, Saccharomyces pastorianus
atcaagaggtttggccttcgttact

SEQ ID NO: 183225 - DNA, 25 bp, Saccharomyces pastorianus
ggccttcgttactttctccagtgaa

SEQ ID NO: 183226 - DNA, 25 bp, Saccharomyces pastorianus
gaaatattgtttccattcgctccta

SEQ ID NO: 183227 - DNA, 25 bp, Saccharomyces pastorianus
gaaatcaagaggtttggccttcgtt

SEQ ID NO: 183228 - DNA, 25 bp, Saccharomyces pastorianus
gatggctgagtgaaaatagtttgag

SEQ ID NO: 183229 - DNA, 25 bp, Saccharomyces pastorianus
atattgtttccattcgctcctattc

SEQ ID NO: 183230 - DNA, 25 bp, Saccharomyces pastorianus
ttccattcgctcctattccaagagt

SEQ ID NO: 183231 - DNA, 25 bp, Saccharomyces pastorianus
ttcgttactttctccagtgaagaag

SEQ ID NO: 183232 - DNA, 25 bp, Saccharomyces pastorianus
ggatggtagaggttacatgaactta

SEQ ID NO: 183233 - DNA, 25 bp, Saccharomyces pastorianus
tatacaacattatgatccgatatag

SEQ ID NO: 183234 - DNA, 25 bp, Saccharomyces pastorianus
caacattatgatccgatatagtgta

SEQ ID NO: 183235 - DNA, 25 bp, Saccharomyces pastorianus
atgatccgatatagtgtaacggcta

SEQ ID NO: 183236 - DNA, 25 bp, Saccharomyces pastorianus
aacattatgatccgatatagtgtaa

SEQ ID NO: 183237 - DNA, 25 bp, Saccharomyces pastorianus
ttatacaacattatgatccgatata

SEQ ID NO: 183238 - DNA, 25 bp, Saccharomyces pastorianus
attatgatccgatatagtgtaacgg

SEQ ID NO: 183239 - DNA, 25 bp, Saccharomyces pastorianus
acaacattatgatccgatatagtgt

SEQ ID NO: 183240 - DNA, 25 bp, Saccharomyces pastorianus
atacaacattatgatccgatatagt

SEQ ID NO: 183241 - DNA, 25 bp, Saccharomyces pastorianus
cattatgatccgatatagtgtaacg

SEQ ID NO: 183242 - DNA, 25 bp, Saccharomyces pastorianus
acattatgatccgatatagtgtaac

SEQ ID NO: 183243 - DNA, 25 bp, Saccharomyces pastorianus
tacaacattatgatccgatatagtg

SEQ ID NO: 183244 - DNA, 25 bp, Saccharomyces pastorianus
cattaagttcgatgactgtgtccca

SEQ ID NO: 183245 - DNA, 25 bp, Saccharomyces pastorianus
ccattaagttcgatgactgtgtccc

SEQ ID NO: 183246 - DNA, 25 bp, Saccharomyces pastorianus
tccattaagttcgatgactgtgtcc

SEQ ID NO: 183247 - DNA, 25 bp, Saccharomyces pastorianus
taagttcgatgactgtgtcccaatc

SEQ ID NO: 183248 - DNA, 25 bp, Saccharomyces pastorianus
cttccattaagttcgatgactgtgt

SEQ ID NO: 183249 - DNA, 25 bp, Saccharomyces pastorianus
gttcgatgactgtgtcccaatccta

SEQ ID NO: 183250 - DNA, 25 bp, Saccharomyces pastorianus
ttaagttcgatgactgtgtcccaat

SEQ ID NO: 183251 - DNA, 25 bp, Saccharomyces pastorianus
aagttcgatgactgtgtcccaatcc

SEQ ID NO: 183252 - DNA, 25 bp, Saccharomyces pastorianus
attaagttcgatgactgtgtcccaa

SEQ ID NO: 183253 - DNA, 25 bp, Saccharomyces pastorianus
gcttccattaagttcgatgactgtg

SEQ ID NO: 183254 - DNA, 25 bp, Saccharomyces pastorianus
agttcgatgactgtgtcccaatcct

SEQ ID NO: 183255 - DNA, 25 bp, Saccharomyces pastorianus
gtagttatatagcagggacccacgg

SEQ ID NO: 183256 - DNA, 25 bp, Saccharomyces pastorianus
agatttcttgtctcttccattagga

SEQ ID NO: 183257 - DNA, 25 bp, Saccharomyces pastorianus
gagggtagccgcaaagatttcttgt

SEQ ID NO: 183258 - DNA, 25 bp, Saccharomyces pastorianus
gacatagctatctttttcttttctg

SEQ ID NO: 183259 - DNA, 25 bp, Saccharomyces pastorianus
gagcgccttctttcacagggacttt

SEQ ID NO: 183260 - DNA, 25 bp, Saccharomyces pastorianus
aaaacaattgccgtccgcgtcgcag

SEQ ID NO: 183261 - DNA, 25 bp, Saccharomyces pastorianus
aaagaagcatttcgcggctacggag

SEQ ID NO: 183262 - DNA, 25 bp, Saccharomyces pastorianus
agccgtgcgcttcagggacagaaaa

SEQ ID NO: 183263 - DNA, 25 bp, Saccharomyces pastorianus
gacccacggaagagagcgagcgcct

SEQ ID NO: 183264 - DNA, 25 bp, Saccharomyces pastorianus
gtgcactaactctctcgagggtagc

SEQ ID NO: 183265 - DNA, 25 bp, Saccharomyces pastorianus
acagggacttttgtcagccacgtct

SEQ ID NO: 183266 - DNA, 25 bp, Saccharomyces pastorianus
gctttcattagaattgatgactgtt

SEQ ID NO: 183267 - DNA, 25 bp, Saccharomyces pastorianus
ttctccttccgttctatatttttca

SEQ ID NO: 183268 - DNA, 25 bp, Saccharomyces pastorianus
ttgcatttctgctttcattagaatt

SEQ ID NO: 183269 - DNA, 25 bp, Saccharomyces pastorianus
gttctatatttttcattaccctatt

SEQ ID NO: 183270 - DNA, 25 bp, Saccharomyces pastorianus
cttgcatttctgctttcattagaat

SEQ ID NO: 183271 - DNA, 25 bp, Saccharomyces pastorianus
tatttttcattaccctattacattg

SEQ ID NO: 183272 - DNA, 25 bp, Saccharomyces pastorianus
tccgttctatatttttcattaccct

SEQ ID NO: 183273 - DNA, 25 bp, Saccharomyces pastorianus
ctatatttttcattaccctattaca

SEQ ID NO: 183274 - DNA, 25 bp, Saccharomyces pastorianus
tgcatttctgctttcattagaattg

SEQ ID NO: 183275 - DNA, 25 bp, Saccharomyces pastorianus
ttctgctttcattagaattgatgac

SEQ ID NO: 183276 - DNA, 25 bp, Saccharomyces pastorianus
ttttcattaccctattacattgtca

SEQ ID NO: 183277 - DNA, 25 bp, Saccharomyces pastorianus
atagcaagctttagttcgggtccct

SEQ ID NO: 183278 - DNA, 25 bp, Saccharomyces pastorianus
aaattcaactttgtccacgtcttca

SEQ ID NO: 183279 - DNA, 25 bp, Saccharomyces pastorianus
gagagattctgcagtcaccatggat

SEQ ID NO: 183280 - DNA, 25 bp, Saccharomyces pastorianus
agccaggtctctatttctacaagtg

SEQ ID NO: 183281 - DNA, 25 bp, Saccharomyces pastorianus
gtattcaaatacgaccctttcttct

SEQ ID NO: 183282 - DNA, 25 bp, Saccharomyces pastorianus
aaattatgcctccacaactgttctt

SEQ ID NO: 183283 - DNA, 25 bp, Saccharomyces pastorianus
ggctaatttcggttctgctactaat

SEQ ID NO: 183284 - DNA, 25 bp, Saccharomyces pastorianus
acaaacttcatctaatacgccttca

SEQ ID NO: 183285 - DNA, 25 bp, Saccharomyces pastorianus
tgcagcggcttcttcaaattcaact

SEQ ID NO: 183286 - DNA, 25 bp, Saccharomyces pastorianus
gcggtctatacttgcgtgttactta

SEQ ID NO: 183287 - DNA, 25 bp, Saccharomyces pastorianus
cggttcttccatttctaacacgatt

SEQ ID NO: 183288 - DNA, 25 bp, Saccharomyces pastorianus
tgaacagattagtcagctatactct

SEQ ID NO: 183289 - DNA, 25 bp, Saccharomyces pastorianus
gcttataaaacagcccaaactttgg

SEQ ID NO: 183290 - DNA, 25 bp, Saccharomyces pastorianus
gaagacgagaacattcaactgatta

SEQ ID NO: 183291 - DNA, 25 bp, Saccharomyces pastorianus
atcatctaacctatcttctctaatc

SEQ ID NO: 183292 - DNA, 25 bp, Saccharomyces pastorianus
aaatggactaaccaggtgaccgagt

SEQ ID NO: 183293 - DNA, 25 bp, Saccharomyces pastorianus
gaaaacggaagctctcctgtctgat

SEQ ID NO: 183294 - DNA, 25 bp, Saccharomyces pastorianus
gggctgctgccaataacaatgacca

SEQ ID NO: 183295 - DNA, 25 bp, Saccharomyces pastorianus
actaaagccagtttctcttgacaat

SEQ ID NO: 183296 - DNA, 25 bp, Saccharomyces pastorianus
gctatactctgatgctgtgatggca

SEQ ID NO: 183297 - DNA, 25 bp, Saccharomyces pastorianus
gaccgagtcagcctctcattttgaa

SEQ ID NO: 183298 - DNA, 25 bp, Saccharomyces pastorianus
gatctcttgacgatagctcatcttc

SEQ ID NO: 183299 - DNA, 25 bp, Saccharomyces pastorianus
gaatatggttcctttgcaacctatg

SEQ ID NO: 183300 - DNA, 25 bp, Saccharomyces pastorianus
tgaacctacaaaacatcggatcttt

SEQ ID NO: 183301 - DNA, 25 bp, Saccharomyces pastorianus
aatcgctagtcgttcaaaccgcatg

SEQ ID NO: 183302 - DNA, 25 bp, Saccharomyces pastorianus
aatcaaggccccactagcaatggaa

SEQ ID NO: 183303 - DNA, 25 bp, Saccharomyces pastorianus
gctaattgcacttcttttcgctgaa

SEQ ID NO: 183304 - DNA, 25 bp, Saccharomyces pastorianus
gcattggaggcattacacaccgtgg

SEQ ID NO: 183305 - DNA, 25 bp, Saccharomyces pastorianus
aaaggttgcgacttcttggtcagta

SEQ ID NO: 183306 - DNA, 25 bp, Saccharomyces pastorianus
aatgtactgattcatccgttctggg

SEQ ID NO: 183307 - DNA, 25 bp, Saccharomyces pastorianus
tacacgcatcagaatcgccatcgaa

SEQ ID NO: 183308 - DNA, 25 bp, Saccharomyces pastorianus
gcaatggaaaccttgaatcctgctg

SEQ ID NO: 183309 - DNA, 25 bp, Saccharomyces pastorianus
catcgaccgcggtattgacctttta

SEQ ID NO: 183310 - DNA, 25 bp, Saccharomyces pastorianus
agaggctttggaggtttactttgca

SEQ ID NO: 183311 - DNA, 25 bp, Saccharomyces pastorianus
gtagcaaacctcaactcatacatgt

SEQ ID NO: 183312 - DNA, 25 bp, Saccharomyces pastorianus
gtgccatacatcgaagaggctttgg

SEQ ID NO: 183313 - DNA, 25 bp, Saccharomyces pastorianus
cattctaattccgtcctctctaaaa

SEQ ID NO: 183314 - DNA, 25 bp, Saccharomyces pastorianus
taaggagtcagtgccatacatcgaa

SEQ ID NO: 183315 - DNA, 25 bp, Saccharomyces pastorianus
aaagtgctccaggtactgacaccga

SEQ ID NO: 183316 - DNA, 25 bp, Saccharomyces pastorianus
atatactcggttttgcaaagaaatg

SEQ ID NO: 183317 - DNA, 25 bp, Saccharomyces pastorianus
gactatgcattctaattccgtcctc

SEQ ID NO: 183318 - DNA, 25 bp, Saccharomyces pastorianus
ttttttgatggtcagcgttgcaaac

SEQ ID NO: 183319 - DNA, 25 bp, Saccharomyces pastorianus
ggtcagcgttgcaaacaatcattta

SEQ ID NO: 183320 - DNA, 25 bp, Saccharomyces pastorianus
ctgacaccgaagactgggagtttat

SEQ ID NO: 183321 - DNA, 25 bp, Saccharomyces pastorianus
agatgatatcatcctctcactaacg

SEQ ID NO: 183322 - DNA, 25 bp, Saccharomyces pastorianus
aaaattgctttttacctgatggcta

SEQ ID NO: 183323 - DNA, 25 bp, Saccharomyces pastorianus
aaggttactctgtgaaacttccata

SEQ ID NO: 183324 - DNA, 25 bp, Saccharomyces pastorianus
aacaatatggtctttcttcgccgca

SEQ ID NO: 183325 - DNA, 25 bp, Saccharomyces pastorianus
tggctacttgacgaaggaacttctt

SEQ ID NO: 183326 - DNA, 25 bp, Saccharomyces pastorianus
gaatgctaacgaacgaacgccacca

SEQ ID NO: 183327 - DNA, 25 bp, Saccharomyces pastorianus
atcatcctctcactaacgaatgcta

SEQ ID NO: 183328 - DNA, 25 bp, Saccharomyces pastorianus
aaaccactttaagcctgctatacga

SEQ ID NO: 183329 - DNA, 25 bp, Saccharomyces pastorianus
ttcgccgcaactacaagcacttgta

SEQ ID NO: 183330 - DNA, 25 bp, Saccharomyces pastorianus
tttacctgatggctacttgacgaag

SEQ ID NO: 183331 - DNA, 25 bp, Saccharomyces pastorianus
gtgtacatcgtcgaaaattgctttt

SEQ ID NO: 183332 - DNA, 25 bp, Saccharomyces pastorianus
gtcaatgcacaatcgtcgtggagtt

SEQ ID NO: 183333 - DNA, 25 bp, Saccharomyces pastorianus
cacaatcgtcgtggagtttcccaac

SEQ ID NO: 183334 - DNA, 25 bp, Saccharomyces pastorianus
atgcacaatcgtcgtggagtttccc

SEQ ID NO: 183335 - DNA, 25 bp, Saccharomyces pastorianus
gcacaatcgtcgtggagtttcccaa

SEQ ID NO: 183336 - DNA, 25 bp, Saccharomyces pastorianus
cagtcaatgcacaatcgtcgtggag

SEQ ID NO: 183337 - DNA, 25 bp, Saccharomyces pastorianus
gtcagtcaatgcacaatcgtcgtgg

SEQ ID NO: 183338 - DNA, 25 bp, Saccharomyces pastorianus
tcgtcgtggagtttcccaacccaag

SEQ ID NO: 183339 - DNA, 25 bp, Saccharomyces pastorianus
caatgcacaatcgtcgtggagtttc

SEQ ID NO: 183340 - DNA, 25 bp, Saccharomyces pastorianus
gagtcagtcaatgcacaatcgtcgt

SEQ ID NO: 183341 - DNA, 25 bp, Saccharomyces pastorianus
aggaagagtcagtcaatgcacaatc

SEQ ID NO: 183342 - DNA, 25 bp, Saccharomyces pastorianus
gaagagtcagtcaatgcacaatcgt

SEQ ID NO: 183343 - DNA, 25 bp, Saccharomyces pastorianus
atttctatatactaatattacgatt

SEQ ID NO: 183344 - DNA, 25 bp, Saccharomyces pastorianus
atatttctatatactaatattacga

SEQ ID NO: 183345 - DNA, 25 bp, Saccharomyces pastorianus
tatttctatatactaatattacgat

SEQ ID NO: 183346 - DNA, 25 bp, Saccharomyces pastorianus
gaatctatatttctatatactaata

SEQ ID NO: 183347 - DNA, 25 bp, Saccharomyces pastorianus
ttctatatactaatattacgattat

SEQ ID NO: 183348 - DNA, 25 bp, Saccharomyces pastorianus
tggaatctatatttctatatactaa

SEQ ID NO: 183349 - DNA, 25 bp, Saccharomyces pastorianus
atggaatctatatttctatatacta

SEQ ID NO: 183350 - DNA, 25 bp, Saccharomyces pastorianus
aatggaatctatatttctatatact

SEQ ID NO: 183351 - DNA, 25 bp, Saccharomyces pastorianus
ctatatactaatattacgattattc

SEQ ID NO: 183352 - DNA, 25 bp, Saccharomyces pastorianus
ggaatctatatttctatatactaat

SEQ ID NO: 183353 - DNA, 25 bp, Saccharomyces pastorianus
tttctatatactaatattacgatta

SEQ ID NO: 183354 - DNA, 25 bp, Saccharomyces pastorianus
tgatattgccaacctcattttgcgt

SEQ ID NO: 183355 - DNA, 25 bp, Saccharomyces pastorianus
ggaaaactttttaatcgcgagtatg

SEQ ID NO: 183356 - DNA, 25 bp, Saccharomyces pastorianus
aactgcttttatatgcctacagtgg

SEQ ID NO: 183357 - DNA, 25 bp, Saccharomyces pastorianus
tgcctacagtggttgatattgccaa

SEQ ID NO: 183358 - DNA, 25 bp, Saccharomyces pastorianus
aaaataaagtcgctgttgcaattga

SEQ ID NO: 183359 - DNA, 25 bp, Saccharomyces pastorianus
ttgaacaactgcttttatatgccta

SEQ ID NO: 183360 - DNA, 25 bp, Saccharomyces pastorianus
ctttgcatgcaaggctcagtttgat

SEQ ID NO: 183361 - DNA, 25 bp, Saccharomyces pastorianus
cgcggcttttactttgcatgcaagg

SEQ ID NO: 183362 - DNA, 25 bp, Saccharomyces pastorianus
ctttttaatcgcgagtatgtccgcg

SEQ ID NO: 183363 - DNA, 25 bp, Saccharomyces pastorianus
ggctcagtttgataacctttgggga

SEQ ID NO: 183364 - DNA, 25 bp, Saccharomyces pastorianus
gaacaactgcttttatatgcctaca

SEQ ID NO: 183365 - DNA, 25 bp, Saccharomyces pastorianus
gaaatcttcgcacttcaatggcact

SEQ ID NO: 183366 - DNA, 25 bp, Saccharomyces pastorianus
tactctcttgaactatttgggcctt

SEQ ID NO: 183367 - DNA, 25 bp, Saccharomyces pastorianus
aacatatcgatacgtccatgaccca

SEQ ID NO: 183368 - DNA, 25 bp, Saccharomyces pastorianus
aacgtcgatattcaccagattctgt

SEQ ID NO: 183369 - DNA, 25 bp, Saccharomyces pastorianus
agcagtgttattcttatcgggttac

SEQ ID NO: 183370 - DNA, 25 bp, Saccharomyces pastorianus
gaacgttagctctgattacctgttt

SEQ ID NO: 183371 - DNA, 25 bp, Saccharomyces pastorianus
aaatcgtagtcgttgctgctgccgc

SEQ ID NO: 183372 - DNA, 25 bp, Saccharomyces pastorianus
gctgccgcggtaatcttaacatatc

SEQ ID NO: 183373 - DNA, 25 bp, Saccharomyces pastorianus
ggactcattattgctgtagccgtca

SEQ ID NO: 183374 - DNA, 25 bp, Saccharomyces pastorianus
ttaccgcttggtgtactacttgaat

SEQ ID NO: 183375 - DNA, 25 bp, Saccharomyces pastorianus
agaagaagcattctggccttaccgc

SEQ ID NO: 183376 - DNA, 25 bp, Saccharomyces pastorianus
ctccatggcccatctctcactaaat

SEQ ID NO: 183377 - DNA, 25 bp, Saccharomyces pastorianus
actccactccatggcccatctctca

SEQ ID NO: 183378 - DNA, 25 bp, Saccharomyces pastorianus
actctcacactccactccatggccc

SEQ ID NO: 183379 - DNA, 25 bp, Saccharomyces pastorianus
tctcacactccactccatggcccat

SEQ ID NO: 183380 - DNA, 25 bp, Saccharomyces pastorianus
atggcatatgcacacggatgctaca

SEQ ID NO: 183381 - DNA, 25 bp, Saccharomyces pastorianus
cactccactccatggcccatctctc

SEQ ID NO: 183382 - DNA, 25 bp, Saccharomyces pastorianus
cacactccactccatggcccatctc

SEQ ID NO: 183383 - DNA, 25 bp, Saccharomyces pastorianus
ctactctcacactccactccatggc

SEQ ID NO: 183384 - DNA, 25 bp, Saccharomyces pastorianus
ctctcacactccactccatggccca

SEQ ID NO: 183385 - DNA, 25 bp, Saccharomyces pastorianus
acactccactccatggcccatctct

SEQ ID NO: 183386 - DNA, 25 bp, Saccharomyces pastorianus
tcacactccactccatggcccatct

SEQ ID NO: 183387 - DNA, 25 bp, Saccharomyces pastorianus
aatattcccagctttctcggcctag

SEQ ID NO: 183388 - DNA, 25 bp, Saccharomyces pastorianus
gtctttggtagaccgattgtgtcag

SEQ ID NO: 183389 - DNA, 25 bp, Saccharomyces pastorianus
gaccgattgtgtcagaataaaattc

SEQ ID NO: 183390 - DNA, 25 bp, Saccharomyces pastorianus
gttctcagtctccaaagacgtggat

SEQ ID NO: 183391 - DNA, 25 bp, Saccharomyces pastorianus
gacgtggatctgtctttggtagacc

SEQ ID NO: 183392 - DNA, 25 bp, Saccharomyces pastorianus
aaattctgtcatctgttttgtactt

SEQ ID NO: 183393 - DNA, 25 bp, Saccharomyces pastorianus
gggttaaatattcccagctttctcg

SEQ ID NO: 183394 - DNA, 25 bp, Saccharomyces pastorianus
tactttctttgtgggcgacgattat

SEQ ID NO: 183395 - DNA, 25 bp, Saccharomyces pastorianus
tcggcctagctcatcagttctcagt

SEQ ID NO: 183396 - DNA, 25 bp, Saccharomyces pastorianus
tcatcagttctcagtctccaaagac

SEQ ID NO: 183397 - DNA, 25 bp, Saccharomyces pastorianus
ttttgtactttctttgtgggcgacg

SEQ ID NO: 183398 - DNA, 25 bp, Saccharomyces pastorianus
agacaaagagcctttctcaacctac

SEQ ID NO: 183399 - DNA, 25 bp, Saccharomyces pastorianus
gcaagacacgtatcgttcgccaaaa

SEQ ID NO: 183400 - DNA, 25 bp, Saccharomyces pastorianus
tgtggatatgcaaaacgacttcgtc

SEQ ID NO: 183401 - DNA, 25 bp, Saccharomyces pastorianus
taccgttctccaagaccaggtgatg

SEQ ID NO: 183402 - DNA, 25 bp, Saccharomyces pastorianus
gtgatgactccacccaggaaggtat

SEQ ID NO: 183403 - DNA, 25 bp, Saccharomyces pastorianus
aatagtcgatccaatttccaagtta

SEQ ID NO: 183404 - DNA, 25 bp, Saccharomyces pastorianus
ttcgtctcgcctttgggttcgttga

SEQ ID NO: 183405 - DNA, 25 bp, Saccharomyces pastorianus
aggaaggtatcttgtggcccgtgca

SEQ ID NO: 183406 - DNA, 25 bp, Saccharomyces pastorianus
tgtggtgaccagagactggcacccc

SEQ ID NO: 183407 - DNA, 25 bp, Saccharomyces pastorianus
ttcgttgaccgtccccaaaggtgag

SEQ ID NO: 183408 - DNA, 25 bp, Saccharomyces pastorianus
gggcagccaattggtcgaccatata

SEQ ID NO: 183409 - DNA, 25 bp, Saccharomyces pastorianus
gaattcgcatttaagtctggaagac

SEQ ID NO: 183410 - DNA, 25 bp, Saccharomyces pastorianus
ctgtgggtacacatcatgctggtga

SEQ ID NO: 183411 - DNA, 25 bp, Saccharomyces pastorianus
acgacgaattcgcacgacacatcga

SEQ ID NO: 183412 - DNA, 25 bp, Saccharomyces pastorianus
atggattttacgtctgatacgacga

SEQ ID NO: 183413 - DNA, 25 bp, Saccharomyces pastorianus
gtctgatacgacgaattcgcacgac

SEQ ID NO: 183414 - DNA, 25 bp, Saccharomyces pastorianus
tgggtacacatcatgctggtgaagc

SEQ ID NO: 183415 - DNA, 25 bp, Saccharomyces pastorianus
agacgctgtgggtacacatcatgct

SEQ ID NO: 183416 - DNA, 25 bp, Saccharomyces pastorianus
tctggaagacgctgtgggtacacat

SEQ ID NO: 183417 - DNA, 25 bp, Saccharomyces pastorianus
gcacgacacatcgaattcgcattta

SEQ ID NO: 183418 - DNA, 25 bp, Saccharomyces pastorianus
gatacgacgaattcgcacgacacat

SEQ ID NO: 183419 - DNA, 25 bp, Saccharomyces pastorianus
tcgcacgacacatcgaattcgcatt

SEQ ID NO: 183420 - DNA, 25 bp, Saccharomyces pastorianus
ttttggaaaagaccgcatgcattac

SEQ ID NO: 183421 - DNA, 25 bp, Saccharomyces pastorianus
tcctctttttgataacgtcggattt

SEQ ID NO: 183422 - DNA, 25 bp, Saccharomyces pastorianus
gggtgtttccctcagggcttctcct

SEQ ID NO: 183423 - DNA, 25 bp, Saccharomyces pastorianus
gcatgcattacagagggtgtttccc

SEQ ID NO: 183424 - DNA, 25 bp, Saccharomyces pastorianus
tcatggtaccatgcaatttttggaa

SEQ ID NO: 183425 - DNA, 25 bp, Saccharomyces pastorianus
gagatcctctttttgataacgtcgg

SEQ ID NO: 183426 - DNA, 25 bp, Saccharomyces pastorianus
tcttcgagatcctctttttgataac

SEQ ID NO: 183427 - DNA, 25 bp, Saccharomyces pastorianus
gataatggcctcatggtaccatgca

SEQ ID NO: 183428 - DNA, 25 bp, Saccharomyces pastorianus
tacagagggtgtttccctcagggct

SEQ ID NO: 183429 - DNA, 25 bp, Saccharomyces pastorianus
gaaaagaccgcatgcattacagagg

SEQ ID NO: 183430 - DNA, 25 bp, Saccharomyces pastorianus
gtcggattttaaagataatggcctc

SEQ ID NO: 183431 - DNA, 25 bp, Saccharomyces pastorianus
gtctactatctaccgtcatttatct

SEQ ID NO: 183432 - DNA, 25 bp, Saccharomyces pastorianus
aatacgcaaccaatgccgcagttaa

SEQ ID NO: 183433 - DNA, 25 bp, Saccharomyces pastorianus
aagtattgtgcgcagtcttcgagaa

SEQ ID NO: 183434 - DNA, 25 bp, Saccharomyces pastorianus
ctcgaacttactcatgcagcacaat

SEQ ID NO: 183435 - DNA, 25 bp, Saccharomyces pastorianus
agaaatttatcataccccactgctc

SEQ ID NO: 183436 - DNA, 25 bp, Saccharomyces pastorianus
ctgcatcctcagaagctagtactct

SEQ ID NO: 183437 - DNA, 25 bp, Saccharomyces pastorianus
gttaaatcgacaactgcatcctcag

SEQ ID NO: 183438 - DNA, 25 bp, Saccharomyces pastorianus
aaatctggtggttgttctgaggact

SEQ ID NO: 183439 - DNA, 25 bp, Saccharomyces pastorianus
ctagtactctgggtgctctacaata

SEQ ID NO: 183440 - DNA, 25 bp, Saccharomyces pastorianus
gtcattcgtggacaaaatcgcaatt

SEQ ID NO: 183441 - DNA, 25 bp, Saccharomyces pastorianus
ttatctaccgctagaccggctttaa

SEQ ID NO: 183442 - DNA, 25 bp, Saccharomyces pastorianus
caagcacgggcatttttagaacagg

SEQ ID NO: 183443 - DNA, 25 bp, Saccharomyces pastorianus
ctccacttcaagtaagagtttgggt

SEQ ID NO: 183444 - DNA, 25 bp, Saccharomyces pastorianus
aaaatcatcaatatcaccccaagca

SEQ ID NO: 183445 - DNA, 25 bp, Saccharomyces pastorianus
gcacgggcatttttagaacaggttt

SEQ ID NO: 183446 - DNA, 25 bp, Saccharomyces pastorianus
gaaatgtggcattactccacttcaa

SEQ ID NO: 183447 - DNA, 25 bp, Saccharomyces pastorianus
agtagagcaacatacattacacaaa

SEQ ID NO: 183448 - DNA, 25 bp, Saccharomyces pastorianus
atatcaccccaagcacgggcatttt

SEQ ID NO: 183449 - DNA, 25 bp, Saccharomyces pastorianus
gaaagcaaagccttaattccaagga

SEQ ID NO: 183450 - DNA, 25 bp, Saccharomyces pastorianus
ggttagaaatataccaccacattaa

SEQ ID NO: 183451 - DNA, 25 bp, Saccharomyces pastorianus
gtggcattactccacttcaagtaag

SEQ ID NO: 183452 - DNA, 25 bp, Saccharomyces pastorianus
gagcccaaagggaaaatcatcaata

SEQ ID NO: 183453 - DNA, 25 bp, Saccharomyces pastorianus
gtagtatgggcatcgttttgggcaa

SEQ ID NO: 183454 - DNA, 25 bp, Saccharomyces pastorianus
tagtatgggcatcgttttgggcaaa

SEQ ID NO: 183455 - DNA, 25 bp, Saccharomyces pastorianus
gtatgggcatcgttttgggcaaaaa

SEQ ID NO: 183456 - DNA, 25 bp, Saccharomyces pastorianus
tgggcatcgttttgggcaaaaagga

SEQ ID NO: 183457 - DNA, 25 bp, Saccharomyces pastorianus
agtagtatgggcatcgttttgggca

SEQ ID NO: 183458 - DNA, 25 bp, Saccharomyces pastorianus
atgggcatcgttttgggcaaaaagg

SEQ ID NO: 183459 - DNA, 25 bp, Saccharomyces pastorianus
tatgggcatcgttttgggcaaaaag

SEQ ID NO: 183460 - DNA, 25 bp, Saccharomyces pastorianus
agtatgggcatcgttttgggcaaaa

SEQ ID NO: 183461 - DNA, 25 bp, Saccharomyces pastorianus
cgttacttagctgaagttggtaaag

SEQ ID NO: 183462 - DNA, 25 bp, Saccharomyces pastorianus
tccaaagcatttgagaggtacttta

SEQ ID NO: 183463 - DNA, 25 bp, Saccharomyces pastorianus
gttggtaaagtcgaagaagctaagc

SEQ ID NO: 183464 - DNA, 25 bp, Saccharomyces pastorianus
cttagctgaagttggtaaagtcgaa

SEQ ID NO: 183465 - DNA, 25 bp, Saccharomyces pastorianus
caattgatgattaccgctggtatct

SEQ ID NO: 183466 - DNA, 25 bp, Saccharomyces pastorianus
tgattaccgctggtatcttcttggg

SEQ ID NO: 183467 - DNA, 25 bp, Saccharomyces pastorianus
tgatgattaccgctggtatcttctt

SEQ ID NO: 183468 - DNA, 25 bp, Saccharomyces pastorianus
gaagttggtaaagtcgaagaagcta

SEQ ID NO: 183469 - DNA, 25 bp, Saccharomyces pastorianus
ccaattgatgattaccgctggtatc

SEQ ID NO: 183470 - DNA, 25 bp, Saccharomyces pastorianus
ctgaagttggtaaagtcgaagaagc

SEQ ID NO: 183471 - DNA, 25 bp, Saccharomyces pastorianus
tggtaaagtcgaagaagctaagcgt

SEQ ID NO: 183472 - DNA, 25 bp, Saccharomyces pastorianus
agtgttatcgcaatcagctgatcca

SEQ ID NO: 183473 - DNA, 25 bp, Saccharomyces pastorianus
tgaaaactgcctaaacaacgacccg

SEQ ID NO: 183474 - DNA, 25 bp, Saccharomyces pastorianus
gatccaagtttgctgatcgaccaat

SEQ ID NO: 183475 - DNA, 25 bp, Saccharomyces pastorianus
gatcgaccaattttctccggtaatt

SEQ ID NO: 183476 - DNA, 25 bp, Saccharomyces pastorianus
gagtctaactagcatcttagtcatt

SEQ ID NO: 183477 - DNA, 25 bp, Saccharomyces pastorianus
ccatttgtgtggttgagctctgaag

SEQ ID NO: 183478 - DNA, 25 bp, Saccharomyces pastorianus
gtgctcctaccgtcaattaacatat

SEQ ID NO: 183479 - DNA, 25 bp, Saccharomyces pastorianus
ttattcaaaggtgctcctaccgtca

SEQ ID NO: 183480 - DNA, 25 bp, Saccharomyces pastorianus
gccataccgctgcagcaagtgttat

SEQ ID NO: 183481 - DNA, 25 bp, Saccharomyces pastorianus
tcgtttttattttctgccataccgc

SEQ ID NO: 183482 - DNA, 25 bp, Saccharomyces pastorianus
aagattctagcttcaatttcaacaa

SEQ ID NO: 183483 - DNA, 25 bp, Saccharomyces pastorianus
tcacgcttacaaagatcgagtcggc

SEQ ID NO: 183484 - DNA, 25 bp, Saccharomyces pastorianus
gtcgtcattataactcacgcttaca

SEQ ID NO: 183485 - DNA, 25 bp, Saccharomyces pastorianus
tatcatttatcgcagaaactaatcg

SEQ ID NO: 183486 - DNA, 25 bp, Saccharomyces pastorianus
gatcgagtcggcgtacgacatctta

SEQ ID NO: 183487 - DNA, 25 bp, Saccharomyces pastorianus
cggcgtacgacatcttaccaacggt

SEQ ID NO: 183488 - DNA, 25 bp, Saccharomyces pastorianus
acgtaccattttttgtgattttcag

SEQ ID NO: 183489 - DNA, 25 bp, Saccharomyces pastorianus
cagttaggtggagtcgaattccata

SEQ ID NO: 183490 - DNA, 25 bp, Saccharomyces pastorianus
gaaactaatcgatttgggccattct

SEQ ID NO: 183491 - DNA, 25 bp, Saccharomyces pastorianus
tttcagagaaaccactttccccact

SEQ ID NO: 183492 - DNA, 25 bp, Saccharomyces pastorianus
tgggccattctgtcgtcattataac

SEQ ID NO: 183493 - DNA, 25 bp, Saccharomyces pastorianus
gtcgaattccatatatatcatttat

SEQ ID NO: 183494 - DNA, 25 bp, Saccharomyces pastorianus
cttcttctttcttctatagaggtaa

SEQ ID NO: 183495 - DNA, 25 bp, Saccharomyces pastorianus
gatgaagattgcgatttactgaaca

SEQ ID NO: 183496 - DNA, 25 bp, Saccharomyces pastorianus
ggagcctgtctaccaaatgcatatc

SEQ ID NO: 183497 - DNA, 25 bp, Saccharomyces pastorianus
aaacaccttccaaaagactgtggag

SEQ ID NO: 183498 - DNA, 25 bp, Saccharomyces pastorianus
actgaacaagactttgaccttcgaa

SEQ ID NO: 183499 - DNA, 25 bp, Saccharomyces pastorianus
aggatattgctgttttgcgttccaa

SEQ ID NO: 183500 - DNA, 25 bp, Saccharomyces pastorianus
tagaggtaactacaccgactttgaa

SEQ ID NO: 183501 - DNA, 25 bp, Saccharomyces pastorianus
gctgttttgcgttccaaagaatggt

SEQ ID NO: 183502 - DNA, 25 bp, Saccharomyces pastorianus
cgaaactgaagtcactttcaagaac

SEQ ID NO: 183503 - DNA, 25 bp, Saccharomyces pastorianus
gaatggttccaattagatgatgaag

SEQ ID NO: 183504 - DNA, 25 bp, Saccharomyces pastorianus
aaagactgtggagcctgtctaccaa

SEQ ID NO: 183505 - DNA, 25 bp, Saccharomyces pastorianus
gctttacaattagcgaaacagcatt

SEQ ID NO: 183506 - DNA, 25 bp, Saccharomyces pastorianus
gaaaatcaaattaacatcatcatcc

SEQ ID NO: 183507 - DNA, 25 bp, Saccharomyces pastorianus
gataactccaaaatctttagaaaat

SEQ ID NO: 183508 - DNA, 25 bp, Saccharomyces pastorianus
gcattcattatcaccgctagatgtt

SEQ ID NO: 183509 - DNA, 25 bp, Saccharomyces pastorianus
ataggataactccaaaatctttaga

SEQ ID NO: 183510 - DNA, 25 bp, Saccharomyces pastorianus
tttgctttacaattagcgaaacagc

SEQ ID NO: 183511 - DNA, 25 bp, Saccharomyces pastorianus
caaattaacatcatcatccaaaagg

SEQ ID NO: 183512 - DNA, 25 bp, Saccharomyces pastorianus
atcatccaaaaggaactgtaccctt

SEQ ID NO: 183513 - DNA, 25 bp, Saccharomyces pastorianus
attagcgaaacagcattcattatca

SEQ ID NO: 183514 - DNA, 25 bp, Saccharomyces pastorianus
attaacatcatcatccaaaaggaac

SEQ ID NO: 183515 - DNA, 25 bp, Saccharomyces pastorianus
agcattcattatcaccgctagatgt

SEQ ID NO: 183516 - DNA, 25 bp, Saccharomyces pastorianus
atattcgccaacgtcgccatcgtat

SEQ ID NO: 183517 - DNA, 25 bp, Saccharomyces pastorianus
atcatattcgccaacgtcaccatca

SEQ ID NO: 183518 - DNA, 25 bp, Saccharomyces pastorianus
gtactcacctacatcaccatcgtat

SEQ ID NO: 183519 - DNA, 25 bp, Saccharomyces pastorianus
atcaccatcgtattcaccaacgtca

SEQ ID NO: 183520 - DNA, 25 bp, Saccharomyces pastorianus
tattcgccaacgtcaccatcatatt

SEQ ID NO: 183521 - DNA, 25 bp, Saccharomyces pastorianus
cgtattcaccaacgtcaccatcata

SEQ ID NO: 183522 - DNA, 25 bp, Saccharomyces pastorianus
accaacatcaccatcgtactcacct

SEQ ID NO: 183523 - DNA, 25 bp, Saccharomyces pastorianus
attcgccaacgtcgccatcgtattc

SEQ ID NO: 183524 - DNA, 25 bp, Saccharomyces pastorianus
aacgtcaccatcatattcgccaacg

SEQ ID NO: 183525 - DNA, 25 bp, Saccharomyces pastorianus
gtcaccatcatattcgccaacgtca

SEQ ID NO: 183526 - DNA, 25 bp, Saccharomyces pastorianus
gtcaccatcatattcgccaacgtcg

SEQ ID NO: 183527 - DNA, 25 bp, Saccharomyces pastorianus
ccgttgatgttatggcaggtcgtcc

SEQ ID NO: 183528 - DNA, 25 bp, Saccharomyces pastorianus
ggaagcaactggtcgtggtaagatc

SEQ ID NO: 183529 - DNA, 25 bp, Saccharomyces pastorianus
ctggtggtttaggtcaattggctat

SEQ ID NO: 183530 - DNA, 25 bp, Saccharomyces pastorianus
ggccattggatgtcagagtcggatt

SEQ ID NO: 183531 - DNA, 25 bp, Saccharomyces pastorianus
gttgctgttgctaataactggccat

SEQ ID NO: 183532 - DNA, 25 bp, Saccharomyces pastorianus
gatcattggtactgactcccataca

SEQ ID NO: 183533 - DNA, 25 bp, Saccharomyces pastorianus
aaatcggtgctaccacatctgtttt

SEQ ID NO: 183534 - DNA, 25 bp, Saccharomyces pastorianus
gaacactctggaaccatacatcaat

SEQ ID NO: 183535 - DNA, 25 bp, Saccharomyces pastorianus
accacaaggatctattatctgctga

SEQ ID NO: 183536 - DNA, 25 bp, Saccharomyces pastorianus
gctgactttgctaaattataccaca

SEQ ID NO: 183537 - DNA, 25 bp, Saccharomyces pastorianus
aattggctggtatcacaactgtcaa

SEQ ID NO: 183538 - DNA, 25 bp, Saccharomyces pastorianus
gcctagtggacttgccttggatagt

SEQ ID NO: 183539 - DNA, 25 bp, Saccharomyces pastorianus
ttggatagtctttccacttgctcct

SEQ ID NO: 183540 - DNA, 25 bp, Saccharomyces pastorianus
gctcctccaggatcttttgggtcaa

SEQ ID NO: 183541 - DNA, 25 bp, Saccharomyces pastorianus
aacttgttcttgtcgcctagtggac

SEQ ID NO: 183542 - DNA, 25 bp, Saccharomyces pastorianus
gaattcactgaatttctcacctctg

SEQ ID NO: 183543 - DNA, 25 bp, Saccharomyces pastorianus
gcaagaaatacttagcggccagcgc

SEQ ID NO: 183544 - DNA, 25 bp, Saccharomyces pastorianus
gtggtcacaatctcgtcgtacaata

SEQ ID NO: 183545 - DNA, 25 bp, Saccharomyces pastorianus
gggtgaccttttcgccggtgtcact

SEQ ID NO: 183546 - DNA, 25 bp, Saccharomyces pastorianus
gggtggccttggtggtcacaatctc

SEQ ID NO: 183547 - DNA, 25 bp, Saccharomyces pastorianus
agcggccagcgcgaacttgttcttg

SEQ ID NO: 183548 - DNA, 25 bp, Saccharomyces pastorianus
tctcacctctgatttctggcaagaa

SEQ ID NO: 183549 - DNA, 25 bp, Saccharomyces pastorianus
agcactaatgccactaccactggaa

SEQ ID NO: 183550 - DNA, 25 bp, Saccharomyces pastorianus
acactagtgccactaccactgctag

SEQ ID NO: 183551 - DNA, 25 bp, Saccharomyces pastorianus
actaatgccactaccactggaagta

SEQ ID NO: 183552 - DNA, 25 bp, Saccharomyces pastorianus
gtgccactaccactgctagcaccaa

SEQ ID NO: 183553 - DNA, 25 bp, Saccharomyces pastorianus
aacactagtgccactaccactgcta

SEQ ID NO: 183554 - DNA, 25 bp, Saccharomyces pastorianus
gcactaatgccactaccactggaag

SEQ ID NO: 183555 - DNA, 25 bp, Saccharomyces pastorianus
ctaatgccactaccactggaagtac

SEQ ID NO: 183556 - DNA, 25 bp, Saccharomyces pastorianus
atgccactaccactggaagtaccaa

SEQ ID NO: 183557 - DNA, 25 bp, Saccharomyces pastorianus
taatgccactaccactggaagtacc

SEQ ID NO: 183558 - DNA, 25 bp, Saccharomyces pastorianus
ctagtgccactaccactgctagcac

SEQ ID NO: 183559 - DNA, 25 bp, Saccharomyces pastorianus
cactaatgccactaccactggaagt

SEQ ID NO: 183560 - DNA, 25 bp, Saccharomyces pastorianus
gttctaggaccacaactgtcaacaa

SEQ ID NO: 183561 - DNA, 25 bp, Saccharomyces pastorianus
gtgcatctcaggctactgaaggagt

SEQ ID NO: 183562 - DNA, 25 bp, Saccharomyces pastorianus
tacggttatatgaaaggtgcatctc

SEQ ID NO: 183563 - DNA, 25 bp, Saccharomyces pastorianus
tatgaaaggtgcatctcaggctact

SEQ ID NO: 183564 - DNA, 25 bp, Saccharomyces pastorianus
ggagcacttttgaatacggttatat

SEQ ID NO: 183565 - DNA, 25 bp, Saccharomyces pastorianus
aggaccacaactgtcaacaaagaag

SEQ ID NO: 183566 - DNA, 25 bp, Saccharomyces pastorianus
gaaaggtgcatctcaggctactgaa

SEQ ID NO: 183567 - DNA, 25 bp, Saccharomyces pastorianus
gatttccagttctaggaccacaact

SEQ ID NO: 183568 - DNA, 25 bp, Saccharomyces pastorianus
tactggatggagcacttttgaatac

SEQ ID NO: 183569 - DNA, 25 bp, Saccharomyces pastorianus
gatggagcacttttgaatacggtta

SEQ ID NO: 183570 - DNA, 25 bp, Saccharomyces pastorianus
aactgtcaacaaagaagccaagacc

SEQ ID NO: 183571 - DNA, 25 bp, Saccharomyces pastorianus
gctttacctctatataatgcctctt

SEQ ID NO: 183572 - DNA, 25 bp, Saccharomyces pastorianus
ttagcgatgacttttcatgagaggg

SEQ ID NO: 183573 - DNA, 25 bp, Saccharomyces pastorianus
cctgtaggctttacctctatataat

SEQ ID NO: 183574 - DNA, 25 bp, Saccharomyces pastorianus
tgccaaagacaacctacgggaacct

SEQ ID NO: 183575 - DNA, 25 bp, Saccharomyces pastorianus
tacctctatataatgcctctttttt

SEQ ID NO: 183576 - DNA, 25 bp, Saccharomyces pastorianus
cagtgttcctctttagcgatgactt

SEQ ID NO: 183577 - DNA, 25 bp, Saccharomyces pastorianus
ttttaacacttttttgaggcagaag

SEQ ID NO: 183578 - DNA, 25 bp, Saccharomyces pastorianus
ggagagcggtgatgtgttatcttgc

SEQ ID NO: 183579 - DNA, 25 bp, Saccharomyces pastorianus
ttcctctttagcgatgacttttcat

SEQ ID NO: 183580 - DNA, 25 bp, Saccharomyces pastorianus
gacaacctacgggaaccttcagtgt

SEQ ID NO: 183581 - DNA, 25 bp, Saccharomyces pastorianus
aaccttcagtgttcctctttagcga

SEQ ID NO: 183582 - DNA, 25 bp, Saccharomyces pastorianus
tacgtatacgtattcttcgttgttc

SEQ ID NO: 183583 - DNA, 25 bp, Saccharomyces pastorianus
gaagtccaccaaatgggttcctcct

SEQ ID NO: 183584 - DNA, 25 bp, Saccharomyces pastorianus
gactaagggcttgacactagaggaa

SEQ ID NO: 183585 - DNA, 25 bp, Saccharomyces pastorianus
actccattcatcacttcagcaatta

SEQ ID NO: 183586 - DNA, 25 bp, Saccharomyces pastorianus
gaggattatgatttgaatgctacca

SEQ ID NO: 183587 - DNA, 25 bp, Saccharomyces pastorianus
atggtgttcgcatacgtatacgtat

SEQ ID NO: 183588 - DNA, 25 bp, Saccharomyces pastorianus
atgtcaattgccagtgcatgtaact

SEQ ID NO: 183589 - DNA, 25 bp, Saccharomyces pastorianus
ctatggatatgtctttatgggctgt

SEQ ID NO: 183590 - DNA, 25 bp, Saccharomyces pastorianus
gaatgctaccagaaacgacactaga

SEQ ID NO: 183591 - DNA, 25 bp, Saccharomyces pastorianus
tgtacgaagaaaacgtcttaccttg

SEQ ID NO: 183592 - DNA, 25 bp, Saccharomyces pastorianus
ttcttcgttgttcccgagactaagg

SEQ ID NO: 183593 - DNA, 25 bp, Saccharomyces pastorianus
actgctaagttggttaacgactttg

SEQ ID NO: 183594 - DNA, 25 bp, Saccharomyces pastorianus
ttatattcaaccatcacacacgtct

SEQ ID NO: 183595 - DNA, 25 bp, Saccharomyces pastorianus
ggttcagacattcacgaggccctac

SEQ ID NO: 183596 - DNA, 25 bp, Saccharomyces pastorianus
tagtgtgtattattgcggccgtttt

SEQ ID NO: 183597 - DNA, 25 bp, Saccharomyces pastorianus
tattgcggccgttttagttatttag

SEQ ID NO: 183598 - DNA, 25 bp, Saccharomyces pastorianus
gggtataaactaagacaactgctaa

SEQ ID NO: 183599 - DNA, 25 bp, Saccharomyces pastorianus
gaggccctacattatccagtttaca

SEQ ID NO: 183600 - DNA, 25 bp, Saccharomyces pastorianus
acgtctttccctgaaacgcttgaga

SEQ ID NO: 183601 - DNA, 25 bp, Saccharomyces pastorianus
attagccaaggtatatagcagcatt

SEQ ID NO: 183602 - DNA, 25 bp, Saccharomyces pastorianus
tggccatttgcttcacttatattca

SEQ ID NO: 183603 - DNA, 25 bp, Saccharomyces pastorianus
agttatttagtctcatggccatttg

SEQ ID NO: 183604 - DNA, 25 bp, Saccharomyces pastorianus
tcagcacttcccatcccgatttagg

SEQ ID NO: 183605 - DNA, 25 bp, Saccharomyces pastorianus
agatgatacccacagcaatgcaaat

SEQ ID NO: 183606 - DNA, 25 bp, Saccharomyces pastorianus
aaagttgtaacccagtcagcacttc

SEQ ID NO: 183607 - DNA, 25 bp, Saccharomyces pastorianus
aatcgcctatgacgcaagagactac

SEQ ID NO: 183608 - DNA, 25 bp, Saccharomyces pastorianus
gaaggctaattcgaaactcaaaaca

SEQ ID NO: 183609 - DNA, 25 bp, Saccharomyces pastorianus
gtaactgcacaaaaatcgcctatga

SEQ ID NO: 183610 - DNA, 25 bp, Saccharomyces pastorianus
gtagtaacgcagatgatacccacag

SEQ ID NO: 183611 - DNA, 25 bp, Saccharomyces pastorianus
gaacgttcaaggactgccagcttat

SEQ ID NO: 183612 - DNA, 25 bp, Saccharomyces pastorianus
aaagcaattatcaggtaagcacaag

SEQ ID NO: 183613 - DNA, 25 bp, Saccharomyces pastorianus
tgatgattcaataggtacgcaagta

SEQ ID NO: 183614 - DNA, 25 bp, Saccharomyces pastorianus
taacactcaaattcaaagccgactt

SEQ ID NO: 183615 - DNA, 25 bp, Saccharomyces pastorianus
gaaaaaacatcttgctcgattgaga

SEQ ID NO: 183616 - DNA, 25 bp, Saccharomyces pastorianus
gataatttttcggaatctcatggta

SEQ ID NO: 183617 - DNA, 25 bp, Saccharomyces pastorianus
accacgtcatacacaccaggaatat

SEQ ID NO: 183618 - DNA, 25 bp, Saccharomyces pastorianus
acaccaggaatattgtggcctacaa

SEQ ID NO: 183619 - DNA, 25 bp, Saccharomyces pastorianus
agaattctgtcattaccacagcatt

SEQ ID NO: 183620 - DNA, 25 bp, Saccharomyces pastorianus
aaacagcgcctcacgtaaatgtaaa

SEQ ID NO: 183621 - DNA, 25 bp, Saccharomyces pastorianus
gagggagcaaaccacgtcatacaca

SEQ ID NO: 183622 - DNA, 25 bp, Saccharomyces pastorianus
gggttgtattcaatatcatcagtga

SEQ ID NO: 183623 - DNA, 25 bp, Saccharomyces pastorianus
ggatactgtggcatgaatacgcaat

SEQ ID NO: 183624 - DNA, 25 bp, Saccharomyces pastorianus
ttgccgagagtggttcatttgattc

SEQ ID NO: 183625 - DNA, 25 bp, Saccharomyces pastorianus
tgaatacgcaattgtggacacagaa

SEQ ID NO: 183626 - DNA, 25 bp, Saccharomyces pastorianus
aaaaccagctcaccaataccagaag

SEQ ID NO: 183627 - DNA, 25 bp, Saccharomyces pastorianus
gtaaaggctcatcgactgccaacga

SEQ ID NO: 183628 - DNA, 25 bp, Saccharomyces pastorianus
ctgccaacgacccaaacatacaaat

SEQ ID NO: 183629 - DNA, 25 bp, Saccharomyces pastorianus
gcagaagctggttcagatgctgata

SEQ ID NO: 183630 - DNA, 25 bp, Saccharomyces pastorianus
ggagcttgctttcccaaatgctgca

SEQ ID NO: 183631 - DNA, 25 bp, Saccharomyces pastorianus
gaagacgttggactaccggattcaa

SEQ ID NO: 183632 - DNA, 25 bp, Saccharomyces pastorianus
ggtctactatcaccgactgaagaga

SEQ ID NO: 183633 - DNA, 25 bp, Saccharomyces pastorianus
agacttgttggcacggagcttgctt

SEQ ID NO: 183634 - DNA, 25 bp, Saccharomyces pastorianus
tattcccagcggcaattacaaagag

SEQ ID NO: 183635 - DNA, 25 bp, Saccharomyces pastorianus
acagatgctccgttgtttagaatcg

SEQ ID NO: 183636 - DNA, 25 bp, Saccharomyces pastorianus
tcagtgttgatattcccagcggcaa

SEQ ID NO: 183637 - DNA, 25 bp, Saccharomyces pastorianus
gattattctcttgctgttattcttc

SEQ ID NO: 183638 - DNA, 25 bp, Saccharomyces pastorianus
gagacttgatctccaacatatctat

SEQ ID NO: 183639 - DNA, 25 bp, Saccharomyces pastorianus
ttaaacggcgcctcacaaaggagat

SEQ ID NO: 183640 - DNA, 25 bp, Saccharomyces pastorianus
gaatctctatgtgcggactatgggc

SEQ ID NO: 183641 - DNA, 25 bp, Saccharomyces pastorianus
gattatcgaaagctattttgggcct

SEQ ID NO: 183642 - DNA, 25 bp, Saccharomyces pastorianus
agtttcttgcgtcttcattatccta

SEQ ID NO: 183643 - DNA, 25 bp, Saccharomyces pastorianus
atcatgcgcatcttgcttaggaggc

SEQ ID NO: 183644 - DNA, 25 bp, Saccharomyces pastorianus
ataatttttctagctatcggcataa

SEQ ID NO: 183645 - DNA, 25 bp, Saccharomyces pastorianus
atgtgcaggctctacaaaacccaaa

SEQ ID NO: 183646 - DNA, 25 bp, Saccharomyces pastorianus
attttgggccttaccattttcgcat

SEQ ID NO: 183647 - DNA, 25 bp, Saccharomyces pastorianus
tgctgttattcttcggagggcctaa

SEQ ID NO: 183648 - DNA, 25 bp, Saccharomyces pastorianus
agaagcagacccttttgcaggcatt

SEQ ID NO: 183649 - DNA, 25 bp, Saccharomyces pastorianus
gcaagagccacttcgagaaatcaaa

SEQ ID NO: 183650 - DNA, 25 bp, Saccharomyces pastorianus
taaacttaccaccagttggcaaaag

SEQ ID NO: 183651 - DNA, 25 bp, Saccharomyces pastorianus
gacacggcaaacaggaaagctttat

SEQ ID NO: 183652 - DNA, 25 bp, Saccharomyces pastorianus
gatctacagcatgcaagagccactt

SEQ ID NO: 183653 - DNA, 25 bp, Saccharomyces pastorianus
tggcgtttatcaaagtacggctgct

SEQ ID NO: 183654 - DNA, 25 bp, Saccharomyces pastorianus
acaagctacaacgagatgcagattc

SEQ ID NO: 183655 - DNA, 25 bp, Saccharomyces pastorianus
tgcgttccaaaagccaagttaatac

SEQ ID NO: 183656 - DNA, 25 bp, Saccharomyces pastorianus
ggcattcctgagataaacttaccac

SEQ ID NO: 183657 - DNA, 25 bp, Saccharomyces pastorianus
tcctcaccatttttgcgttccaaaa

SEQ ID NO: 183658 - DNA, 25 bp, Saccharomyces pastorianus
gaaaaaacgtagctcctcaccattt

SEQ ID NO: 183659 - DNA, 25 bp, Saccharomyces pastorianus
aaagaaataaagattgcagcacctg

SEQ ID NO: 183660 - DNA, 25 bp, Saccharomyces pastorianus
ataaagattgcagcacctgagtttc

SEQ ID NO: 183661 - DNA, 25 bp, Saccharomyces pastorianus
aagaaataaagattgcagcacctga

SEQ ID NO: 183662 - DNA, 25 bp, Saccharomyces pastorianus
aaagattgcagcacctgagtttcgc

SEQ ID NO: 183663 - DNA, 25 bp, Saccharomyces pastorianus
gaaataaagattgcagcacctgagt

SEQ ID NO: 183664 - DNA, 25 bp, Saccharomyces pastorianus
aaaagaaataaagattgcagcacct

SEQ ID NO: 183665 - DNA, 25 bp, Saccharomyces pastorianus
agaaataaagattgcagcacctgag

SEQ ID NO: 183666 - DNA, 25 bp, Saccharomyces pastorianus
aaaaagaaataaagattgcagcacc

SEQ ID NO: 183667 - DNA, 25 bp, Saccharomyces pastorianus
aaaaaagaaataaagattgcagcac

SEQ ID NO: 183668 - DNA, 25 bp, Saccharomyces pastorianus
aataaagattgcagcacctgagttt

SEQ ID NO: 183669 - DNA, 25 bp, Saccharomyces pastorianus
aaataaagattgcagcacctgagtt

SEQ ID NO: 183670 - DNA, 25 bp, Saccharomyces pastorianus
atcaaacttggtgctttactatagg

SEQ ID NO: 183671 - DNA, 25 bp, Saccharomyces pastorianus
cacagggtcttatttcggcgtaatc

SEQ ID NO: 183672 - DNA, 25 bp, Saccharomyces pastorianus
taaagtcgaatgtgcccgtttcttg

SEQ ID NO: 183673 - DNA, 25 bp, Saccharomyces pastorianus
gtaccggatcatttattgtttcagg

SEQ ID NO: 183674 - DNA, 25 bp, Saccharomyces pastorianus
gatttgccatcgacattcgtcatgc

SEQ ID NO: 183675 - DNA, 25 bp, Saccharomyces pastorianus
tgcccgtttcttgcagtttcaaagg

SEQ ID NO: 183676 - DNA, 25 bp, Saccharomyces pastorianus
gaatcaattgcagacttccatttca

SEQ ID NO: 183677 - DNA, 25 bp, Saccharomyces pastorianus
gttttccgactttgatggacggctt

SEQ ID NO: 183678 - DNA, 25 bp, Saccharomyces pastorianus
tggacggcttaattctttgcagact

SEQ ID NO: 183679 - DNA, 25 bp, Saccharomyces pastorianus
actgtgccaaagactgtaccggatc

SEQ ID NO: 183680 - DNA, 25 bp, Saccharomyces pastorianus
ggtggatcgcctacaaagaaattca

SEQ ID NO: 183681 - DNA, 25 bp, Saccharomyces pastorianus
gatgctatctggatttcgccattct

SEQ ID NO: 183682 - DNA, 25 bp, Saccharomyces pastorianus
ggtgccgatgctatctggatttcgc

SEQ ID NO: 183683 - DNA, 25 bp, Saccharomyces pastorianus
tcaaggagagcaggtcttctaagac

SEQ ID NO: 183684 - DNA, 25 bp, Saccharomyces pastorianus
gctacgatgccgatggcgcaccaat

SEQ ID NO: 183685 - DNA, 25 bp, Saccharomyces pastorianus
ctggatttcgccattctacgactcg

SEQ ID NO: 183686 - DNA, 25 bp, Saccharomyces pastorianus
tggtcatcaaccattgttccagtga

SEQ ID NO: 183687 - DNA, 25 bp, Saccharomyces pastorianus
tcgccttgattgataagacccataa

SEQ ID NO: 183688 - DNA, 25 bp, Saccharomyces pastorianus
ggactgcttcgccttgattgataag

SEQ ID NO: 183689 - DNA, 25 bp, Saccharomyces pastorianus
gagagcacctaagggctacgatgcc

SEQ ID NO: 183690 - DNA, 25 bp, Saccharomyces pastorianus
gttccagtgaacacgagtggttcaa

SEQ ID NO: 183691 - DNA, 25 bp, Saccharomyces pastorianus
gcaggtcttctaagactaatccaaa

SEQ ID NO: 183692 - DNA, 25 bp, Saccharomyces pastorianus
cgacgatgacgatgacgatgaagat

SEQ ID NO: 183693 - DNA, 25 bp, Saccharomyces pastorianus
gacgacgacgacgacgacgatgacg

SEQ ID NO: 183694 - DNA, 25 bp, Saccharomyces pastorianus
gacgatgacgatgacgatgaagatg

SEQ ID NO: 183695 - DNA, 25 bp, Saccharomyces pastorianus
acgacgacgacgacgacgatgacga

SEQ ID NO: 183696 - DNA, 25 bp, Saccharomyces pastorianus
cgatgacgatgacgacgacgacgac

SEQ ID NO: 183697 - DNA, 25 bp, Saccharomyces pastorianus
cgatgacgatgacgatgaagatgaa

SEQ ID NO: 183698 - DNA, 25 bp, Saccharomyces pastorianus
cgacgacgacgacgatgacgatgac

SEQ ID NO: 183699 - DNA, 25 bp, Saccharomyces pastorianus
tgaagatgaagacgaagatggcggg

SEQ ID NO: 183700 - DNA, 25 bp, Saccharomyces pastorianus
taacgacgacgacgacgacgacgat

SEQ ID NO: 183701 - DNA, 25 bp, Saccharomyces pastorianus
aacgacgacgacgacgacgacgatg

SEQ ID NO: 183702 - DNA, 25 bp, Saccharomyces pastorianus
cgacgacgacgacgacgacgatgac

SEQ ID NO: 183703 - DNA, 25 bp, Saccharomyces pastorianus
gtgtcaacagtcaaagccttctatt

SEQ ID NO: 183704 - DNA, 25 bp, Saccharomyces pastorianus
gtgaatccctgtgtaagaccgtaat

SEQ ID NO: 183705 - DNA, 25 bp, Saccharomyces pastorianus
atagattccatttttgtcagcctga

SEQ ID NO: 183706 - DNA, 25 bp, Saccharomyces pastorianus
gtagcgcctaccacttacagggaaa

SEQ ID NO: 183707 - DNA, 25 bp, Saccharomyces pastorianus
tatttaccaggtgtagcgcctacca

SEQ ID NO: 183708 - DNA, 25 bp, Saccharomyces pastorianus
atgacaacatcccattgctcgttaa

SEQ ID NO: 183709 - DNA, 25 bp, Saccharomyces pastorianus
gacggtaataacgtttctggcgata

SEQ ID NO: 183710 - DNA, 25 bp, Saccharomyces pastorianus
gaaaatttcttgtactcatacgact

SEQ ID NO: 183711 - DNA, 25 bp, Saccharomyces pastorianus
cacgtacagcttttgttgttgtatt

SEQ ID NO: 183712 - DNA, 25 bp, Saccharomyces pastorianus
gtaattccgggagatgatgctaaat

SEQ ID NO: 183713 - DNA, 25 bp, Saccharomyces pastorianus
acatcccattgctcgttaatcattt

SEQ ID NO: 183714 - DNA, 25 bp, Saccharomyces pastorianus
tgaacaaccgactatcttcgcctat

SEQ ID NO: 183715 - DNA, 25 bp, Saccharomyces pastorianus
aacgctgatttttcgaagctactgg

SEQ ID NO: 183716 - DNA, 25 bp, Saccharomyces pastorianus
aatgagttgttatcccacaccatgg

SEQ ID NO: 183717 - DNA, 25 bp, Saccharomyces pastorianus
gatgaagctctgttcaactcaaatg

SEQ ID NO: 183718 - DNA, 25 bp, Saccharomyces pastorianus
gagaccctgccaacattagtagatg

SEQ ID NO: 183719 - DNA, 25 bp, Saccharomyces pastorianus
tacctgataaccttgataacgctga

SEQ ID NO: 183720 - DNA, 25 bp, Saccharomyces pastorianus
aactatctgagccaatcgatgcaag

SEQ ID NO: 183721 - DNA, 25 bp, Saccharomyces pastorianus
tcccacaccatggatcctgtaaata

SEQ ID NO: 183722 - DNA, 25 bp, Saccharomyces pastorianus
tgggacaaccgccacaaaagactgt

SEQ ID NO: 183723 - DNA, 25 bp, Saccharomyces pastorianus
cgatgcaagtttaccgctaccgaat

SEQ ID NO: 183724 - DNA, 25 bp, Saccharomyces pastorianus
acagatgctgaaactacccaacgaa

SEQ ID NO: 183725 - DNA, 25 bp, Saccharomyces pastorianus
gaccccttgcactgtttaattatcg

SEQ ID NO: 183726 - DNA, 25 bp, Saccharomyces pastorianus
gtgacatctccggaaggccagaatg

SEQ ID NO: 183727 - DNA, 25 bp, Saccharomyces pastorianus
gcagactcggaagacaagatccaaa

SEQ ID NO: 183728 - DNA, 25 bp, Saccharomyces pastorianus
aagcggtgacatctccggaaggcca

SEQ ID NO: 183729 - DNA, 25 bp, Saccharomyces pastorianus
aaaacattgttatcaaagcggtgac

SEQ ID NO: 183730 - DNA, 25 bp, Saccharomyces pastorianus
tgaaacgaggacaactgagagaatt

SEQ ID NO: 183731 - DNA, 25 bp, Saccharomyces pastorianus
gtttaattatcgcagactcggaaga

SEQ ID NO: 183732 - DNA, 25 bp, Saccharomyces pastorianus
atgaactttgaggaccccttgcact

SEQ ID NO: 183733 - DNA, 25 bp, Saccharomyces pastorianus
tctccggaaggccagaatgacttga

SEQ ID NO: 183734 - DNA, 25 bp, Saccharomyces pastorianus
acaactgagagaattggcggaactt

SEQ ID NO: 183735 - DNA, 25 bp, Saccharomyces pastorianus
ttgaggaccccttgcactgtttaat

SEQ ID NO: 183736 - DNA, 25 bp, Saccharomyces pastorianus
aaccggatataagtctgagctttct

SEQ ID NO: 183737 - DNA, 25 bp, Saccharomyces pastorianus
aaatgatatatgcatctacggttgc

SEQ ID NO: 183738 - DNA, 25 bp, Saccharomyces pastorianus
gccatcgttgttttctttgggaatg

SEQ ID NO: 183739 - DNA, 25 bp, Saccharomyces pastorianus
gctgcttctttcatccactagaatt

SEQ ID NO: 183740 - DNA, 25 bp, Saccharomyces pastorianus
aagtctgagctttctgttggatata

SEQ ID NO: 183741 - DNA, 25 bp, Saccharomyces pastorianus
acccttgtggccatcgttgttttct

SEQ ID NO: 183742 - DNA, 25 bp, Saccharomyces pastorianus
ttataaacttcaacacgccacctgg

SEQ ID NO: 183743 - DNA, 25 bp, Saccharomyces pastorianus
aatggtgaacctttccatgtgtcgt

SEQ ID NO: 183744 - DNA, 25 bp, Saccharomyces pastorianus
ctttccatgtgtcgttgtctgtaga

SEQ ID NO: 183745 - DNA, 25 bp, Saccharomyces pastorianus
agaatttctctcttaaaccggatat

SEQ ID NO: 183746 - DNA, 25 bp, Saccharomyces pastorianus
agaaatggtgttcgtgctgcttctt

SEQ ID NO: 183747 - DNA, 25 bp, Saccharomyces pastorianus
cttccaagtattctttgtattcctc

SEQ ID NO: 183748 - DNA, 25 bp, Saccharomyces pastorianus
ggctcgatgtcttccaagtattctt

SEQ ID NO: 183749 - DNA, 25 bp, Saccharomyces pastorianus
ctcgatgtcttccaagtattctttg

SEQ ID NO: 183750 - DNA, 25 bp, Saccharomyces pastorianus
tatggctcgatgtcttccaagtatt

SEQ ID NO: 183751 - DNA, 25 bp, Saccharomyces pastorianus
tcttccaagtattctttgtattcct

SEQ ID NO: 183752 - DNA, 25 bp, Saccharomyces pastorianus
tggctcgatgtcttccaagtattct

SEQ ID NO: 183753 - DNA, 25 bp, Saccharomyces pastorianus
cgatgtcttccaagtattctttgta

SEQ ID NO: 183754 - DNA, 25 bp, Saccharomyces pastorianus
gatgtcttccaagtattctttgtat

SEQ ID NO: 183755 - DNA, 25 bp, Saccharomyces pastorianus
atatggctcgatgtcttccaagtat

SEQ ID NO: 183756 - DNA, 25 bp, Saccharomyces pastorianus
atggctcgatgtcttccaagtattc

SEQ ID NO: 183757 - DNA, 25 bp, Saccharomyces pastorianus
tcgatgtcttccaagtattctttgt

SEQ ID NO: 183758 - DNA, 25 bp, Saccharomyces pastorianus
ataatattataaatgattctgttcc

SEQ ID NO: 183759 - DNA, 25 bp, Saccharomyces pastorianus
taatattataaatgattctgttcct

SEQ ID NO: 183760 - DNA, 25 bp, Saccharomyces pastorianus
tataaatgattctgttcctcttttt

SEQ ID NO: 183761 - DNA, 25 bp, Saccharomyces pastorianus
attctgttcctctttttatatgttg

SEQ ID NO: 183762 - DNA, 25 bp, Saccharomyces pastorianus
tgattctgttcctctttttatatgt

SEQ ID NO: 183763 - DNA, 25 bp, Saccharomyces pastorianus
aaatgattctgttcctctttttata

SEQ ID NO: 183764 - DNA, 25 bp, Saccharomyces pastorianus
tattataaatgattctgttcctctt

SEQ ID NO: 183765 - DNA, 25 bp, Saccharomyces pastorianus
ttataaatgattctgttcctctttt

SEQ ID NO: 183766 - DNA, 25 bp, Saccharomyces pastorianus
atattataaatgattctgttcctct

SEQ ID NO: 183767 - DNA, 25 bp, Saccharomyces pastorianus
attataaatgattctgttcctcttt

SEQ ID NO: 183768 - DNA, 25 bp, Saccharomyces pastorianus
ataaatgattctgttcctcttttta

SEQ ID NO: 183769 - DNA, 25 bp, Saccharomyces pastorianus
ggtttcttcgaagcttatctatcct

SEQ ID NO: 183770 - DNA, 25 bp, Saccharomyces pastorianus
gtacatcggacacaagatctataag

SEQ ID NO: 183771 - DNA, 25 bp, Saccharomyces pastorianus
gttatggttatgtacatcggacaca

SEQ ID NO: 183772 - DNA, 25 bp, Saccharomyces pastorianus
acgttgctctattccccgtgggaga

SEQ ID NO: 183773 - DNA, 25 bp, Saccharomyces pastorianus
aagatggacattgatacgggtagaa

SEQ ID NO: 183774 - DNA, 25 bp, Saccharomyces pastorianus
ggttattattatgttcattgcccaa

SEQ ID NO: 183775 - DNA, 25 bp, Saccharomyces pastorianus
attggaagcttttcatcccagcaga

SEQ ID NO: 183776 - DNA, 25 bp, Saccharomyces pastorianus
attgcccaattctacgttgctctat

SEQ ID NO: 183777 - DNA, 25 bp, Saccharomyces pastorianus
tctccaagtgcggaaggtttcttcg

SEQ ID NO: 183778 - DNA, 25 bp, Saccharomyces pastorianus
tattccccgtgggagattctccaag

SEQ ID NO: 183779 - DNA, 25 bp, Saccharomyces pastorianus
ctatccttcccacttgttatggtta

SEQ ID NO: 183780 - DNA, 25 bp, Saccharomyces pastorianus
aacgtatcttcatcttctcaatcgg

SEQ ID NO: 183781 - DNA, 25 bp, Saccharomyces pastorianus
tcatcttctcaatcggcatcatcaa

SEQ ID NO: 183782 - DNA, 25 bp, Saccharomyces pastorianus
tcttcatcttctcaatcggcatcat

SEQ ID NO: 183783 - DNA, 25 bp, Saccharomyces pastorianus
ttcatcttctcaatcggcatcatca

SEQ ID NO: 183784 - DNA, 25 bp, Saccharomyces pastorianus
atcttcatcttctcaatcggcatca

SEQ ID NO: 183785 - DNA, 25 bp, Saccharomyces pastorianus
cttctcaatcggcatcatcaagacc

SEQ ID NO: 183786 - DNA, 25 bp, Saccharomyces pastorianus
catcttctcaatcggcatcatcaag

SEQ ID NO: 183787 - DNA, 25 bp, Saccharomyces pastorianus
tctcaatcggcatcatcaagaccat

SEQ ID NO: 183788 - DNA, 25 bp, Saccharomyces pastorianus
gaacgtatcttcatcttctcaatcg

SEQ ID NO: 183789 - DNA, 25 bp, Saccharomyces pastorianus
gtatcttcatcttctcaatcggcat

SEQ ID NO: 183790 - DNA, 25 bp, Saccharomyces pastorianus
acgtatcttcatcttctcaatcggc

SEQ ID NO: 183791 - DNA, 25 bp, Saccharomyces pastorianus
aagtaccaagaacctgctgttgcct

SEQ ID NO: 183792 - DNA, 25 bp, Saccharomyces pastorianus
ggagttgtcatatgagcagtaccat

SEQ ID NO: 183793 - DNA, 25 bp, Saccharomyces pastorianus
gcagcgcatctgaacgaagctatca

SEQ ID NO: 183794 - DNA, 25 bp, Saccharomyces pastorianus
agatccagcgcttcatcatcgagca

SEQ ID NO: 183795 - DNA, 25 bp, Saccharomyces pastorianus
tacccggatcggaaggctcgcgcga

SEQ ID NO: 183796 - DNA, 25 bp, Saccharomyces pastorianus
gacagcggttggaacaaaagtacca

SEQ ID NO: 183797 - DNA, 25 bp, Saccharomyces pastorianus
cagaacgcgcgtacccggatcggaa

SEQ ID NO: 183798 - DNA, 25 bp, Saccharomyces pastorianus
gaagctatcaacctagacagcggtt

SEQ ID NO: 183799 - DNA, 25 bp, Saccharomyces pastorianus
atgagcagtaccatgcagcgcatct

SEQ ID NO: 183800 - DNA, 25 bp, Saccharomyces pastorianus
tgccttttaacagaacgcgcgtacc

SEQ ID NO: 183801 - DNA, 25 bp, Saccharomyces pastorianus
aagaacctgctgttgccttttaaca

SEQ ID NO: 183802 - DNA, 25 bp, Saccharomyces pastorianus
aaagccaacatcatcgctgcacgtt

SEQ ID NO: 183803 - DNA, 25 bp, Saccharomyces pastorianus
atgctagtagaggtttctgccgcgc

SEQ ID NO: 183804 - DNA, 25 bp, Saccharomyces pastorianus
taaagttccatctaacgccacgttt

SEQ ID NO: 183805 - DNA, 25 bp, Saccharomyces pastorianus
catccggtggccagaatgctagtag

SEQ ID NO: 183806 - DNA, 25 bp, Saccharomyces pastorianus
tgcacgttctgttgcagatgccatc

SEQ ID NO: 183807 - DNA, 25 bp, Saccharomyces pastorianus
atccgtacttcattgggtcccaagg

SEQ ID NO: 183808 - DNA, 25 bp, Saccharomyces pastorianus
attgtgtctcaatactcttcgtttt

SEQ ID NO: 183809 - DNA, 25 bp, Saccharomyces pastorianus
tgcatccacttctttgagttccaag

SEQ ID NO: 183810 - DNA, 25 bp, Saccharomyces pastorianus
gaccggagctctattgggtgctgct

SEQ ID NO: 183811 - DNA, 25 bp, Saccharomyces pastorianus
gcggactcctttcaaagtgctgcga

SEQ ID NO: 183812 - DNA, 25 bp, Saccharomyces pastorianus
aagccggtgatggtaccacttctgt

SEQ ID NO: 183813 - DNA, 25 bp, Saccharomyces pastorianus
tagatttggtgactccaggtctccc

SEQ ID NO: 183814 - DNA, 25 bp, Saccharomyces pastorianus
atgtgccaatagaagatgctgacgg

SEQ ID NO: 183815 - DNA, 25 bp, Saccharomyces pastorianus
caggtctcccgcatatggtgaaata

SEQ ID NO: 183816 - DNA, 25 bp, Saccharomyces pastorianus
aggttcaacggatgcgattccctgg

SEQ ID NO: 183817 - DNA, 25 bp, Saccharomyces pastorianus
tgggccatccatcaaggtaagcaaa

SEQ ID NO: 183818 - DNA, 25 bp, Saccharomyces pastorianus
cccgtcttatcccatatcgtaaatg

SEQ ID NO: 183819 - DNA, 25 bp, Saccharomyces pastorianus
ggaactttgggtcgtgatgccactt

SEQ ID NO: 183820 - DNA, 25 bp, Saccharomyces pastorianus
gattcggccaagttgattttcaata

SEQ ID NO: 183821 - DNA, 25 bp, Saccharomyces pastorianus
caatagggctatcgtcactgaaaaa

SEQ ID NO: 183822 - DNA, 25 bp, Saccharomyces pastorianus
aaggctattgctcaaattgtctcgc

SEQ ID NO: 183823 - DNA, 25 bp, Saccharomyces pastorianus
ggcattcaagtcttgattcggccaa

SEQ ID NO: 183824 - DNA, 25 bp, Saccharomyces pastorianus
ggaagcaaacactagcgcaaatctg

SEQ ID NO: 183825 - DNA, 25 bp, Saccharomyces pastorianus
gtaaccgctaataattttcaacaga

SEQ ID NO: 183826 - DNA, 25 bp, Saccharomyces pastorianus
tttcaacagacgcagaatgaccctt

SEQ ID NO: 183827 - DNA, 25 bp, Saccharomyces pastorianus
gcagaatgacccttcgtataacaga

SEQ ID NO: 183828 - DNA, 25 bp, Saccharomyces pastorianus
gaaatttgttcatgatgtccaatca

SEQ ID NO: 183829 - DNA, 25 bp, Saccharomyces pastorianus
acatgatgacatctggtccggtaga

SEQ ID NO: 183830 - DNA, 25 bp, Saccharomyces pastorianus
gtaactaacgcagacatcaggaaaa

SEQ ID NO: 183831 - DNA, 25 bp, Saccharomyces pastorianus
aaaagcgttctaactgggataacat

SEQ ID NO: 183832 - DNA, 25 bp, Saccharomyces pastorianus
agcgcaaatctgcatttcgacaatg

SEQ ID NO: 183833 - DNA, 25 bp, Saccharomyces pastorianus
acatctggtccggtagaagactttt

SEQ ID NO: 183834 - DNA, 25 bp, Saccharomyces pastorianus
gtccaatcaggaaggtgtacaatat

SEQ ID NO: 183835 - DNA, 25 bp, Saccharomyces pastorianus
actagcatacctagtcgaacacgcc

SEQ ID NO: 183836 - DNA, 25 bp, Saccharomyces pastorianus
gaaactagaacaaccatcactggaa

SEQ ID NO: 183837 - DNA, 25 bp, Saccharomyces pastorianus
ttgaacatgccaaggccatcaatca

SEQ ID NO: 183838 - DNA, 25 bp, Saccharomyces pastorianus
aaccatcactagcatacctagtcga

SEQ ID NO: 183839 - DNA, 25 bp, Saccharomyces pastorianus
gaaggagaagtctgcctacctgggc

SEQ ID NO: 183840 - DNA, 25 bp, Saccharomyces pastorianus
gttgtatccaacgaggcatattctg

SEQ ID NO: 183841 - DNA, 25 bp, Saccharomyces pastorianus
aaggccatcaatcaccatttactat

SEQ ID NO: 183842 - DNA, 25 bp, Saccharomyces pastorianus
ggaatacctagttgaacatgccaag

SEQ ID NO: 183843 - DNA, 25 bp, Saccharomyces pastorianus
tctgccaaactaggccatactgttg

SEQ ID NO: 183844 - DNA, 25 bp, Saccharomyces pastorianus
aactaggccatactgttgtatccaa

SEQ ID NO: 183845 - DNA, 25 bp, Saccharomyces pastorianus
agtctgcctacctgggccatactgt

SEQ ID NO: 183846 - DNA, 25 bp, Saccharomyces pastorianus
gaattcctattataggggtgccgag

SEQ ID NO: 183847 - DNA, 25 bp, Saccharomyces pastorianus
tcatacatttttgatagacttcgta

SEQ ID NO: 183848 - DNA, 25 bp, Saccharomyces pastorianus
ctgttttatggcgcttatgtgtatt

SEQ ID NO: 183849 - DNA, 25 bp, Saccharomyces pastorianus
tactgttttatggcgcttatgtgta

SEQ ID NO: 183850 - DNA, 25 bp, Saccharomyces pastorianus
ttttgatagacttcgtatgtggagt

SEQ ID NO: 183851 - DNA, 25 bp, Saccharomyces pastorianus
ggaattcctattataggggtgccga

SEQ ID NO: 183852 - DNA, 25 bp, Saccharomyces pastorianus
aattcctattataggggtgccgagg

SEQ ID NO: 183853 - DNA, 25 bp, Saccharomyces pastorianus
atttttgatagacttcgtatgtgga

SEQ ID NO: 183854 - DNA, 25 bp, Saccharomyces pastorianus
ttcctattataggggtgccgaggtg

SEQ ID NO: 183855 - DNA, 25 bp, Saccharomyces pastorianus
attcctattataggggtgccgaggt

SEQ ID NO: 183856 - DNA, 25 bp, Saccharomyces pastorianus
gtactgttttatggcgcttatgtgt

SEQ ID NO: 183857 - DNA, 25 bp, Saccharomyces pastorianus
cttctttgaagtttctagtcggaca

SEQ ID NO: 183858 - DNA, 25 bp, Saccharomyces pastorianus
tttctagtcggacaaggtatgagac

SEQ ID NO: 183859 - DNA, 25 bp, Saccharomyces pastorianus
ggaacctcgtctctggcaaaaagaa

SEQ ID NO: 183860 - DNA, 25 bp, Saccharomyces pastorianus
gtctctggcaaaaagaaaacttctt

SEQ ID NO: 183861 - DNA, 25 bp, Saccharomyces pastorianus
caatgacataattgcacagcacaca

SEQ ID NO: 183862 - DNA, 25 bp, Saccharomyces pastorianus
aggacgtataaaggcaggcgaattt

SEQ ID NO: 183863 - DNA, 25 bp, Saccharomyces pastorianus
agcacacagatgaagctttcatacg

SEQ ID NO: 183864 - DNA, 25 bp, Saccharomyces pastorianus
ggtatgagacaaagccaaggacgta

SEQ ID NO: 183865 - DNA, 25 bp, Saccharomyces pastorianus
taaaggcaggcgaatttgagaaaaa

SEQ ID NO: 183866 - DNA, 25 bp, Saccharomyces pastorianus
atacggaacctcgtctctggcaaaa

SEQ ID NO: 183867 - DNA, 25 bp, Saccharomyces pastorianus
gaagctttcatacggaacctcgtct

SEQ ID NO: 183868 - DNA, 25 bp, Saccharomyces pastorianus
gctgcagcaagcactaaggagcatt

SEQ ID NO: 183869 - DNA, 25 bp, Saccharomyces pastorianus
atttgtcaattgttgcttgctcgag

SEQ ID NO: 183870 - DNA, 25 bp, Saccharomyces pastorianus
acatgccctgaatcggagttccatt

SEQ ID NO: 183871 - DNA, 25 bp, Saccharomyces pastorianus
atttgattaggcacacatgccctga

SEQ ID NO: 183872 - DNA, 25 bp, Saccharomyces pastorianus
ggagttaccagacatcaacgacgaa

SEQ ID NO: 183873 - DNA, 25 bp, Saccharomyces pastorianus
attgttgcttgctcgagcttgaaga

SEQ ID NO: 183874 - DNA, 25 bp, Saccharomyces pastorianus
caacgacgaaactgactgtgacatt

SEQ ID NO: 183875 - DNA, 25 bp, Saccharomyces pastorianus
gtagaatctacaaaagctgcagcaa

SEQ ID NO: 183876 - DNA, 25 bp, Saccharomyces pastorianus
gagggattccattaaatgacgacga

SEQ ID NO: 183877 - DNA, 25 bp, Saccharomyces pastorianus
tggagtctcaattcagggatctgga

SEQ ID NO: 183878 - DNA, 25 bp, Saccharomyces pastorianus
ctgtgacattgttcccttagatttc

SEQ ID NO: 183879 - DNA, 25 bp, Saccharomyces pastorianus
atttctatatactaatattacgatt

SEQ ID NO: 183880 - DNA, 25 bp, Saccharomyces pastorianus
atatttctatatactaatattacga

SEQ ID NO: 183881 - DNA, 25 bp, Saccharomyces pastorianus
tatttctatatactaatattacgat

SEQ ID NO: 183882 - DNA, 25 bp, Saccharomyces pastorianus
gaatctatatttctatatactaata

SEQ ID NO: 183883 - DNA, 25 bp, Saccharomyces pastorianus
ttctatatactaatattacgattat

SEQ ID NO: 183884 - DNA, 25 bp, Saccharomyces pastorianus
tggaatctatatttctatatactaa

SEQ ID NO: 183885 - DNA, 25 bp, Saccharomyces pastorianus
atggaatctatatttctatatacta

SEQ ID NO: 183886 - DNA, 25 bp, Saccharomyces pastorianus
aatggaatctatatttctatatact

SEQ ID NO: 183887 - DNA, 25 bp, Saccharomyces pastorianus
ctatatactaatattacgattattc

SEQ ID NO: 183888 - DNA, 25 bp, Saccharomyces pastorianus
ggaatctatatttctatatactaat

SEQ ID NO: 183889 - DNA, 25 bp, Saccharomyces pastorianus
tttctatatactaatattacgatta

SEQ ID NO: 183890 - DNA, 25 bp, Saccharomyces pastorianus
acatccttggtttcatccgttgcgg

SEQ ID NO: 183891 - DNA, 25 bp, Saccharomyces pastorianus
ttcacaggcgctttgatcttgttta

SEQ ID NO: 183892 - DNA, 25 bp, Saccharomyces pastorianus
ggtgtatagaggttttcccctgaag

SEQ ID NO: 183893 - DNA, 25 bp, Saccharomyces pastorianus
ttgtcctctgatgttttcccattga

SEQ ID NO: 183894 - DNA, 25 bp, Saccharomyces pastorianus
aagttccttattactttgctggaca

SEQ ID NO: 183895 - DNA, 25 bp, Saccharomyces pastorianus
tgctggacaattgatcggtgccttc

SEQ ID NO: 183896 - DNA, 25 bp, Saccharomyces pastorianus
gaatccgtctattacattagccaat

SEQ ID NO: 183897 - DNA, 25 bp, Saccharomyces pastorianus
tgcgctggtggtagtgccatctcag

SEQ ID NO: 183898 - DNA, 25 bp, Saccharomyces pastorianus
cgttgcgggcggtacctttgatgat

SEQ ID NO: 183899 - DNA, 25 bp, Saccharomyces pastorianus
gcaggaacatttgcgctgaccgatc

SEQ ID NO: 183900 - DNA, 25 bp, Saccharomyces pastorianus
atccttatacgtgtttgtcctctga

SEQ ID NO: 183901 - DNA, 25 bp, Saccharomyces pastorianus
ctgactttgtttctggcacacctat

SEQ ID NO: 183902 - DNA, 25 bp, Saccharomyces pastorianus
aaatatggatacaatttggcaccct

SEQ ID NO: 183903 - DNA, 25 bp, Saccharomyces pastorianus
tttcactgactttgtttctggcaca

SEQ ID NO: 183904 - DNA, 25 bp, Saccharomyces pastorianus
atacaatttggcaccctacatgttt

SEQ ID NO: 183905 - DNA, 25 bp, Saccharomyces pastorianus
ctttcactgactttgtttctggcac

SEQ ID NO: 183906 - DNA, 25 bp, Saccharomyces pastorianus
ttcactgactttgtttctggcacac

SEQ ID NO: 183907 - DNA, 25 bp, Saccharomyces pastorianus
actttcactgactttgtttctggca

SEQ ID NO: 183908 - DNA, 25 bp, Saccharomyces pastorianus
aatatggatacaatttggcacccta

SEQ ID NO: 183909 - DNA, 25 bp, Saccharomyces pastorianus
gtttctggcacacctattgtaagga

SEQ ID NO: 183910 - DNA, 25 bp, Saccharomyces pastorianus
actgactttgtttctggcacaccta

SEQ ID NO: 183911 - DNA, 25 bp, Saccharomyces pastorianus
tcactgactttgtttctggcacacc

SEQ ID NO: 183912 - DNA, 25 bp, Saccharomyces pastorianus
gtttggcgctcgttatcaaccacaa

SEQ ID NO: 183913 - DNA, 25 bp, Saccharomyces pastorianus
tcctgaacagcacccaaatgacgat

SEQ ID NO: 183914 - DNA, 25 bp, Saccharomyces pastorianus
atctcagcctcaagcgcaaactcaa

SEQ ID NO: 183915 - DNA, 25 bp, Saccharomyces pastorianus
tctgctgctttaagaactcctgaac

SEQ ID NO: 183916 - DNA, 25 bp, Saccharomyces pastorianus
aagaagccaaatctccacggatacg

SEQ ID NO: 183917 - DNA, 25 bp, Saccharomyces pastorianus
gcaacagctacgtgcaacaggccaa

SEQ ID NO: 183918 - DNA, 25 bp, Saccharomyces pastorianus
ggcagatatgcgcaattctcaatat

SEQ ID NO: 183919 - DNA, 25 bp, Saccharomyces pastorianus
taccagcatcaaacccagcagaaat

SEQ ID NO: 183920 - DNA, 25 bp, Saccharomyces pastorianus
gctccaaatgcaacagctccaacag

SEQ ID NO: 183921 - DNA, 25 bp, Saccharomyces pastorianus
agttagaccctacttcttatgaagc

SEQ ID NO: 183922 - DNA, 25 bp, Saccharomyces pastorianus
aactcaatctcagcagtttggcgct

SEQ ID NO: 183923 - DNA, 25 bp, Saccharomyces pastorianus
aaatctcagaacataaacctttata

SEQ ID NO: 183924 - DNA, 25 bp, Saccharomyces pastorianus
aaatactctaatacttataaagctg

SEQ ID NO: 183925 - DNA, 25 bp, Saccharomyces pastorianus
aaggagatggtcatatcggtgctaa

SEQ ID NO: 183926 - DNA, 25 bp, Saccharomyces pastorianus
agctgtaagtttaaatttggattct

SEQ ID NO: 183927 - DNA, 25 bp, Saccharomyces pastorianus
taaacaatcggcaagtaacttttat

SEQ ID NO: 183928 - DNA, 25 bp, Saccharomyces pastorianus
gagatggtcatatcggtgctaaata

SEQ ID NO: 183929 - DNA, 25 bp, Saccharomyces pastorianus
tattaggttattatttagcaggttt

SEQ ID NO: 183930 - DNA, 25 bp, Saccharomyces pastorianus
taactaataataaacaatcggcaag

SEQ ID NO: 183931 - DNA, 25 bp, Saccharomyces pastorianus
tagcaggtttaattgaaggagatgg

SEQ ID NO: 183932 - DNA, 25 bp, Saccharomyces pastorianus
cggtgctaaatatattactattgct

SEQ ID NO: 183933 - DNA, 25 bp, Saccharomyces pastorianus
aaatttggattctaaagcagctata

SEQ ID NO: 183934 - DNA, 25 bp, Saccharomyces pastorianus
tctccgggcaagaaacagataacat

SEQ ID NO: 183935 - DNA, 25 bp, Saccharomyces pastorianus
tggtcctggacctgaaataaataag

SEQ ID NO: 183936 - DNA, 25 bp, Saccharomyces pastorianus
tacgaattcatcgaagaggccaatt

SEQ ID NO: 183937 - DNA, 25 bp, Saccharomyces pastorianus
gaagaggccaattgaaaagtatgac

SEQ ID NO: 183938 - DNA, 25 bp, Saccharomyces pastorianus
caaatctaattgatggatctacgaa

SEQ ID NO: 183939 - DNA, 25 bp, Saccharomyces pastorianus
atgactggtcctggacctgaaataa

SEQ ID NO: 183940 - DNA, 25 bp, Saccharomyces pastorianus
gatggatctacgaattcatcgaaga

SEQ ID NO: 183941 - DNA, 25 bp, Saccharomyces pastorianus
aataaggaggagcaccccagttctc

SEQ ID NO: 183942 - DNA, 25 bp, Saccharomyces pastorianus
gcaccccagttctccgggcaagaaa

SEQ ID NO: 183943 - DNA, 25 bp, Saccharomyces pastorianus
tataatagtatacccaagaatgcaa

SEQ ID NO: 183944 - DNA, 25 bp, Saccharomyces pastorianus
gtatacccaagaatgcaaatctaat

SEQ ID NO: 183945 - DNA, 25 bp, Saccharomyces pastorianus
gagcaatctttacgtgtccaactag

SEQ ID NO: 183946 - DNA, 25 bp, Saccharomyces pastorianus
atccgtgttgcgttatggtttacca

SEQ ID NO: 183947 - DNA, 25 bp, Saccharomyces pastorianus
ctacattctgaacacttgaccactg

SEQ ID NO: 183948 - DNA, 25 bp, Saccharomyces pastorianus
gtccaagagttcacagcggctgcaa

SEQ ID NO: 183949 - DNA, 25 bp, Saccharomyces pastorianus
tgtaccagcatctgcaggtgtaatt

SEQ ID NO: 183950 - DNA, 25 bp, Saccharomyces pastorianus
aggaacatgactctgctgcaagttt

SEQ ID NO: 183951 - DNA, 25 bp, Saccharomyces pastorianus
gttccaccaaagaacctctctagat

SEQ ID NO: 183952 - DNA, 25 bp, Saccharomyces pastorianus
gaagtttatccctcgtgaattcaat

SEQ ID NO: 183953 - DNA, 25 bp, Saccharomyces pastorianus
acacttgaccactgttcttgtagca

SEQ ID NO: 183954 - DNA, 25 bp, Saccharomyces pastorianus
agagtctacgtggaatccgtgttgc

SEQ ID NO: 183955 - DNA, 25 bp, Saccharomyces pastorianus
ggtttaccacctcattttaacatca

SEQ ID NO: 183956 - DNA, 25 bp, Saccharomyces pastorianus
attccttatttggtcgactgtgtcg

SEQ ID NO: 183957 - DNA, 25 bp, Saccharomyces pastorianus
tcccgcagttgcttgatgacatcag

SEQ ID NO: 183958 - DNA, 25 bp, Saccharomyces pastorianus
cggtgccgatgaactgtttgattat

SEQ ID NO: 183959 - DNA, 25 bp, Saccharomyces pastorianus
agatcattgtcgtcgcttctcagaa

SEQ ID NO: 183960 - DNA, 25 bp, Saccharomyces pastorianus
gaaggccgccattagattagtcaag

SEQ ID NO: 183961 - DNA, 25 bp, Saccharomyces pastorianus
ggttgtatgacgtcccgcagttgct

SEQ ID NO: 183962 - DNA, 25 bp, Saccharomyces pastorianus
gccgtaggccaactactgattcagt

SEQ ID NO: 183963 - DNA, 25 bp, Saccharomyces pastorianus
ccatcatatcccagtcaaggtctat

SEQ ID NO: 183964 - DNA, 25 bp, Saccharomyces pastorianus
gtcaccattgccaaaacaagcctat

SEQ ID NO: 183965 - DNA, 25 bp, Saccharomyces pastorianus
attcacttttccagctgatcttgag

SEQ ID NO: 183966 - DNA, 25 bp, Saccharomyces pastorianus
tggaagccttctgtgccacaaaggg

SEQ ID NO: 183967 - DNA, 25 bp, Saccharomyces pastorianus
tctagcgggatcgaaccgctgatcc

SEQ ID NO: 183968 - DNA, 25 bp, Saccharomyces pastorianus
atggtctctagcgggatcgaaccgc

SEQ ID NO: 183969 - DNA, 25 bp, Saccharomyces pastorianus
cgaaccgctgatccccgcgttatta

SEQ ID NO: 183970 - DNA, 25 bp, Saccharomyces pastorianus
gtctctagcgggatcgaaccgctga

SEQ ID NO: 183971 - DNA, 25 bp, Saccharomyces pastorianus
tctctagcgggatcgaaccgctgat

SEQ ID NO: 183972 - DNA, 25 bp, Saccharomyces pastorianus
ctctagcgggatcgaaccgctgatc

SEQ ID NO: 183973 - DNA, 25 bp, Saccharomyces pastorianus
ggtctctagcgggatcgaaccgctg

SEQ ID NO: 183974 - DNA, 25 bp, Saccharomyces pastorianus
ggatcgaaccgctgatccccgcgtt

SEQ ID NO: 183975 - DNA, 25 bp, Saccharomyces pastorianus
tagcgggatcgaaccgctgatcccc

SEQ ID NO: 183976 - DNA, 25 bp, Saccharomyces pastorianus
atcgaaccgctgatccccgcgttat

SEQ ID NO: 183977 - DNA, 25 bp, Saccharomyces pastorianus
gctgatccccgcgttattagcacgg

SEQ ID NO: 183978 - DNA, 25 bp, Saccharomyces pastorianus
gacgagaagattaccagtcctggat

SEQ ID NO: 183979 - DNA, 25 bp, Saccharomyces pastorianus
cccaagagtttcttactggtggttg

SEQ ID NO: 183980 - DNA, 25 bp, Saccharomyces pastorianus
accagtcctggatgttcgtgaatgt

SEQ ID NO: 183981 - DNA, 25 bp, Saccharomyces pastorianus
gctatgcaatatttcagatacccca

SEQ ID NO: 183982 - DNA, 25 bp, Saccharomyces pastorianus
gaatatcttcatttgcagctatgca

SEQ ID NO: 183983 - DNA, 25 bp, Saccharomyces pastorianus
tcttactggtggttggattttcttt

SEQ ID NO: 183984 - DNA, 25 bp, Saccharomyces pastorianus
cagataccccattttacccaagagt

SEQ ID NO: 183985 - DNA, 25 bp, Saccharomyces pastorianus
tattgcgtcatcagcgactccgcgc

SEQ ID NO: 183986 - DNA, 25 bp, Saccharomyces pastorianus
gtggttggattttctttaagacgag

SEQ ID NO: 183987 - DNA, 25 bp, Saccharomyces pastorianus
tgttcgtgaatgtgcctattgcgtc

SEQ ID NO: 183988 - DNA, 25 bp, Saccharomyces pastorianus
aatgtgcctattgcgtcatcagcga

SEQ ID NO: 183989 - DNA, 25 bp, Saccharomyces pastorianus
cttttttacctcaccagaggatact

SEQ ID NO: 183990 - DNA, 25 bp, Saccharomyces pastorianus
gagtggagttttccgtgtcctggaa

SEQ ID NO: 183991 - DNA, 25 bp, Saccharomyces pastorianus
ctataatgagtggagttttccgtgt

SEQ ID NO: 183992 - DNA, 25 bp, Saccharomyces pastorianus
ataatgagtggagttttccgtgtcc

SEQ ID NO: 183993 - DNA, 25 bp, Saccharomyces pastorianus
tggagttttccgtgtcctggaacgt

SEQ ID NO: 183994 - DNA, 25 bp, Saccharomyces pastorianus
gtggagttttccgtgtcctggaacg

SEQ ID NO: 183995 - DNA, 25 bp, Saccharomyces pastorianus
ttctcttttttacctcaccagagga

SEQ ID NO: 183996 - DNA, 25 bp, Saccharomyces pastorianus
aatgagtggagttttccgtgtcctg

SEQ ID NO: 183997 - DNA, 25 bp, Saccharomyces pastorianus
tataatgagtggagttttccgtgtc

SEQ ID NO: 183998 - DNA, 25 bp, Saccharomyces pastorianus
tgagtggagttttccgtgtcctgga

SEQ ID NO: 183999 - DNA, 25 bp, Saccharomyces pastorianus
atgagtggagttttccgtgtcctgg

SEQ ID NO: 184000 - DNA, 25 bp, Saccharomyces pastorianus
cttgaaaacaaggacgttcagaatt

SEQ ID NO: 184001 - DNA, 25 bp, Saccharomyces pastorianus
tgatatggatagcaactctcgaaat

SEQ ID NO: 184002 - DNA, 25 bp, Saccharomyces pastorianus
caaggacgttcagaattgttagatt

SEQ ID NO: 184003 - DNA, 25 bp, Saccharomyces pastorianus
ggacgttcagaattgttagattatt

SEQ ID NO: 184004 - DNA, 25 bp, Saccharomyces pastorianus
actctcgaaattacttgaaaacaag

SEQ ID NO: 184005 - DNA, 25 bp, Saccharomyces pastorianus
gcaactctcgaaattacttgaaaac

SEQ ID NO: 184006 - DNA, 25 bp, Saccharomyces pastorianus
gatagcaactctcgaaattacttga

SEQ ID NO: 184007 - DNA, 25 bp, Saccharomyces pastorianus
tatggatagcaactctcgaaattac

SEQ ID NO: 184008 - DNA, 25 bp, Saccharomyces pastorianus
tggatagcaactctcgaaattactt

SEQ ID NO: 184009 - DNA, 25 bp, Saccharomyces pastorianus
tagcaactctcgaaattacttgaaa

SEQ ID NO: 184010 - DNA, 25 bp, Saccharomyces pastorianus
gatatggatagcaactctcgaaatt

SEQ ID NO: 184011 - DNA, 25 bp, Saccharomyces pastorianus
cggaagaagcatttctatctcttga

SEQ ID NO: 184012 - DNA, 25 bp, Saccharomyces pastorianus
gcttccgcggaagaagcatttctat

SEQ ID NO: 184013 - DNA, 25 bp, Saccharomyces pastorianus
ccgcggaagaagcatttctatctct

SEQ ID NO: 184014 - DNA, 25 bp, Saccharomyces pastorianus
cgcggaagaagcatttctatctctt

SEQ ID NO: 184015 - DNA, 25 bp, Saccharomyces pastorianus
taagcccatattcagtctgctctaa

SEQ ID NO: 184016 - DNA, 25 bp, Saccharomyces pastorianus
atctcttgaaatccgtacaagatat

SEQ ID NO: 184017 - DNA, 25 bp, Saccharomyces pastorianus
tatctcttgaaatccgtacaagata

SEQ ID NO: 184018 - DNA, 25 bp, Saccharomyces pastorianus
ttccgcggaagaagcatttctatct

SEQ ID NO: 184019 - DNA, 25 bp, Saccharomyces pastorianus
ctaagcccatattcagtctgctcta

SEQ ID NO: 184020 - DNA, 25 bp, Saccharomyces pastorianus
tccgcggaagaagcatttctatctc

SEQ ID NO: 184021 - DNA, 25 bp, Saccharomyces pastorianus
cttccgcggaagaagcatttctatc

SEQ ID NO: 184022 - DNA, 25 bp, Saccharomyces pastorianus
agcctgggaacgtagattcatgcaa

SEQ ID NO: 184023 - DNA, 25 bp, Saccharomyces pastorianus
ttgggcctctcttcgcaaaataacg

SEQ ID NO: 184024 - DNA, 25 bp, Saccharomyces pastorianus
ctgttctcatgggtcagcctgggaa

SEQ ID NO: 184025 - DNA, 25 bp, Saccharomyces pastorianus
gacctttgccagttgaaatctttta

SEQ ID NO: 184026 - DNA, 25 bp, Saccharomyces pastorianus
tttgctgacactaccgacaataccg

SEQ ID NO: 184027 - DNA, 25 bp, Saccharomyces pastorianus
caagagttaaagtcgtacctgcacg

SEQ ID NO: 184028 - DNA, 25 bp, Saccharomyces pastorianus
atgacgttgacgtgtttgctgacac

SEQ ID NO: 184029 - DNA, 25 bp, Saccharomyces pastorianus
ttcaagtatccattgcctaagccaa

SEQ ID NO: 184030 - DNA, 25 bp, Saccharomyces pastorianus
taccgccctcttgaattattcgcaa

SEQ ID NO: 184031 - DNA, 25 bp, Saccharomyces pastorianus
gaaagacatgttgggcctctcttcg

SEQ ID NO: 184032 - DNA, 25 bp, Saccharomyces pastorianus
ttggcagttcctaagctattttttg

SEQ ID NO: 184033 - DNA, 25 bp, Saccharomyces pastorianus
gatgtttttcgttcgccaagtcaat

SEQ ID NO: 184034 - DNA, 25 bp, Saccharomyces pastorianus
ggtaacttgcagtatcttcttcgct

SEQ ID NO: 184035 - DNA, 25 bp, Saccharomyces pastorianus
tagaggttccttagccactgttatg

SEQ ID NO: 184036 - DNA, 25 bp, Saccharomyces pastorianus
caatcgctaaccctttcaattttgg

SEQ ID NO: 184037 - DNA, 25 bp, Saccharomyces pastorianus
agttcctggtgctattctgctaata

SEQ ID NO: 184038 - DNA, 25 bp, Saccharomyces pastorianus
ttcttcgctgcattgggtttcctat

SEQ ID NO: 184039 - DNA, 25 bp, Saccharomyces pastorianus
gatattgactccacttctagttcct

SEQ ID NO: 184040 - DNA, 25 bp, Saccharomyces pastorianus
gtcatctgttgttatccattcgcta

SEQ ID NO: 184041 - DNA, 25 bp, Saccharomyces pastorianus
gtcggctcttatacatctatgggca

SEQ ID NO: 184042 - DNA, 25 bp, Saccharomyces pastorianus
ccattcgctattgcgcgcactgaaa

SEQ ID NO: 184043 - DNA, 25 bp, Saccharomyces pastorianus
attattcgggtttgtcggctcttat

SEQ ID NO: 184044 - DNA, 25 bp, Saccharomyces pastorianus
gaaaccgtactataagctttatagt

SEQ ID NO: 184045 - DNA, 25 bp, Saccharomyces pastorianus
gaatggctctctggacgtgacaaga

SEQ ID NO: 184046 - DNA, 25 bp, Saccharomyces pastorianus
aatgcatacttattgtactgtgaaa

SEQ ID NO: 184047 - DNA, 25 bp, Saccharomyces pastorianus
aaaagtagctgattctaaaggaggt

SEQ ID NO: 184048 - DNA, 25 bp, Saccharomyces pastorianus
gaaaggattaggcagaatggctctc

SEQ ID NO: 184049 - DNA, 25 bp, Saccharomyces pastorianus
aagctttatagtgaggacagagaaa

SEQ ID NO: 184050 - DNA, 25 bp, Saccharomyces pastorianus
agaggcccacaaatgcatacttatt

SEQ ID NO: 184051 - DNA, 25 bp, Saccharomyces pastorianus
ggatcatctacaaaagtagctgatt

SEQ ID NO: 184052 - DNA, 25 bp, Saccharomyces pastorianus
aacgaggaaggatcatctacaaaag

SEQ ID NO: 184053 - DNA, 25 bp, Saccharomyces pastorianus
tctggcagaaggttggaaaaatctt

SEQ ID NO: 184054 - DNA, 25 bp, Saccharomyces pastorianus
ggacgtgacaagagatctggcagaa

SEQ ID NO: 184055 - DNA, 25 bp, Saccharomyces pastorianus
cagccgctaaaaagacttccacttc

SEQ ID NO: 184056 - DNA, 25 bp, Saccharomyces pastorianus
ccagccgctaaaaagacttccactt

SEQ ID NO: 184057 - DNA, 25 bp, Saccharomyces pastorianus
gccgctaaaaagacttccacttcca

SEQ ID NO: 184058 - DNA, 25 bp, Saccharomyces pastorianus
gctaaaaagacttccacttccactg

SEQ ID NO: 184059 - DNA, 25 bp, Saccharomyces pastorianus
taaaaagacttccacttccactgat

SEQ ID NO: 184060 - DNA, 25 bp, Saccharomyces pastorianus
gctgaaaagaaaccagccgctaaaa

SEQ ID NO: 184061 - DNA, 25 bp, Saccharomyces pastorianus
ccagctgaaaagaaaccagccgcta

SEQ ID NO: 184062 - DNA, 25 bp, Saccharomyces pastorianus
aaaaagacttccacttccactgatg

SEQ ID NO: 184063 - DNA, 25 bp, Saccharomyces pastorianus
aaaagacttccacttccactgatgg

SEQ ID NO: 184064 - DNA, 25 bp, Saccharomyces pastorianus
cgctaaaaagacttccacttccact

SEQ ID NO: 184065 - DNA, 25 bp, Saccharomyces pastorianus
ctaaaaagacttccacttccactga

SEQ ID NO: 184066 - DNA, 25 bp, Saccharomyces pastorianus
accttcacttctactgatatgtcat

SEQ ID NO: 184067 - DNA, 25 bp, Saccharomyces pastorianus
acttctactgatatgtcatacgcac

SEQ ID NO: 184068 - DNA, 25 bp, Saccharomyces pastorianus
ccttcacttctactgatatgtcata

SEQ ID NO: 184069 - DNA, 25 bp, Saccharomyces pastorianus
gttaccctactttcatattccacac

SEQ ID NO: 184070 - DNA, 25 bp, Saccharomyces pastorianus
ctcaccttcacttctactgatatgt

SEQ ID NO: 184071 - DNA, 25 bp, Saccharomyces pastorianus
cactctcaagttaccctactttcat

SEQ ID NO: 184072 - DNA, 25 bp, Saccharomyces pastorianus
ttcacttctactgatatgtcatacg

SEQ ID NO: 184073 - DNA, 25 bp, Saccharomyces pastorianus
agttaccctactttcatattccaca

SEQ ID NO: 184074 - DNA, 25 bp, Saccharomyces pastorianus
cacttctactgatatgtcatacgca

SEQ ID NO: 184075 - DNA, 25 bp, Saccharomyces pastorianus
ttctactgatatgtcatacgcacac

SEQ ID NO: 184076 - DNA, 25 bp, Saccharomyces pastorianus
tcacttctactgatatgtcatacgc

SEQ ID NO: 184077 - DNA, 25 bp, Saccharomyces pastorianus
aactctaccggtgcagaattaagat

SEQ ID NO: 184078 - DNA, 25 bp, Saccharomyces pastorianus
aggtggctactgaaaaggatttcct

SEQ ID NO: 184079 - DNA, 25 bp, Saccharomyces pastorianus
cagactgtgtccaaactctaccggt

SEQ ID NO: 184080 - DNA, 25 bp, Saccharomyces pastorianus
gtggcatcagatgggaacttatctc

SEQ ID NO: 184081 - DNA, 25 bp, Saccharomyces pastorianus
gaacttatctccagactgtgtccaa

SEQ ID NO: 184082 - DNA, 25 bp, Saccharomyces pastorianus
agatctgtttgcacagaagccggta

SEQ ID NO: 184083 - DNA, 25 bp, Saccharomyces pastorianus
gccggtatgtttgccattagagcaa

SEQ ID NO: 184084 - DNA, 25 bp, Saccharomyces pastorianus
aaggatttcctgaaggctgttgata

SEQ ID NO: 184085 - DNA, 25 bp, Saccharomyces pastorianus
tcctgaaggctgttgataaagttat

SEQ ID NO: 184086 - DNA, 25 bp, Saccharomyces pastorianus
cagaagccggtatgtttgccattag

SEQ ID NO: 184087 - DNA, 25 bp, Saccharomyces pastorianus
gttattagcggatacaagaagttta

SEQ ID NO: 184088 - DNA, 25 bp, Saccharomyces pastorianus
cgtgtcggttgttccatattaacaa

SEQ ID NO: 184089 - DNA, 25 bp, Saccharomyces pastorianus
actgaaggcgtgtgaactctcctat

SEQ ID NO: 184090 - DNA, 25 bp, Saccharomyces pastorianus
gaaggcgtgtgaactctcctatagc

SEQ ID NO: 184091 - DNA, 25 bp, Saccharomyces pastorianus
atagcccctattctcacttccgtgt

SEQ ID NO: 184092 - DNA, 25 bp, Saccharomyces pastorianus
aacgatgttatcttcactggtgcta

SEQ ID NO: 184093 - DNA, 25 bp, Saccharomyces pastorianus
gtcggttgttccatattaacaaata

SEQ ID NO: 184094 - DNA, 25 bp, Saccharomyces pastorianus
tgtgaactctcctatagcccctatt

SEQ ID NO: 184095 - DNA, 25 bp, Saccharomyces pastorianus
gttatcttcactggtgctaatgtcg

SEQ ID NO: 184096 - DNA, 25 bp, Saccharomyces pastorianus
gctacagtaattgtatatgtgcaga

SEQ ID NO: 184097 - DNA, 25 bp, Saccharomyces pastorianus
ggcactgaaggcgtgtgaactctcc

SEQ ID NO: 184098 - DNA, 25 bp, Saccharomyces pastorianus
gaagccttaaaaagggcggcactga

SEQ ID NO: 184099 - DNA, 25 bp, Saccharomyces pastorianus
gtaaacttgccagacttcaattcta

SEQ ID NO: 184100 - DNA, 25 bp, Saccharomyces pastorianus
tgatggtggcggagataaccatgaa

SEQ ID NO: 184101 - DNA, 25 bp, Saccharomyces pastorianus
gaaatctctagatgattctacagag

SEQ ID NO: 184102 - DNA, 25 bp, Saccharomyces pastorianus
ggcgccactatggagaatctgtcct

SEQ ID NO: 184103 - DNA, 25 bp, Saccharomyces pastorianus
gaatctgtccttaaacgaccgtgat

SEQ ID NO: 184104 - DNA, 25 bp, Saccharomyces pastorianus
taccaattgaagaggctgagaaact

SEQ ID NO: 184105 - DNA, 25 bp, Saccharomyces pastorianus
gtccttaaacgaccgtgatggtggc

SEQ ID NO: 184106 - DNA, 25 bp, Saccharomyces pastorianus
aagaggctgagaaacttttggaagt

SEQ ID NO: 184107 - DNA, 25 bp, Saccharomyces pastorianus
gagacgattcaattgaaatctctag

SEQ ID NO: 184108 - DNA, 25 bp, Saccharomyces pastorianus
gccagacttcaattctaaagatcca

SEQ ID NO: 184109 - DNA, 25 bp, Saccharomyces pastorianus
gaacaggaccatgaaggcgccacta

SEQ ID NO: 184110 - DNA, 25 bp, Saccharomyces pastorianus
aaggcccgttatcaagagtgccgcc

SEQ ID NO: 184111 - DNA, 25 bp, Saccharomyces pastorianus
gttctgctcttaattattgccatga

SEQ ID NO: 184112 - DNA, 25 bp, Saccharomyces pastorianus
atgagcacggcatctaccactgtga

SEQ ID NO: 184113 - DNA, 25 bp, Saccharomyces pastorianus
agaagataacgttttcctatgcgat

SEQ ID NO: 184114 - DNA, 25 bp, Saccharomyces pastorianus
aaatcctaccgctttccgatgactt

SEQ ID NO: 184115 - DNA, 25 bp, Saccharomyces pastorianus
gattttggtctatccactacttcca

SEQ ID NO: 184116 - DNA, 25 bp, Saccharomyces pastorianus
attggtagctcgtattatatgcccc

SEQ ID NO: 184117 - DNA, 25 bp, Saccharomyces pastorianus
gaaatccctggctgaaggctgacaa

SEQ ID NO: 184118 - DNA, 25 bp, Saccharomyces pastorianus
aggtttgtccctcatgtaatggcga

SEQ ID NO: 184119 - DNA, 25 bp, Saccharomyces pastorianus
gcctctttccaggtctgtttatgaa

SEQ ID NO: 184120 - DNA, 25 bp, Saccharomyces pastorianus
gttagttctatgacaagcttcacca

SEQ ID NO: 184121 - DNA, 25 bp, Saccharomyces pastorianus
ggagaggtcctgcatatcaacgtca

SEQ ID NO: 184122 - DNA, 25 bp, Saccharomyces pastorianus
gaaagggagaggtcctgcatatcaa

SEQ ID NO: 184123 - DNA, 25 bp, Saccharomyces pastorianus
gggagaggtcctgcatatcaacgtc

SEQ ID NO: 184124 - DNA, 25 bp, Saccharomyces pastorianus
aacgagaaagggagaggtcctgcat

SEQ ID NO: 184125 - DNA, 25 bp, Saccharomyces pastorianus
aagggagaggtcctgcatatcaacg

SEQ ID NO: 184126 - DNA, 25 bp, Saccharomyces pastorianus
gagaggtcctgcatatcaacgtcat

SEQ ID NO: 184127 - DNA, 25 bp, Saccharomyces pastorianus
gagatgttaaaaaaggctctttggt

SEQ ID NO: 184128 - DNA, 25 bp, Saccharomyces pastorianus
agaggtcctgcatatcaacgtcatt

SEQ ID NO: 184129 - DNA, 25 bp, Saccharomyces pastorianus
ccgagatgttaaaaaaggctctttg

SEQ ID NO: 184130 - DNA, 25 bp, Saccharomyces pastorianus
aaagggagaggtcctgcatatcaac

SEQ ID NO: 184131 - DNA, 25 bp, Saccharomyces pastorianus
gagaaagggagaggtcctgcatatc

SEQ ID NO: 184132 - DNA, 25 bp, Saccharomyces pastorianus
aaggagaggagcttcttccagggaa

SEQ ID NO: 184133 - DNA, 25 bp, Saccharomyces pastorianus
ttcttccagggaaactgaggctaag

SEQ ID NO: 184134 - DNA, 25 bp, Saccharomyces pastorianus
cctcaaggagaggagcttcttccag

SEQ ID NO: 184135 - DNA, 25 bp, Saccharomyces pastorianus
ccagggaaactgaggctaagaagaa

SEQ ID NO: 184136 - DNA, 25 bp, Saccharomyces pastorianus
gagaggagcttcttccagggaaact

SEQ ID NO: 184137 - DNA, 25 bp, Saccharomyces pastorianus
gcttcttccagggaaactgaggcta

SEQ ID NO: 184138 - DNA, 25 bp, Saccharomyces pastorianus
gaggagcttcttccagggaaactga

SEQ ID NO: 184139 - DNA, 25 bp, Saccharomyces pastorianus
ttgggtaccaccctcaaggagagga

SEQ ID NO: 184140 - DNA, 25 bp, Saccharomyces pastorianus
atcttgggtaccaccctcaaggaga

SEQ ID NO: 184141 - DNA, 25 bp, Saccharomyces pastorianus
gtaccaccctcaaggagaggagctt

SEQ ID NO: 184142 - DNA, 25 bp, Saccharomyces pastorianus
gagcttcttccagggaaactgaggc

SEQ ID NO: 184143 - DNA, 25 bp, Saccharomyces pastorianus
tttttcctcccacggcaaactgcaa

SEQ ID NO: 184144 - DNA, 25 bp, Saccharomyces pastorianus
gcaagagcagatcgcttcatacgtt

SEQ ID NO: 184145 - DNA, 25 bp, Saccharomyces pastorianus
tcccacggcaaactgcaagagcaga

SEQ ID NO: 184146 - DNA, 25 bp, Saccharomyces pastorianus
taaaggtgttagtcatctcgtttct

SEQ ID NO: 184147 - DNA, 25 bp, Saccharomyces pastorianus
agctggaagttggaaactcgcgcaa

SEQ ID NO: 184148 - DNA, 25 bp, Saccharomyces pastorianus
gtcatctcgtttctttttctaatgg

SEQ ID NO: 184149 - DNA, 25 bp, Saccharomyces pastorianus
agatcgcttcatacgttagctggaa

SEQ ID NO: 184150 - DNA, 25 bp, Saccharomyces pastorianus
ttttctaatggtcgcctttttgcct

SEQ ID NO: 184151 - DNA, 25 bp, Saccharomyces pastorianus
cccgcgccttctcgaagataaaggt

SEQ ID NO: 184152 - DNA, 25 bp, Saccharomyces pastorianus
tctaatggtcgcctttttgcctttt

SEQ ID NO: 184153 - DNA, 25 bp, Saccharomyces pastorianus
gtgttagtcatctcgtttctttttc

SEQ ID NO: 184154 - DNA, 25 bp, Saccharomyces pastorianus
attattcttcactctgttttacatg

SEQ ID NO: 184155 - DNA, 25 bp, Saccharomyces pastorianus
tattcttcactctgttttacatgtt

SEQ ID NO: 184156 - DNA, 25 bp, Saccharomyces pastorianus
cgattattcttcactctgttttaca

SEQ ID NO: 184157 - DNA, 25 bp, Saccharomyces pastorianus
attcttcactctgttttacatgttt

SEQ ID NO: 184158 - DNA, 25 bp, Saccharomyces pastorianus
gattattcttcactctgttttacat

SEQ ID NO: 184159 - DNA, 25 bp, Saccharomyces pastorianus
ctctgttttacatgtttcattatcc

SEQ ID NO: 184160 - DNA, 25 bp, Saccharomyces pastorianus
tcttcactctgttttacatgtttca

SEQ ID NO: 184161 - DNA, 25 bp, Saccharomyces pastorianus
ttcactctgttttacatgtttcatt

SEQ ID NO: 184162 - DNA, 25 bp, Saccharomyces pastorianus
acgattattcttcactctgttttac

SEQ ID NO: 184163 - DNA, 25 bp, Saccharomyces pastorianus
ttcttcactctgttttacatgtttc

SEQ ID NO: 184164 - DNA, 25 bp, Saccharomyces pastorianus
ttattcttcactctgttttacatgt

SEQ ID NO: 184165 - DNA, 25 bp, Saccharomyces pastorianus
tgatggattattcaagtacactacc

SEQ ID NO: 184166 - DNA, 25 bp, Saccharomyces pastorianus
gttggatgatggattattcaagtac

SEQ ID NO: 184167 - DNA, 25 bp, Saccharomyces pastorianus
attcaagtacactaccaaggattgt

SEQ ID NO: 184168 - DNA, 25 bp, Saccharomyces pastorianus
ggattattcaagtacactaccaagg

SEQ ID NO: 184169 - DNA, 25 bp, Saccharomyces pastorianus
ttattcaagtacactaccaaggatt

SEQ ID NO: 184170 - DNA, 25 bp, Saccharomyces pastorianus
caagtacactaccaaggattgtatc

SEQ ID NO: 184171 - DNA, 25 bp, Saccharomyces pastorianus
ggatgatggattattcaagtacact

SEQ ID NO: 184172 - DNA, 25 bp, Saccharomyces pastorianus
gatggattattcaagtacactacca

SEQ ID NO: 184173 - DNA, 25 bp, Saccharomyces pastorianus
gattattcaagtacactaccaagga

SEQ ID NO: 184174 - DNA, 25 bp, Saccharomyces pastorianus
tattcaagtacactaccaaggattg

SEQ ID NO: 184175 - DNA, 25 bp, Saccharomyces pastorianus
tcaagtacactaccaaggattgtat

SEQ ID NO: 184176 - DNA, 25 bp, Saccharomyces pastorianus
tacgttactagtatattatcatata

SEQ ID NO: 184177 - DNA, 25 bp, Saccharomyces pastorianus
ttacgttactagtatattatcatat

SEQ ID NO: 184178 - DNA, 25 bp, Saccharomyces pastorianus
tagtatttacgttactagtatatta

SEQ ID NO: 184179 - DNA, 25 bp, Saccharomyces pastorianus
atttacgttactagtatattatcat

SEQ ID NO: 184180 - DNA, 25 bp, Saccharomyces pastorianus
cgttactagtatattatcatatacg

SEQ ID NO: 184181 - DNA, 25 bp, Saccharomyces pastorianus
tatttacgttactagtatattatca

SEQ ID NO: 184182 - DNA, 25 bp, Saccharomyces pastorianus
tttacgttactagtatattatcata

SEQ ID NO: 184183 - DNA, 25 bp, Saccharomyces pastorianus
acgttactagtatattatcatatac

SEQ ID NO: 184184 - DNA, 25 bp, Saccharomyces pastorianus
agtatttacgttactagtatattat

SEQ ID NO: 184185 - DNA, 25 bp, Saccharomyces pastorianus
ctatcatctactaactagtatttac

SEQ ID NO: 184186 - DNA, 25 bp, Saccharomyces pastorianus
gtatttacgttactagtatattatc

SEQ ID NO: 184187 - DNA, 25 bp, Saccharomyces pastorianus
aacaaccttgttccggaatcaatag

SEQ ID NO: 184188 - DNA, 25 bp, Saccharomyces pastorianus
gattttcttggttgcggtgatctaa

SEQ ID NO: 184189 - DNA, 25 bp, Saccharomyces pastorianus
aacagactttgtttgctggtccctt

SEQ ID NO: 184190 - DNA, 25 bp, Saccharomyces pastorianus
tgcagtagctttcccttggaacaaa

SEQ ID NO: 184191 - DNA, 25 bp, Saccharomyces pastorianus
gatccaaattatccggttgttcacg

SEQ ID NO: 184192 - DNA, 25 bp, Saccharomyces pastorianus
tgctggtcccttgtactataattat

SEQ ID NO: 184193 - DNA, 25 bp, Saccharomyces pastorianus
gaagccatggatctattaagcacta

SEQ ID NO: 184194 - DNA, 25 bp, Saccharomyces pastorianus
attgctggtcagagaacttttcctg

SEQ ID NO: 184195 - DNA, 25 bp, Saccharomyces pastorianus
ttgttcacgactacacgatgggcca

SEQ ID NO: 184196 - DNA, 25 bp, Saccharomyces pastorianus
ctagacaacaatccggtgcgactat

SEQ ID NO: 184197 - DNA, 25 bp, Saccharomyces pastorianus
taggaacttcgatcctgaagccatg

SEQ ID NO: 184198 - DNA, 25 bp, Saccharomyces pastorianus
atcttattcgttggcgtgggacaaa

SEQ ID NO: 184199 - DNA, 25 bp, Saccharomyces pastorianus
aaacctataccgatttgaggacatt

SEQ ID NO: 184200 - DNA, 25 bp, Saccharomyces pastorianus
gggattcctatcttattcgttggcg

SEQ ID NO: 184201 - DNA, 25 bp, Saccharomyces pastorianus
ctatcttattcgttggcgtgggaca

SEQ ID NO: 184202 - DNA, 25 bp, Saccharomyces pastorianus
ttcctatcttattcgttggcgtggg

SEQ ID NO: 184203 - DNA, 25 bp, Saccharomyces pastorianus
attcgttggcgtgggacaaacctat

SEQ ID NO: 184204 - DNA, 25 bp, Saccharomyces pastorianus
gggacaaacctataccgatttgagg

SEQ ID NO: 184205 - DNA, 25 bp, Saccharomyces pastorianus
gattcctatcttattcgttggcgtg

SEQ ID NO: 184206 - DNA, 25 bp, Saccharomyces pastorianus
gcgtgggacaaacctataccgattt

SEQ ID NO: 184207 - DNA, 25 bp, Saccharomyces pastorianus
ttattcgttggcgtgggacaaacct

SEQ ID NO: 184208 - DNA, 25 bp, Saccharomyces pastorianus
ataccgatttgaggacattaagcgt

SEQ ID NO: 184209 - DNA, 25 bp, Saccharomyces pastorianus
aaccaagacattttctaccaatgtt

SEQ ID NO: 184210 - DNA, 25 bp, Saccharomyces pastorianus
gtaaccaagacattttctaccaatg

SEQ ID NO: 184211 - DNA, 25 bp, Saccharomyces pastorianus
tggccattggtaaccaagacatttt

SEQ ID NO: 184212 - DNA, 25 bp, Saccharomyces pastorianus
tacgatgaacacattgggtctcaat

SEQ ID NO: 184213 - DNA, 25 bp, Saccharomyces pastorianus
aacttctacaatctgtacgatgaac

SEQ ID NO: 184214 - DNA, 25 bp, Saccharomyces pastorianus
tgtacgatgaacacattgggtctca

SEQ ID NO: 184215 - DNA, 25 bp, Saccharomyces pastorianus
cggtaacttctacaatctgtacgat

SEQ ID NO: 184216 - DNA, 25 bp, Saccharomyces pastorianus
tctacaatctgtacgatgaacacat

SEQ ID NO: 184217 - DNA, 25 bp, Saccharomyces pastorianus
cattggtaaccaagacattttctac

SEQ ID NO: 184218 - DNA, 25 bp, Saccharomyces pastorianus
gtaacttctacaatctgtacgatga

SEQ ID NO: 184219 - DNA, 25 bp, Saccharomyces pastorianus
atctgtacgatgaacacattgggtc

SEQ ID NO: 184220 - DNA, 25 bp, Saccharomyces pastorianus
gacagtttcccgtatcttatgtcat

SEQ ID NO: 184221 - DNA, 25 bp, Saccharomyces pastorianus
agtttcccgtatcttatgtcatcgt

SEQ ID NO: 184222 - DNA, 25 bp, Saccharomyces pastorianus
ttcgatgacagtttcccgtatctta

SEQ ID NO: 184223 - DNA, 25 bp, Saccharomyces pastorianus
tcgatgacagtttcccgtatcttat

SEQ ID NO: 184224 - DNA, 25 bp, Saccharomyces pastorianus
gtttcccgtatcttatgtcatcgtc

SEQ ID NO: 184225 - DNA, 25 bp, Saccharomyces pastorianus
cgatgacagtttcccgtatcttatg

SEQ ID NO: 184226 - DNA, 25 bp, Saccharomyces pastorianus
tgacagtttcccgtatcttatgtca

SEQ ID NO: 184227 - DNA, 25 bp, Saccharomyces pastorianus
gtatcttatgtcatcgtctaacacc

SEQ ID NO: 184228 - DNA, 25 bp, Saccharomyces pastorianus
acagtttcccgtatcttatgtcatc

SEQ ID NO: 184229 - DNA, 25 bp, Saccharomyces pastorianus
cagtttcccgtatcttatgtcatcg

SEQ ID NO: 184230 - DNA, 25 bp, Saccharomyces pastorianus
tttcccgtatcttatgtcatcgtct

SEQ ID NO: 184231 - DNA, 25 bp, Saccharomyces pastorianus
ggatgccttagaggattcggaagct

SEQ ID NO: 184232 - DNA, 25 bp, Saccharomyces pastorianus
ggattcggaagctgaagaagattca

SEQ ID NO: 184233 - DNA, 25 bp, Saccharomyces pastorianus
ggattcggaagctgaagcagattcg

SEQ ID NO: 184234 - DNA, 25 bp, Saccharomyces pastorianus
tcttggcagaagaggaagcggcagc

SEQ ID NO: 184235 - DNA, 25 bp, Saccharomyces pastorianus
agcagcagcggaggaggatgcctta

SEQ ID NO: 184236 - DNA, 25 bp, Saccharomyces pastorianus
ccttagaggattcggaagctgaaga

SEQ ID NO: 184237 - DNA, 25 bp, Saccharomyces pastorianus
cttggaagatgcagaagaggcagca

SEQ ID NO: 184238 - DNA, 25 bp, Saccharomyces pastorianus
gaagcggcagcagaggaagaggaag

SEQ ID NO: 184239 - DNA, 25 bp, Saccharomyces pastorianus
aagaggcagagctcttggcagaaga

SEQ ID NO: 184240 - DNA, 25 bp, Saccharomyces pastorianus
gaagatgccttggaagatgcagaag

SEQ ID NO: 184241 - DNA, 25 bp, Saccharomyces pastorianus
agcagaagaggcagagctcttggca

SEQ ID NO: 184242 - DNA, 25 bp, Saccharomyces pastorianus
agacgaatcggttctcgactctgtc

SEQ ID NO: 184243 - DNA, 25 bp, Saccharomyces pastorianus
tacctagaggcgctgttgcagaatt

SEQ ID NO: 184244 - DNA, 25 bp, Saccharomyces pastorianus
gatgatgtttcaaccgtattccaga

SEQ ID NO: 184245 - DNA, 25 bp, Saccharomyces pastorianus
actacagttagtgcgtttggatata

SEQ ID NO: 184246 - DNA, 25 bp, Saccharomyces pastorianus
gactctgtcatcaaaacatgggcgt

SEQ ID NO: 184247 - DNA, 25 bp, Saccharomyces pastorianus
gatttctgaattacctagaggcgct

SEQ ID NO: 184248 - DNA, 25 bp, Saccharomyces pastorianus
cagcccagattaccctctattataa

SEQ ID NO: 184249 - DNA, 25 bp, Saccharomyces pastorianus
aagaaatcatcactttccaccatca

SEQ ID NO: 184250 - DNA, 25 bp, Saccharomyces pastorianus
gtggagaaactttttgattaccgtg

SEQ ID NO: 184251 - DNA, 25 bp, Saccharomyces pastorianus
aacacctctcactgaccaaatagtt

SEQ ID NO: 184252 - DNA, 25 bp, Saccharomyces pastorianus
acatgggcgttttattgttcaaata

SEQ ID NO: 184253 - DNA, 25 bp, Saccharomyces pastorianus
tattgttttatggcactcatgtgta

SEQ ID NO: 184254 - DNA, 25 bp, Saccharomyces pastorianus
ttgttttatggcactcatgtgtatt

SEQ ID NO: 184255 - DNA, 25 bp, Saccharomyces pastorianus
gtattgttttatggcactcatgtgt

SEQ ID NO: 184256 - DNA, 25 bp, Saccharomyces pastorianus
tggagtattgttttatggcactcat

SEQ ID NO: 184257 - DNA, 25 bp, Saccharomyces pastorianus
attgttttatggcactcatgtgtat

SEQ ID NO: 184258 - DNA, 25 bp, Saccharomyces pastorianus
ggagtattgttttatggcactcatg

SEQ ID NO: 184259 - DNA, 25 bp, Saccharomyces pastorianus
agtattgttttatggcactcatgtg

SEQ ID NO: 184260 - DNA, 25 bp, Saccharomyces pastorianus
tgtggagtattgttttatggcactc

SEQ ID NO: 184261 - DNA, 25 bp, Saccharomyces pastorianus
atggagatgctcttgtttctgaacg

SEQ ID NO: 184262 - DNA, 25 bp, Saccharomyces pastorianus
gtggagtattgttttatggcactca

SEQ ID NO: 184263 - DNA, 25 bp, Saccharomyces pastorianus
gagtattgttttatggcactcatgt

SEQ ID NO: 184264 - DNA, 25 bp, Saccharomyces pastorianus
aagcctcttcatctttaagagcgaa

SEQ ID NO: 184265 - DNA, 25 bp, Saccharomyces pastorianus
aactttcgacgggtgcaccaaatga

SEQ ID NO: 184266 - DNA, 25 bp, Saccharomyces pastorianus
ggattgaaagcctcttcatctttaa

SEQ ID NO: 184267 - DNA, 25 bp, Saccharomyces pastorianus
gacgggtgcaccaaatgatcaaaac

SEQ ID NO: 184268 - DNA, 25 bp, Saccharomyces pastorianus
gtactaacttcgctttgtgttgcaa

SEQ ID NO: 184269 - DNA, 25 bp, Saccharomyces pastorianus
tttgtgttgcaatccctaccacgct

SEQ ID NO: 184270 - DNA, 25 bp, Saccharomyces pastorianus
tacattgcctattttttattccaca

SEQ ID NO: 184271 - DNA, 25 bp, Saccharomyces pastorianus
accacgctcgatctggtagagacaa

SEQ ID NO: 184272 - DNA, 25 bp, Saccharomyces pastorianus
gatatatactataccacttacattg

SEQ ID NO: 184273 - DNA, 25 bp, Saccharomyces pastorianus
tggaagactaactaaactttcgacg

SEQ ID NO: 184274 - DNA, 25 bp, Saccharomyces pastorianus
gatttgataactcatacattgccta

SEQ ID NO: 184275 - DNA, 25 bp, Saccharomyces pastorianus
tcaggtggcatcgatttggcctttc

SEQ ID NO: 184276 - DNA, 25 bp, Saccharomyces pastorianus
tgggctctaccattagcaatccaga

SEQ ID NO: 184277 - DNA, 25 bp, Saccharomyces pastorianus
gacgttacggttcctctattggata

SEQ ID NO: 184278 - DNA, 25 bp, Saccharomyces pastorianus
atttggcctttcctcaccatgataa

SEQ ID NO: 184279 - DNA, 25 bp, Saccharomyces pastorianus
caccgttacaactcgtgtttctgag

SEQ ID NO: 184280 - DNA, 25 bp, Saccharomyces pastorianus
atggccagtgatatcctaggctcta

SEQ ID NO: 184281 - DNA, 25 bp, Saccharomyces pastorianus
gactatgctaaatgccagccatgga

SEQ ID NO: 184282 - DNA, 25 bp, Saccharomyces pastorianus
taggctctaacatcgatattcattc

SEQ ID NO: 184283 - DNA, 25 bp, Saccharomyces pastorianus
tgaagggtccttaagcaactttgct

SEQ ID NO: 184284 - DNA, 25 bp, Saccharomyces pastorianus
ttccatggacgcagaagttgccttt

SEQ ID NO: 184285 - DNA, 25 bp, Saccharomyces pastorianus
aagcttccaaggcaggtgaacctga

SEQ ID NO: 184286 - DNA, 25 bp, Saccharomyces pastorianus
gagtcttcctagcattcatacacaa

SEQ ID NO: 184287 - DNA, 25 bp, Saccharomyces pastorianus
caagaaattcgcagacggtgttaat

SEQ ID NO: 184288 - DNA, 25 bp, Saccharomyces pastorianus
aagatgctgagaatgggccttcaag

SEQ ID NO: 184289 - DNA, 25 bp, Saccharomyces pastorianus
gaatttttgcactgaactcccatat

SEQ ID NO: 184290 - DNA, 25 bp, Saccharomyces pastorianus
gagacatttcgttagaatctatcca

SEQ ID NO: 184291 - DNA, 25 bp, Saccharomyces pastorianus
accccgcatctacgatttggagttt

SEQ ID NO: 184292 - DNA, 25 bp, Saccharomyces pastorianus
tagaggctcccgtagggtttgatgt

SEQ ID NO: 184293 - DNA, 25 bp, Saccharomyces pastorianus
ggatttctactgagtcttcctagca

SEQ ID NO: 184294 - DNA, 25 bp, Saccharomyces pastorianus
aatgatctggtaagtgtcccggatc

SEQ ID NO: 184295 - DNA, 25 bp, Saccharomyces pastorianus
agtgtcccggatcaatacggttgga

SEQ ID NO: 184296 - DNA, 25 bp, Saccharomyces pastorianus
actgcaagaagcgatgtgtgtatta

SEQ ID NO: 184297 - DNA, 25 bp, Saccharomyces pastorianus
aacgatgaacgtgaggagctgttta

SEQ ID NO: 184298 - DNA, 25 bp, Saccharomyces pastorianus
gaacgtcagaattttatagcggaaa

SEQ ID NO: 184299 - DNA, 25 bp, Saccharomyces pastorianus
taaaattgacgatttttcttccctg

SEQ ID NO: 184300 - DNA, 25 bp, Saccharomyces pastorianus
aacttgggtcaatttttgcaggcaa

SEQ ID NO: 184301 - DNA, 25 bp, Saccharomyces pastorianus
ttatcttcctgagacaatctggccc

SEQ ID NO: 184302 - DNA, 25 bp, Saccharomyces pastorianus
gaactacacagcgaagtttctgaaa

SEQ ID NO: 184303 - DNA, 25 bp, Saccharomyces pastorianus
aattcattgacacagcactttgata

SEQ ID NO: 184304 - DNA, 25 bp, Saccharomyces pastorianus
tttaaggtggtacaaggcgacgaca

SEQ ID NO: 184305 - DNA, 25 bp, Saccharomyces pastorianus
aacattttcaaaactctgcatgagg

SEQ ID NO: 184306 - DNA, 25 bp, Saccharomyces pastorianus
gaaagctacggtaacttagttctag

SEQ ID NO: 184307 - DNA, 25 bp, Saccharomyces pastorianus
gaatttagatgctcaggaccaggaa

SEQ ID NO: 184308 - DNA, 25 bp, Saccharomyces pastorianus
agcattccttttatctactttcggc

SEQ ID NO: 184309 - DNA, 25 bp, Saccharomyces pastorianus
gcttttcacttccaattcatttact

SEQ ID NO: 184310 - DNA, 25 bp, Saccharomyces pastorianus
gagactgggtgaaacattagctgat

SEQ ID NO: 184311 - DNA, 25 bp, Saccharomyces pastorianus
tctactttcggcatgttgacgttgt

SEQ ID NO: 184312 - DNA, 25 bp, Saccharomyces pastorianus
tagcgactgcaattggtatcattat

SEQ ID NO: 184313 - DNA, 25 bp, Saccharomyces pastorianus
attcatgctttgcttttcacttcca

SEQ ID NO: 184314 - DNA, 25 bp, Saccharomyces pastorianus
gggtaccctgttagcgactgcaatt

SEQ ID NO: 184315 - DNA, 25 bp, Saccharomyces pastorianus
aaaaggcaatccaccactgcattat

SEQ ID NO: 184316 - DNA, 25 bp, Saccharomyces pastorianus
taacccggttagcttctatgattac

SEQ ID NO: 184317 - DNA, 25 bp, Saccharomyces pastorianus
gggtcaatccttcgacagcaaattc

SEQ ID NO: 184318 - DNA, 25 bp, Saccharomyces pastorianus
gttacaaacctatgtttccatggaa

SEQ ID NO: 184319 - DNA, 25 bp, Saccharomyces pastorianus
ttcttttcaactgcgcaccatttaa

SEQ ID NO: 184320 - DNA, 25 bp, Saccharomyces pastorianus
ttactacgtcaacaatcaccgaaat

SEQ ID NO: 184321 - DNA, 25 bp, Saccharomyces pastorianus
aacaactgtatttactacgtcaaca

SEQ ID NO: 184322 - DNA, 25 bp, Saccharomyces pastorianus
caaaccatgcagtttcttttcaact

SEQ ID NO: 184323 - DNA, 25 bp, Saccharomyces pastorianus
cgcaccatttaagtggaagggtcct

SEQ ID NO: 184324 - DNA, 25 bp, Saccharomyces pastorianus
agcggaaaccgctttgaatactgct

SEQ ID NO: 184325 - DNA, 25 bp, Saccharomyces pastorianus
cactcggtcgatgtaacaactgtat

SEQ ID NO: 184326 - DNA, 25 bp, Saccharomyces pastorianus
taaccgtactttgtcactcggtcga

SEQ ID NO: 184327 - DNA, 25 bp, Saccharomyces pastorianus
ataacttcttgtgcgctgaacttta

SEQ ID NO: 184328 - DNA, 25 bp, Saccharomyces pastorianus
tactgctactaacataattcaaacc

SEQ ID NO: 184329 - DNA, 25 bp, Saccharomyces pastorianus
gtactttgtcactcggtcgatgtaa

SEQ ID NO: 184330 - DNA, 25 bp, Saccharomyces pastorianus
gatggtactactattgaagcgcaaa

SEQ ID NO: 184331 - DNA, 25 bp, Saccharomyces pastorianus
ttgcgcatttagaagaagaactcac

SEQ ID NO: 184332 - DNA, 25 bp, Saccharomyces pastorianus
gatgagacaggagcttgaacagtta

SEQ ID NO: 184333 - DNA, 25 bp, Saccharomyces pastorianus
gcaaccaagcagaagcacaaagcaa

SEQ ID NO: 184334 - DNA, 25 bp, Saccharomyces pastorianus
gcatcaaaatgcaagggaactgtta

SEQ ID NO: 184335 - DNA, 25 bp, Saccharomyces pastorianus
agaactcacgaaggaaatgggcggt

SEQ ID NO: 184336 - DNA, 25 bp, Saccharomyces pastorianus
aattgaggacaatttcacgcagcat

SEQ ID NO: 184337 - DNA, 25 bp, Saccharomyces pastorianus
acatccaacatgaacgtgagtctga

SEQ ID NO: 184338 - DNA, 25 bp, Saccharomyces pastorianus
tgttgcccataatacagatgcttgt

SEQ ID NO: 184339 - DNA, 25 bp, Saccharomyces pastorianus
gcgcaaattgatgcaaaggtcattt

SEQ ID NO: 184340 - DNA, 25 bp, Saccharomyces pastorianus
tggatcgatgttgcccataatacag

SEQ ID NO: 184341 - DNA, 25 bp, Saccharomyces pastorianus
tacgtttctagtgatctcttattga

SEQ ID NO: 184342 - DNA, 25 bp, Saccharomyces pastorianus
gaatccttcaacagcgatctttatt

SEQ ID NO: 184343 - DNA, 25 bp, Saccharomyces pastorianus
gctcacctcgtcacataataacagt

SEQ ID NO: 184344 - DNA, 25 bp, Saccharomyces pastorianus
aagaacaaatctgcttgcccaagtt

SEQ ID NO: 184345 - DNA, 25 bp, Saccharomyces pastorianus
agtagcactaacatgaatccttcaa

SEQ ID NO: 184346 - DNA, 25 bp, Saccharomyces pastorianus
tgcccaagttcttttgatgccaatg

SEQ ID NO: 184347 - DNA, 25 bp, Saccharomyces pastorianus
tggacctttggaaccatccgaaaat

SEQ ID NO: 184348 - DNA, 25 bp, Saccharomyces pastorianus
tgggcacatccacttctggcaagaa

SEQ ID NO: 184349 - DNA, 25 bp, Saccharomyces pastorianus
gatgacactaatttatcacgccgaa

SEQ ID NO: 184350 - DNA, 25 bp, Saccharomyces pastorianus
actaattctacctcaagttccaatg

SEQ ID NO: 184351 - DNA, 25 bp, Saccharomyces pastorianus
tgcaagtccgaataccactactatg

SEQ ID NO: 184352 - DNA, 25 bp, Saccharomyces pastorianus
gtatattaaggcctctgtatcccag

SEQ ID NO: 184353 - DNA, 25 bp, Saccharomyces pastorianus
gacccataggccttgtggattttaa

SEQ ID NO: 184354 - DNA, 25 bp, Saccharomyces pastorianus
atctgggtgataagttattagaaac

SEQ ID NO: 184355 - DNA, 25 bp, Saccharomyces pastorianus
cataggccttgtggattttaagaac

SEQ ID NO: 184356 - DNA, 25 bp, Saccharomyces pastorianus
attaaggcctctgtatcccagggag

SEQ ID NO: 184357 - DNA, 25 bp, Saccharomyces pastorianus
ggagatgataagacccataggcctt

SEQ ID NO: 184358 - DNA, 25 bp, Saccharomyces pastorianus
ataagacccataggccttgtggatt

SEQ ID NO: 184359 - DNA, 25 bp, Saccharomyces pastorianus
gaacagttcagagtatattaaggcc

SEQ ID NO: 184360 - DNA, 25 bp, Saccharomyces pastorianus
gcctctgtatcccagggagggttaa

SEQ ID NO: 184361 - DNA, 25 bp, Saccharomyces pastorianus
gatgataagacccataggccttgtg

SEQ ID NO: 184362 - DNA, 25 bp, Saccharomyces pastorianus
gccttgtggattttaagaacagttc

SEQ ID NO: 184363 - DNA, 25 bp, Saccharomyces pastorianus
ggagaactgtaccaactttcctatc

SEQ ID NO: 184364 - DNA, 25 bp, Saccharomyces pastorianus
cgagggatcattatcgtttttgaat

SEQ ID NO: 184365 - DNA, 25 bp, Saccharomyces pastorianus
aagagtctgtttccctttcttggag

SEQ ID NO: 184366 - DNA, 25 bp, Saccharomyces pastorianus
gaggctttgggcgatggctttaata

SEQ ID NO: 184367 - DNA, 25 bp, Saccharomyces pastorianus
gaatctacgatactgcgcaatattt

SEQ ID NO: 184368 - DNA, 25 bp, Saccharomyces pastorianus
gcggatattgaactaattggctctc

SEQ ID NO: 184369 - DNA, 25 bp, Saccharomyces pastorianus
tttattcccgatgaaagtcttctag

SEQ ID NO: 184370 - DNA, 25 bp, Saccharomyces pastorianus
tttcctatcttcaccacaaattcga

SEQ ID NO: 184371 - DNA, 25 bp, Saccharomyces pastorianus
tcttggagggtctgcgccatatttc

SEQ ID NO: 184372 - DNA, 25 bp, Saccharomyces pastorianus
attggctctcagaagagtctgtttc

SEQ ID NO: 184373 - DNA, 25 bp, Saccharomyces pastorianus
tctcctttcccgctaactacggtat

SEQ ID NO: 184374 - DNA, 25 bp, Saccharomyces pastorianus
gcttatgccaagttacttgaagaaa

SEQ ID NO: 184375 - DNA, 25 bp, Saccharomyces pastorianus
tacttgaagaaagaaagcggaggga

SEQ ID NO: 184376 - DNA, 25 bp, Saccharomyces pastorianus
agttacttgaagaaagaaagcggag

SEQ ID NO: 184377 - DNA, 25 bp, Saccharomyces pastorianus
ttatgccaagttacttgaagaaaga

SEQ ID NO: 184378 - DNA, 25 bp, Saccharomyces pastorianus
tgcttatgccaagttacttgaagaa

SEQ ID NO: 184379 - DNA, 25 bp, Saccharomyces pastorianus
atgcttatgccaagttacttgaaga

SEQ ID NO: 184380 - DNA, 25 bp, Saccharomyces pastorianus
cttatgccaagttacttgaagaaag

SEQ ID NO: 184381 - DNA, 25 bp, Saccharomyces pastorianus
ccaagttacttgaagaaagaaagcg

SEQ ID NO: 184382 - DNA, 25 bp, Saccharomyces pastorianus
gccaagttacttgaagaaagaaagc

SEQ ID NO: 184383 - DNA, 25 bp, Saccharomyces pastorianus
tatgccaagttacttgaagaaagaa

SEQ ID NO: 184384 - DNA, 25 bp, Saccharomyces pastorianus
atgccaagttacttgaagaaagaaa

SEQ ID NO: 184385 - DNA, 25 bp, Saccharomyces pastorianus
aaaatggaatcccaacaattacatc

SEQ ID NO: 184386 - DNA, 25 bp, Saccharomyces pastorianus
aaatggaatcccaacaattacatca

SEQ ID NO: 184387 - DNA, 25 bp, Saccharomyces pastorianus
tcgccttataaaaaatggaatccca

SEQ ID NO: 184388 - DNA, 25 bp, Saccharomyces pastorianus
acattctcttcaaatggaatcccaa

SEQ ID NO: 184389 - DNA, 25 bp, Saccharomyces pastorianus
aaaaatggaatcccaacaattacat

SEQ ID NO: 184390 - DNA, 25 bp, Saccharomyces pastorianus
cacattctcttcaaatggaatccca

SEQ ID NO: 184391 - DNA, 25 bp, Saccharomyces pastorianus
ttataaaaaatggaatcccaacaat

SEQ ID NO: 184392 - DNA, 25 bp, Saccharomyces pastorianus
tataaaaaatggaatcccaacaatt

SEQ ID NO: 184393 - DNA, 25 bp, Saccharomyces pastorianus
gaatcccaacaattacatcaaaatc

SEQ ID NO: 184394 - DNA, 25 bp, Saccharomyces pastorianus
tatcgccttataaaaaatggaatcc

SEQ ID NO: 184395 - DNA, 25 bp, Saccharomyces pastorianus
cattctcttcaaatggaatcccaac

SEQ ID NO: 184396 - DNA, 25 bp, Saccharomyces pastorianus
tatacacttatttcaatattataga

SEQ ID NO: 184397 - DNA, 25 bp, Saccharomyces pastorianus
atacattacaccacttttacaccat

SEQ ID NO: 184398 - DNA, 25 bp, Saccharomyces pastorianus
cattacaccacttttacaccatata

SEQ ID NO: 184399 - DNA, 25 bp, Saccharomyces pastorianus
tacaccacttttacaccatatacta

SEQ ID NO: 184400 - DNA, 25 bp, Saccharomyces pastorianus
tacattacaccacttttacaccata

SEQ ID NO: 184401 - DNA, 25 bp, Saccharomyces pastorianus
taactgctcttaatacatacattac

SEQ ID NO: 184402 - DNA, 25 bp, Saccharomyces pastorianus
catacattacaccacttttacacca

SEQ ID NO: 184403 - DNA, 25 bp, Saccharomyces pastorianus
acattacaccacttttacaccatat

SEQ ID NO: 184404 - DNA, 25 bp, Saccharomyces pastorianus
attacaccacttttacaccatatac

SEQ ID NO: 184405 - DNA, 25 bp, Saccharomyces pastorianus
atacacttatttcaatattatagaa

SEQ ID NO: 184406 - DNA, 25 bp, Saccharomyces pastorianus
caccacttttacaccatatactaac

SEQ ID NO: 184407 - DNA, 25 bp, Saccharomyces pastorianus
tctagcgggatcgaaccgctgatcc

SEQ ID NO: 184408 - DNA, 25 bp, Saccharomyces pastorianus
cgaaccgctgatccccgcgttatta

SEQ ID NO: 184409 - DNA, 25 bp, Saccharomyces pastorianus
gtctctagcgggatcgaaccgctga

SEQ ID NO: 184410 - DNA, 25 bp, Saccharomyces pastorianus
atggtctctagcgggatcgaaccgc

SEQ ID NO: 184411 - DNA, 25 bp, Saccharomyces pastorianus
ctagcgggatcgaaccgctgatccc

SEQ ID NO: 184412 - DNA, 25 bp, Saccharomyces pastorianus
tctctagcgggatcgaaccgctgat

SEQ ID NO: 184413 - DNA, 25 bp, Saccharomyces pastorianus
ctctagcgggatcgaaccgctgatc

SEQ ID NO: 184414 - DNA, 25 bp, Saccharomyces pastorianus
ggtctctagcgggatcgaaccgctg

SEQ ID NO: 184415 - DNA, 25 bp, Saccharomyces pastorianus
ggatcgaaccgctgatccccgcgtt

SEQ ID NO: 184416 - DNA, 25 bp, Saccharomyces pastorianus
tagcgggatcgaaccgctgatcccc

SEQ ID NO: 184417 - DNA, 25 bp, Saccharomyces pastorianus
gctgatccccgcgttattagcacgg

SEQ ID NO: 184418 - DNA, 25 bp, Saccharomyces pastorianus
tattatactagagattctcctcatg

SEQ ID NO: 184419 - DNA, 25 bp, Saccharomyces pastorianus
atatattatactagagattctcctc

SEQ ID NO: 184420 - DNA, 25 bp, Saccharomyces pastorianus
atatatattatactagagattctcc

SEQ ID NO: 184421 - DNA, 25 bp, Saccharomyces pastorianus
atattatactagagattctcctcat

SEQ ID NO: 184422 - DNA, 25 bp, Saccharomyces pastorianus
gatctttgggattccattatttctt

SEQ ID NO: 184423 - DNA, 25 bp, Saccharomyces pastorianus
tatattatactagagattctcctca

SEQ ID NO: 184424 - DNA, 25 bp, Saccharomyces pastorianus
tgggattccattatttcttaatgtt

SEQ ID NO: 184425 - DNA, 25 bp, Saccharomyces pastorianus
ctttgggattccattatttcttaat

SEQ ID NO: 184426 - DNA, 25 bp, Saccharomyces pastorianus
atctttgggattccattatttctta

SEQ ID NO: 184427 - DNA, 25 bp, Saccharomyces pastorianus
tctttgggattccattatttcttaa

SEQ ID NO: 184428 - DNA, 25 bp, Saccharomyces pastorianus
tatatattatactagagattctcct

SEQ ID NO: 184429 - DNA, 25 bp, Saccharomyces pastorianus
ccttggcaagaggtgagaggcctat

SEQ ID NO: 184430 - DNA, 25 bp, Saccharomyces pastorianus
gttccctccgccttggcaagaggtg

SEQ ID NO: 184431 - DNA, 25 bp, Saccharomyces pastorianus
tccctccgccttggcaagaggtgag

SEQ ID NO: 184432 - DNA, 25 bp, Saccharomyces pastorianus
ggcaagaggtgagaggcctatcccc

SEQ ID NO: 184433 - DNA, 25 bp, Saccharomyces pastorianus
ttggcaagaggtgagaggcctatcc

SEQ ID NO: 184434 - DNA, 25 bp, Saccharomyces pastorianus
aagaggtgagaggcctatccccaaa

SEQ ID NO: 184435 - DNA, 25 bp, Saccharomyces pastorianus
ttccctccgccttggcaagaggtga

SEQ ID NO: 184436 - DNA, 25 bp, Saccharomyces pastorianus
gcaagaggtgagaggcctatcccca

SEQ ID NO: 184437 - DNA, 25 bp, Saccharomyces pastorianus
cttggcaagaggtgagaggcctatc

SEQ ID NO: 184438 - DNA, 25 bp, Saccharomyces pastorianus
caagaggtgagaggcctatccccaa

SEQ ID NO: 184439 - DNA, 25 bp, Saccharomyces pastorianus
tggcaagaggtgagaggcctatccc

SEQ ID NO: 184440 - DNA, 25 bp, Saccharomyces pastorianus
aatacggatccatgacgcgcgctgc

SEQ ID NO: 184441 - DNA, 25 bp, Saccharomyces pastorianus
acaggagttacgaatgctggccact

SEQ ID NO: 184442 - DNA, 25 bp, Saccharomyces pastorianus
ataggtttcaggcattgtcttccca

SEQ ID NO: 184443 - DNA, 25 bp, Saccharomyces pastorianus
atctggcacttctgcagctgcagta

SEQ ID NO: 184444 - DNA, 25 bp, Saccharomyces pastorianus
ggagattctgcagcctttattcagc

SEQ ID NO: 184445 - DNA, 25 bp, Saccharomyces pastorianus
agcaccgtcccagaatacttgaaaa

SEQ ID NO: 184446 - DNA, 25 bp, Saccharomyces pastorianus
aagacagaagcttccagctcttgga

SEQ ID NO: 184447 - DNA, 25 bp, Saccharomyces pastorianus
gcacggccaagtacctacatgttag

SEQ ID NO: 184448 - DNA, 25 bp, Saccharomyces pastorianus
agtgcaacaaaaccccatggccagt

SEQ ID NO: 184449 - DNA, 25 bp, Saccharomyces pastorianus
gggtgccactactacagtgcaacaa

SEQ ID NO: 184450 - DNA, 25 bp, Saccharomyces pastorianus
aagcacaagtgtacgcgcagcaatc

SEQ ID NO: 184451 - DNA, 25 bp, Saccharomyces pastorianus
gcacttgtacaaaagcctcgtcttc

SEQ ID NO: 184452 - DNA, 25 bp, Saccharomyces pastorianus
attattggtgtcaacggtccctcaa

SEQ ID NO: 184453 - DNA, 25 bp, Saccharomyces pastorianus
tatgcttacccttcttctgacggtt

SEQ ID NO: 184454 - DNA, 25 bp, Saccharomyces pastorianus
gaaaacttccactactacgtcatct

SEQ ID NO: 184455 - DNA, 25 bp, Saccharomyces pastorianus
gaagacatacctaatcagtgatcca

SEQ ID NO: 184456 - DNA, 25 bp, Saccharomyces pastorianus
tcgtcttcatccattactacttcat

SEQ ID NO: 184457 - DNA, 25 bp, Saccharomyces pastorianus
gacggttgcacagtttggatgccaa

SEQ ID NO: 184458 - DNA, 25 bp, Saccharomyces pastorianus
gggacaaccaccttcgatttatcga

SEQ ID NO: 184459 - DNA, 25 bp, Saccharomyces pastorianus
aggtgatgctgctcagtactggcaa

SEQ ID NO: 184460 - DNA, 25 bp, Saccharomyces pastorianus
actacttcatccattactacttcat

SEQ ID NO: 184461 - DNA, 25 bp, Saccharomyces pastorianus
gattttacatccacttttcaggttt

SEQ ID NO: 184462 - DNA, 25 bp, Saccharomyces pastorianus
tctaaaaatataccatctctctccc

SEQ ID NO: 184463 - DNA, 25 bp, Saccharomyces pastorianus
acagatctgatgactcccactgaaa

SEQ ID NO: 184464 - DNA, 25 bp, Saccharomyces pastorianus
gcaagattacagtcagttgtcccta

SEQ ID NO: 184465 - DNA, 25 bp, Saccharomyces pastorianus
ccctcatgccatcaaaagacgtcat

SEQ ID NO: 184466 - DNA, 25 bp, Saccharomyces pastorianus
aatgtacaagatttcagccctaagc

SEQ ID NO: 184467 - DNA, 25 bp, Saccharomyces pastorianus
ttccgactctatttcccaatcttta

SEQ ID NO: 184468 - DNA, 25 bp, Saccharomyces pastorianus
aatacctcccggacttgcaaatgta

SEQ ID NO: 184469 - DNA, 25 bp, Saccharomyces pastorianus
aataacgctaggtcactccttacag

SEQ ID NO: 184470 - DNA, 25 bp, Saccharomyces pastorianus
agacgtcatcaaccttattcagaag

SEQ ID NO: 184471 - DNA, 25 bp, Saccharomyces pastorianus
tattaaatgccgtcgcttctaatcc

SEQ ID NO: 184472 - DNA, 25 bp, Saccharomyces pastorianus
agccaattcgaatcttccttgtcta

SEQ ID NO: 184473 - DNA, 25 bp, Saccharomyces pastorianus
taccggaccgcaatcttcgtaggat

SEQ ID NO: 184474 - DNA, 25 bp, Saccharomyces pastorianus
tcatggctattctttgttgggctat

SEQ ID NO: 184475 - DNA, 25 bp, Saccharomyces pastorianus
gagaccaatcgcaggctatatcgct

SEQ ID NO: 184476 - DNA, 25 bp, Saccharomyces pastorianus
aaatctggccactgcgatagtcttt

SEQ ID NO: 184477 - DNA, 25 bp, Saccharomyces pastorianus
ttgccttagtcgctccaataattgg

SEQ ID NO: 184478 - DNA, 25 bp, Saccharomyces pastorianus
ataattggtctggagcttcgcacga

SEQ ID NO: 184479 - DNA, 25 bp, Saccharomyces pastorianus
gatttttattgccacctttgcctta

SEQ ID NO: 184480 - DNA, 25 bp, Saccharomyces pastorianus
tgcacgcatcgttggtctccaaaaa

SEQ ID NO: 184481 - DNA, 25 bp, Saccharomyces pastorianus
aattgcttccattgttgcacgcatc

SEQ ID NO: 184482 - DNA, 25 bp, Saccharomyces pastorianus
aactagctgttacttttggcgtcac

SEQ ID NO: 184483 - DNA, 25 bp, Saccharomyces pastorianus
gtctttggattgttagccggttcta

SEQ ID NO: 184484 - DNA, 25 bp, Saccharomyces pastorianus
tacactaccggccacgagtacagac

SEQ ID NO: 184485 - DNA, 25 bp, Saccharomyces pastorianus
ctgagttggtcaaaactagctctga

SEQ ID NO: 184486 - DNA, 25 bp, Saccharomyces pastorianus
acgagtacagacctgaaggctccga

SEQ ID NO: 184487 - DNA, 25 bp, Saccharomyces pastorianus
cagacctgaaggctccgacgatgaa

SEQ ID NO: 184488 - DNA, 25 bp, Saccharomyces pastorianus
taccggccacgagtacagacctgaa

SEQ ID NO: 184489 - DNA, 25 bp, Saccharomyces pastorianus
tacacattaggcgaaggttacacta

SEQ ID NO: 184490 - DNA, 25 bp, Saccharomyces pastorianus
taggcgaaggttacactaccggcca

SEQ ID NO: 184491 - DNA, 25 bp, Saccharomyces pastorianus
ccggccacgagtacagacctgaagg

SEQ ID NO: 184492 - DNA, 25 bp, Saccharomyces pastorianus
gaaggttacactaccggccacgagt

SEQ ID NO: 184493 - DNA, 25 bp, Saccharomyces pastorianus
gtacagacctgaaggctccgacgat

SEQ ID NO: 184494 - DNA, 25 bp, Saccharomyces pastorianus
gacctgaaggctccgacgatgaaat

SEQ ID NO: 184495 - DNA, 25 bp, Saccharomyces pastorianus
atggtgatcatgcttgataatagac

SEQ ID NO: 184496 - DNA, 25 bp, Saccharomyces pastorianus
ttattgagctcattcaaggcgtagg

SEQ ID NO: 184497 - DNA, 25 bp, Saccharomyces pastorianus
gtgatcatgcttgataatagactta

SEQ ID NO: 184498 - DNA, 25 bp, Saccharomyces pastorianus
gatcatgcttgataatagacttaat

SEQ ID NO: 184499 - DNA, 25 bp, Saccharomyces pastorianus
atcatgcttgataatagacttaata

SEQ ID NO: 184500 - DNA, 25 bp, Saccharomyces pastorianus
gatggtgatcatgcttgataataga

SEQ ID NO: 184501 - DNA, 25 bp, Saccharomyces pastorianus
ggtgatcatgcttgataatagactt

SEQ ID NO: 184502 - DNA, 25 bp, Saccharomyces pastorianus
atgatggtgatcatgcttgataata

SEQ ID NO: 184503 - DNA, 25 bp, Saccharomyces pastorianus
catgcttgataatagacttaatatt

SEQ ID NO: 184504 - DNA, 25 bp, Saccharomyces pastorianus
tattgagctcattcaaggcgtaggg

SEQ ID NO: 184505 - DNA, 25 bp, Saccharomyces pastorianus
tgatcatgcttgataatagacttaa

SEQ ID NO: 184506 - DNA, 25 bp, Saccharomyces pastorianus
catatggtggtaacattgggttcga

SEQ ID NO: 184507 - DNA, 25 bp, Saccharomyces pastorianus
caagttgggccttcatcatctacaa

SEQ ID NO: 184508 - DNA, 25 bp, Saccharomyces pastorianus
ggccgcttaattggtacatatggtg

SEQ ID NO: 184509 - DNA, 25 bp, Saccharomyces pastorianus
ccgcttaattggtacatatggtggt

SEQ ID NO: 184510 - DNA, 25 bp, Saccharomyces pastorianus
tcatctacaacatcttaagaccctt

SEQ ID NO: 184511 - DNA, 25 bp, Saccharomyces pastorianus
cattgggttcgagttgggtgcaagt

SEQ ID NO: 184512 - DNA, 25 bp, Saccharomyces pastorianus
tctacaacatcttaagaccctttag

SEQ ID NO: 184513 - DNA, 25 bp, Saccharomyces pastorianus
tgggtgcaagttgggccttcatcat

SEQ ID NO: 184514 - DNA, 25 bp, Saccharomyces pastorianus
caacatcttaagaccctttagaatt

SEQ ID NO: 184515 - DNA, 25 bp, Saccharomyces pastorianus
tgcaagttgggccttcatcatctac

SEQ ID NO: 184516 - DNA, 25 bp, Saccharomyces pastorianus
agttgggtgcaagttgggccttcat

SEQ ID NO: 184517 - DNA, 25 bp, Saccharomyces pastorianus
gaagcacccacaaatgtatcaagag

SEQ ID NO: 184518 - DNA, 25 bp, Saccharomyces pastorianus
tataattccaactgagcccctccat

SEQ ID NO: 184519 - DNA, 25 bp, Saccharomyces pastorianus
gatcgcctctgaagttcacgaaggt

SEQ ID NO: 184520 - DNA, 25 bp, Saccharomyces pastorianus
agatacgatcgcctctgaagttcac

SEQ ID NO: 184521 - DNA, 25 bp, Saccharomyces pastorianus
ggatctctggtgatgaagacaccca

SEQ ID NO: 184522 - DNA, 25 bp, Saccharomyces pastorianus
agagatagctataattccaactgag

SEQ ID NO: 184523 - DNA, 25 bp, Saccharomyces pastorianus
agaacctattgggatctctggtgat

SEQ ID NO: 184524 - DNA, 25 bp, Saccharomyces pastorianus
aaatcaacgccatcagaccaatatg

SEQ ID NO: 184525 - DNA, 25 bp, Saccharomyces pastorianus
gaacctagttctgaaattgatttaa

SEQ ID NO: 184526 - DNA, 25 bp, Saccharomyces pastorianus
gaagacacccaaatcactgaacaaa

SEQ ID NO: 184527 - DNA, 25 bp, Saccharomyces pastorianus
ggcaagaaacgagagaacctagttc

SEQ ID NO: 184528 - DNA, 25 bp, Saccharomyces pastorianus
ataatattataaatgattctgttcc

SEQ ID NO: 184529 - DNA, 25 bp, Saccharomyces pastorianus
taatattataaatgattctgttcct

SEQ ID NO: 184530 - DNA, 25 bp, Saccharomyces pastorianus
tataaatgattctgttcctcttttt

SEQ ID NO: 184531 - DNA, 25 bp, Saccharomyces pastorianus
attctgttcctctttttatatgttg

SEQ ID NO: 184532 - DNA, 25 bp, Saccharomyces pastorianus
tgattctgttcctctttttatatgt

SEQ ID NO: 184533 - DNA, 25 bp, Saccharomyces pastorianus
aaatgattctgttcctctttttata

SEQ ID NO: 184534 - DNA, 25 bp, Saccharomyces pastorianus
tattataaatgattctgttcctctt

SEQ ID NO: 184535 - DNA, 25 bp, Saccharomyces pastorianus
ttataaatgattctgttcctctttt

SEQ ID NO: 184536 - DNA, 25 bp, Saccharomyces pastorianus
atattataaatgattctgttcctct

SEQ ID NO: 184537 - DNA, 25 bp, Saccharomyces pastorianus
attataaatgattctgttcctcttt

SEQ ID NO: 184538 - DNA, 25 bp, Saccharomyces pastorianus
ataaatgattctgttcctcttttta

SEQ ID NO: 184539 - DNA, 25 bp, Saccharomyces pastorianus
tacgttactagtatattatcatata

SEQ ID NO: 184540 - DNA, 25 bp, Saccharomyces pastorianus
ttacgttactagtatattatcatat

SEQ ID NO: 184541 - DNA, 25 bp, Saccharomyces pastorianus
tagtatttacgttactagtatatta

SEQ ID NO: 184542 - DNA, 25 bp, Saccharomyces pastorianus
atttacgttactagtatattatcat

SEQ ID NO: 184543 - DNA, 25 bp, Saccharomyces pastorianus
cgttactagtatattatcatatacg

SEQ ID NO: 184544 - DNA, 25 bp, Saccharomyces pastorianus
tatttacgttactagtatattatca

SEQ ID NO: 184545 - DNA, 25 bp, Saccharomyces pastorianus
tttacgttactagtatattatcata

SEQ ID NO: 184546 - DNA, 25 bp, Saccharomyces pastorianus
acgttactagtatattatcatatac

SEQ ID NO: 184547 - DNA, 25 bp, Saccharomyces pastorianus
agtatttacgttactagtatattat

SEQ ID NO: 184548 - DNA, 25 bp, Saccharomyces pastorianus
ctatcatctactaactagtatttac

SEQ ID NO: 184549 - DNA, 25 bp, Saccharomyces pastorianus
gtatttacgttactagtatattatc

SEQ ID NO: 184550 - DNA, 25 bp, Saccharomyces pastorianus
aactatgccgggtctgtgagaactt

SEQ ID NO: 184551 - DNA, 25 bp, Saccharomyces pastorianus
acgactggtcagacttttatgccaa

SEQ ID NO: 184552 - DNA, 25 bp, Saccharomyces pastorianus
gaatgatgacaccagttgcactata

SEQ ID NO: 184553 - DNA, 25 bp, Saccharomyces pastorianus
gttgccctctcacacgatgtggata

SEQ ID NO: 184554 - DNA, 25 bp, Saccharomyces pastorianus
aaaggccacagacatgctgctcatg

SEQ ID NO: 184555 - DNA, 25 bp, Saccharomyces pastorianus
ggatagtcaagcctcgcacaaacga

SEQ ID NO: 184556 - DNA, 25 bp, Saccharomyces pastorianus
gatatcgatatccaacttcccgaag

SEQ ID NO: 184557 - DNA, 25 bp, Saccharomyces pastorianus
ggcgctaagatcttcgtgcagtact

SEQ ID NO: 184558 - DNA, 25 bp, Saccharomyces pastorianus
aagacgcttgggttcggcgctaaga

SEQ ID NO: 184559 - DNA, 25 bp, Saccharomyces pastorianus
gacatggtcatccagttatccgata

SEQ ID NO: 184560 - DNA, 25 bp, Saccharomyces pastorianus
atcttcttgagcaacaggcgatctt

SEQ ID NO: 184561 - DNA, 25 bp, Saccharomyces pastorianus
tatcaccccttttatcgtagaatat

SEQ ID NO: 184562 - DNA, 25 bp, Saccharomyces pastorianus
gtacttagtcgaaaacaacgtatgt

SEQ ID NO: 184563 - DNA, 25 bp, Saccharomyces pastorianus
aaccataatagttacacgttgtcca

SEQ ID NO: 184564 - DNA, 25 bp, Saccharomyces pastorianus
ttggcgatttgtttcatttcctggc

SEQ ID NO: 184565 - DNA, 25 bp, Saccharomyces pastorianus
gaaatatcttctacagtgacaattg

SEQ ID NO: 184566 - DNA, 25 bp, Saccharomyces pastorianus
catttcctggctatttagacaacta

SEQ ID NO: 184567 - DNA, 25 bp, Saccharomyces pastorianus
acgttgtccaatttcaatcatagca

SEQ ID NO: 184568 - DNA, 25 bp, Saccharomyces pastorianus
ttacccttaaatggctatttaccat

SEQ ID NO: 184569 - DNA, 25 bp, Saccharomyces pastorianus
gtttactttagacatgatacttgga

SEQ ID NO: 184570 - DNA, 25 bp, Saccharomyces pastorianus
ttttttactgcaccgaaatatcttc

SEQ ID NO: 184571 - DNA, 25 bp, Saccharomyces pastorianus
tttggttcaccaagcacaattttga

SEQ ID NO: 184572 - DNA, 25 bp, Saccharomyces pastorianus
gttagagacttcacacacttaccag

SEQ ID NO: 184573 - DNA, 25 bp, Saccharomyces pastorianus
gagacgcgctatccaaattacaaaa

SEQ ID NO: 184574 - DNA, 25 bp, Saccharomyces pastorianus
ggaactaccgttcttgcaagagcta

SEQ ID NO: 184575 - DNA, 25 bp, Saccharomyces pastorianus
tggatgatcaattcacgttccccta

SEQ ID NO: 184576 - DNA, 25 bp, Saccharomyces pastorianus
taacccgctagtttccatcgtggaa

SEQ ID NO: 184577 - DNA, 25 bp, Saccharomyces pastorianus
aaatggcctgccactttgcaaattc

SEQ ID NO: 184578 - DNA, 25 bp, Saccharomyces pastorianus
agcacgagcttgcattaccggcagt

SEQ ID NO: 184579 - DNA, 25 bp, Saccharomyces pastorianus
ttgccgcgattctcttctctaaaat

SEQ ID NO: 184580 - DNA, 25 bp, Saccharomyces pastorianus
acgttgagagcgctttccatcaaaa

SEQ ID NO: 184581 - DNA, 25 bp, Saccharomyces pastorianus
agattctaaaactggacggcttcgc

SEQ ID NO: 184582 - DNA, 25 bp, Saccharomyces pastorianus
gacggcttcgctcaacttagcaaat

SEQ ID NO: 184583 - DNA, 25 bp, Saccharomyces pastorianus
ggttctgacttttggtctgaactaa

SEQ ID NO: 184584 - DNA, 25 bp, Saccharomyces pastorianus
tttacctcttgttcggctgcggcaa

SEQ ID NO: 184585 - DNA, 25 bp, Saccharomyces pastorianus
taaacactttatcgtttgcaccctc

SEQ ID NO: 184586 - DNA, 25 bp, Saccharomyces pastorianus
gcgtcttcgagcttgtgtttgtcaa

SEQ ID NO: 184587 - DNA, 25 bp, Saccharomyces pastorianus
ttcctgtacaggcttttcaaattcc

SEQ ID NO: 184588 - DNA, 25 bp, Saccharomyces pastorianus
tcctcttcttcttttacctcttgtt

SEQ ID NO: 184589 - DNA, 25 bp, Saccharomyces pastorianus
ctgcggcaacaggtttctgttcttt

SEQ ID NO: 184590 - DNA, 25 bp, Saccharomyces pastorianus
ttttctgctgattttggttctgact

SEQ ID NO: 184591 - DNA, 25 bp, Saccharomyces pastorianus
tctacgtcgtcatcattcgcgtctt

SEQ ID NO: 184592 - DNA, 25 bp, Saccharomyces pastorianus
tagaggtatttccttctacgtcgtc

SEQ ID NO: 184593 - DNA, 25 bp, Saccharomyces pastorianus
attcttcatgaagtcttggagatca

SEQ ID NO: 184594 - DNA, 25 bp, Saccharomyces pastorianus
atttgccctaattgcagttgttgtt

SEQ ID NO: 184595 - DNA, 25 bp, Saccharomyces pastorianus
agttgttgttgttttctctgttgct

SEQ ID NO: 184596 - DNA, 25 bp, Saccharomyces pastorianus
tgttgttgttttctctgttgctcga

SEQ ID NO: 184597 - DNA, 25 bp, Saccharomyces pastorianus
gcagttgttgttgttttctctgttg

SEQ ID NO: 184598 - DNA, 25 bp, Saccharomyces pastorianus
ttgcagttgttgttgttttctctgt

SEQ ID NO: 184599 - DNA, 25 bp, Saccharomyces pastorianus
ttgccctaattgcagttgttgttgt

SEQ ID NO: 184600 - DNA, 25 bp, Saccharomyces pastorianus
gttgttttctctgttgctcgacatc

SEQ ID NO: 184601 - DNA, 25 bp, Saccharomyces pastorianus
gccctaattgcagttgttgttgttt

SEQ ID NO: 184602 - DNA, 25 bp, Saccharomyces pastorianus
ttgttttctctgttgctcgacatcc

SEQ ID NO: 184603 - DNA, 25 bp, Saccharomyces pastorianus
aattgcagttgttgttgttttctct

SEQ ID NO: 184604 - DNA, 25 bp, Saccharomyces pastorianus
tgttgttttctctgttgctcgacat

SEQ ID NO: 184605 - DNA, 25 bp, Saccharomyces pastorianus
aacagccgcgttggagcaaactaca

SEQ ID NO: 184606 - DNA, 25 bp, Saccharomyces pastorianus
agaagttagtacacgcagcgctata

SEQ ID NO: 184607 - DNA, 25 bp, Saccharomyces pastorianus
atttgatatcccatagcgcttggag

SEQ ID NO: 184608 - DNA, 25 bp, Saccharomyces pastorianus
atagggcacccaattgccactgaga

SEQ ID NO: 184609 - DNA, 25 bp, Saccharomyces pastorianus
aacagttgttccaagttctagggca

SEQ ID NO: 184610 - DNA, 25 bp, Saccharomyces pastorianus
ggcaacgatgctatcaccaagggta

SEQ ID NO: 184611 - DNA, 25 bp, Saccharomyces pastorianus
atagcccttggtagtgatgtctctt

SEQ ID NO: 184612 - DNA, 25 bp, Saccharomyces pastorianus
atatactacctggtgtccaatctcc

SEQ ID NO: 184613 - DNA, 25 bp, Saccharomyces pastorianus
caacctcaagtctcttcttcaagaa

SEQ ID NO: 184614 - DNA, 25 bp, Saccharomyces pastorianus
aagtggcgctgctataattccagaa

SEQ ID NO: 184615 - DNA, 25 bp, Saccharomyces pastorianus
atcggtatttgatgcctactccaag

SEQ ID NO: 184616 - DNA, 25 bp, Saccharomyces pastorianus
gagttgttctcgttgtgatgcaaga

SEQ ID NO: 184617 - DNA, 25 bp, Saccharomyces pastorianus
aacggtccccttgagactagcgatg

SEQ ID NO: 184618 - DNA, 25 bp, Saccharomyces pastorianus
agtcattttcgtcatttgcattcaa

SEQ ID NO: 184619 - DNA, 25 bp, Saccharomyces pastorianus
aagcgctttcacttgttgtgttctg

SEQ ID NO: 184620 - DNA, 25 bp, Saccharomyces pastorianus
ggtgttatcacattcaactcgatta

SEQ ID NO: 184621 - DNA, 25 bp, Saccharomyces pastorianus
tccaatttttatgaactacccgaag

SEQ ID NO: 184622 - DNA, 25 bp, Saccharomyces pastorianus
aaaaacgacgctgcacaggctttaa

SEQ ID NO: 184623 - DNA, 25 bp, Saccharomyces pastorianus
catagctctctctcgagtattgcaa

SEQ ID NO: 184624 - DNA, 25 bp, Saccharomyces pastorianus
gtttctttacgtctcacttatagtg

SEQ ID NO: 184625 - DNA, 25 bp, Saccharomyces pastorianus
caggctttaaaatgctctgtggtaa

SEQ ID NO: 184626 - DNA, 25 bp, Saccharomyces pastorianus
aacagttctttgcatgggaccaaac

SEQ ID NO: 184627 - DNA, 25 bp, Saccharomyces pastorianus
tactaatatcacgattattcttcat

SEQ ID NO: 184628 - DNA, 25 bp, Saccharomyces pastorianus
ctaatatcacgattattcttcattc

SEQ ID NO: 184629 - DNA, 25 bp, Saccharomyces pastorianus
tttactaatatcacgattattcttc

SEQ ID NO: 184630 - DNA, 25 bp, Saccharomyces pastorianus
atggaatctatatttctatttacta

SEQ ID NO: 184631 - DNA, 25 bp, Saccharomyces pastorianus
taatatcacgattattcttcattcc

SEQ ID NO: 184632 - DNA, 25 bp, Saccharomyces pastorianus
ttactaatatcacgattattcttca

SEQ ID NO: 184633 - DNA, 25 bp, Saccharomyces pastorianus
actaatatcacgattattcttcatt

SEQ ID NO: 184634 - DNA, 25 bp, Saccharomyces pastorianus
atttactaatatcacgattattctt

SEQ ID NO: 184635 - DNA, 25 bp, Saccharomyces pastorianus
tggaatctatatttctatttactaa

SEQ ID NO: 184636 - DNA, 25 bp, Saccharomyces pastorianus
tatttactaatatcacgattattct

SEQ ID NO: 184637 - DNA, 25 bp, Saccharomyces pastorianus
aatatcacgattattcttcattccg

SEQ ID NO: 184638 - DNA, 25 bp, Saccharomyces pastorianus
tgggtgatgggctggaaatccttat

SEQ ID NO: 184639 - DNA, 25 bp, Saccharomyces pastorianus
gatatgagccaggtacaaacggtaa

SEQ ID NO: 184640 - DNA, 25 bp, Saccharomyces pastorianus
ggacaatcaggttaatttcaaggat

SEQ ID NO: 184641 - DNA, 25 bp, Saccharomyces pastorianus
tcatcaaactggtgagagactcgtt

SEQ ID NO: 184642 - DNA, 25 bp, Saccharomyces pastorianus
tgggctggaaatccttattgtcacc

SEQ ID NO: 184643 - DNA, 25 bp, Saccharomyces pastorianus
tttcaaggatcgatatgagccaggt

SEQ ID NO: 184644 - DNA, 25 bp, Saccharomyces pastorianus
aggatcgatatgagccaggtacaaa

SEQ ID NO: 184645 - DNA, 25 bp, Saccharomyces pastorianus
ctggtgagagactcgttcacttctg

SEQ ID NO: 184646 - DNA, 25 bp, Saccharomyces pastorianus
gacatatacaagtgggtgatgggct

SEQ ID NO: 184647 - DNA, 25 bp, Saccharomyces pastorianus
aactggtgagagactcgttcacttc

SEQ ID NO: 184648 - DNA, 25 bp, Saccharomyces pastorianus
tgagccaggtacaaacggtaaagtc

SEQ ID NO: 184649 - DNA, 25 bp, Saccharomyces pastorianus
ggatccccttcgcaagaaagcggat

SEQ ID NO: 184650 - DNA, 25 bp, Saccharomyces pastorianus
gcccacacggattcatctttcaata

SEQ ID NO: 184651 - DNA, 25 bp, Saccharomyces pastorianus
ggaaccatgggttcccaacctgcat

SEQ ID NO: 184652 - DNA, 25 bp, Saccharomyces pastorianus
aaaggatgccgagtctccttggcaa

SEQ ID NO: 184653 - DNA, 25 bp, Saccharomyces pastorianus
ttctccgggcgaacaaagtcttaag

SEQ ID NO: 184654 - DNA, 25 bp, Saccharomyces pastorianus
gcatcgcagcctttgctgatatttt

SEQ ID NO: 184655 - DNA, 25 bp, Saccharomyces pastorianus
ggatgtaccgcctttagatatctta

SEQ ID NO: 184656 - DNA, 25 bp, Saccharomyces pastorianus
gttggtgtttttcatctagacgatc

SEQ ID NO: 184657 - DNA, 25 bp, Saccharomyces pastorianus
agacgatcatatttctccgggcgaa

SEQ ID NO: 184658 - DNA, 25 bp, Saccharomyces pastorianus
ttagaagtgaacaccggatcccctt

SEQ ID NO: 184659 - DNA, 25 bp, Saccharomyces pastorianus
atggcaatagcagccctcaggaatt

SEQ ID NO: 184660 - DNA, 25 bp, Saccharomyces pastorianus
tggatcaagacaccttaccggctat

SEQ ID NO: 184661 - DNA, 25 bp, Saccharomyces pastorianus
attgcgttagaagtcgcttactgga

SEQ ID NO: 184662 - DNA, 25 bp, Saccharomyces pastorianus
agtccggcgaactattctttgaacg

SEQ ID NO: 184663 - DNA, 25 bp, Saccharomyces pastorianus
ttttgtgccaaaatctcaagagcta

SEQ ID NO: 184664 - DNA, 25 bp, Saccharomyces pastorianus
aaatgtgtggtggagtctactgcaa

SEQ ID NO: 184665 - DNA, 25 bp, Saccharomyces pastorianus
caccttaccggctattgagattgtc

SEQ ID NO: 184666 - DNA, 25 bp, Saccharomyces pastorianus
attctagttttacagcaagcgatat

SEQ ID NO: 184667 - DNA, 25 bp, Saccharomyces pastorianus
aattttgcaagagaccattacggta

SEQ ID NO: 184668 - DNA, 25 bp, Saccharomyces pastorianus
atcaaatccattttcttaccattat

SEQ ID NO: 184669 - DNA, 25 bp, Saccharomyces pastorianus
gataacagtccaaacagtccggcga

SEQ ID NO: 184670 - DNA, 25 bp, Saccharomyces pastorianus
aattttccgcaattttgtgcaagca

SEQ ID NO: 184671 - DNA, 25 bp, Saccharomyces pastorianus
gtcgcagttcgacaaggttattcac

SEQ ID NO: 184672 - DNA, 25 bp, Saccharomyces pastorianus
gcacttgcacgggtgaacacggtgt

SEQ ID NO: 184673 - DNA, 25 bp, Saccharomyces pastorianus
gaacccctgaagaacacgaaacctg

SEQ ID NO: 184674 - DNA, 25 bp, Saccharomyces pastorianus
gaaacctgtagccaacttgttgaca

SEQ ID NO: 184675 - DNA, 25 bp, Saccharomyces pastorianus
gctagtaagctgatcaacgccattg

SEQ ID NO: 184676 - DNA, 25 bp, Saccharomyces pastorianus
gagcactgaacgcagaaggcacttg

SEQ ID NO: 184677 - DNA, 25 bp, Saccharomyces pastorianus
attaagctagctattgacccaaaga

SEQ ID NO: 184678 - DNA, 25 bp, Saccharomyces pastorianus
tggtaacttccatgcattcatcgtc

SEQ ID NO: 184679 - DNA, 25 bp, Saccharomyces pastorianus
attcatcgtctacagaacccctgaa

SEQ ID NO: 184680 - DNA, 25 bp, Saccharomyces pastorianus
ggtgaagcacccgtcgatttgatga

SEQ ID NO: 184681 - DNA, 25 bp, Saccharomyces pastorianus
aactgatgtagctgttcctgtgtcg

SEQ ID NO: 184682 - DNA, 25 bp, Saccharomyces pastorianus
tgatcctgattatacacctcaaagg

SEQ ID NO: 184683 - DNA, 25 bp, Saccharomyces pastorianus
atttgtttgatcctgattatacacc

SEQ ID NO: 184684 - DNA, 25 bp, Saccharomyces pastorianus
ttatgtcattacaggaggatgtgat

SEQ ID NO: 184685 - DNA, 25 bp, Saccharomyces pastorianus
gattatacacctcaaaggaccacgt

SEQ ID NO: 184686 - DNA, 25 bp, Saccharomyces pastorianus
atgatcagagtttataacttagtaa

SEQ ID NO: 184687 - DNA, 25 bp, Saccharomyces pastorianus
ttatacacctcaaaggaccacgtta

SEQ ID NO: 184688 - DNA, 25 bp, Saccharomyces pastorianus
ttgtttgatcctgattatacacctc

SEQ ID NO: 184689 - DNA, 25 bp, Saccharomyces pastorianus
gttttggtaaatttgtttgatcctg

SEQ ID NO: 184690 - DNA, 25 bp, Saccharomyces pastorianus
tgtcattacaggaggatgtgataaa

SEQ ID NO: 184691 - DNA, 25 bp, Saccharomyces pastorianus
ggtaaatttgtttgatcctgattat

SEQ ID NO: 184692 - DNA, 25 bp, Saccharomyces pastorianus
gtttgatcctgattatacacctcaa

SEQ ID NO: 184693 - DNA, 25 bp, Saccharomyces pastorianus
tgaaatcaattctagctctataata

SEQ ID NO: 184694 - DNA, 25 bp, Saccharomyces pastorianus
tccaaggaaggtcagtatgaaatca

SEQ ID NO: 184695 - DNA, 25 bp, Saccharomyces pastorianus
gaaggtcagtatgaaatcaattcta

SEQ ID NO: 184696 - DNA, 25 bp, Saccharomyces pastorianus
gtccaaggaaggtcagtatgaaatc

SEQ ID NO: 184697 - DNA, 25 bp, Saccharomyces pastorianus
aaatcaattctagctctataataaa

SEQ ID NO: 184698 - DNA, 25 bp, Saccharomyces pastorianus
gaaatcaattctagctctataataa

SEQ ID NO: 184699 - DNA, 25 bp, Saccharomyces pastorianus
atcaattctagctctataataaaag

SEQ ID NO: 184700 - DNA, 25 bp, Saccharomyces pastorianus
ggaaggtcagtatgaaatcaattct

SEQ ID NO: 184701 - DNA, 25 bp, Saccharomyces pastorianus
tgtccaaggaaggtcagtatgaaat

SEQ ID NO: 184702 - DNA, 25 bp, Saccharomyces pastorianus
ccaaggaaggtcagtatgaaatcaa

SEQ ID NO: 184703 - DNA, 25 bp, Saccharomyces pastorianus
atgtccaaggaaggtcagtatgaaa

SEQ ID NO: 184704 - DNA, 25 bp, Saccharomyces pastorianus
tcattatgcacggcacttgcctcag

SEQ ID NO: 184705 - DNA, 25 bp, Saccharomyces pastorianus
cgcatcattatgcacggcacttgcc

SEQ ID NO: 184706 - DNA, 25 bp, Saccharomyces pastorianus
tcgcatcattatgcacggcacttgc

SEQ ID NO: 184707 - DNA, 25 bp, Saccharomyces pastorianus
ttcgcatcattatgcacggcacttg

SEQ ID NO: 184708 - DNA, 25 bp, Saccharomyces pastorianus
gcatcattatgcacggcacttgcct

SEQ ID NO: 184709 - DNA, 25 bp, Saccharomyces pastorianus
atcattatgcacggcacttgcctca

SEQ ID NO: 184710 - DNA, 25 bp, Saccharomyces pastorianus
cattcgcatcattatgcacggcact

SEQ ID NO: 184711 - DNA, 25 bp, Saccharomyces pastorianus
attcgcatcattatgcacggcactt

SEQ ID NO: 184712 - DNA, 25 bp, Saccharomyces pastorianus
catcattatgcacggcacttgcctc

SEQ ID NO: 184713 - DNA, 25 bp, Saccharomyces pastorianus
ttacaagcacagtaccggagagtac

SEQ ID NO: 184714 - DNA, 25 bp, Saccharomyces pastorianus
tttgtattcctatctctttcggagg

SEQ ID NO: 184715 - DNA, 25 bp, Saccharomyces pastorianus
ttactttgtattcctatctctttcg

SEQ ID NO: 184716 - DNA, 25 bp, Saccharomyces pastorianus
tgtattcctatctctttcggagggt

SEQ ID NO: 184717 - DNA, 25 bp, Saccharomyces pastorianus
gagggtttttacctggctgggatag

SEQ ID NO: 184718 - DNA, 25 bp, Saccharomyces pastorianus
acctgactatctatttactttgtat

SEQ ID NO: 184719 - DNA, 25 bp, Saccharomyces pastorianus
actttgtattcctatctctttcgga

SEQ ID NO: 184720 - DNA, 25 bp, Saccharomyces pastorianus
gggatacctgactatctatttactt

SEQ ID NO: 184721 - DNA, 25 bp, Saccharomyces pastorianus
gagaggatttttgggatacctgact

SEQ ID NO: 184722 - DNA, 25 bp, Saccharomyces pastorianus
tattcctatctctttcggagggttt

SEQ ID NO: 184723 - DNA, 25 bp, Saccharomyces pastorianus
ggatttttgggatacctgactatct

SEQ ID NO: 184724 - DNA, 25 bp, Saccharomyces pastorianus
gataaccttcgttgcattgacggct

SEQ ID NO: 184725 - DNA, 25 bp, Saccharomyces pastorianus
attgacggctagattctttaaccta

SEQ ID NO: 184726 - DNA, 25 bp, Saccharomyces pastorianus
gccaataatagttccttccctgata

SEQ ID NO: 184727 - DNA, 25 bp, Saccharomyces pastorianus
atgtacttgataaccttcgttgcat

SEQ ID NO: 184728 - DNA, 25 bp, Saccharomyces pastorianus
tagctgccgcctcggccaataatag

SEQ ID NO: 184729 - DNA, 25 bp, Saccharomyces pastorianus
gttccttccctgatattgaccttac

SEQ ID NO: 184730 - DNA, 25 bp, Saccharomyces pastorianus
tagattctttaacctagctgccgcc

SEQ ID NO: 184731 - DNA, 25 bp, Saccharomyces pastorianus
atagttccttccctgatattgacct

SEQ ID NO: 184732 - DNA, 25 bp, Saccharomyces pastorianus
aaccttcgttgcattgacggctaga

SEQ ID NO: 184733 - DNA, 25 bp, Saccharomyces pastorianus
tgcattgacggctagattctttaac

SEQ ID NO: 184734 - DNA, 25 bp, Saccharomyces pastorianus
tcggccaataatagttccttccctg

SEQ ID NO: 184735 - DNA, 25 bp, Saccharomyces pastorianus
atagtgcattttctgcagcctcaga

SEQ ID NO: 184736 - DNA, 25 bp, Saccharomyces pastorianus
aacatgactgtggttccctattgca

SEQ ID NO: 184737 - DNA, 25 bp, Saccharomyces pastorianus
ggcacaggccatggtatcggatcat

SEQ ID NO: 184738 - DNA, 25 bp, Saccharomyces pastorianus
gactccggttcgcaattcttggagg

SEQ ID NO: 184739 - DNA, 25 bp, Saccharomyces pastorianus
gtcccgcgggttagattacaaacat

SEQ ID NO: 184740 - DNA, 25 bp, Saccharomyces pastorianus
tctgatgaatttccccttaagagcg

SEQ ID NO: 184741 - DNA, 25 bp, Saccharomyces pastorianus
gggtttaatatcgacgccatcgcta

SEQ ID NO: 184742 - DNA, 25 bp, Saccharomyces pastorianus
cggctttaggccacatctgatgaat

SEQ ID NO: 184743 - DNA, 25 bp, Saccharomyces pastorianus
aaggacccatgggtgtcggctttag

SEQ ID NO: 184744 - DNA, 25 bp, Saccharomyces pastorianus
gccctagagaggttgatttttcccg

SEQ ID NO: 184745 - DNA, 25 bp, Saccharomyces pastorianus
cgctaggcagtttttatggtcccgc

SEQ ID NO: 184746 - DNA, 25 bp, Saccharomyces pastorianus
ctttgcattacaagtgcaacgctct

SEQ ID NO: 184747 - DNA, 25 bp, Saccharomyces pastorianus
cgacctttgcattacaagtgcaacg

SEQ ID NO: 184748 - DNA, 25 bp, Saccharomyces pastorianus
tagcgacctttgcattacaagtgca

SEQ ID NO: 184749 - DNA, 25 bp, Saccharomyces pastorianus
acctttgcattacaagtgcaacgct

SEQ ID NO: 184750 - DNA, 25 bp, Saccharomyces pastorianus
agcgacctttgcattacaagtgcaa

SEQ ID NO: 184751 - DNA, 25 bp, Saccharomyces pastorianus
gcattacaagtgcaacgctctacca

SEQ ID NO: 184752 - DNA, 25 bp, Saccharomyces pastorianus
acaagtgcaacgctctaccactaag

SEQ ID NO: 184753 - DNA, 25 bp, Saccharomyces pastorianus
gcgacctttgcattacaagtgcaac

SEQ ID NO: 184754 - DNA, 25 bp, Saccharomyces pastorianus
attacaagtgcaacgctctaccact

SEQ ID NO: 184755 - DNA, 25 bp, Saccharomyces pastorianus
gacctttgcattacaagtgcaacgc

SEQ ID NO: 184756 - DNA, 25 bp, Saccharomyces pastorianus
ctagcgacctttgcattacaagtgc

SEQ ID NO: 184757 - DNA, 25 bp, Saccharomyces pastorianus
aagtttcaggctttctttttcatca

SEQ ID NO: 184758 - DNA, 25 bp, Saccharomyces pastorianus
tttcagaagtttcaggctttctttt

SEQ ID NO: 184759 - DNA, 25 bp, Saccharomyces pastorianus
gttttcagaagtttcaggctttctt

SEQ ID NO: 184760 - DNA, 25 bp, Saccharomyces pastorianus
tgccattttttgttaatgttaaaat

SEQ ID NO: 184761 - DNA, 25 bp, Saccharomyces pastorianus
taaaatttccaaatctgttttcaga

SEQ ID NO: 184762 - DNA, 25 bp, Saccharomyces pastorianus
aaatttccaaatctgttttcagaag

SEQ ID NO: 184763 - DNA, 25 bp, Saccharomyces pastorianus
ctgttttcagaagtttcaggctttc

SEQ ID NO: 184764 - DNA, 25 bp, Saccharomyces pastorianus
caggctttctttttcatcattccaa

SEQ ID NO: 184765 - DNA, 25 bp, Saccharomyces pastorianus
tcagaagtttcaggctttctttttc

SEQ ID NO: 184766 - DNA, 25 bp, Saccharomyces pastorianus
gaagtttcaggctttctttttcatc

SEQ ID NO: 184767 - DNA, 25 bp, Saccharomyces pastorianus
atctgttttcagaagtttcaggctt

SEQ ID NO: 184768 - DNA, 25 bp, Saccharomyces pastorianus
aaagatggaaaacgcgaaatggaga

SEQ ID NO: 184769 - DNA, 25 bp, Saccharomyces pastorianus
gctctattgaaacagcaaagacaaa

SEQ ID NO: 184770 - DNA, 25 bp, Saccharomyces pastorianus
caaattgcacgaagtccgtcacgaa

SEQ ID NO: 184771 - DNA, 25 bp, Saccharomyces pastorianus
aattgcacgaagtccgtcacgaaag

SEQ ID NO: 184772 - DNA, 25 bp, Saccharomyces pastorianus
attgcacgaagtccgtcacgaaaga

SEQ ID NO: 184773 - DNA, 25 bp, Saccharomyces pastorianus
aaaagctgaacttcagagagctgca

SEQ ID NO: 184774 - DNA, 25 bp, Saccharomyces pastorianus
acgaagtccgtcacgaaagatggaa

SEQ ID NO: 184775 - DNA, 25 bp, Saccharomyces pastorianus
gtccgtcacgaaagatggaaaacgc

SEQ ID NO: 184776 - DNA, 25 bp, Saccharomyces pastorianus
aaagacaaattgcacgaagtccgtc

SEQ ID NO: 184777 - DNA, 25 bp, Saccharomyces pastorianus
gctgaacttcagagagctgcagctg

SEQ ID NO: 184778 - DNA, 25 bp, Saccharomyces pastorianus
tgcacgaagtccgtcacgaaagatg

SEQ ID NO: 184779 - DNA, 25 bp, Saccharomyces pastorianus
gcgattacttcaaaacgctctctaa

SEQ ID NO: 184780 - DNA, 25 bp, Saccharomyces pastorianus
aagagatatctctggtttgcccctc

SEQ ID NO: 184781 - DNA, 25 bp, Saccharomyces pastorianus
atatctctggtttgcccctcatgat

SEQ ID NO: 184782 - DNA, 25 bp, Saccharomyces pastorianus
cccatcaagggcaagataattcatt

SEQ ID NO: 184783 - DNA, 25 bp, Saccharomyces pastorianus
tgcatatagggacttcagaggatct

SEQ ID NO: 184784 - DNA, 25 bp, Saccharomyces pastorianus
gctcttaagccccatcaagggcaag

SEQ ID NO: 184785 - DNA, 25 bp, Saccharomyces pastorianus
aacgctctctaaagttgcatatagg

SEQ ID NO: 184786 - DNA, 25 bp, Saccharomyces pastorianus
aaagtttgcaggctcttaagcccca

SEQ ID NO: 184787 - DNA, 25 bp, Saccharomyces pastorianus
aattcattgttgctgtatgtggaca

SEQ ID NO: 184788 - DNA, 25 bp, Saccharomyces pastorianus
cattgttgctgtatgtggacattaa

SEQ ID NO: 184789 - DNA, 25 bp, Saccharomyces pastorianus
acttttatcgtagagatcatggacg

SEQ ID NO: 184790 - DNA, 25 bp, Saccharomyces pastorianus
atttagcgaggcaacttcggacatt

SEQ ID NO: 184791 - DNA, 25 bp, Saccharomyces pastorianus
gctaggattatccacatcttcgaaa

SEQ ID NO: 184792 - DNA, 25 bp, Saccharomyces pastorianus
ataaactcatacatgtctcctcttc

SEQ ID NO: 184793 - DNA, 25 bp, Saccharomyces pastorianus
gtcatattcatctagcgccgttatc

SEQ ID NO: 184794 - DNA, 25 bp, Saccharomyces pastorianus
aatcctcgtcatcaatatcatcttc

SEQ ID NO: 184795 - DNA, 25 bp, Saccharomyces pastorianus
ccccgttggttttcagattcatcat

SEQ ID NO: 184796 - DNA, 25 bp, Saccharomyces pastorianus
ttctagtccttcatcatttagcgag

SEQ ID NO: 184797 - DNA, 25 bp, Saccharomyces pastorianus
atcttctggttctacgacgtcatat

SEQ ID NO: 184798 - DNA, 25 bp, Saccharomyces pastorianus
atgcacgctagtatctgccatgcta

SEQ ID NO: 184799 - DNA, 25 bp, Saccharomyces pastorianus
ttgtcgctactgttttcatcttcta

SEQ ID NO: 184800 - DNA, 25 bp, Saccharomyces pastorianus
tgggaatcgcctaacatcttctggt

SEQ ID NO: 184801 - DNA, 25 bp, Saccharomyces pastorianus
ggcttactgcctccacggaaaagaa

SEQ ID NO: 184802 - DNA, 25 bp, Saccharomyces pastorianus
attttccgcgaattaaccagtgatt

SEQ ID NO: 184803 - DNA, 25 bp, Saccharomyces pastorianus
gacactttgatttcattctacgcat

SEQ ID NO: 184804 - DNA, 25 bp, Saccharomyces pastorianus
gaaacttcacgactggctggttacc

SEQ ID NO: 184805 - DNA, 25 bp, Saccharomyces pastorianus
gcgttggcagagaattgtccttatt

SEQ ID NO: 184806 - DNA, 25 bp, Saccharomyces pastorianus
gagttcgaagccagaccatgctaaa

SEQ ID NO: 184807 - DNA, 25 bp, Saccharomyces pastorianus
accttcgagggctgataccttctaa

SEQ ID NO: 184808 - DNA, 25 bp, Saccharomyces pastorianus
gcaagttagccgttccaggaggtac

SEQ ID NO: 184809 - DNA, 25 bp, Saccharomyces pastorianus
gagagcactcagaagaccgcatttg

SEQ ID NO: 184810 - DNA, 25 bp, Saccharomyces pastorianus
gctaaacatgctgcgcttctgatta

SEQ ID NO: 184811 - DNA, 25 bp, Saccharomyces pastorianus
gagactcgctgcaaagactctgggc

SEQ ID NO: 184812 - DNA, 25 bp, Saccharomyces pastorianus
gtagagcctcaagagccatactgga

SEQ ID NO: 184813 - DNA, 25 bp, Saccharomyces pastorianus
gattcattgtctttgcggtgggata

SEQ ID NO: 184814 - DNA, 25 bp, Saccharomyces pastorianus
accgcactgagtggtaccattgcta

SEQ ID NO: 184815 - DNA, 25 bp, Saccharomyces pastorianus
gaatatcccatttgcagcgttcaat

SEQ ID NO: 184816 - DNA, 25 bp, Saccharomyces pastorianus
gctaccattgctgcggatgcattga

SEQ ID NO: 184817 - DNA, 25 bp, Saccharomyces pastorianus
aagtggtgcaacatgtgctgcgtta

SEQ ID NO: 184818 - DNA, 25 bp, Saccharomyces pastorianus
gctttgcagcattttactactccta

SEQ ID NO: 184819 - DNA, 25 bp, Saccharomyces pastorianus
tgctgcgttaactacaccgttggat

SEQ ID NO: 184820 - DNA, 25 bp, Saccharomyces pastorianus
gatgcattgatgaacccctttgaca

SEQ ID NO: 184821 - DNA, 25 bp, Saccharomyces pastorianus
aatctgccagcaaattcttcaaccc

SEQ ID NO: 184822 - DNA, 25 bp, Saccharomyces pastorianus
gaggcagcgaaactgtctccatcga

SEQ ID NO: 184823 - DNA, 25 bp, Saccharomyces pastorianus
gaaatcgatctagctccaaaatggc

SEQ ID NO: 184824 - DNA, 25 bp, Saccharomyces pastorianus
tcgatctagctccaaaatggcccaa

SEQ ID NO: 184825 - DNA, 25 bp, Saccharomyces pastorianus
taccccagggatgaaatcgatctag

SEQ ID NO: 184826 - DNA, 25 bp, Saccharomyces pastorianus
gtggctataccccagggatgaaatc

SEQ ID NO: 184827 - DNA, 25 bp, Saccharomyces pastorianus
tataccccagggatgaaatcgatct

SEQ ID NO: 184828 - DNA, 25 bp, Saccharomyces pastorianus
atgaaatcgatctagctccaaaatg

SEQ ID NO: 184829 - DNA, 25 bp, Saccharomyces pastorianus
cccagggatgaaatcgatctagctc

SEQ ID NO: 184830 - DNA, 25 bp, Saccharomyces pastorianus
ttagagtggctataccccagggatg

SEQ ID NO: 184831 - DNA, 25 bp, Saccharomyces pastorianus
agagtggctataccccagggatgaa

SEQ ID NO: 184832 - DNA, 25 bp, Saccharomyces pastorianus
aatcgatctagctccaaaatggccc

SEQ ID NO: 184833 - DNA, 25 bp, Saccharomyces pastorianus
cgatctagctccaaaatggcccaag

SEQ ID NO: 184834 - DNA, 25 bp, Saccharomyces pastorianus
ggaaaattcttcctctgtttttgat

SEQ ID NO: 184835 - DNA, 25 bp, Saccharomyces pastorianus
ttgaacccagactaaacctgtcctt

SEQ ID NO: 184836 - DNA, 25 bp, Saccharomyces pastorianus
gaggattgcgaccaatttatgtcat

SEQ ID NO: 184837 - DNA, 25 bp, Saccharomyces pastorianus
ggtaacgaattcatccaactgggta

SEQ ID NO: 184838 - DNA, 25 bp, Saccharomyces pastorianus
gatagtgcaccgttaaccaggttga

SEQ ID NO: 184839 - DNA, 25 bp, Saccharomyces pastorianus
gtatgcgagtttccttacactttag

SEQ ID NO: 184840 - DNA, 25 bp, Saccharomyces pastorianus
catctcgttattcagcttacattaa

SEQ ID NO: 184841 - DNA, 25 bp, Saccharomyces pastorianus
gagagcttccttcgtgaggcagaaa

SEQ ID NO: 184842 - DNA, 25 bp, Saccharomyces pastorianus
gtcgcagctaaagaggcactaattg

SEQ ID NO: 184843 - DNA, 25 bp, Saccharomyces pastorianus
accaggttgaacttcgtatgcgagt

SEQ ID NO: 184844 - DNA, 25 bp, Saccharomyces pastorianus
aagtttccaaggcaggtcattgatc

SEQ ID NO: 184845 - DNA, 25 bp, Saccharomyces pastorianus
gaaagttcttctgcaagatacagga

SEQ ID NO: 184846 - DNA, 25 bp, Saccharomyces pastorianus
ttatatgtttcactatcctactatt

SEQ ID NO: 184847 - DNA, 25 bp, Saccharomyces pastorianus
gggaatcaatatatctacctaatag

SEQ ID NO: 184848 - DNA, 25 bp, Saccharomyces pastorianus
tatcctactatttcatcgatcctct

SEQ ID NO: 184849 - DNA, 25 bp, Saccharomyces pastorianus
gttcttctgcaagatacaggaatcc

SEQ ID NO: 184850 - DNA, 25 bp, Saccharomyces pastorianus
tattgttacaggctacgatattgcg

SEQ ID NO: 184851 - DNA, 25 bp, Saccharomyces pastorianus
tctgcaagatacaggaatccaaagg

SEQ ID NO: 184852 - DNA, 25 bp, Saccharomyces pastorianus
gtttcactatcctactatttcatcg

SEQ ID NO: 184853 - DNA, 25 bp, Saccharomyces pastorianus
gttacaggctacgatattgcgtata

SEQ ID NO: 184854 - DNA, 25 bp, Saccharomyces pastorianus
tcctactatttcatcgatcctctta

SEQ ID NO: 184855 - DNA, 25 bp, Saccharomyces pastorianus
caggctacgatattgcgtatagaaa

SEQ ID NO: 184856 - DNA, 25 bp, Saccharomyces pastorianus
ttacaacaatgactatggcaagcaa

SEQ ID NO: 184857 - DNA, 25 bp, Saccharomyces pastorianus
atatggctactagtactactacgac

SEQ ID NO: 184858 - DNA, 25 bp, Saccharomyces pastorianus
tatggcaagcaatatggctactagt

SEQ ID NO: 184859 - DNA, 25 bp, Saccharomyces pastorianus
ggcaagcaatatggctactagtact

SEQ ID NO: 184860 - DNA, 25 bp, Saccharomyces pastorianus
aatgactatggcaagcaatatggct

SEQ ID NO: 184861 - DNA, 25 bp, Saccharomyces pastorianus
gactatggcaagcaatatggctact

SEQ ID NO: 184862 - DNA, 25 bp, Saccharomyces pastorianus
caacaatgactatggcaagcaatat

SEQ ID NO: 184863 - DNA, 25 bp, Saccharomyces pastorianus
caatatggctactagtactactacg

SEQ ID NO: 184864 - DNA, 25 bp, Saccharomyces pastorianus
atggctactagtactactacgacgg

SEQ ID NO: 184865 - DNA, 25 bp, Saccharomyces pastorianus
agcaatatggctactagtactacta

SEQ ID NO: 184866 - DNA, 25 bp, Saccharomyces pastorianus
ggctactagtactactacgacggct

SEQ ID NO: 184867 - DNA, 25 bp, Saccharomyces pastorianus
atttcagggacaagggctgccacaa

SEQ ID NO: 184868 - DNA, 25 bp, Saccharomyces pastorianus
gaatactgatgccacgcgtatcgca

SEQ ID NO: 184869 - DNA, 25 bp, Saccharomyces pastorianus
atgattgggtctccaccatacactc

SEQ ID NO: 184870 - DNA, 25 bp, Saccharomyces pastorianus
cctggttccgaatactctttagcaa

SEQ ID NO: 184871 - DNA, 25 bp, Saccharomyces pastorianus
gacccgaaccctgcaactagatata

SEQ ID NO: 184872 - DNA, 25 bp, Saccharomyces pastorianus
ctatgccctcggaatcatgttgatt

SEQ ID NO: 184873 - DNA, 25 bp, Saccharomyces pastorianus
catacactccgccagaggtaatgta

SEQ ID NO: 184874 - DNA, 25 bp, Saccharomyces pastorianus
gaggtaatgtacttcgatgccaaga

SEQ ID NO: 184875 - DNA, 25 bp, Saccharomyces pastorianus
atccccttcatcgattcttgtaaca

SEQ ID NO: 184876 - DNA, 25 bp, Saccharomyces pastorianus
tgccaagaagcactaccccgaaaag

SEQ ID NO: 184877 - DNA, 25 bp, Saccharomyces pastorianus
gattaacaatatcatccccttcatc

SEQ ID NO: 184878 - DNA, 25 bp, Saccharomyces pastorianus
tgactaaacaggaggacaaagcatg

SEQ ID NO: 184879 - DNA, 25 bp, Saccharomyces pastorianus
ttcctgactaaacaggaggacaaag

SEQ ID NO: 184880 - DNA, 25 bp, Saccharomyces pastorianus
tgggcgacttcctgactaaacagga

SEQ ID NO: 184881 - DNA, 25 bp, Saccharomyces pastorianus
cttcctgactaaacaggaggacaaa

SEQ ID NO: 184882 - DNA, 25 bp, Saccharomyces pastorianus
acttcctgactaaacaggaggacaa

SEQ ID NO: 184883 - DNA, 25 bp, Saccharomyces pastorianus
gggcgacttcctgactaaacaggag

SEQ ID NO: 184884 - DNA, 25 bp, Saccharomyces pastorianus
gactaaacaggaggacaaagcatgc

SEQ ID NO: 184885 - DNA, 25 bp, Saccharomyces pastorianus
ctgactaaacaggaggacaaagcat

SEQ ID NO: 184886 - DNA, 25 bp, Saccharomyces pastorianus
cgacttcctgactaaacaggaggac

SEQ ID NO: 184887 - DNA, 25 bp, Saccharomyces pastorianus
taaacaggaggacaaagcatgcgag

SEQ ID NO: 184888 - DNA, 25 bp, Saccharomyces pastorianus
gacttcctgactaaacaggaggaca

SEQ ID NO: 184889 - DNA, 25 bp, Saccharomyces pastorianus
tcaactttggcagcacaatttcacg

SEQ ID NO: 184890 - DNA, 25 bp, Saccharomyces pastorianus
gatcatccacgtaagtggcaccgta

SEQ ID NO: 184891 - DNA, 25 bp, Saccharomyces pastorianus
agagccgcggtcattttgttagcat

SEQ ID NO: 184892 - DNA, 25 bp, Saccharomyces pastorianus
tgcaacagccactttatttttaaga

SEQ ID NO: 184893 - DNA, 25 bp, Saccharomyces pastorianus
atggatcatccacgtaagtggcacc

SEQ ID NO: 184894 - DNA, 25 bp, Saccharomyces pastorianus
ttgcaacagccactttatttttaag

SEQ ID NO: 184895 - DNA, 25 bp, Saccharomyces pastorianus
ttgttagcatctcttctcaactttg

SEQ ID NO: 184896 - DNA, 25 bp, Saccharomyces pastorianus
gtaagtggcaccgtaagctcgtcaa

SEQ ID NO: 184897 - DNA, 25 bp, Saccharomyces pastorianus
attgcaacagccactttatttttaa

SEQ ID NO: 184898 - DNA, 25 bp, Saccharomyces pastorianus
cgtaagctcgtcaattgcaacagcc

SEQ ID NO: 184899 - DNA, 25 bp, Saccharomyces pastorianus
gccactttatttttaagagccgcgg

SEQ ID NO: 184900 - DNA, 25 bp, Saccharomyces pastorianus
atatccggagcgtatgctgccaata

SEQ ID NO: 184901 - DNA, 25 bp, Saccharomyces pastorianus
tttaggcggtgttgctaccacagca

SEQ ID NO: 184902 - DNA, 25 bp, Saccharomyces pastorianus
gtacaagtaatctaggtagcacctc

SEQ ID NO: 184903 - DNA, 25 bp, Saccharomyces pastorianus
gcagttgcattgatcgcaggttgtt

SEQ ID NO: 184904 - DNA, 25 bp, Saccharomyces pastorianus
gtgccagtgggttcttaatcacgct

SEQ ID NO: 184905 - DNA, 25 bp, Saccharomyces pastorianus
tagcacctcatgttgggttggagct

SEQ ID NO: 184906 - DNA, 25 bp, Saccharomyces pastorianus
atgccgcagtgattgcttcacctat

SEQ ID NO: 184907 - DNA, 25 bp, Saccharomyces pastorianus
aaaactactattgggcgttggctgg

SEQ ID NO: 184908 - DNA, 25 bp, Saccharomyces pastorianus
aatcacgctagcaggaatatccgga

SEQ ID NO: 184909 - DNA, 25 bp, Saccharomyces pastorianus
ttcacctatggtgggcaatcatcta

SEQ ID NO: 184910 - DNA, 25 bp, Saccharomyces pastorianus
aaagctttagtcgatgccgcagtga

SEQ ID NO: 184911 - DNA, 25 bp, Saccharomyces pastorianus
actttgcgagagtagatgaactatg

SEQ ID NO: 184912 - DNA, 25 bp, Saccharomyces pastorianus
aaagagtcagtaccctacatcgagg

SEQ ID NO: 184913 - DNA, 25 bp, Saccharomyces pastorianus
catcgaggaggctttgcaggtctac

SEQ ID NO: 184914 - DNA, 25 bp, Saccharomyces pastorianus
gtaccctacatcgaggaggctttgc

SEQ ID NO: 184915 - DNA, 25 bp, Saccharomyces pastorianus
gtcagtaccctacatcgaggaggct

SEQ ID NO: 184916 - DNA, 25 bp, Saccharomyces pastorianus
aatcatttaaagagtcagtacccta

SEQ ID NO: 184917 - DNA, 25 bp, Saccharomyces pastorianus
gagtagatgaactatggaatcaggt

SEQ ID NO: 184918 - DNA, 25 bp, Saccharomyces pastorianus
cgaggaggctttgcaggtctacttt

SEQ ID NO: 184919 - DNA, 25 bp, Saccharomyces pastorianus
gaggctttgcaggtctactttgcga

SEQ ID NO: 184920 - DNA, 25 bp, Saccharomyces pastorianus
ggctttgcaggtctactttgcgaga

SEQ ID NO: 184921 - DNA, 25 bp, Saccharomyces pastorianus
tttgcaggtctactttgcgagagta

SEQ ID NO: 184922 - DNA, 25 bp, Saccharomyces pastorianus
tacggctgtagggtcattcaaagat

SEQ ID NO: 184923 - DNA, 25 bp, Saccharomyces pastorianus
gttttgcaacaagatcagttcacca

SEQ ID NO: 184924 - DNA, 25 bp, Saccharomyces pastorianus
gaaaaatctattctttatggctcta

SEQ ID NO: 184925 - DNA, 25 bp, Saccharomyces pastorianus
tcttaagttctttaactggccacat

SEQ ID NO: 184926 - DNA, 25 bp, Saccharomyces pastorianus
tcaatttgccaactatgtgattcaa

SEQ ID NO: 184927 - DNA, 25 bp, Saccharomyces pastorianus
aagacgattctccaatgattttaat

SEQ ID NO: 184928 - DNA, 25 bp, Saccharomyces pastorianus
taaatttgcctccaacgtggtcgaa

SEQ ID NO: 184929 - DNA, 25 bp, Saccharomyces pastorianus
aattagttaatgtctctgagggtga

SEQ ID NO: 184930 - DNA, 25 bp, Saccharomyces pastorianus
gaaattgatcgtcattgccattaga

SEQ ID NO: 184931 - DNA, 25 bp, Saccharomyces pastorianus
aactgtggccaataatgttgtcgaa

SEQ ID NO: 184932 - DNA, 25 bp, Saccharomyces pastorianus
aatcatgctttgaatctggaagacg

SEQ ID NO: 184933 - DNA, 25 bp, Saccharomyces pastorianus
aatattttgccaagaatggtaaaag

SEQ ID NO: 184934 - DNA, 25 bp, Saccharomyces pastorianus
gaatattttgccaagaatggtaaaa

SEQ ID NO: 184935 - DNA, 25 bp, Saccharomyces pastorianus
gaagaaagaatattttgccaagaat

SEQ ID NO: 184936 - DNA, 25 bp, Saccharomyces pastorianus
ggtaaaagaacaaccatggatggtg

SEQ ID NO: 184937 - DNA, 25 bp, Saccharomyces pastorianus
aagaagaaagaatattttgccaaga

SEQ ID NO: 184938 - DNA, 25 bp, Saccharomyces pastorianus
agaatattttgccaagaatggtaaa

SEQ ID NO: 184939 - DNA, 25 bp, Saccharomyces pastorianus
aaagaagaaagaatattttgccaag

SEQ ID NO: 184940 - DNA, 25 bp, Saccharomyces pastorianus
gaaagaatattttgccaagaatggt

SEQ ID NO: 184941 - DNA, 25 bp, Saccharomyces pastorianus
taaaagaacaaccatggatggtgac

SEQ ID NO: 184942 - DNA, 25 bp, Saccharomyces pastorianus
aaagaatattttgccaagaatggta

SEQ ID NO: 184943 - DNA, 25 bp, Saccharomyces pastorianus
tattttgccaagaatggtaaaagaa

SEQ ID NO: 184944 - DNA, 25 bp, Saccharomyces pastorianus
gtaagaacgatggatcattcatggg

SEQ ID NO: 184945 - DNA, 25 bp, Saccharomyces pastorianus
gcgcggacaactgaaatacgtgggt

SEQ ID NO: 184946 - DNA, 25 bp, Saccharomyces pastorianus
agttgcaaaaagtcgcatcattgat

SEQ ID NO: 184947 - DNA, 25 bp, Saccharomyces pastorianus
gctggtgtagacttacttgccaaca

SEQ ID NO: 184948 - DNA, 25 bp, Saccharomyces pastorianus
gtagacttacttgccaacattggta

SEQ ID NO: 184949 - DNA, 25 bp, Saccharomyces pastorianus
gatgtttcatacaaatcccaaattt

SEQ ID NO: 184950 - DNA, 25 bp, Saccharomyces pastorianus
gaagtattttcaaacggagtatcct

SEQ ID NO: 184951 - DNA, 25 bp, Saccharomyces pastorianus
gtttgctggtgtagacttacttgcc

SEQ ID NO: 184952 - DNA, 25 bp, Saccharomyces pastorianus
tcaaacggagtatcctcaaagtgga

SEQ ID NO: 184953 - DNA, 25 bp, Saccharomyces pastorianus
gctggaatgtttgctggtgtagact

SEQ ID NO: 184954 - DNA, 25 bp, Saccharomyces pastorianus
actgaaatacgtgggtccagtggac

SEQ ID NO: 184955 - DNA, 25 bp, Saccharomyces pastorianus
tcgtcgtccaaatcatccaagttgt

SEQ ID NO: 184956 - DNA, 25 bp, Saccharomyces pastorianus
gtcttgctcctttttgctttttggt

SEQ ID NO: 184957 - DNA, 25 bp, Saccharomyces pastorianus
tggcttttgcttgttgtcttgctcc

SEQ ID NO: 184958 - DNA, 25 bp, Saccharomyces pastorianus
tgttggaccttcttctaaatccttt

SEQ ID NO: 184959 - DNA, 25 bp, Saccharomyces pastorianus
tctggtttaggttcttcctcttctt

SEQ ID NO: 184960 - DNA, 25 bp, Saccharomyces pastorianus
tcgatgacaataccgccttccaaga

SEQ ID NO: 184961 - DNA, 25 bp, Saccharomyces pastorianus
atggcacggtcttcgatgacaatac

SEQ ID NO: 184962 - DNA, 25 bp, Saccharomyces pastorianus
cttcaatacgaacttcttcttcctc

SEQ ID NO: 184963 - DNA, 25 bp, Saccharomyces pastorianus
aagaccttggtctttggcttttgct

SEQ ID NO: 184964 - DNA, 25 bp, Saccharomyces pastorianus
ttttcgtcgtgctttctcttctttt

SEQ ID NO: 184965 - DNA, 25 bp, Saccharomyces pastorianus
ttagttttctttggctctggtttag

SEQ ID NO: 184966 - DNA, 25 bp, Saccharomyces pastorianus
aagcatggtatagatttgacgttca

SEQ ID NO: 184967 - DNA, 25 bp, Saccharomyces pastorianus
gaaaaaactgaatacctcctcgcaa

SEQ ID NO: 184968 - DNA, 25 bp, Saccharomyces pastorianus
aactaccagatatcgtttctataag

SEQ ID NO: 184969 - DNA, 25 bp, Saccharomyces pastorianus
tgaatacctcctcgcaaggttattt

SEQ ID NO: 184970 - DNA, 25 bp, Saccharomyces pastorianus
gatctctacaaaattccaaagctgg

SEQ ID NO: 184971 - DNA, 25 bp, Saccharomyces pastorianus
ttccaaagctggtttgaaaaaactg

SEQ ID NO: 184972 - DNA, 25 bp, Saccharomyces pastorianus
gaagcagtaaaagtcatctcagtaa

SEQ ID NO: 184973 - DNA, 25 bp, Saccharomyces pastorianus
atagatttgacgttcatgcctcgaa

SEQ ID NO: 184974 - DNA, 25 bp, Saccharomyces pastorianus
gatatcgtttctataagaagcagta

SEQ ID NO: 184975 - DNA, 25 bp, Saccharomyces pastorianus
gttcatgcctcgaagatctctacaa

SEQ ID NO: 184976 - DNA, 25 bp, Saccharomyces pastorianus
tttgacgttcatgcctcgaagatct

SEQ ID NO: 184977 - DNA, 25 bp, Saccharomyces pastorianus
aaagggagagccaccgcttgcattg

SEQ ID NO: 184978 - DNA, 25 bp, Saccharomyces pastorianus
agagccaccgcttgcattggtgaat

SEQ ID NO: 184979 - DNA, 25 bp, Saccharomyces pastorianus
aaatcttcgaaattgatgccgccaa

SEQ ID NO: 184980 - DNA, 25 bp, Saccharomyces pastorianus
ccgcttgcattggtgaatcccgaga

SEQ ID NO: 184981 - DNA, 25 bp, Saccharomyces pastorianus
gtgaatcccgagaagtcatggaact

SEQ ID NO: 184982 - DNA, 25 bp, Saccharomyces pastorianus
agaagtcatggaactgcgagccgaa

SEQ ID NO: 184983 - DNA, 25 bp, Saccharomyces pastorianus
actgcgagccgaagggagatccgcc

SEQ ID NO: 184984 - DNA, 25 bp, Saccharomyces pastorianus
ttgatgccgccaaagggagagccac

SEQ ID NO: 184985 - DNA, 25 bp, Saccharomyces pastorianus
gcattggtgaatcccgagaagtcat

SEQ ID NO: 184986 - DNA, 25 bp, Saccharomyces pastorianus
gccaaacgcagcaccgaacaaatct

SEQ ID NO: 184987 - DNA, 25 bp, Saccharomyces pastorianus
aacgcagcaccgaacaaatcttcga

SEQ ID NO: 184988 - DNA, 25 bp, Saccharomyces pastorianus
gagaattttgatgtcaaacatgaca

SEQ ID NO: 184989 - DNA, 25 bp, Saccharomyces pastorianus
aaccaggcagattgtctatggccaa

SEQ ID NO: 184990 - DNA, 25 bp, Saccharomyces pastorianus
cagattgtctatggccaatcgtggt

SEQ ID NO: 184991 - DNA, 25 bp, Saccharomyces pastorianus
gtcaaacatgacaaaccaggcagat

SEQ ID NO: 184992 - DNA, 25 bp, Saccharomyces pastorianus
aaaccaggcagattgtctatggcca

SEQ ID NO: 184993 - DNA, 25 bp, Saccharomyces pastorianus
aaacatgacaaaccaggcagattgt

SEQ ID NO: 184994 - DNA, 25 bp, Saccharomyces pastorianus
accaggcagattgtctatggccaat

SEQ ID NO: 184995 - DNA, 25 bp, Saccharomyces pastorianus
ggcagattgtctatggccaatcgtg

SEQ ID NO: 184996 - DNA, 25 bp, Saccharomyces pastorianus
acaaaccaggcagattgtctatggc

SEQ ID NO: 184997 - DNA, 25 bp, Saccharomyces pastorianus
aggcagattgtctatggccaatcgt

SEQ ID NO: 184998 - DNA, 25 bp, Saccharomyces pastorianus
ccaggcagattgtctatggccaatc

SEQ ID NO: 184999 - DNA, 25 bp, Saccharomyces pastorianus
gattacgcaaaggaagctgagctat

SEQ ID NO: 185000 - DNA, 25 bp, Saccharomyces pastorianus
gaggtccttgacagggaacccgatg

SEQ ID NO: 185001 - DNA, 25 bp, Saccharomyces pastorianus
tctcggttgttcaaggtcgtgctga

SEQ ID NO: 185002 - DNA, 25 bp, Saccharomyces pastorianus
gaacccgatgagttcaccaaatgga

SEQ ID NO: 185003 - DNA, 25 bp, Saccharomyces pastorianus
ttcaaacaatcctcactctcggttg

SEQ ID NO: 185004 - DNA, 25 bp, Saccharomyces pastorianus
ttctgcttgcataagagttttccaa

SEQ ID NO: 185005 - DNA, 25 bp, Saccharomyces pastorianus
ggctgtagcgcattaaatggccaat

SEQ ID NO: 185006 - DNA, 25 bp, Saccharomyces pastorianus
ggtcgtgctgaccatatggcattat

SEQ ID NO: 185007 - DNA, 25 bp, Saccharomyces pastorianus
gacgtatccactagcgaattccatt

SEQ ID NO: 185008 - DNA, 25 bp, Saccharomyces pastorianus
atcatgggcatttatcttttttctg

SEQ ID NO: 185009 - DNA, 25 bp, Saccharomyces pastorianus
acagtggagctgctggacgtatcca

SEQ ID NO: 185010 - DNA, 25 bp, Saccharomyces pastorianus
tatgaaacccttttccgtgcctgtt

SEQ ID NO: 185011 - DNA, 25 bp, Saccharomyces pastorianus
tgccttatgaaacccttttccgtgc

SEQ ID NO: 185012 - DNA, 25 bp, Saccharomyces pastorianus
ataggggtgccggggtgccttatga

SEQ ID NO: 185013 - DNA, 25 bp, Saccharomyces pastorianus
tataggggtgccggggtgccttatg

SEQ ID NO: 185014 - DNA, 25 bp, Saccharomyces pastorianus
gtgccttatgaaacccttttccgtg

SEQ ID NO: 185015 - DNA, 25 bp, Saccharomyces pastorianus
cttatgaaacccttttccgtgcctg

SEQ ID NO: 185016 - DNA, 25 bp, Saccharomyces pastorianus
gtgccggggtgccttatgaaaccct

SEQ ID NO: 185017 - DNA, 25 bp, Saccharomyces pastorianus
ttataggggtgccggggtgccttat

SEQ ID NO: 185018 - DNA, 25 bp, Saccharomyces pastorianus
tgccggggtgccttatgaaaccctt

SEQ ID NO: 185019 - DNA, 25 bp, Saccharomyces pastorianus
taggggtgccggggtgccttatgaa

SEQ ID NO: 185020 - DNA, 25 bp, Saccharomyces pastorianus
ttatgaaacccttttccgtgcctgt

SEQ ID NO: 185021 - DNA, 25 bp, Saccharomyces pastorianus
gatggtatttctaaatcttccatta

SEQ ID NO: 185022 - DNA, 25 bp, Saccharomyces pastorianus
aattttggaccagacgtagcgaaca

SEQ ID NO: 185023 - DNA, 25 bp, Saccharomyces pastorianus
gaatactttcttatctaacttgaag

SEQ ID NO: 185024 - DNA, 25 bp, Saccharomyces pastorianus
ggcctttctgcaccaacctaaagaa

SEQ ID NO: 185025 - DNA, 25 bp, Saccharomyces pastorianus
tgatccaagggcctttctgcaccaa

SEQ ID NO: 185026 - DNA, 25 bp, Saccharomyces pastorianus
ctggacgagagttatgacatagaat

SEQ ID NO: 185027 - DNA, 25 bp, Saccharomyces pastorianus
tgccaattttgatggtatttctaaa

SEQ ID NO: 185028 - DNA, 25 bp, Saccharomyces pastorianus
gctacttaacagacagaatactttc

SEQ ID NO: 185029 - DNA, 25 bp, Saccharomyces pastorianus
acaatggcattctggacgagagtta

SEQ ID NO: 185030 - DNA, 25 bp, Saccharomyces pastorianus
gacgtagcgaacaatggcattctgg

SEQ ID NO: 185031 - DNA, 25 bp, Saccharomyces pastorianus
atagaatctgatccaagggcctttc

SEQ ID NO: 185032 - DNA, 25 bp, Saccharomyces pastorianus
gtaaattcttcagcacacctggtgt

SEQ ID NO: 185033 - DNA, 25 bp, Saccharomyces pastorianus
gaggcattgtcgatatttactcgaa

SEQ ID NO: 185034 - DNA, 25 bp, Saccharomyces pastorianus
tgttatgattactactgacgacgat

SEQ ID NO: 185035 - DNA, 25 bp, Saccharomyces pastorianus
agggatttagcgacgatgctgtttc

SEQ ID NO: 185036 - DNA, 25 bp, Saccharomyces pastorianus
atgctgtttcgttcgattggatcca

SEQ ID NO: 185037 - DNA, 25 bp, Saccharomyces pastorianus
gaatgcactaatagcgttggaacta

SEQ ID NO: 185038 - DNA, 25 bp, Saccharomyces pastorianus
tattacctggtctacttgaaagtgg

SEQ ID NO: 185039 - DNA, 25 bp, Saccharomyces pastorianus
ataatgcttctcacatggtaccctt

SEQ ID NO: 185040 - DNA, 25 bp, Saccharomyces pastorianus
gattcgttgcatcttgattctgata

SEQ ID NO: 185041 - DNA, 25 bp, Saccharomyces pastorianus
aagccatctatccatttattacctg

SEQ ID NO: 185042 - DNA, 25 bp, Saccharomyces pastorianus
cacctggtgttattgattcgttgca

SEQ ID NO: 185043 - DNA, 25 bp, Saccharomyces pastorianus
gaacccttggcctgaactaataaat

SEQ ID NO: 185044 - DNA, 25 bp, Saccharomyces pastorianus
cttggcctgctctcaaaatgattgt

SEQ ID NO: 185045 - DNA, 25 bp, Saccharomyces pastorianus
gggagctcagctttcaacctttaac

SEQ ID NO: 185046 - DNA, 25 bp, Saccharomyces pastorianus
attccatatactgttttgctcatga

SEQ ID NO: 185047 - DNA, 25 bp, Saccharomyces pastorianus
taacgggcactctcccagatatgga

SEQ ID NO: 185048 - DNA, 25 bp, Saccharomyces pastorianus
gttatctacgaacccaattatgtgg

SEQ ID NO: 185049 - DNA, 25 bp, Saccharomyces pastorianus
ttacggttacagaacccttggcctg

SEQ ID NO: 185050 - DNA, 25 bp, Saccharomyces pastorianus
taaacgctatgcttacttggcctgc

SEQ ID NO: 185051 - DNA, 25 bp, Saccharomyces pastorianus
ggtactctcagaaacacattttgtt

SEQ ID NO: 185052 - DNA, 25 bp, Saccharomyces pastorianus
gttttgcaagcacacccagatagta

SEQ ID NO: 185053 - DNA, 25 bp, Saccharomyces pastorianus
agccacgttttctggtattccatat

SEQ ID NO: 185054 - DNA, 25 bp, Saccharomyces pastorianus
aatgtctgttattcggagcggcttc

SEQ ID NO: 185055 - DNA, 25 bp, Saccharomyces pastorianus
attcctgtgggactatgctttctgt

SEQ ID NO: 185056 - DNA, 25 bp, Saccharomyces pastorianus
gagcggcttcaatgatggcttgtat

SEQ ID NO: 185057 - DNA, 25 bp, Saccharomyces pastorianus
acatgaagaggcctgtgtctccatc

SEQ ID NO: 185058 - DNA, 25 bp, Saccharomyces pastorianus
gatccatgggtactcaaacaggctg

SEQ ID NO: 185059 - DNA, 25 bp, Saccharomyces pastorianus
atcgttggcatgttattagttccag

SEQ ID NO: 185060 - DNA, 25 bp, Saccharomyces pastorianus
taccattttcaaatcagttgggctt

SEQ ID NO: 185061 - DNA, 25 bp, Saccharomyces pastorianus
tgggctctaattatcatcgttggca

SEQ ID NO: 185062 - DNA, 25 bp, Saccharomyces pastorianus
ctatgctttctgtgggctctaatta

SEQ ID NO: 185063 - DNA, 25 bp, Saccharomyces pastorianus
aggcctgtgtctccatcgccaagat

SEQ ID NO: 185064 - DNA, 25 bp, Saccharomyces pastorianus
caccagaggatccatgggtactcaa

SEQ ID NO: 185065 - DNA, 25 bp, Saccharomyces pastorianus
aatccggataattcacaagcaacga

SEQ ID NO: 185066 - DNA, 25 bp, Saccharomyces pastorianus
atcaaccgacgtatgcacagcagga

SEQ ID NO: 185067 - DNA, 25 bp, Saccharomyces pastorianus
gcaggatatattaacgcagtcacaa

SEQ ID NO: 185068 - DNA, 25 bp, Saccharomyces pastorianus
aactttctggccacgcgctataata

SEQ ID NO: 185069 - DNA, 25 bp, Saccharomyces pastorianus
aattcaacagccaatcctatcaacc

SEQ ID NO: 185070 - DNA, 25 bp, Saccharomyces pastorianus
acaaccaccatttgtggacacaaac

SEQ ID NO: 185071 - DNA, 25 bp, Saccharomyces pastorianus
atagcgctcaaactaaattcaacag

SEQ ID NO: 185072 - DNA, 25 bp, Saccharomyces pastorianus
attaacgcagtcacaaccaccattt

SEQ ID NO: 185073 - DNA, 25 bp, Saccharomyces pastorianus
gaaaggtcaaaatagcgctcaaact

SEQ ID NO: 185074 - DNA, 25 bp, Saccharomyces pastorianus
agccaatcctatcaaccgacgtatg

SEQ ID NO: 185075 - DNA, 25 bp, Saccharomyces pastorianus
tctggccacgcgctataatatagga

SEQ ID NO: 185076 - DNA, 25 bp, Saccharomyces pastorianus
aattcattcacttgggagatcaccg

SEQ ID NO: 185077 - DNA, 25 bp, Saccharomyces pastorianus
attcacttgggagatcaccgttgtt

SEQ ID NO: 185078 - DNA, 25 bp, Saccharomyces pastorianus
gactcaataaacaccttttgtgctc

SEQ ID NO: 185079 - DNA, 25 bp, Saccharomyces pastorianus
attcattcacttgggagatcaccgt

SEQ ID NO: 185080 - DNA, 25 bp, Saccharomyces pastorianus
tcattcacttgggagatcaccgttg

SEQ ID NO: 185081 - DNA, 25 bp, Saccharomyces pastorianus
aataaacaccttttgtgctcctcca

SEQ ID NO: 185082 - DNA, 25 bp, Saccharomyces pastorianus
ccagactcaataaacaccttttgtg

SEQ ID NO: 185083 - DNA, 25 bp, Saccharomyces pastorianus
acttgggagatcaccgttgttggag

SEQ ID NO: 185084 - DNA, 25 bp, Saccharomyces pastorianus
taaacaccttttgtgctcctccaga

SEQ ID NO: 185085 - DNA, 25 bp, Saccharomyces pastorianus
aacaccttttgtgctcctccagaat

SEQ ID NO: 185086 - DNA, 25 bp, Saccharomyces pastorianus
tcacttgggagatcaccgttgttgg

SEQ ID NO: 185087 - DNA, 25 bp, Saccharomyces pastorianus
tctcctcccttatatgttccattac

SEQ ID NO: 185088 - DNA, 25 bp, Saccharomyces pastorianus
cccttatatgttccattaccctatt

SEQ ID NO: 185089 - DNA, 25 bp, Saccharomyces pastorianus
atcatttctcctcccttatatgttc

SEQ ID NO: 185090 - DNA, 25 bp, Saccharomyces pastorianus
atttctcctcccttatatgttccat

SEQ ID NO: 185091 - DNA, 25 bp, Saccharomyces pastorianus
cttatatgttccattaccctattac

SEQ ID NO: 185092 - DNA, 25 bp, Saccharomyces pastorianus
ttctcctcccttatatgttccatta

SEQ ID NO: 185093 - DNA, 25 bp, Saccharomyces pastorianus
catcatttctcctcccttatatgtt

SEQ ID NO: 185094 - DNA, 25 bp, Saccharomyces pastorianus
atttctgcatattaatatcaccatc

SEQ ID NO: 185095 - DNA, 25 bp, Saccharomyces pastorianus
accctattacattataaatcctcgt

SEQ ID NO: 185096 - DNA, 25 bp, Saccharomyces pastorianus
ttaatatcaccatcatttctcctcc

SEQ ID NO: 185097 - DNA, 25 bp, Saccharomyces pastorianus
tcccttatatgttccattaccctat

SEQ ID NO: 185098 - DNA, 25 bp, Saccharomyces pastorianus
gagcttctactccaattttaactaa

SEQ ID NO: 185099 - DNA, 25 bp, Saccharomyces pastorianus
atgatgccttcaactccttatattc

SEQ ID NO: 185100 - DNA, 25 bp, Saccharomyces pastorianus
ttagcgttgccattcgtgacagatt

SEQ ID NO: 185101 - DNA, 25 bp, Saccharomyces pastorianus
gatttcattacttctaacacctctg

SEQ ID NO: 185102 - DNA, 25 bp, Saccharomyces pastorianus
aaaatctcgtacagctccagtagca

SEQ ID NO: 185103 - DNA, 25 bp, Saccharomyces pastorianus
gtattcagtgccttcatcaatgttt

SEQ ID NO: 185104 - DNA, 25 bp, Saccharomyces pastorianus
agtcctttttgccttagtattcagt

SEQ ID NO: 185105 - DNA, 25 bp, Saccharomyces pastorianus
ggcaagttcttcagtatcctcattt

SEQ ID NO: 185106 - DNA, 25 bp, Saccharomyces pastorianus
ggattcataccagttacaccgcaga

SEQ ID NO: 185107 - DNA, 25 bp, Saccharomyces pastorianus
acaactttggcgctaattgggtcaa

SEQ ID NO: 185108 - DNA, 25 bp, Saccharomyces pastorianus
aagctattgttaccgtcacaccatt

SEQ ID NO: 185109 - DNA, 25 bp, Saccharomyces pastorianus
taatattacgattatccctcattcc

SEQ ID NO: 185110 - DNA, 25 bp, Saccharomyces pastorianus
tatactaatattacgattatccctc

SEQ ID NO: 185111 - DNA, 25 bp, Saccharomyces pastorianus
tactaatattacgattatccctcat

SEQ ID NO: 185112 - DNA, 25 bp, Saccharomyces pastorianus
aatattacgattatccctcattccg

SEQ ID NO: 185113 - DNA, 25 bp, Saccharomyces pastorianus
actaatattacgattatccctcatt

SEQ ID NO: 185114 - DNA, 25 bp, Saccharomyces pastorianus
atactaatattacgattatccctca

SEQ ID NO: 185115 - DNA, 25 bp, Saccharomyces pastorianus
ttttatatgtttcattatcctatta

SEQ ID NO: 185116 - DNA, 25 bp, Saccharomyces pastorianus
ctaatattacgattatccctcattc

SEQ ID NO: 185117 - DNA, 25 bp, Saccharomyces pastorianus
gaatcaatatttctatatactaata

SEQ ID NO: 185118 - DNA, 25 bp, Saccharomyces pastorianus
atattacgattatccctcattccgt

SEQ ID NO: 185119 - DNA, 25 bp, Saccharomyces pastorianus
cattatcaatcctttcacttcagct

SEQ ID NO: 185120 - DNA, 25 bp, Saccharomyces pastorianus
gaatatactggatcgcgtcagcaac

SEQ ID NO: 185121 - DNA, 25 bp, Saccharomyces pastorianus
agatcggcgagtgaatcgtcgacga

SEQ ID NO: 185122 - DNA, 25 bp, Saccharomyces pastorianus
gcaggcagaaaccacagcgaccaga

SEQ ID NO: 185123 - DNA, 25 bp, Saccharomyces pastorianus
atcatgcaggcagaaaccacagcga

SEQ ID NO: 185124 - DNA, 25 bp, Saccharomyces pastorianus
tcggcgagtgaatcgtcgacgacgc

SEQ ID NO: 185125 - DNA, 25 bp, Saccharomyces pastorianus
agcggctgaagtactaggagtactg

SEQ ID NO: 185126 - DNA, 25 bp, Saccharomyces pastorianus
acagcgaccagaggacgtctcgcga

SEQ ID NO: 185127 - DNA, 25 bp, Saccharomyces pastorianus
ctaggagtactgaaacaatcatgca

SEQ ID NO: 185128 - DNA, 25 bp, Saccharomyces pastorianus
aaaccacagcgaccagaggacgtct

SEQ ID NO: 185129 - DNA, 25 bp, Saccharomyces pastorianus
gtcgacgacgcctctgaatatactg

SEQ ID NO: 185130 - DNA, 25 bp, Saccharomyces pastorianus
gacgcctctgaatatactggatcgc

SEQ ID NO: 185131 - DNA, 25 bp, Saccharomyces pastorianus
gtttctgcctacgagaggattgcta

SEQ ID NO: 185132 - DNA, 25 bp, Saccharomyces pastorianus
gacgattcatcatcttcctctgtat

SEQ ID NO: 185133 - DNA, 25 bp, Saccharomyces pastorianus
ctgtatccagcacgacacatagtac

SEQ ID NO: 185134 - DNA, 25 bp, Saccharomyces pastorianus
gtcagccaagtgtacaggctcccaa

SEQ ID NO: 185135 - DNA, 25 bp, Saccharomyces pastorianus
agtgtacaggctcccaacaagaatg

SEQ ID NO: 185136 - DNA, 25 bp, Saccharomyces pastorianus
acgacacatagtacgtcagccaagt

SEQ ID NO: 185137 - DNA, 25 bp, Saccharomyces pastorianus
agaatgtcaactgcctacaaatacc

SEQ ID NO: 185138 - DNA, 25 bp, Saccharomyces pastorianus
aatgtttctgatactgtttctgcct

SEQ ID NO: 185139 - DNA, 25 bp, Saccharomyces pastorianus
gatactgtttctgcctacgagagga

SEQ ID NO: 185140 - DNA, 25 bp, Saccharomyces pastorianus
attcatcatcttcctctgtatccag

SEQ ID NO: 185141 - DNA, 25 bp, Saccharomyces pastorianus
caaccctcgtaacttcagcagtaaa

SEQ ID NO: 185142 - DNA, 25 bp, Saccharomyces pastorianus
taccaagtagtacacttacttcctt

SEQ ID NO: 185143 - DNA, 25 bp, Saccharomyces pastorianus
tcagccattgtttccgcttgggggt

SEQ ID NO: 185144 - DNA, 25 bp, Saccharomyces pastorianus
gcacaatgataccaagtagtacact

SEQ ID NO: 185145 - DNA, 25 bp, Saccharomyces pastorianus
gacgcacaatgataccaagtagtac

SEQ ID NO: 185146 - DNA, 25 bp, Saccharomyces pastorianus
taaacaaggccgatttatattggtt

SEQ ID NO: 185147 - DNA, 25 bp, Saccharomyces pastorianus
aagcgacaacaatgatggtagcacc

SEQ ID NO: 185148 - DNA, 25 bp, Saccharomyces pastorianus
gacaacaatgatggtagcaccgcta

SEQ ID NO: 185149 - DNA, 25 bp, Saccharomyces pastorianus
caacaatgatggtagcaccgctaag

SEQ ID NO: 185150 - DNA, 25 bp, Saccharomyces pastorianus
gccgatttatattggtttatagcat

SEQ ID NO: 185151 - DNA, 25 bp, Saccharomyces pastorianus
gataccaagtagtacacttacttcc

SEQ ID NO: 185152 - DNA, 25 bp, Saccharomyces pastorianus
caaggccgatttatattggtttata

SEQ ID NO: 185153 - DNA, 25 bp, Saccharomyces pastorianus
aacaactcttgcgtgcatggtgcga

SEQ ID NO: 185154 - DNA, 25 bp, Saccharomyces pastorianus
gagtcaagagacaccccgaatttag

SEQ ID NO: 185155 - DNA, 25 bp, Saccharomyces pastorianus
atgcactctgccgatcttttgagga

SEQ ID NO: 185156 - DNA, 25 bp, Saccharomyces pastorianus
aactgtggctacaaggcgacgagac

SEQ ID NO: 185157 - DNA, 25 bp, Saccharomyces pastorianus
ccacttctgtcctggaaactttcag

SEQ ID NO: 185158 - DNA, 25 bp, Saccharomyces pastorianus
aaagtaaaagatcggcgcacctcca

SEQ ID NO: 185159 - DNA, 25 bp, Saccharomyces pastorianus
cagatcccgcagttgtttctgggaa

SEQ ID NO: 185160 - DNA, 25 bp, Saccharomyces pastorianus
gagtcgttcacgtcaagcacagatg

SEQ ID NO: 185161 - DNA, 25 bp, Saccharomyces pastorianus
gttttaagcattttcccacttctgt

SEQ ID NO: 185162 - DNA, 25 bp, Saccharomyces pastorianus
atcgtattcgaatgccagatcccgc

SEQ ID NO: 185163 - DNA, 25 bp, Saccharomyces pastorianus
tcatcgacaatatcagggccgcctg

SEQ ID NO: 185164 - DNA, 25 bp, Saccharomyces pastorianus
gaatctaacttcaagcgacgcaaag

SEQ ID NO: 185165 - DNA, 25 bp, Saccharomyces pastorianus
aagtagtcagatctgtcggcgccaa

SEQ ID NO: 185166 - DNA, 25 bp, Saccharomyces pastorianus
actggcatcgccaagagattaaata

SEQ ID NO: 185167 - DNA, 25 bp, Saccharomyces pastorianus
gatatctgcaacatctttaccaaag

SEQ ID NO: 185168 - DNA, 25 bp, Saccharomyces pastorianus
ccgtataccggcgaaatgaatgcta

SEQ ID NO: 185169 - DNA, 25 bp, Saccharomyces pastorianus
gacgcaaagaccttttttgcatggt

SEQ ID NO: 185170 - DNA, 25 bp, Saccharomyces pastorianus
gggttacagtgatatctgcaacatc

SEQ ID NO: 185171 - DNA, 25 bp, Saccharomyces pastorianus
acttattatcaaacaggacctggcc

SEQ ID NO: 185172 - DNA, 25 bp, Saccharomyces pastorianus
acaaaatatttgactggcatcgcca

SEQ ID NO: 185173 - DNA, 25 bp, Saccharomyces pastorianus
acaggacctggccatgaagtagtca

SEQ ID NO: 185174 - DNA, 25 bp, Saccharomyces pastorianus
ggcgccaatactttgagtgctcatc

SEQ ID NO: 185175 - DNA, 25 bp, Saccharomyces pastorianus
atcgcatcgcgctataacttgggac

SEQ ID NO: 185176 - DNA, 25 bp, Saccharomyces pastorianus
ttatgtgcctccttgccataaaaaa

SEQ ID NO: 185177 - DNA, 25 bp, Saccharomyces pastorianus
ggatgaacagcctgaagatttcaaa

SEQ ID NO: 185178 - DNA, 25 bp, Saccharomyces pastorianus
agaaacaagacagaaacgcccttct

SEQ ID NO: 185179 - DNA, 25 bp, Saccharomyces pastorianus
tgggaccctagtatacaaataccgt

SEQ ID NO: 185180 - DNA, 25 bp, Saccharomyces pastorianus
cgcgctataacttgggaccctagta

SEQ ID NO: 185181 - DNA, 25 bp, Saccharomyces pastorianus
agaaacgcccttctgtgacttgctt

SEQ ID NO: 185182 - DNA, 25 bp, Saccharomyces pastorianus
agtatacaaataccgtttgcaacat

SEQ ID NO: 185183 - DNA, 25 bp, Saccharomyces pastorianus
tgtgacttgcttccatcgcatcgcg

SEQ ID NO: 185184 - DNA, 25 bp, Saccharomyces pastorianus
acatgtctggaaggttcgtaaaaat

SEQ ID NO: 185185 - DNA, 25 bp, Saccharomyces pastorianus
atatttatgtgcctccttgccataa

SEQ ID NO: 185186 - DNA, 25 bp, Saccharomyces pastorianus
gtaatagtggcgctactccaagtcc

SEQ ID NO: 185187 - DNA, 25 bp, Saccharomyces pastorianus
acccatcaaagtcgtaaggcttcct

SEQ ID NO: 185188 - DNA, 25 bp, Saccharomyces pastorianus
gataactatcttacaccatccaaag

SEQ ID NO: 185189 - DNA, 25 bp, Saccharomyces pastorianus
ataccagctggttcgaatcctttga

SEQ ID NO: 185190 - DNA, 25 bp, Saccharomyces pastorianus
gaatgcatttttacccatcgatttc

SEQ ID NO: 185191 - DNA, 25 bp, Saccharomyces pastorianus
agccaattttggttccgtggagtat

SEQ ID NO: 185192 - DNA, 25 bp, Saccharomyces pastorianus
agccaatatcgcaatcttatccaga

SEQ ID NO: 185193 - DNA, 25 bp, Saccharomyces pastorianus
taacggtcctaaactgcctcatata

SEQ ID NO: 185194 - DNA, 25 bp, Saccharomyces pastorianus
aaggcttccttctgatggatccgta

SEQ ID NO: 185195 - DNA, 25 bp, Saccharomyces pastorianus
ttccatttcgctcctctagataaag

SEQ ID NO: 185196 - DNA, 25 bp, Saccharomyces pastorianus
gaggtttggcgcattcaaatcaact

SEQ ID NO: 185197 - DNA, 25 bp, Saccharomyces pastorianus
tattgtagacgacctaccctggtac

SEQ ID NO: 185198 - DNA, 25 bp, Saccharomyces pastorianus
attactacagacacggcttcttcaa

SEQ ID NO: 185199 - DNA, 25 bp, Saccharomyces pastorianus
tgggcagacattacgcctcaatcca

SEQ ID NO: 185200 - DNA, 25 bp, Saccharomyces pastorianus
ggctatttgcttcggtgccattaat

SEQ ID NO: 185201 - DNA, 25 bp, Saccharomyces pastorianus
aactatatggctggccttggctgtt

SEQ ID NO: 185202 - DNA, 25 bp, Saccharomyces pastorianus
gctaggcctttaccacagcgaagaa

SEQ ID NO: 185203 - DNA, 25 bp, Saccharomyces pastorianus
aaatctcgctattttaagcacgtgg

SEQ ID NO: 185204 - DNA, 25 bp, Saccharomyces pastorianus
aagttttgccttccgaggacaatgc

SEQ ID NO: 185205 - DNA, 25 bp, Saccharomyces pastorianus
agagtgcctgtttcgagtggctgtt

SEQ ID NO: 185206 - DNA, 25 bp, Saccharomyces pastorianus
cttggctgttgtttgggctatttgc

SEQ ID NO: 185207 - DNA, 25 bp, Saccharomyces pastorianus
caaatttacaatcagtgccacccta

SEQ ID NO: 185208 - DNA, 25 bp, Saccharomyces pastorianus
gattggtgaacatctctggtttccc

SEQ ID NO: 185209 - DNA, 25 bp, Saccharomyces pastorianus
gattattggtgcctaccaaggccaa

SEQ ID NO: 185210 - DNA, 25 bp, Saccharomyces pastorianus
gaatatggtgcacccagttcacatt

SEQ ID NO: 185211 - DNA, 25 bp, Saccharomyces pastorianus
tggtatggccaacaaagcttctttt

SEQ ID NO: 185212 - DNA, 25 bp, Saccharomyces pastorianus
agttcacattctgctaacgctactg

SEQ ID NO: 185213 - DNA, 25 bp, Saccharomyces pastorianus
gtgatattttactacttaaccctgg

SEQ ID NO: 185214 - DNA, 25 bp, Saccharomyces pastorianus
aacgctactgcggtaagtctattat

SEQ ID NO: 185215 - DNA, 25 bp, Saccharomyces pastorianus
atgatctacgttcttggttattcaa

SEQ ID NO: 185216 - DNA, 25 bp, Saccharomyces pastorianus
aaggccaaaatcaccgccagttgac

SEQ ID NO: 185217 - DNA, 25 bp, Saccharomyces pastorianus
agcttcttttactgagtctggtgat

SEQ ID NO: 185218 - DNA, 25 bp, Saccharomyces pastorianus
gtttatctgacacactggtatggcc

SEQ ID NO: 185219 - DNA, 25 bp, Saccharomyces pastorianus
catactaatattacgaatattcctc

SEQ ID NO: 185220 - DNA, 25 bp, Saccharomyces pastorianus
taatattacgaatattcctcattcc

SEQ ID NO: 185221 - DNA, 25 bp, Saccharomyces pastorianus
tactaatattacgaatattcctcat

SEQ ID NO: 185222 - DNA, 25 bp, Saccharomyces pastorianus
aatattacgaatattcctcattccg

SEQ ID NO: 185223 - DNA, 25 bp, Saccharomyces pastorianus
actaatattacgaatattcctcatt

SEQ ID NO: 185224 - DNA, 25 bp, Saccharomyces pastorianus
atactaatattacgaatattcctca

SEQ ID NO: 185225 - DNA, 25 bp, Saccharomyces pastorianus
tggaatctatatttctacatactaa

SEQ ID NO: 185226 - DNA, 25 bp, Saccharomyces pastorianus
atggaatctatatttctacatacta

SEQ ID NO: 185227 - DNA, 25 bp, Saccharomyces pastorianus
ctaatattacgaatattcctcattc

SEQ ID NO: 185228 - DNA, 25 bp, Saccharomyces pastorianus
acatactaatattacgaatattcct

SEQ ID NO: 185229 - DNA, 25 bp, Saccharomyces pastorianus
ggaatctatatttctacatactaat

SEQ ID NO: 185230 - DNA, 25 bp, Saccharomyces pastorianus
gaggttttccagaatgatcaacgat

SEQ ID NO: 185231 - DNA, 25 bp, Saccharomyces pastorianus
taagtgacacctttttcatttggaa

SEQ ID NO: 185232 - DNA, 25 bp, Saccharomyces pastorianus
gaaatctgatggtcgttggcaatta

SEQ ID NO: 185233 - DNA, 25 bp, Saccharomyces pastorianus
tttttctccggtaaattcgctgtct

SEQ ID NO: 185234 - DNA, 25 bp, Saccharomyces pastorianus
tattccccatttctacattctcgaa

SEQ ID NO: 185235 - DNA, 25 bp, Saccharomyces pastorianus
taagttgtctgccttgttgtacgtg

SEQ ID NO: 185236 - DNA, 25 bp, Saccharomyces pastorianus
cgtggataacgacgctaacgtggtt

SEQ ID NO: 185237 - DNA, 25 bp, Saccharomyces pastorianus
cgtggttaagaacacttcctggaag

SEQ ID NO: 185238 - DNA, 25 bp, Saccharomyces pastorianus
tgataaacgggcctggttacaaaat

SEQ ID NO: 185239 - DNA, 25 bp, Saccharomyces pastorianus
gtctccttcatctttgagtaccgat

SEQ ID NO: 185240 - DNA, 25 bp, Saccharomyces pastorianus
aacaatgagccttccgcatctctgg

SEQ ID NO: 185241 - DNA, 25 bp, Saccharomyces pastorianus
attccagtacttatcgttccctcaa

SEQ ID NO: 185242 - DNA, 25 bp, Saccharomyces pastorianus
tcgaccgaaaactcagtgatatctt

SEQ ID NO: 185243 - DNA, 25 bp, Saccharomyces pastorianus
atacttgggttgctctagattggac

SEQ ID NO: 185244 - DNA, 25 bp, Saccharomyces pastorianus
gtacattttacagcttctgaaggca

SEQ ID NO: 185245 - DNA, 25 bp, Saccharomyces pastorianus
gctgtaagctttcctattccagtac

SEQ ID NO: 185246 - DNA, 25 bp, Saccharomyces pastorianus
gcaattaacgtttatacaccggact

SEQ ID NO: 185247 - DNA, 25 bp, Saccharomyces pastorianus
aactggctgatgtttttgctgtaag

SEQ ID NO: 185248 - DNA, 25 bp, Saccharomyces pastorianus
gttttaactacactaccaagattga

SEQ ID NO: 185249 - DNA, 25 bp, Saccharomyces pastorianus
agattggaccctttgcaagattgca

SEQ ID NO: 185250 - DNA, 25 bp, Saccharomyces pastorianus
aaatagtagctatatcttccgagat

SEQ ID NO: 185251 - DNA, 25 bp, Saccharomyces pastorianus
acaccggacttcctagttatcgcta

SEQ ID NO: 185252 - DNA, 25 bp, Saccharomyces pastorianus
tgtgactactttagttgacccaact

SEQ ID NO: 185253 - DNA, 25 bp, Saccharomyces pastorianus
gcgctgtgactactttagttgaccc

SEQ ID NO: 185254 - DNA, 25 bp, Saccharomyces pastorianus
tacttctgtagtcatttcaacctca

SEQ ID NO: 185255 - DNA, 25 bp, Saccharomyces pastorianus
ctgtagtcatttcaacctcagttga

SEQ ID NO: 185256 - DNA, 25 bp, Saccharomyces pastorianus
gtgactactttagttgacccaacta

SEQ ID NO: 185257 - DNA, 25 bp, Saccharomyces pastorianus
ttctgtagtcatttcaacctcagtt

SEQ ID NO: 185258 - DNA, 25 bp, Saccharomyces pastorianus
tgactactttagttgacccaactac

SEQ ID NO: 185259 - DNA, 25 bp, Saccharomyces pastorianus
gtagtcatttcaacctcagttgatc

SEQ ID NO: 185260 - DNA, 25 bp, Saccharomyces pastorianus
catttcaacctcagttgatcaaact

SEQ ID NO: 185261 - DNA, 25 bp, Saccharomyces pastorianus
gtcatttcaacctcagttgatcaaa

SEQ ID NO: 185262 - DNA, 25 bp, Saccharomyces pastorianus
gctgtgactactttagttgacccaa

SEQ ID NO: 185263 - DNA, 25 bp, Saccharomyces pastorianus
aagcctccgccaagcgatgctatcg

SEQ ID NO: 185264 - DNA, 25 bp, Saccharomyces pastorianus
tgctatcgggaatctactttaatgt

SEQ ID NO: 185265 - DNA, 25 bp, Saccharomyces pastorianus
gaatctactttaatgtgaacccgga

SEQ ID NO: 185266 - DNA, 25 bp, Saccharomyces pastorianus
aaggtactaccaagcctccgccaag

SEQ ID NO: 185267 - DNA, 25 bp, Saccharomyces pastorianus
caagcgatgctatcgggaatctact

SEQ ID NO: 185268 - DNA, 25 bp, Saccharomyces pastorianus
atcgggaatctactttaatgtgaac

SEQ ID NO: 185269 - DNA, 25 bp, Saccharomyces pastorianus
gccaagcgatgctatcgggaatcta

SEQ ID NO: 185270 - DNA, 25 bp, Saccharomyces pastorianus
cgatgctatcgggaatctactttaa

SEQ ID NO: 185271 - DNA, 25 bp, Saccharomyces pastorianus
taatcaaggtactaccaagcctccg

SEQ ID NO: 185272 - DNA, 25 bp, Saccharomyces pastorianus
aactatctaatcaaggtactaccaa

SEQ ID NO: 185273 - DNA, 25 bp, Saccharomyces pastorianus
tccgccaagcgatgctatcgggaat

SEQ ID NO: 185274 - DNA, 25 bp, Saccharomyces pastorianus
cagctactggagaattggacaacca

SEQ ID NO: 185275 - DNA, 25 bp, Saccharomyces pastorianus
actgctttcgtataacaagactttt

SEQ ID NO: 185276 - DNA, 25 bp, Saccharomyces pastorianus
gaagcgatccaagatttattccagc

SEQ ID NO: 185277 - DNA, 25 bp, Saccharomyces pastorianus
ccaagatttattccagctactggag

SEQ ID NO: 185278 - DNA, 25 bp, Saccharomyces pastorianus
gatccaagatttattccagctactg

SEQ ID NO: 185279 - DNA, 25 bp, Saccharomyces pastorianus
aagtagtcgaagaagcgatccaaga

SEQ ID NO: 185280 - DNA, 25 bp, Saccharomyces pastorianus
tggacaaccaaataccacacgtatg

SEQ ID NO: 185281 - DNA, 25 bp, Saccharomyces pastorianus
gaaaaatgtagtatccagatggcta

SEQ ID NO: 185282 - DNA, 25 bp, Saccharomyces pastorianus
ataccacacgtatgaaaaatgtagt

SEQ ID NO: 185283 - DNA, 25 bp, Saccharomyces pastorianus
tagtatccagatggctacaacagcc

SEQ ID NO: 185284 - DNA, 25 bp, Saccharomyces pastorianus
caagacttttattacagattcagaa

SEQ ID NO: 185285 - DNA, 25 bp, Saccharomyces pastorianus
cgttaagtacctttccaacagctgg

SEQ ID NO: 185286 - DNA, 25 bp, Saccharomyces pastorianus
atgaacgtgcagctgcttctgtaaa

SEQ ID NO: 185287 - DNA, 25 bp, Saccharomyces pastorianus
attggtggtgtttcctatgactttc

SEQ ID NO: 185288 - DNA, 25 bp, Saccharomyces pastorianus
ctgatacgaagagtccagcgccatc

SEQ ID NO: 185289 - DNA, 25 bp, Saccharomyces pastorianus
aaacagcaacatttctccatcaacg

SEQ ID NO: 185290 - DNA, 25 bp, Saccharomyces pastorianus
atgatggtcagctctctgatacgaa

SEQ ID NO: 185291 - DNA, 25 bp, Saccharomyces pastorianus
tagtattatggaacctcaggcggct

SEQ ID NO: 185292 - DNA, 25 bp, Saccharomyces pastorianus
cgaagttctgtttctgctggtacca

SEQ ID NO: 185293 - DNA, 25 bp, Saccharomyces pastorianus
aacgccctctgcagtgttgaatgat

SEQ ID NO: 185294 - DNA, 25 bp, Saccharomyces pastorianus
caggcggctgatgcggtttcgacaa

SEQ ID NO: 185295 - DNA, 25 bp, Saccharomyces pastorianus
ggtttcgacaatggcgcctatatca

SEQ ID NO: 185296 - DNA, 25 bp, Saccharomyces pastorianus
tctagcgggatcgaaccgctgatcc

SEQ ID NO: 185297 - DNA, 25 bp, Saccharomyces pastorianus
aaccaactgggccaagagaccatta

SEQ ID NO: 185298 - DNA, 25 bp, Saccharomyces pastorianus
atggtctctagcgggatcgaaccgc

SEQ ID NO: 185299 - DNA, 25 bp, Saccharomyces pastorianus
cgaaccgctgatccccgcgttatta

SEQ ID NO: 185300 - DNA, 25 bp, Saccharomyces pastorianus
gtctctagcgggatcgaaccgctga

SEQ ID NO: 185301 - DNA, 25 bp, Saccharomyces pastorianus
tctctagcgggatcgaaccgctgat

SEQ ID NO: 185302 - DNA, 25 bp, Saccharomyces pastorianus
ctctagcgggatcgaaccgctgatc

SEQ ID NO: 185303 - DNA, 25 bp, Saccharomyces pastorianus
ggtctctagcgggatcgaaccgctg

SEQ ID NO: 185304 - DNA, 25 bp, Saccharomyces pastorianus
ggatcgaaccgctgatccccgcgtt

SEQ ID NO: 185305 - DNA, 25 bp, Saccharomyces pastorianus
tagcgggatcgaaccgctgatcccc

SEQ ID NO: 185306 - DNA, 25 bp, Saccharomyces pastorianus
gctgatccccgcgttattagcacgg

SEQ ID NO: 185307 - DNA, 25 bp, Saccharomyces pastorianus
tatttcatcgcgtgattgaggagca

SEQ ID NO: 185308 - DNA, 25 bp, Saccharomyces pastorianus
aaaataggcctttatttcatcgcgt

SEQ ID NO: 185309 - DNA, 25 bp, Saccharomyces pastorianus
ggcctttatttcatcgcgtgattga

SEQ ID NO: 185310 - DNA, 25 bp, Saccharomyces pastorianus
catcgcgtgattgaggagcataaca

SEQ ID NO: 185311 - DNA, 25 bp, Saccharomyces pastorianus
ggaaattttcaaaggcgttggatca

SEQ ID NO: 185312 - DNA, 25 bp, Saccharomyces pastorianus
taggcctttatttcatcgcgtgatt

SEQ ID NO: 185313 - DNA, 25 bp, Saccharomyces pastorianus
aataggcctttatttcatcgcgtga

SEQ ID NO: 185314 - DNA, 25 bp, Saccharomyces pastorianus
cgtgattgaggagcataacatgttt

SEQ ID NO: 185315 - DNA, 25 bp, Saccharomyces pastorianus
atgttcatggtaggtaccccaccca

SEQ ID NO: 185316 - DNA, 25 bp, Saccharomyces pastorianus
ccacccagccataaggaaattttca

SEQ ID NO: 185317 - DNA, 25 bp, Saccharomyces pastorianus
gtaggtaccccacccagccataagg

SEQ ID NO: 185318 - DNA, 25 bp, Saccharomyces pastorianus
ttgacgagtacgattctttctttta

SEQ ID NO: 185319 - DNA, 25 bp, Saccharomyces pastorianus
ggaattgacgagtacgattctttct

SEQ ID NO: 185320 - DNA, 25 bp, Saccharomyces pastorianus
tgacgagtacgattctttcttttaa

SEQ ID NO: 185321 - DNA, 25 bp, Saccharomyces pastorianus
aattgacgagtacgattctttcttt

SEQ ID NO: 185322 - DNA, 25 bp, Saccharomyces pastorianus
actgcttccatgtgccagcctcatt

SEQ ID NO: 185323 - DNA, 25 bp, Saccharomyces pastorianus
tgaacaactgcttccatgtgccagc

SEQ ID NO: 185324 - DNA, 25 bp, Saccharomyces pastorianus
aggaattgacgagtacgattctttc

SEQ ID NO: 185325 - DNA, 25 bp, Saccharomyces pastorianus
attgacgagtacgattctttctttt

SEQ ID NO: 185326 - DNA, 25 bp, Saccharomyces pastorianus
gttgaacaactgcttccatgtgcca

SEQ ID NO: 185327 - DNA, 25 bp, Saccharomyces pastorianus
gaattgacgagtacgattctttctt

SEQ ID NO: 185328 - DNA, 25 bp, Saccharomyces pastorianus
gattctttcttttaaatatcgtgaa

SEQ ID NO: 185329 - DNA, 25 bp, Saccharomyces pastorianus
aatattttgccaagaatggtaaaag

SEQ ID NO: 185330 - DNA, 25 bp, Saccharomyces pastorianus
gaatattttgccaagaatggtaaaa

SEQ ID NO: 185331 - DNA, 25 bp, Saccharomyces pastorianus
gaagaaagaatattttgccaagaat

SEQ ID NO: 185332 - DNA, 25 bp, Saccharomyces pastorianus
ggtaaaagaacaaccatggatggtg

SEQ ID NO: 185333 - DNA, 25 bp, Saccharomyces pastorianus
aagaagaaagaatattttgccaaga

SEQ ID NO: 185334 - DNA, 25 bp, Saccharomyces pastorianus
agaatattttgccaagaatggtaaa

SEQ ID NO: 185335 - DNA, 25 bp, Saccharomyces pastorianus
aaagaagaaagaatattttgccaag

SEQ ID NO: 185336 - DNA, 25 bp, Saccharomyces pastorianus
gaaagaatattttgccaagaatggt

SEQ ID NO: 185337 - DNA, 25 bp, Saccharomyces pastorianus
taaaagaacaaccatggatggtgac

SEQ ID NO: 185338 - DNA, 25 bp, Saccharomyces pastorianus
aaagaatattttgccaagaatggta

SEQ ID NO: 185339 - DNA, 25 bp, Saccharomyces pastorianus
tattttgccaagaatggtaaaagaa

SEQ ID NO: 185340 - DNA, 25 bp, Saccharomyces pastorianus
tttgatctttgagtcaccacaattg

SEQ ID NO: 185341 - DNA, 25 bp, Saccharomyces pastorianus
ctgcatagaagaggtacggccacac

SEQ ID NO: 185342 - DNA, 25 bp, Saccharomyces pastorianus
ggccacacaaggtactttacatttg

SEQ ID NO: 185343 - DNA, 25 bp, Saccharomyces pastorianus
tttacatttgactactcaccatttg

SEQ ID NO: 185344 - DNA, 25 bp, Saccharomyces pastorianus
ttgagtcaccacaattgtcgacgga

SEQ ID NO: 185345 - DNA, 25 bp, Saccharomyces pastorianus
gatctttgagtcaccacaattgtcg

SEQ ID NO: 185346 - DNA, 25 bp, Saccharomyces pastorianus
ggtactttacatttgactactcacc

SEQ ID NO: 185347 - DNA, 25 bp, Saccharomyces pastorianus
gaggtacggccacacaaggtacttt

SEQ ID NO: 185348 - DNA, 25 bp, Saccharomyces pastorianus
agtcaccacaattgtcgacggaatt

SEQ ID NO: 185349 - DNA, 25 bp, Saccharomyces pastorianus
tacggccacacaaggtactttacat

SEQ ID NO: 185350 - DNA, 25 bp, Saccharomyces pastorianus
acatttgactactcaccatttgatc

SEQ ID NO: 185351 - DNA, 25 bp, Saccharomyces pastorianus
taaggctaccatctgcaagcgacaa

SEQ ID NO: 185352 - DNA, 25 bp, Saccharomyces pastorianus
tccacagccgctgagattgcgaata

SEQ ID NO: 185353 - DNA, 25 bp, Saccharomyces pastorianus
gagttcatggagatcaactaccttt

SEQ ID NO: 185354 - DNA, 25 bp, Saccharomyces pastorianus
gtttacgagtcctcctttgatgtat

SEQ ID NO: 185355 - DNA, 25 bp, Saccharomyces pastorianus
ggtaccaatcgtgtcttggaattgc

SEQ ID NO: 185356 - DNA, 25 bp, Saccharomyces pastorianus
atggctactgtcttacaagtttacg

SEQ ID NO: 185357 - DNA, 25 bp, Saccharomyces pastorianus
gcccggcgtagatagtgcaactttt

SEQ ID NO: 185358 - DNA, 25 bp, Saccharomyces pastorianus
gaacaaattcagatccacagccgct

SEQ ID NO: 185359 - DNA, 25 bp, Saccharomyces pastorianus
ggaactcagcgatttgcatctaaca

SEQ ID NO: 185360 - DNA, 25 bp, Saccharomyces pastorianus
gaaccattgatcagcgatccattga

SEQ ID NO: 185361 - DNA, 25 bp, Saccharomyces pastorianus
ttggaattgcattggcagcccggcg

SEQ ID NO: 185362 - DNA, 25 bp, Saccharomyces pastorianus
accaaaaggttttctcaggacacag

SEQ ID NO: 185363 - DNA, 25 bp, Saccharomyces pastorianus
aatggtcttttggattggagctcat

SEQ ID NO: 185364 - DNA, 25 bp, Saccharomyces pastorianus
acagatttcgatgtttgtcaccaaa

SEQ ID NO: 185365 - DNA, 25 bp, Saccharomyces pastorianus
atcgacttgcatttgtgtcaacgga

SEQ ID NO: 185366 - DNA, 25 bp, Saccharomyces pastorianus
gcattaatcacgcaacaccaaaagg

SEQ ID NO: 185367 - DNA, 25 bp, Saccharomyces pastorianus
gaaattcggatcacttctaaaccag

SEQ ID NO: 185368 - DNA, 25 bp, Saccharomyces pastorianus
ggagctcattggtattcgattctat

SEQ ID NO: 185369 - DNA, 25 bp, Saccharomyces pastorianus
ggatacttccgtgtatctgatcgaa

SEQ ID NO: 185370 - DNA, 25 bp, Saccharomyces pastorianus
aagatttcattttcggtcggctatc

SEQ ID NO: 185371 - DNA, 25 bp, Saccharomyces pastorianus
aacaaatccggagctttcaaagagg

SEQ ID NO: 185372 - DNA, 25 bp, Saccharomyces pastorianus
cattgagcgacgatattttccgaat

SEQ ID NO: 185373 - DNA, 25 bp, Saccharomyces pastorianus
attgaatctgatgaggttcctcaac

SEQ ID NO: 185374 - DNA, 25 bp, Saccharomyces pastorianus
gaggttcctcaacaagagacaaaaa

SEQ ID NO: 185375 - DNA, 25 bp, Saccharomyces pastorianus
gagacaaaaaataacttacctagtg

SEQ ID NO: 185376 - DNA, 25 bp, Saccharomyces pastorianus
gacaaaaaataacttacctagtgca

SEQ ID NO: 185377 - DNA, 25 bp, Saccharomyces pastorianus
aaagaaggaaccgattgaatctgat

SEQ ID NO: 185378 - DNA, 25 bp, Saccharomyces pastorianus
gaaggaaccgattgaatctgatgag

SEQ ID NO: 185379 - DNA, 25 bp, Saccharomyces pastorianus
gaatctgatgaggttcctcaacaag

SEQ ID NO: 185380 - DNA, 25 bp, Saccharomyces pastorianus
gatgaggttcctcaacaagagacaa

SEQ ID NO: 185381 - DNA, 25 bp, Saccharomyces pastorianus
ccgattgaatctgatgaggttcctc

SEQ ID NO: 185382 - DNA, 25 bp, Saccharomyces pastorianus
gagtgggataaagaaggaaccgatt

SEQ ID NO: 185383 - DNA, 25 bp, Saccharomyces pastorianus
gattgaatctgatgaggttcctcaa

SEQ ID NO: 185384 - DNA, 25 bp, Saccharomyces pastorianus
ctggagaagcagtcttagagcatat

SEQ ID NO: 185385 - DNA, 25 bp, Saccharomyces pastorianus
tgtggtttgctctgttgtccccttg

SEQ ID NO: 185386 - DNA, 25 bp, Saccharomyces pastorianus
tagagcatatgtcagattcacaaga

SEQ ID NO: 185387 - DNA, 25 bp, Saccharomyces pastorianus
gtaactactgtggtttgttttgttg

SEQ ID NO: 185388 - DNA, 25 bp, Saccharomyces pastorianus
gttttgttgtttctgtggtttgctc

SEQ ID NO: 185389 - DNA, 25 bp, Saccharomyces pastorianus
ctgttgtccccttggtttgctttgt

SEQ ID NO: 185390 - DNA, 25 bp, Saccharomyces pastorianus
tgtccccttggtttgctttgttgtc

SEQ ID NO: 185391 - DNA, 25 bp, Saccharomyces pastorianus
cgccgctaacagtaacggtggccgt

SEQ ID NO: 185392 - DNA, 25 bp, Saccharomyces pastorianus
ggcaccatgtggtatactctgttgt

SEQ ID NO: 185393 - DNA, 25 bp, Saccharomyces pastorianus
cgtagtttgctttgttatctctgtg

SEQ ID NO: 185394 - DNA, 25 bp, Saccharomyces pastorianus
ttgctttgttgtctccgtagtttgc

SEQ ID NO: 185395 - DNA, 25 bp, Saccharomyces pastorianus
gggttgttttctgatcgcgtcttta

SEQ ID NO: 185396 - DNA, 25 bp, Saccharomyces pastorianus
ttctgatcgcgtctttatcttgtgt

SEQ ID NO: 185397 - DNA, 25 bp, Saccharomyces pastorianus
tcatcgggttgttttctgatcgcgt

SEQ ID NO: 185398 - DNA, 25 bp, Saccharomyces pastorianus
atcgggttgttttctgatcgcgtct

SEQ ID NO: 185399 - DNA, 25 bp, Saccharomyces pastorianus
tgatcgcgtctttatcttgtgtggg

SEQ ID NO: 185400 - DNA, 25 bp, Saccharomyces pastorianus
ttgttttctgatcgcgtctttatct

SEQ ID NO: 185401 - DNA, 25 bp, Saccharomyces pastorianus
accttattttcgctagtctttgata

SEQ ID NO: 185402 - DNA, 25 bp, Saccharomyces pastorianus
gaaaccttattttcgctagtctttg

SEQ ID NO: 185403 - DNA, 25 bp, Saccharomyces pastorianus
tattttcgctagtctttgatacggc

SEQ ID NO: 185404 - DNA, 25 bp, Saccharomyces pastorianus
ttcgctagtctttgatacggcgtat

SEQ ID NO: 185405 - DNA, 25 bp, Saccharomyces pastorianus
gggcttactgtatttgaaaccttat

SEQ ID NO: 185406 - DNA, 25 bp, Saccharomyces pastorianus
gtttctactttcttctcattgtata

SEQ ID NO: 185407 - DNA, 25 bp, Saccharomyces pastorianus
agccggtatctttctgggttactgt

SEQ ID NO: 185408 - DNA, 25 bp, Saccharomyces pastorianus
gaagattcaccgttagttactctgg

SEQ ID NO: 185409 - DNA, 25 bp, Saccharomyces pastorianus
gttgtgttttgcatggtctatcttc

SEQ ID NO: 185410 - DNA, 25 bp, Saccharomyces pastorianus
ttgtatactgttgaccgtttcggcc

SEQ ID NO: 185411 - DNA, 25 bp, Saccharomyces pastorianus
ctctgcctcgtggagcgaattagtc

SEQ ID NO: 185412 - DNA, 25 bp, Saccharomyces pastorianus
ttgctacatggtctatgcctctgta

SEQ ID NO: 185413 - DNA, 25 bp, Saccharomyces pastorianus
gaattaccaatcttccattgaggct

SEQ ID NO: 185414 - DNA, 25 bp, Saccharomyces pastorianus
ggccgtcgtaactgtctactgtggg

SEQ ID NO: 185415 - DNA, 25 bp, Saccharomyces pastorianus
gatgagttttgttcctgaatcccca

SEQ ID NO: 185416 - DNA, 25 bp, Saccharomyces pastorianus
caactgatgatcacagccggtatct

SEQ ID NO: 185417 - DNA, 25 bp, Saccharomyces pastorianus
gtttccatactggtaaggttctcag

SEQ ID NO: 185418 - DNA, 25 bp, Saccharomyces pastorianus
gatgaaggagctattattcctacaa

SEQ ID NO: 185419 - DNA, 25 bp, Saccharomyces pastorianus
gatacgtgcgtttccatactggtaa

SEQ ID NO: 185420 - DNA, 25 bp, Saccharomyces pastorianus
gtagctccaaatgtgttgatcaatt

SEQ ID NO: 185421 - DNA, 25 bp, Saccharomyces pastorianus
aggttctcagcgaatgtagctccaa

SEQ ID NO: 185422 - DNA, 25 bp, Saccharomyces pastorianus
gttttagccattgaaacttcctgtg

SEQ ID NO: 185423 - DNA, 25 bp, Saccharomyces pastorianus
agatactctggatagtgttgatgaa

SEQ ID NO: 185424 - DNA, 25 bp, Saccharomyces pastorianus
gagggtggcagattccttttaggta

SEQ ID NO: 185425 - DNA, 25 bp, Saccharomyces pastorianus
ggcagaagtctgtgttaaacaaacc

SEQ ID NO: 185426 - DNA, 25 bp, Saccharomyces pastorianus
gaaacttcctgtgacgatacgtgcg

SEQ ID NO: 185427 - DNA, 25 bp, Saccharomyces pastorianus
tattcctacaaaggctcatgtccat

SEQ ID NO: 185428 - DNA, 25 bp, Saccharomyces pastorianus
tgtccttttagccttttattcttgt

SEQ ID NO: 185429 - DNA, 25 bp, Saccharomyces pastorianus
caacgcttacgtttcgggaatgaag

SEQ ID NO: 185430 - DNA, 25 bp, Saccharomyces pastorianus
gtgctgcatatgtcaattctgtacc

SEQ ID NO: 185431 - DNA, 25 bp, Saccharomyces pastorianus
gcataccaatatttgtttggttcct

SEQ ID NO: 185432 - DNA, 25 bp, Saccharomyces pastorianus
taaccgttggtgctgcatatgtcaa

SEQ ID NO: 185433 - DNA, 25 bp, Saccharomyces pastorianus
gtaatgatttggtgcatactcaagt

SEQ ID NO: 185434 - DNA, 25 bp, Saccharomyces pastorianus
ggaagatttaggctttcaaggtaat

SEQ ID NO: 185435 - DNA, 25 bp, Saccharomyces pastorianus
ttattcttgtattgcttattgggtc

SEQ ID NO: 185436 - DNA, 25 bp, Saccharomyces pastorianus
atttcaattgccatttttgatttac

SEQ ID NO: 185437 - DNA, 25 bp, Saccharomyces pastorianus
ggatacggttaatataaacaacgct

SEQ ID NO: 185438 - DNA, 25 bp, Saccharomyces pastorianus
tatgttggtcgcttttaaccgttgg

SEQ ID NO: 185439 - DNA, 25 bp, Saccharomyces pastorianus
ggtaacatagcattcacccagatgg

SEQ ID NO: 185440 - DNA, 25 bp, Saccharomyces pastorianus
tcacaagcgctgtattcacaaatag

SEQ ID NO: 185441 - DNA, 25 bp, Saccharomyces pastorianus
aagcatgcagtagccattttgggta

SEQ ID NO: 185442 - DNA, 25 bp, Saccharomyces pastorianus
agatctattgtcttcctctgatttc

SEQ ID NO: 185443 - DNA, 25 bp, Saccharomyces pastorianus
aaaatttcggttccatcgcgactgt

SEQ ID NO: 185444 - DNA, 25 bp, Saccharomyces pastorianus
aagacctggtaaaagtatcgcaagc

SEQ ID NO: 185445 - DNA, 25 bp, Saccharomyces pastorianus
acgaatatcactctcatacttctcc

SEQ ID NO: 185446 - DNA, 25 bp, Saccharomyces pastorianus
gcgactgttttttgcgaagatctat

SEQ ID NO: 185447 - DNA, 25 bp, Saccharomyces pastorianus
tatagcaaattaccgccaagacctg

SEQ ID NO: 185448 - DNA, 25 bp, Saccharomyces pastorianus
caggtagaagatttgcctctgatat

SEQ ID NO: 185449 - DNA, 25 bp, Saccharomyces pastorianus
actctcttcactatatcacaagcgc

SEQ ID NO: 185450 - DNA, 25 bp, Saccharomyces pastorianus
gtgagatcatgatgtcccaatcaat

SEQ ID NO: 185451 - DNA, 25 bp, Saccharomyces pastorianus
tgcatctcaaattctgtccacagct

SEQ ID NO: 185452 - DNA, 25 bp, Saccharomyces pastorianus
atatatacctttgaacccattccgc

SEQ ID NO: 185453 - DNA, 25 bp, Saccharomyces pastorianus
agccttccctgattttttggagcga

SEQ ID NO: 185454 - DNA, 25 bp, Saccharomyces pastorianus
gatgaccaattctgcattgctgata

SEQ ID NO: 185455 - DNA, 25 bp, Saccharomyces pastorianus
tgaaaagctgttcagcgccgagcca

SEQ ID NO: 185456 - DNA, 25 bp, Saccharomyces pastorianus
agcgccgagccatttgtttcgcaaa

SEQ ID NO: 185457 - DNA, 25 bp, Saccharomyces pastorianus
accgaactaattgaagccttccctg

SEQ ID NO: 185458 - DNA, 25 bp, Saccharomyces pastorianus
tagttccatagcttctcccgagaaa

SEQ ID NO: 185459 - DNA, 25 bp, Saccharomyces pastorianus
gacattattgatacctctgcagcta

SEQ ID NO: 185460 - DNA, 25 bp, Saccharomyces pastorianus
ggtagattcctccaaaatttcgact

SEQ ID NO: 185461 - DNA, 25 bp, Saccharomyces pastorianus
gcatctatctattcattcacaccta

SEQ ID NO: 185462 - DNA, 25 bp, Saccharomyces pastorianus
gctctcggtgactcttacaccaata

SEQ ID NO: 185463 - DNA, 25 bp, Saccharomyces pastorianus
agacttgagttctatcacttccgtc

SEQ ID NO: 185464 - DNA, 25 bp, Saccharomyces pastorianus
gctgaagaaactggcgctgtctccg

SEQ ID NO: 185465 - DNA, 25 bp, Saccharomyces pastorianus
aaaatacgtcttctcatctgatcta

SEQ ID NO: 185466 - DNA, 25 bp, Saccharomyces pastorianus
gcggtgatctcacagttactggtaa

SEQ ID NO: 185467 - DNA, 25 bp, Saccharomyces pastorianus
gagcagcggtgacatttctttgagt

SEQ ID NO: 185468 - DNA, 25 bp, Saccharomyces pastorianus
gtctcgtcagctagtgcaagtgcca

SEQ ID NO: 185469 - DNA, 25 bp, Saccharomyces pastorianus
aagtaattgcaaccgaggccgtgga

SEQ ID NO: 185470 - DNA, 25 bp, Saccharomyces pastorianus
ggtaccgtttatttgccatccacaa

SEQ ID NO: 185471 - DNA, 25 bp, Saccharomyces pastorianus
cgctgccggtggtaagttgacttta

SEQ ID NO: 185472 - DNA, 25 bp, Saccharomyces pastorianus
taccgttcgtttgctcattattcta

SEQ ID NO: 185473 - DNA, 25 bp, Saccharomyces pastorianus
ggatgctctctcaaaatacgtcgaa

SEQ ID NO: 185474 - DNA, 25 bp, Saccharomyces pastorianus
tgcttttggcgtatggcgaatcttc

SEQ ID NO: 185475 - DNA, 25 bp, Saccharomyces pastorianus
gttgccagactatgcgctgatcgaa

SEQ ID NO: 185476 - DNA, 25 bp, Saccharomyces pastorianus
agattacaccagagcgttttccttc

SEQ ID NO: 185477 - DNA, 25 bp, Saccharomyces pastorianus
gcattttctgtagccgagtttatca

SEQ ID NO: 185478 - DNA, 25 bp, Saccharomyces pastorianus
taagatcctgttggcgtttgacaat

SEQ ID NO: 185479 - DNA, 25 bp, Saccharomyces pastorianus
gaatcttcgagtaccaacctggatg

SEQ ID NO: 185480 - DNA, 25 bp, Saccharomyces pastorianus
tttggataccaattcctgcgcttat

SEQ ID NO: 185481 - DNA, 25 bp, Saccharomyces pastorianus
aatgactattttgtgtaccgttcgt

SEQ ID NO: 185482 - DNA, 25 bp, Saccharomyces pastorianus
agcgttttccttcttgacaatcgtc

SEQ ID NO: 185483 - DNA, 25 bp, Saccharomyces pastorianus
aggactggtctcttgttcaaactgt

SEQ ID NO: 185484 - DNA, 25 bp, Saccharomyces pastorianus
attaaagttgccataccgtatcgtt

SEQ ID NO: 185485 - DNA, 25 bp, Saccharomyces pastorianus
attacgctggttactcttcttgttt

SEQ ID NO: 185486 - DNA, 25 bp, Saccharomyces pastorianus
gcaattgccaatccattacgctggt

SEQ ID NO: 185487 - DNA, 25 bp, Saccharomyces pastorianus
attgtttgaactctaccttggctgc

SEQ ID NO: 185488 - DNA, 25 bp, Saccharomyces pastorianus
ttgccatttatcaacgagctcccaa

SEQ ID NO: 185489 - DNA, 25 bp, Saccharomyces pastorianus
tttccgtagagaagctggttcccat

SEQ ID NO: 185490 - DNA, 25 bp, Saccharomyces pastorianus
tgtaccgactaccaatccagaaact

SEQ ID NO: 185491 - DNA, 25 bp, Saccharomyces pastorianus
gctggttcccatggtaaggacgctt

SEQ ID NO: 185492 - DNA, 25 bp, Saccharomyces pastorianus
tatcgttggtattgtctctggtgaa

SEQ ID NO: 185493 - DNA, 25 bp, Saccharomyces pastorianus
ggtgaaccagaattcttgccattta

SEQ ID NO: 185494 - DNA, 25 bp, Saccharomyces pastorianus
gaagacgctacttctgcatcttacc

SEQ ID NO: 185495 - DNA, 25 bp, Saccharomyces pastorianus
actgtcagtggcgttgctacggaat

SEQ ID NO: 185496 - DNA, 25 bp, Saccharomyces pastorianus
acagcaacgacgtgccttcgatttc

SEQ ID NO: 185497 - DNA, 25 bp, Saccharomyces pastorianus
gttactgataactctgtcaaccccg

SEQ ID NO: 185498 - DNA, 25 bp, Saccharomyces pastorianus
tgccttcggtttcagggactgctaa

SEQ ID NO: 185499 - DNA, 25 bp, Saccharomyces pastorianus
agcacatccaactaccatggctgat

SEQ ID NO: 185500 - DNA, 25 bp, Saccharomyces pastorianus
tgagactgccacttctgctatcttt

SEQ ID NO: 185501 - DNA, 25 bp, Saccharomyces pastorianus
agttactttctgtgagtctggcgtc

SEQ ID NO: 185502 - DNA, 25 bp, Saccharomyces pastorianus
attggccatagcagtagcgtgcctt

SEQ ID NO: 185503 - DNA, 25 bp, Saccharomyces pastorianus
gacttctgctgtcacaacaggcgaa

SEQ ID NO: 185504 - DNA, 25 bp, Saccharomyces pastorianus
cttaccgcgatcgtactactattga

SEQ ID NO: 185505 - DNA, 25 bp, Saccharomyces pastorianus
tgctttaaacggcttccgcggaaga

SEQ ID NO: 185506 - DNA, 25 bp, Saccharomyces pastorianus
aagaagtatttccatctcttgaatt

SEQ ID NO: 185507 - DNA, 25 bp, Saccharomyces pastorianus
gtctgctttaaacggcttccgcgga

SEQ ID NO: 185508 - DNA, 25 bp, Saccharomyces pastorianus
aagtatttccatctcttgaattcgt

SEQ ID NO: 185509 - DNA, 25 bp, Saccharomyces pastorianus
taaacggcttccgcggaagaagtat

SEQ ID NO: 185510 - DNA, 25 bp, Saccharomyces pastorianus
ctaagcctaaattcagtctgcttta

SEQ ID NO: 185511 - DNA, 25 bp, Saccharomyces pastorianus
gaagtatttccatctcttgaattcg

SEQ ID NO: 185512 - DNA, 25 bp, Saccharomyces pastorianus
agaagtatttccatctcttgaattc

SEQ ID NO: 185513 - DNA, 25 bp, Saccharomyces pastorianus
tctgctttaaacggcttccgcggaa

SEQ ID NO: 185514 - DNA, 25 bp, Saccharomyces pastorianus
tttccatctcttgaattcgtacaac

SEQ ID NO: 185515 - DNA, 25 bp, Saccharomyces pastorianus
gaagaagtatttccatctcttgaat

SEQ ID NO: 185516 - DNA, 25 bp, Saccharomyces pastorianus
gcgttattagcacggtgccttaacc

SEQ ID NO: 185517 - DNA, 25 bp, Saccharomyces pastorianus
aagagaccatgaaaactgtttgggg

SEQ ID NO: 185518 - DNA, 25 bp, Saccharomyces pastorianus
ccaagagaccatgaaaactgtttgg

SEQ ID NO: 185519 - DNA, 25 bp, Saccharomyces pastorianus
gccaagagaccatgaaaactgtttg

SEQ ID NO: 185520 - DNA, 25 bp, Saccharomyces pastorianus
tattagcacggtgccttaaccaact

SEQ ID NO: 185521 - DNA, 25 bp, Saccharomyces pastorianus
attagcacggtgccttaaccaactg

SEQ ID NO: 185522 - DNA, 25 bp, Saccharomyces pastorianus
agcacggtgccttaaccaactgggc

SEQ ID NO: 185523 - DNA, 25 bp, Saccharomyces pastorianus
ttattagcacggtgccttaaccaac

SEQ ID NO: 185524 - DNA, 25 bp, Saccharomyces pastorianus
gttattagcacggtgccttaaccaa

SEQ ID NO: 185525 - DNA, 25 bp, Saccharomyces pastorianus
agagaccatgaaaactgtttggggg

SEQ ID NO: 185526 - DNA, 25 bp, Saccharomyces pastorianus
caagagaccatgaaaactgtttggg

SEQ ID NO: 185527 - DNA, 25 bp, Saccharomyces pastorianus
accagtccaaacaacactattccaa

SEQ ID NO: 185528 - DNA, 25 bp, Saccharomyces pastorianus
tgccaactccatggcagctggtgtt

SEQ ID NO: 185529 - DNA, 25 bp, Saccharomyces pastorianus
aactcgactaccagtccaaacaaca

SEQ ID NO: 185530 - DNA, 25 bp, Saccharomyces pastorianus
caaacaacactattccaaacaacac

SEQ ID NO: 185531 - DNA, 25 bp, Saccharomyces pastorianus
aacgtgaccacgaccgtctcgaccg

SEQ ID NO: 185532 - DNA, 25 bp, Saccharomyces pastorianus
cgactaccagtccaaacaacactat

SEQ ID NO: 185533 - DNA, 25 bp, Saccharomyces pastorianus
gccacagtcactgctatacaagctg

SEQ ID NO: 185534 - DNA, 25 bp, Saccharomyces pastorianus
acaagctgccaactcgactaccagt

SEQ ID NO: 185535 - DNA, 25 bp, Saccharomyces pastorianus
tatacaagctgccaactcgactacc

SEQ ID NO: 185536 - DNA, 25 bp, Saccharomyces pastorianus
ttctagccacagtcactgctataca

SEQ ID NO: 185537 - DNA, 25 bp, Saccharomyces pastorianus
taacaacaccactcccaacgtgacc

SEQ ID NO: 185538 - DNA, 25 bp, Saccharomyces pastorianus
tatttgccacagtcggtgtcacaag

SEQ ID NO: 185539 - DNA, 25 bp, Saccharomyces pastorianus
gggctttttgatcggctttttcaca

SEQ ID NO: 185540 - DNA, 25 bp, Saccharomyces pastorianus
gccccaatttcctacgtcattgtag

SEQ ID NO: 185541 - DNA, 25 bp, Saccharomyces pastorianus
gaaaagaccagccatcgtcgcaaag

SEQ ID NO: 185542 - DNA, 25 bp, Saccharomyces pastorianus
tgttttgctattacttgggccccaa

SEQ ID NO: 185543 - DNA, 25 bp, Saccharomyces pastorianus
gattgtcaactttgcatccaccttt

SEQ ID NO: 185544 - DNA, 25 bp, Saccharomyces pastorianus
ctttgttgcgctatacatcgtcgat

SEQ ID NO: 185545 - DNA, 25 bp, Saccharomyces pastorianus
ggtttctcttatggctacgttttca

SEQ ID NO: 185546 - DNA, 25 bp, Saccharomyces pastorianus
gggtctgcatcaatggccatctgtt

SEQ ID NO: 185547 - DNA, 25 bp, Saccharomyces pastorianus
gccatctgttttgtcatatttgcca

SEQ ID NO: 185548 - DNA, 25 bp, Saccharomyces pastorianus
cgtccattgtgctcgggattgtcaa

SEQ ID NO: 185549 - DNA, 25 bp, Saccharomyces pastorianus
tgagtcggctctaaataacaaaaac

SEQ ID NO: 185550 - DNA, 25 bp, Saccharomyces pastorianus
cgataggcgtaagtttgaaaaagca

SEQ ID NO: 185551 - DNA, 25 bp, Saccharomyces pastorianus
acgagtttgagtcggctctaaataa

SEQ ID NO: 185552 - DNA, 25 bp, Saccharomyces pastorianus
gagtcggctctaaataacaaaaacg

SEQ ID NO: 185553 - DNA, 25 bp, Saccharomyces pastorianus
tttgagtcggctctaaataacaaaa

SEQ ID NO: 185554 - DNA, 25 bp, Saccharomyces pastorianus
gacgagtttgagtcggctctaaata

SEQ ID NO: 185555 - DNA, 25 bp, Saccharomyces pastorianus
tttgaaaaagcaaactttgacgagt

SEQ ID NO: 185556 - DNA, 25 bp, Saccharomyces pastorianus
agtttgagtcggctctaaataacaa

SEQ ID NO: 185557 - DNA, 25 bp, Saccharomyces pastorianus
gtttgagtcggctctaaataacaaa

SEQ ID NO: 185558 - DNA, 25 bp, Saccharomyces pastorianus
ttgagtcggctctaaataacaaaaa

SEQ ID NO: 185559 - DNA, 25 bp, Saccharomyces pastorianus
ggctctaaataacaaaaacgacttg

SEQ ID NO: 185560 - DNA, 25 bp, Saccharomyces pastorianus
aaacgcttggcatgttccagtaaca

SEQ ID NO: 185561 - DNA, 25 bp, Saccharomyces pastorianus
gatcatattacaaacgcttggcatg

SEQ ID NO: 185562 - DNA, 25 bp, Saccharomyces pastorianus
atattacaaacgcttggcatgttcc

SEQ ID NO: 185563 - DNA, 25 bp, Saccharomyces pastorianus
aacgcttggcatgttccagtaacag

SEQ ID NO: 185564 - DNA, 25 bp, Saccharomyces pastorianus
cgcttggcatgttccagtaacagca

SEQ ID NO: 185565 - DNA, 25 bp, Saccharomyces pastorianus
caaacgcttggcatgttccagtaac

SEQ ID NO: 185566 - DNA, 25 bp, Saccharomyces pastorianus
attacaaacgcttggcatgttccag

SEQ ID NO: 185567 - DNA, 25 bp, Saccharomyces pastorianus
ttacaaacgcttggcatgttccagt

SEQ ID NO: 185568 - DNA, 25 bp, Saccharomyces pastorianus
tcatattacaaacgcttggcatgtt

SEQ ID NO: 185569 - DNA, 25 bp, Saccharomyces pastorianus
acgcttggcatgttccagtaacagc

SEQ ID NO: 185570 - DNA, 25 bp, Saccharomyces pastorianus
acaaacgcttggcatgttccagtaa

SEQ ID NO: 185571 - DNA, 25 bp, Saccharomyces pastorianus
gtcgtggctatcatttcagaacttt

SEQ ID NO: 185572 - DNA, 25 bp, Saccharomyces pastorianus
agaacttttcatatctgttgacgtt

SEQ ID NO: 185573 - DNA, 25 bp, Saccharomyces pastorianus
ttttcatatctgttgacgttctcct

SEQ ID NO: 185574 - DNA, 25 bp, Saccharomyces pastorianus
gtggctatcatttcagaacttttca

SEQ ID NO: 185575 - DNA, 25 bp, Saccharomyces pastorianus
ggctatcatttcagaacttttcata

SEQ ID NO: 185576 - DNA, 25 bp, Saccharomyces pastorianus
ggtagaaattgtcgtggctatcatt

SEQ ID NO: 185577 - DNA, 25 bp, Saccharomyces pastorianus
tcgtggctatcatttcagaactttt

SEQ ID NO: 185578 - DNA, 25 bp, Saccharomyces pastorianus
tgaagtggtagaaattgtcgtggct

SEQ ID NO: 185579 - DNA, 25 bp, Saccharomyces pastorianus
ttcatatctgttgacgttctcctag

SEQ ID NO: 185580 - DNA, 25 bp, Saccharomyces pastorianus
ttgtcgtggctatcatttcagaact

SEQ ID NO: 185581 - DNA, 25 bp, Saccharomyces pastorianus
catatctgttgacgttctcctagta

SEQ ID NO: 185582 - DNA, 25 bp, Saccharomyces pastorianus
tagctttggattcttgtgcagcccg

SEQ ID NO: 185583 - DNA, 25 bp, Saccharomyces pastorianus
gattcttcctcaagttttttcagcc

SEQ ID NO: 185584 - DNA, 25 bp, Saccharomyces pastorianus
ttaatatcctcctcagcactttttt

SEQ ID NO: 185585 - DNA, 25 bp, Saccharomyces pastorianus
gaggatttcaactccgtttcattgc

SEQ ID NO: 185586 - DNA, 25 bp, Saccharomyces pastorianus
tttcaagctctccaggtctcgttta

SEQ ID NO: 185587 - DNA, 25 bp, Saccharomyces pastorianus
ctcgtttactatctcgctctattga

SEQ ID NO: 185588 - DNA, 25 bp, Saccharomyces pastorianus
gtttcattgctctcaatcgtactct

SEQ ID NO: 185589 - DNA, 25 bp, Saccharomyces pastorianus
gaagcttttcgtcatttctagttat

SEQ ID NO: 185590 - DNA, 25 bp, Saccharomyces pastorianus
gcccttcttcaactttagctttgga

SEQ ID NO: 185591 - DNA, 25 bp, Saccharomyces pastorianus
gtattatcgatctctttggctttta

SEQ ID NO: 185592 - DNA, 25 bp, Saccharomyces pastorianus
tctagttcactcctcgtattatcga

SEQ ID NO: 185593 - DNA, 25 bp, Saccharomyces pastorianus
tctgctgcgaagttagttgatctat

SEQ ID NO: 185594 - DNA, 25 bp, Saccharomyces pastorianus
tagttgatctatgtaaaaaagccag

SEQ ID NO: 185595 - DNA, 25 bp, Saccharomyces pastorianus
gaagcgctttctaatattatttttg

SEQ ID NO: 185596 - DNA, 25 bp, Saccharomyces pastorianus
atgacggaactttatctgctgcgaa

SEQ ID NO: 185597 - DNA, 25 bp, Saccharomyces pastorianus
gtatgctgatagagagattgactta

SEQ ID NO: 185598 - DNA, 25 bp, Saccharomyces pastorianus
aagccagaattttgcagtatgctga

SEQ ID NO: 185599 - DNA, 25 bp, Saccharomyces pastorianus
actttcccagggaagcgtgtatctg

SEQ ID NO: 185600 - DNA, 25 bp, Saccharomyces pastorianus
ggaagcgtgtatctgcatcattcaa

SEQ ID NO: 185601 - DNA, 25 bp, Saccharomyces pastorianus
gtgtatctgcatcattcaaaatcta

SEQ ID NO: 185602 - DNA, 25 bp, Saccharomyces pastorianus
tatttttggacgttatgacggaact

SEQ ID NO: 185603 - DNA, 25 bp, Saccharomyces pastorianus
tagtaaagtgttcagtatcagaagc

SEQ ID NO: 185604 - DNA, 25 bp, Saccharomyces pastorianus
gccccatagatgacctgaagttaca

SEQ ID NO: 185605 - DNA, 25 bp, Saccharomyces pastorianus
gaaatcgaagattcaagccccatag

SEQ ID NO: 185606 - DNA, 25 bp, Saccharomyces pastorianus
tcaagccccatagatgacctgaagt

SEQ ID NO: 185607 - DNA, 25 bp, Saccharomyces pastorianus
gtttattttggaccctgtgagatat

SEQ ID NO: 185608 - DNA, 25 bp, Saccharomyces pastorianus
atcgaagattcaagccccatagatg

SEQ ID NO: 185609 - DNA, 25 bp, Saccharomyces pastorianus
ttttggaccctgtgagatattgaca

SEQ ID NO: 185610 - DNA, 25 bp, Saccharomyces pastorianus
gatgacctgaagttacaaaaactgg

SEQ ID NO: 185611 - DNA, 25 bp, Saccharomyces pastorianus
gttacaaaaactggataccaatgtt

SEQ ID NO: 185612 - DNA, 25 bp, Saccharomyces pastorianus
gattcaagccccatagatgacctga

SEQ ID NO: 185613 - DNA, 25 bp, Saccharomyces pastorianus
caatgtttattttggaccctgtgag

SEQ ID NO: 185614 - DNA, 25 bp, Saccharomyces pastorianus
gataccaatgtttattttggaccct

SEQ ID NO: 185615 - DNA, 25 bp, Saccharomyces pastorianus
gtcaatctggcgtctatgaaggtga

SEQ ID NO: 185616 - DNA, 25 bp, Saccharomyces pastorianus
ggagcatcaacactcaaggcgagaa

SEQ ID NO: 185617 - DNA, 25 bp, Saccharomyces pastorianus
aagtcggttcgtgcagtttattctg

SEQ ID NO: 185618 - DNA, 25 bp, Saccharomyces pastorianus
gaagctgtgtctaggagcatcaaca

SEQ ID NO: 185619 - DNA, 25 bp, Saccharomyces pastorianus
ggtaagcgtgccattaattatcaaa

SEQ ID NO: 185620 - DNA, 25 bp, Saccharomyces pastorianus
aagaaactcaagtcggttcgtgcag

SEQ ID NO: 185621 - DNA, 25 bp, Saccharomyces pastorianus
tgtctcaggtgatggtaagcgtgcc

SEQ ID NO: 185622 - DNA, 25 bp, Saccharomyces pastorianus
ataatggtgctgacctagacgataa

SEQ ID NO: 185623 - DNA, 25 bp, Saccharomyces pastorianus
attctggtggtcaatctggcgtcta

SEQ ID NO: 185624 - DNA, 25 bp, Saccharomyces pastorianus
gacgataaggattacggttctgaag

SEQ ID NO: 185625 - DNA, 25 bp, Saccharomyces pastorianus
tggcggaattggctgaaaatgtctc

SEQ ID NO: 185626 - DNA, 25 bp, Saccharomyces pastorianus
caccaggaaattgttgagaaacttc

SEQ ID NO: 185627 - DNA, 25 bp, Saccharomyces pastorianus
aactcgaagaaacaattctatcact

SEQ ID NO: 185628 - DNA, 25 bp, Saccharomyces pastorianus
gaatcaggctttgattgcttcaaga

SEQ ID NO: 185629 - DNA, 25 bp, Saccharomyces pastorianus
tactgacgagttagctggaaaacaa

SEQ ID NO: 185630 - DNA, 25 bp, Saccharomyces pastorianus
gagaaacttcagaatcaggctttga

SEQ ID NO: 185631 - DNA, 25 bp, Saccharomyces pastorianus
gattgagcactcaaattcaagagtc

SEQ ID NO: 185632 - DNA, 25 bp, Saccharomyces pastorianus
gaaaattactgacgagttagctgga

SEQ ID NO: 185633 - DNA, 25 bp, Saccharomyces pastorianus
ttgcttcaagattgagcactcaaat

SEQ ID NO: 185634 - DNA, 25 bp, Saccharomyces pastorianus
aactatatggtgatccttctaccga

SEQ ID NO: 185635 - DNA, 25 bp, Saccharomyces pastorianus
tcaagagtcagaacacacacataag

SEQ ID NO: 185636 - DNA, 25 bp, Saccharomyces pastorianus
ctatatggtgatccttctaccgaac

SEQ ID NO: 185637 - DNA, 25 bp, Saccharomyces pastorianus
ataccaccgcaaatgcttttactgg

SEQ ID NO: 185638 - DNA, 25 bp, Saccharomyces pastorianus
ggagagctgcccttggcaaagtcaa

SEQ ID NO: 185639 - DNA, 25 bp, Saccharomyces pastorianus
cattaattccatattctccttcaca

SEQ ID NO: 185640 - DNA, 25 bp, Saccharomyces pastorianus
aagcaacgactcttccagtagttct

SEQ ID NO: 185641 - DNA, 25 bp, Saccharomyces pastorianus
aagtaccggcagtgacgttttagat

SEQ ID NO: 185642 - DNA, 25 bp, Saccharomyces pastorianus
agagaatttaaccactgacctgccc

SEQ ID NO: 185643 - DNA, 25 bp, Saccharomyces pastorianus
acagctccatttggataccgttctc

SEQ ID NO: 185644 - DNA, 25 bp, Saccharomyces pastorianus
aaaagctcatccagttataccaccg

SEQ ID NO: 185645 - DNA, 25 bp, Saccharomyces pastorianus
ggaaatgactcatcgcactctgatc

SEQ ID NO: 185646 - DNA, 25 bp, Saccharomyces pastorianus
aagtttgccaactcagtcaagcaca

SEQ ID NO: 185647 - DNA, 25 bp, Saccharomyces pastorianus
ttcctctgggaacaaatcatctagt

SEQ ID NO: 185648 - DNA, 25 bp, Saccharomyces pastorianus
tgcttccatgtgccagcctcatttt

SEQ ID NO: 185649 - DNA, 25 bp, Saccharomyces pastorianus
actgcttccatgtgccagcctcatt

SEQ ID NO: 185650 - DNA, 25 bp, Saccharomyces pastorianus
gaacaactgcttccatgtgccagcc

SEQ ID NO: 185651 - DNA, 25 bp, Saccharomyces pastorianus
ttgaacaactgcttccatgtgccag

SEQ ID NO: 185652 - DNA, 25 bp, Saccharomyces pastorianus
tgaacaactgcttccatgtgccagc

SEQ ID NO: 185653 - DNA, 25 bp, Saccharomyces pastorianus
aacaactgcttccatgtgccagcct

SEQ ID NO: 185654 - DNA, 25 bp, Saccharomyces pastorianus
catgtgccagcctcattttgcgtaa

SEQ ID NO: 185655 - DNA, 25 bp, Saccharomyces pastorianus
ctgcttccatgtgccagcctcattt

SEQ ID NO: 185656 - DNA, 25 bp, Saccharomyces pastorianus
caactgcttccatgtgccagcctca

SEQ ID NO: 185657 - DNA, 25 bp, Saccharomyces pastorianus
gttgaacaactgcttccatgtgcca

SEQ ID NO: 185658 - DNA, 25 bp, Saccharomyces pastorianus
acaactgcttccatgtgccagcctc

SEQ ID NO: 185659 - DNA, 25 bp, Saccharomyces pastorianus
cacccacatcattatgcacggcact

SEQ ID NO: 185660 - DNA, 25 bp, Saccharomyces pastorianus
cacatcattatgcacggcacttgcc

SEQ ID NO: 185661 - DNA, 25 bp, Saccharomyces pastorianus
acatcattatgcacggcacttgcct

SEQ ID NO: 185662 - DNA, 25 bp, Saccharomyces pastorianus
tgcacccacatcattatgcacggca

SEQ ID NO: 185663 - DNA, 25 bp, Saccharomyces pastorianus
atgcacccacatcattatgcacggc

SEQ ID NO: 185664 - DNA, 25 bp, Saccharomyces pastorianus
cccacatcattatgcacggcacttg

SEQ ID NO: 185665 - DNA, 25 bp, Saccharomyces pastorianus
gcacccacatcattatgcacggcac

SEQ ID NO: 185666 - DNA, 25 bp, Saccharomyces pastorianus
acccacatcattatgcacggcactt

SEQ ID NO: 185667 - DNA, 25 bp, Saccharomyces pastorianus
ccacatcattatgcacggcacttgc

SEQ ID NO: 185668 - DNA, 25 bp, Saccharomyces pastorianus
cacaacatgagaaatgggtaaatga

SEQ ID NO: 185669 - DNA, 25 bp, Saccharomyces pastorianus
tgtacacaacatgagaaatgggtaa

SEQ ID NO: 185670 - DNA, 25 bp, Saccharomyces pastorianus
agaaatgggtaaatgatgagataat

SEQ ID NO: 185671 - DNA, 25 bp, Saccharomyces pastorianus
atgagaaatgggtaaatgatgagat

SEQ ID NO: 185672 - DNA, 25 bp, Saccharomyces pastorianus
tgagaaatgggtaaatgatgagata

SEQ ID NO: 185673 - DNA, 25 bp, Saccharomyces pastorianus
gtacacaacatgagaaatgggtaaa

SEQ ID NO: 185674 - DNA, 25 bp, Saccharomyces pastorianus
caacatgagaaatgggtaaatgatg

SEQ ID NO: 185675 - DNA, 25 bp, Saccharomyces pastorianus
acacaacatgagaaatgggtaaatg

SEQ ID NO: 185676 - DNA, 25 bp, Saccharomyces pastorianus
tacacaacatgagaaatgggtaaat

SEQ ID NO: 185677 - DNA, 25 bp, Saccharomyces pastorianus
acaacatgagaaatgggtaaatgat

SEQ ID NO: 185678 - DNA, 25 bp, Saccharomyces pastorianus
gagaaatgggtaaatgatgagataa

SEQ ID NO: 185679 - DNA, 25 bp, Saccharomyces pastorianus
atctatatttctacatactaatatt

SEQ ID NO: 185680 - DNA, 25 bp, Saccharomyces pastorianus
tatatttctacatactaatattacg

SEQ ID NO: 185681 - DNA, 25 bp, Saccharomyces pastorianus
aatctatatttctacatactaatat

SEQ ID NO: 185682 - DNA, 25 bp, Saccharomyces pastorianus
gaatctatatttctacatactaata

SEQ ID NO: 185683 - DNA, 25 bp, Saccharomyces pastorianus
atactaatattacgattattcctca

SEQ ID NO: 185684 - DNA, 25 bp, Saccharomyces pastorianus
tggaatctatatttctacatactaa

SEQ ID NO: 185685 - DNA, 25 bp, Saccharomyces pastorianus
ttccgtttcatatgtctcattatcc

SEQ ID NO: 185686 - DNA, 25 bp, Saccharomyces pastorianus
atggaatctatatttctacatacta

SEQ ID NO: 185687 - DNA, 25 bp, Saccharomyces pastorianus
ctatatttctacatactaatattac

SEQ ID NO: 185688 - DNA, 25 bp, Saccharomyces pastorianus
tctatatttctacatactaatatta

SEQ ID NO: 185689 - DNA, 25 bp, Saccharomyces pastorianus
ggaatctatatttctacatactaat

SEQ ID NO: 185690 - DNA, 25 bp, Saccharomyces pastorianus
gcgtatacttatggttggtctagat

SEQ ID NO: 185691 - DNA, 25 bp, Saccharomyces pastorianus
tgtctggttagtcttcgctaacaaa

SEQ ID NO: 185692 - DNA, 25 bp, Saccharomyces pastorianus
tgcaacctcgggtgaaggtctgtac

SEQ ID NO: 185693 - DNA, 25 bp, Saccharomyces pastorianus
tattcagcaatctttttggcaacaa

SEQ ID NO: 185694 - DNA, 25 bp, Saccharomyces pastorianus
tatacgcttctaagttattcagcaa

SEQ ID NO: 185695 - DNA, 25 bp, Saccharomyces pastorianus
ggtgttatttttgtcatcgattcca

SEQ ID NO: 185696 - DNA, 25 bp, Saccharomyces pastorianus
caccgaaggtgttatttttgtcatc

SEQ ID NO: 185697 - DNA, 25 bp, Saccharomyces pastorianus
gagatgcgtatacttatggttggtc

SEQ ID NO: 185698 - DNA, 25 bp, Saccharomyces pastorianus
atggtttatccagtctacttgtgca

SEQ ID NO: 185699 - DNA, 25 bp, Saccharomyces pastorianus
agtctacttgtgcaacctcgggtga

SEQ ID NO: 185700 - DNA, 25 bp, Saccharomyces pastorianus
ttttgtcatcgattccaacgataga

SEQ ID NO: 185701 - DNA, 25 bp, Saccharomyces pastorianus
agttccatcctagccatgatacagt

SEQ ID NO: 185702 - DNA, 25 bp, Saccharomyces pastorianus
attggcggttcttcaaatgagttag

SEQ ID NO: 185703 - DNA, 25 bp, Saccharomyces pastorianus
ttttatcaatatgtcggtttaggta

SEQ ID NO: 185704 - DNA, 25 bp, Saccharomyces pastorianus
atgagttaggcatcgagctctgcga

SEQ ID NO: 185705 - DNA, 25 bp, Saccharomyces pastorianus
aaatattgacactatagacagtatt

SEQ ID NO: 185706 - DNA, 25 bp, Saccharomyces pastorianus
taggcatcgagctctgcgagacatt

SEQ ID NO: 185707 - DNA, 25 bp, Saccharomyces pastorianus
agtcctcgtaagtttttatcaatat

SEQ ID NO: 185708 - DNA, 25 bp, Saccharomyces pastorianus
catcctagccatgatacagtattaa

SEQ ID NO: 185709 - DNA, 25 bp, Saccharomyces pastorianus
cgagctctgcgagacatttatagaa

SEQ ID NO: 185710 - DNA, 25 bp, Saccharomyces pastorianus
taaaaagttccatcctagccatgat

SEQ ID NO: 185711 - DNA, 25 bp, Saccharomyces pastorianus
cagtattaatcattggcggttcttc

SEQ ID NO: 185712 - DNA, 25 bp, Saccharomyces pastorianus
cacacggccaagacatcggtatcaa

SEQ ID NO: 185713 - DNA, 25 bp, Saccharomyces pastorianus
tacgtagacaaagttcccaaggaca

SEQ ID NO: 185714 - DNA, 25 bp, Saccharomyces pastorianus
tcctcttttgttaacggtaaatgca

SEQ ID NO: 185715 - DNA, 25 bp, Saccharomyces pastorianus
cggtaaatgcaggaacagggacctt

SEQ ID NO: 185716 - DNA, 25 bp, Saccharomyces pastorianus
tgtcctgtcgaatttcccaagatag

SEQ ID NO: 185717 - DNA, 25 bp, Saccharomyces pastorianus
attttacgctgatggtggcgggtca

SEQ ID NO: 185718 - DNA, 25 bp, Saccharomyces pastorianus
aataaacaccaattcacacggccaa

SEQ ID NO: 185719 - DNA, 25 bp, Saccharomyces pastorianus
atcctccgaaaagccctgaactgaa

SEQ ID NO: 185720 - DNA, 25 bp, Saccharomyces pastorianus
ccaaggacagtacgccgtcgattca

SEQ ID NO: 185721 - DNA, 25 bp, Saccharomyces pastorianus
gaagacagaggtcatcctcttttgt

SEQ ID NO: 185722 - DNA, 25 bp, Saccharomyces pastorianus
cgtcgattcacatcctccgaaaagc

SEQ ID NO: 185723 - DNA, 25 bp, Saccharomyces pastorianus
tgacatatgtggtccctcatcttca

SEQ ID NO: 185724 - DNA, 25 bp, Saccharomyces pastorianus
ttggcgtatttctttgaagatgaca

SEQ ID NO: 185725 - DNA, 25 bp, Saccharomyces pastorianus
atgtggtccctcatcttcagagaaa

SEQ ID NO: 185726 - DNA, 25 bp, Saccharomyces pastorianus
ccattgcattttgaactatggccat

SEQ ID NO: 185727 - DNA, 25 bp, Saccharomyces pastorianus
gaagatgacatatgtggtccctcat

SEQ ID NO: 185728 - DNA, 25 bp, Saccharomyces pastorianus
gagaaacctgtgtctcagttaccat

SEQ ID NO: 185729 - DNA, 25 bp, Saccharomyces pastorianus
gggaatttggcgtatttctttgaag

SEQ ID NO: 185730 - DNA, 25 bp, Saccharomyces pastorianus
gtctcagttaccattgcattttgaa

SEQ ID NO: 185731 - DNA, 25 bp, Saccharomyces pastorianus
gtccctcatcttcagagaaacctgt

SEQ ID NO: 185732 - DNA, 25 bp, Saccharomyces pastorianus
ctgtgtctcagttaccattgcattt

SEQ ID NO: 185733 - DNA, 25 bp, Saccharomyces pastorianus
atgagaggagagtttacgggaattt

SEQ ID NO: 185734 - DNA, 25 bp, Saccharomyces pastorianus
ctgaagtctcacattccggtgaaaa

SEQ ID NO: 185735 - DNA, 25 bp, Saccharomyces pastorianus
gaaaatttcagctttaagcaatgaa

SEQ ID NO: 185736 - DNA, 25 bp, Saccharomyces pastorianus
ttccgaaaatttcagctttaagcaa

SEQ ID NO: 185737 - DNA, 25 bp, Saccharomyces pastorianus
catctcacatgttccgaaaatttca

SEQ ID NO: 185738 - DNA, 25 bp, Saccharomyces pastorianus
gaagtctcacattccggtgaaaaaa

SEQ ID NO: 185739 - DNA, 25 bp, Saccharomyces pastorianus
gcgccatctcacatgttccgaaaat

SEQ ID NO: 185740 - DNA, 25 bp, Saccharomyces pastorianus
gccatctcacatgttccgaaaattt

SEQ ID NO: 185741 - DNA, 25 bp, Saccharomyces pastorianus
gctcatagcgccatctcacatgttc

SEQ ID NO: 185742 - DNA, 25 bp, Saccharomyces pastorianus
cgccatctcacatgttccgaaaatt

SEQ ID NO: 185743 - DNA, 25 bp, Saccharomyces pastorianus
tagcgccatctcacatgttccgaaa

SEQ ID NO: 185744 - DNA, 25 bp, Saccharomyces pastorianus
atagcgccatctcacatgttccgaa

SEQ ID NO: 185745 - DNA, 25 bp, Saccharomyces pastorianus
tgccttattaaaaatggaatcccaa

SEQ ID NO: 185746 - DNA, 25 bp, Saccharomyces pastorianus
tattgccttattaaaaatggaatcc

SEQ ID NO: 185747 - DNA, 25 bp, Saccharomyces pastorianus
ttgtgtagaattgcagattcccttt

SEQ ID NO: 185748 - DNA, 25 bp, Saccharomyces pastorianus
tctagtacattctacatacctaata

SEQ ID NO: 185749 - DNA, 25 bp, Saccharomyces pastorianus
aacttctagtacattctacatacct

SEQ ID NO: 185750 - DNA, 25 bp, Saccharomyces pastorianus
tatggattcctaaatcctcgaggag

SEQ ID NO: 185751 - DNA, 25 bp, Saccharomyces pastorianus
ctagtacattctacatacctaatat

SEQ ID NO: 185752 - DNA, 25 bp, Saccharomyces pastorianus
ttgccttattaaaaatggaatccca

SEQ ID NO: 185753 - DNA, 25 bp, Saccharomyces pastorianus
taacggattttctggcatatctgca

SEQ ID NO: 185754 - DNA, 25 bp, Saccharomyces pastorianus
tctattgtggttctgcaaactttag

SEQ ID NO: 185755 - DNA, 25 bp, Saccharomyces pastorianus
gacgcaaattcggatactttcggtt

SEQ ID NO: 185756 - DNA, 25 bp, Saccharomyces pastorianus
atagcacagtttctaatggagtttt

SEQ ID NO: 185757 - DNA, 25 bp, Saccharomyces pastorianus
ttggcgctctatcaaaggtcttttg

SEQ ID NO: 185758 - DNA, 25 bp, Saccharomyces pastorianus
aaggtcttttgattcttcaaagagg

SEQ ID NO: 185759 - DNA, 25 bp, Saccharomyces pastorianus
tagttttaatgcttttggcgctcta

SEQ ID NO: 185760 - DNA, 25 bp, Saccharomyces pastorianus
aggtaacgactagcgccgattcaaa

SEQ ID NO: 185761 - DNA, 25 bp, Saccharomyces pastorianus
gcagctcctgttgatagcgacgcaa

SEQ ID NO: 185762 - DNA, 25 bp, Saccharomyces pastorianus
ctttgttttctcgaacttagccaat

SEQ ID NO: 185763 - DNA, 25 bp, Saccharomyces pastorianus
tttctggcatatctgcagagcagtt

SEQ ID NO: 185764 - DNA, 25 bp, Saccharomyces pastorianus
gaaaccctacccgttatccagagct

SEQ ID NO: 185765 - DNA, 25 bp, Saccharomyces pastorianus
tgccgggtcctcagcgcaacgtata

SEQ ID NO: 185766 - DNA, 25 bp, Saccharomyces pastorianus
gctttgccgggtcctcagcgcaacg

SEQ ID NO: 185767 - DNA, 25 bp, Saccharomyces pastorianus
accctacccgttatccagagcttca

SEQ ID NO: 185768 - DNA, 25 bp, Saccharomyces pastorianus
tttgccgggtcctcagcgcaacgta

SEQ ID NO: 185769 - DNA, 25 bp, Saccharomyces pastorianus
ttgccgggtcctcagcgcaacgtat

SEQ ID NO: 185770 - DNA, 25 bp, Saccharomyces pastorianus
ctttgccgggtcctcagcgcaacgt

SEQ ID NO: 185771 - DNA, 25 bp, Saccharomyces pastorianus
tactcgctttgccgggtcctcagcg

SEQ ID NO: 185772 - DNA, 25 bp, Saccharomyces pastorianus
gccgggtcctcagcgcaacgtatac

SEQ ID NO: 185773 - DNA, 25 bp, Saccharomyces pastorianus
cctacccgttatccagagcttcagc

SEQ ID NO: 185774 - DNA, 25 bp, Saccharomyces pastorianus
ctactcgctttgccgggtcctcagc

SEQ ID NO: 185775 - DNA, 25 bp, Saccharomyces pastorianus
acaacaacatcagcagcagcagcag

SEQ ID NO: 185776 - DNA, 25 bp, Saccharomyces pastorianus
cagcagcagcagcgacaacaacaac

SEQ ID NO: 185777 - DNA, 25 bp, Saccharomyces pastorianus
gcagcagcagcagcgacaacaacaa

SEQ ID NO: 185778 - DNA, 25 bp, Saccharomyces pastorianus
gcagcagcagcgacaacaacaacaa

SEQ ID NO: 185779 - DNA, 25 bp, Saccharomyces pastorianus
agcgacaacaacaacaacaacaaca

SEQ ID NO: 185780 - DNA, 25 bp, Saccharomyces pastorianus
gcagcagcaacagcagcaacaacag

SEQ ID NO: 185781 - DNA, 25 bp, Saccharomyces pastorianus
cagcagcaacatcagcaacagcatc

SEQ ID NO: 185782 - DNA, 25 bp, Saccharomyces pastorianus
gcaacaacatcaacagcagcagcaa

SEQ ID NO: 185783 - DNA, 25 bp, Saccharomyces pastorianus
agcagcagcagcgacaacaacaaca

SEQ ID NO: 185784 - DNA, 25 bp, Saccharomyces pastorianus
agcagcaacaacaacaacaacaaca

SEQ ID NO: 185785 - DNA, 25 bp, Saccharomyces pastorianus
agcagcagcgacaacaacaacaaca

SEQ ID NO: 185786 - DNA, 25 bp, Saccharomyces pastorianus
gagaatcttcacttcgggacagacc

SEQ ID NO: 185787 - DNA, 25 bp, Saccharomyces pastorianus
acgcggttttattcttgggcagtct

SEQ ID NO: 185788 - DNA, 25 bp, Saccharomyces pastorianus
gacactttgcaactcttgggattga

SEQ ID NO: 185789 - DNA, 25 bp, Saccharomyces pastorianus
aaactagtgagccatattgcggtca

SEQ ID NO: 185790 - DNA, 25 bp, Saccharomyces pastorianus
actggtgaccaaggctatcatcgag

SEQ ID NO: 185791 - DNA, 25 bp, Saccharomyces pastorianus
gcgggatatttctttatgtcacagg

SEQ ID NO: 185792 - DNA, 25 bp, Saccharomyces pastorianus
agaagaccacatccatcataccatt

SEQ ID NO: 185793 - DNA, 25 bp, Saccharomyces pastorianus
cacgtgtaattgttggttcccattt

SEQ ID NO: 185794 - DNA, 25 bp, Saccharomyces pastorianus
agtctttaccatgctgcaagtgcga

SEQ ID NO: 185795 - DNA, 25 bp, Saccharomyces pastorianus
atctgaccgtctgttttgcaatatg

SEQ ID NO: 185796 - DNA, 25 bp, Saccharomyces pastorianus
gctgaactccggcattgtctacaag

SEQ ID NO: 185797 - DNA, 25 bp, Saccharomyces pastorianus
agtgttaccgtcatcatcctcagag

SEQ ID NO: 185798 - DNA, 25 bp, Saccharomyces pastorianus
tgttaccgtcatcatcctcagagtc

SEQ ID NO: 185799 - DNA, 25 bp, Saccharomyces pastorianus
gagtcctcatcggtatcatcatctt

SEQ ID NO: 185800 - DNA, 25 bp, Saccharomyces pastorianus
gtcatcgtcctcactatcatcgtcc

SEQ ID NO: 185801 - DNA, 25 bp, Saccharomyces pastorianus
atcggtatcatcatcttcattgtcc

SEQ ID NO: 185802 - DNA, 25 bp, Saccharomyces pastorianus
atcatcctcagtgttaccgtcatca

SEQ ID NO: 185803 - DNA, 25 bp, Saccharomyces pastorianus
gtatcatcatcttcattgtcctcac

SEQ ID NO: 185804 - DNA, 25 bp, Saccharomyces pastorianus
atcatcctcagagtcctcatcggta

SEQ ID NO: 185805 - DNA, 25 bp, Saccharomyces pastorianus
cctcatcggtatcatcatcttcatt

SEQ ID NO: 185806 - DNA, 25 bp, Saccharomyces pastorianus
ccgtcctcactatcatcatcatcat

SEQ ID NO: 185807 - DNA, 25 bp, Saccharomyces pastorianus
tcagagtcctcatcggtatcatcat

SEQ ID NO: 185808 - DNA, 25 bp, Saccharomyces pastorianus
ataacacgatgactccaggcgggat

SEQ ID NO: 185809 - DNA, 25 bp, Saccharomyces pastorianus
tttgagaacctgtcagacaacatta

SEQ ID NO: 185810 - DNA, 25 bp, Saccharomyces pastorianus
caggcgggattaaccagtggcattt

SEQ ID NO: 185811 - DNA, 25 bp, Saccharomyces pastorianus
gcacgcctacagtactaatccatgg

SEQ ID NO: 185812 - DNA, 25 bp, Saccharomyces pastorianus
gaaggagaccactactgcagacgcc

SEQ ID NO: 185813 - DNA, 25 bp, Saccharomyces pastorianus
gtggcatttccacaataagcgtgcg

SEQ ID NO: 185814 - DNA, 25 bp, Saccharomyces pastorianus
acgccaaggtgtgtgctagcgtgca

SEQ ID NO: 185815 - DNA, 25 bp, Saccharomyces pastorianus
attatggatagcaccactgtgcgtg

SEQ ID NO: 185816 - DNA, 25 bp, Saccharomyces pastorianus
actgtgcgtgggtccgttaataaca

SEQ ID NO: 185817 - DNA, 25 bp, Saccharomyces pastorianus
gaacaaagtgtgcacgcctacagta

SEQ ID NO: 185818 - DNA, 25 bp, Saccharomyces pastorianus
actgcagacgccaaggtgtgtgcta

SEQ ID NO: 185819 - DNA, 25 bp, Saccharomyces pastorianus
aaatgagctgagtgttacgcaaaaa

SEQ ID NO: 185820 - DNA, 25 bp, Saccharomyces pastorianus
ataaatgagctgagtgttacgcaaa

SEQ ID NO: 185821 - DNA, 25 bp, Saccharomyces pastorianus
ctgagtgttacgcaaaaaggactta

SEQ ID NO: 185822 - DNA, 25 bp, Saccharomyces pastorianus
gagtgttacgcaaaaaggacttata

SEQ ID NO: 185823 - DNA, 25 bp, Saccharomyces pastorianus
gtgttacgcaaaaaggacttataat

SEQ ID NO: 185824 - DNA, 25 bp, Saccharomyces pastorianus
atgagctgagtgttacgcaaaaagg

SEQ ID NO: 185825 - DNA, 25 bp, Saccharomyces pastorianus
caataaatgagctgagtgttacgca

SEQ ID NO: 185826 - DNA, 25 bp, Saccharomyces pastorianus
aatgagctgagtgttacgcaaaaag

SEQ ID NO: 185827 - DNA, 25 bp, Saccharomyces pastorianus
ggcaacaacaataaatgagctgagt

SEQ ID NO: 185828 - DNA, 25 bp, Saccharomyces pastorianus
aaggacttataatgggagtacaaga

SEQ ID NO: 185829 - DNA, 25 bp, Saccharomyces pastorianus
gagctgagtgttacgcaaaaaggac

SEQ ID NO: 185830 - DNA, 25 bp, Saccharomyces pastorianus
tactccaaatgctacgcagccaaat

SEQ ID NO: 185831 - DNA, 25 bp, Saccharomyces pastorianus
ggcgaagccgtagttaataccatgg

SEQ ID NO: 185832 - DNA, 25 bp, Saccharomyces pastorianus
taccgcttcggtgactacgacagtt

SEQ ID NO: 185833 - DNA, 25 bp, Saccharomyces pastorianus
gttggcattgaacctaacgccacta

SEQ ID NO: 185834 - DNA, 25 bp, Saccharomyces pastorianus
acgcagccaaatactactcttccta

SEQ ID NO: 185835 - DNA, 25 bp, Saccharomyces pastorianus
gctatcaacgcccaagttggcattg

SEQ ID NO: 185836 - DNA, 25 bp, Saccharomyces pastorianus
acagtttcgattggcgaagccgtag

SEQ ID NO: 185837 - DNA, 25 bp, Saccharomyces pastorianus
agttaataccatggcggcgggtgcc

SEQ ID NO: 185838 - DNA, 25 bp, Saccharomyces pastorianus
ttctagctacagtcactgctatcaa

SEQ ID NO: 185839 - DNA, 25 bp, Saccharomyces pastorianus
taacgccactactccaaatgctacg

SEQ ID NO: 185840 - DNA, 25 bp, Saccharomyces pastorianus
gcagccaaatgctacgcagccaaat

SEQ ID NO: 185841 - DNA, 25 bp, Saccharomyces pastorianus
tggaggtttctgtgccattaccacc

SEQ ID NO: 185842 - DNA, 25 bp, Saccharomyces pastorianus
agtacactttttctgtgcttcatta

SEQ ID NO: 185843 - DNA, 25 bp, Saccharomyces pastorianus
tctactcttgtagtgatgccgccaa

SEQ ID NO: 185844 - DNA, 25 bp, Saccharomyces pastorianus
acgtagcgatggaggtttctgtgcc

SEQ ID NO: 185845 - DNA, 25 bp, Saccharomyces pastorianus
ctcatcgtaagtgtggacgtagcga

SEQ ID NO: 185846 - DNA, 25 bp, Saccharomyces pastorianus
accacaaccattctactcttgtagt

SEQ ID NO: 185847 - DNA, 25 bp, Saccharomyces pastorianus
ctcttgtagtgatgccgccaacgtg

SEQ ID NO: 185848 - DNA, 25 bp, Saccharomyces pastorianus
tctgtgcttcattatcgtagcgata

SEQ ID NO: 185849 - DNA, 25 bp, Saccharomyces pastorianus
actttttctgtgcttcattatcgta

SEQ ID NO: 185850 - DNA, 25 bp, Saccharomyces pastorianus
gataggtatatcactcatcgtaagt

SEQ ID NO: 185851 - DNA, 25 bp, Saccharomyces pastorianus
cgtagcgataggtatatcactcatc

SEQ ID NO: 185852 - DNA, 25 bp, Saccharomyces pastorianus
gatcatcaatagtcacgcaacggaa

SEQ ID NO: 185853 - DNA, 25 bp, Saccharomyces pastorianus
atcgccggactttaggagaccatga

SEQ ID NO: 185854 - DNA, 25 bp, Saccharomyces pastorianus
gatccaatccttattattgagcaag

SEQ ID NO: 185855 - DNA, 25 bp, Saccharomyces pastorianus
gacgtcttgtttctgtactctttga

SEQ ID NO: 185856 - DNA, 25 bp, Saccharomyces pastorianus
attcttcaagctatggaggcccgga

SEQ ID NO: 185857 - DNA, 25 bp, Saccharomyces pastorianus
gaaactaaggtcatctccatctgcc

SEQ ID NO: 185858 - DNA, 25 bp, Saccharomyces pastorianus
cattcctctagttccgtcaacgaaa

SEQ ID NO: 185859 - DNA, 25 bp, Saccharomyces pastorianus
tttgtaagcacctgatccaatcctt

SEQ ID NO: 185860 - DNA, 25 bp, Saccharomyces pastorianus
gacattgttgacagtctgatcatca

SEQ ID NO: 185861 - DNA, 25 bp, Saccharomyces pastorianus
gaggcccggaacgacattgttgaca

SEQ ID NO: 185862 - DNA, 25 bp, Saccharomyces pastorianus
gcaacggaaagtgatcgccggactt

SEQ ID NO: 185863 - DNA, 25 bp, Saccharomyces pastorianus
ggcacggccgttgccaatttcgagt

SEQ ID NO: 185864 - DNA, 25 bp, Saccharomyces pastorianus
agcgatcccggcgagcaagatcgta

SEQ ID NO: 185865 - DNA, 25 bp, Saccharomyces pastorianus
aggagatcaagaagcgcggcggcac

SEQ ID NO: 185866 - DNA, 25 bp, Saccharomyces pastorianus
ggccgttgccaatttcgagtccgtc

SEQ ID NO: 185867 - DNA, 25 bp, Saccharomyces pastorianus
aaggtcgtcgtcaacgatcccggcg

SEQ ID NO: 185868 - DNA, 25 bp, Saccharomyces pastorianus
tcgtcgtcaacgatcccggcgtggc

SEQ ID NO: 185869 - DNA, 25 bp, Saccharomyces pastorianus
aaggcgccaaggtcgtcgtcaacga

SEQ ID NO: 185870 - DNA, 25 bp, Saccharomyces pastorianus
cggaaggcgccaaggtcgtcgtcaa

SEQ ID NO: 185871 - DNA, 25 bp, Saccharomyces pastorianus
ggcgcctgccgaggaagtggtcgag

SEQ ID NO: 185872 - DNA, 25 bp, Saccharomyces pastorianus
gatcccggcgagcaagatcgtaaag

SEQ ID NO: 185873 - DNA, 25 bp, Saccharomyces pastorianus
aatttcgagtccgtcgccgaagcga

SEQ ID NO: 185874 - DNA, 25 bp, Saccharomyces pastorianus
ttgtataactgcaccatatactaac

SEQ ID NO: 185875 - DNA, 25 bp, Saccharomyces pastorianus
taactgcaccatatactaaccactc

SEQ ID NO: 185876 - DNA, 25 bp, Saccharomyces pastorianus
tattgtataactgcaccatatacta

SEQ ID NO: 185877 - DNA, 25 bp, Saccharomyces pastorianus
gtataactgcaccatatactaacca

SEQ ID NO: 185878 - DNA, 25 bp, Saccharomyces pastorianus
ataactgcaccatatactaaccact

SEQ ID NO: 185879 - DNA, 25 bp, Saccharomyces pastorianus
attgtataactgcaccatatactaa

SEQ ID NO: 185880 - DNA, 25 bp, Saccharomyces pastorianus
tataactgcaccatatactaaccac

SEQ ID NO: 185881 - DNA, 25 bp, Saccharomyces pastorianus
tgtataactgcaccatatactaacc

SEQ ID NO: 185882 - DNA, 25 bp, Saccharomyces pastorianus
aactgcaccatatactaaccactca

SEQ ID NO: 185883 - DNA, 25 bp, Saccharomyces pastorianus
ccatgacccatctctcaccatcagt

SEQ ID NO: 185884 - DNA, 25 bp, Saccharomyces pastorianus
atattgtataactgcaccatatact

SEQ ID NO: 185885 - DNA, 25 bp, Saccharomyces pastorianus
aaaagcatatcctaaactaccagat

SEQ ID NO: 185886 - DNA, 25 bp, Saccharomyces pastorianus
tcctcaccaaagtcaccaaaagcat

SEQ ID NO: 185887 - DNA, 25 bp, Saccharomyces pastorianus
acatccgaggtacatgagagctctc

SEQ ID NO: 185888 - DNA, 25 bp, Saccharomyces pastorianus
aatcgcgacttgatcttacatcctc

SEQ ID NO: 185889 - DNA, 25 bp, Saccharomyces pastorianus
aacgggctaaataccaatgaagtca

SEQ ID NO: 185890 - DNA, 25 bp, Saccharomyces pastorianus
gaagctcgcgattggattgcggtaa

SEQ ID NO: 185891 - DNA, 25 bp, Saccharomyces pastorianus
gagctctcgaagaaaatcgcgactt

SEQ ID NO: 185892 - DNA, 25 bp, Saccharomyces pastorianus
gatcttacatcctcaagattcgatt

SEQ ID NO: 185893 - DNA, 25 bp, Saccharomyces pastorianus
caagattcgatttataacgggctaa

SEQ ID NO: 185894 - DNA, 25 bp, Saccharomyces pastorianus
gtaaaatgtcacttgaacagagcaa

SEQ ID NO: 185895 - DNA, 25 bp, Saccharomyces pastorianus
gagcaaggactcttaccaaatatga

SEQ ID NO: 185896 - DNA, 25 bp, Saccharomyces pastorianus
ttatgccaatattacaaaaaaatca

SEQ ID NO: 185897 - DNA, 25 bp, Saccharomyces pastorianus
tctttttcaccgtatactaaccact

SEQ ID NO: 185898 - DNA, 25 bp, Saccharomyces pastorianus
tatacacttatgccaatattacaaa

SEQ ID NO: 185899 - DNA, 25 bp, Saccharomyces pastorianus
atacacttatgccaatattacaaaa

SEQ ID NO: 185900 - DNA, 25 bp, Saccharomyces pastorianus
ttatacctctttttcaccgtatact

SEQ ID NO: 185901 - DNA, 25 bp, Saccharomyces pastorianus
tacacttatgccaatattacaaaaa

SEQ ID NO: 185902 - DNA, 25 bp, Saccharomyces pastorianus
tgccaatattacaaaaaaatcacca

SEQ ID NO: 185903 - DNA, 25 bp, Saccharomyces pastorianus
catacgttatacctctttttcaccg

SEQ ID NO: 185904 - DNA, 25 bp, Saccharomyces pastorianus
tatacctctttttcaccgtatacta

SEQ ID NO: 185905 - DNA, 25 bp, Saccharomyces pastorianus
atgccaatattacaaaaaaatcacc

SEQ ID NO: 185906 - DNA, 25 bp, Saccharomyces pastorianus
tatgccaatattacaaaaaaatcac

SEQ ID NO: 185907 - DNA, 25 bp, Saccharomyces pastorianus
ggtatttgttttgtttgttagtgct

SEQ ID NO: 185908 - DNA, 25 bp, Saccharomyces pastorianus
gctgatgtaatcttaacaagaaata

SEQ ID NO: 185909 - DNA, 25 bp, Saccharomyces pastorianus
tttgaccatggtatttgttttgttt

SEQ ID NO: 185910 - DNA, 25 bp, Saccharomyces pastorianus
tgctgatgtaatcttaacaagaaat

SEQ ID NO: 185911 - DNA, 25 bp, Saccharomyces pastorianus
tagtgctgatgtaatcttaacaaga

SEQ ID NO: 185912 - DNA, 25 bp, Saccharomyces pastorianus
ttagtgctgatgtaatcttaacaag

SEQ ID NO: 185913 - DNA, 25 bp, Saccharomyces pastorianus
gattgaagttaatttgaccatggta

SEQ ID NO: 185914 - DNA, 25 bp, Saccharomyces pastorianus
agtgctgatgtaatcttaacaagaa

SEQ ID NO: 185915 - DNA, 25 bp, Saccharomyces pastorianus
gtgctgatgtaatcttaacaagaaa

SEQ ID NO: 185916 - DNA, 25 bp, Saccharomyces pastorianus
gttagtgctgatgtaatcttaacaa

SEQ ID NO: 185917 - DNA, 25 bp, Saccharomyces pastorianus
agcgattgaagttaatttgaccatg

SEQ ID NO: 185918 - DNA, 25 bp, Saccharomyces pastorianus
atctactaactagtatttatgttac

SEQ ID NO: 185919 - DNA, 25 bp, Saccharomyces pastorianus
ctactaactagtatttatgttacta

SEQ ID NO: 185920 - DNA, 25 bp, Saccharomyces pastorianus
tctactaactagtatttatgttact

SEQ ID NO: 185921 - DNA, 25 bp, Saccharomyces pastorianus
tgttactagtatattatcatatacg

SEQ ID NO: 185922 - DNA, 25 bp, Saccharomyces pastorianus
catctactaactagtatttatgtta

SEQ ID NO: 185923 - DNA, 25 bp, Saccharomyces pastorianus
tatgttactagtatattatcatata

SEQ ID NO: 185924 - DNA, 25 bp, Saccharomyces pastorianus
gaataaaaatcaactatcatctact

SEQ ID NO: 185925 - DNA, 25 bp, Saccharomyces pastorianus
ggaataaaaatcaactatcatctac

SEQ ID NO: 185926 - DNA, 25 bp, Saccharomyces pastorianus
aataaaaatcaactatcatctacta

SEQ ID NO: 185927 - DNA, 25 bp, Saccharomyces pastorianus
tcatctactaactagtatttatgtt

SEQ ID NO: 185928 - DNA, 25 bp, Saccharomyces pastorianus
gttggaataaaaatcaactatcatc

SEQ ID NO: 185929 - DNA, 25 bp, Saccharomyces pastorianus
ctctagaaggtcgacaagatcggaa

SEQ ID NO: 185930 - DNA, 25 bp, Saccharomyces pastorianus
tggtctctagaaggtcgacaagatc

SEQ ID NO: 185931 - DNA, 25 bp, Saccharomyces pastorianus
tcgacaagatcggaaagcacctcaa

SEQ ID NO: 185932 - DNA, 25 bp, Saccharomyces pastorianus
gccttggtctctagaaggtcgacaa

SEQ ID NO: 185933 - DNA, 25 bp, Saccharomyces pastorianus
atggccttggtctctagaaggtcga

SEQ ID NO: 185934 - DNA, 25 bp, Saccharomyces pastorianus
cgacaagatcggaaagcacctcaat

SEQ ID NO: 185935 - DNA, 25 bp, Saccharomyces pastorianus
ggtcgacaagatcggaaagcacctc

SEQ ID NO: 185936 - DNA, 25 bp, Saccharomyces pastorianus
ggccttggtctctagaaggtcgaca

SEQ ID NO: 185937 - DNA, 25 bp, Saccharomyces pastorianus
gtctctagaaggtcgacaagatcgg

SEQ ID NO: 185938 - DNA, 25 bp, Saccharomyces pastorianus
ttggtctctagaaggtcgacaagat

SEQ ID NO: 185939 - DNA, 25 bp, Saccharomyces pastorianus
tggccttggtctctagaaggtcgac

SEQ ID NO: 185940 - DNA, 25 bp, Saccharomyces pastorianus
atccattattatgtataccgtatta

SEQ ID NO: 185941 - DNA, 25 bp, Saccharomyces pastorianus
atagttgtcggatggcaatccatta

SEQ ID NO: 185942 - DNA, 25 bp, Saccharomyces pastorianus
gtataccgtattattaagagtgcaa

SEQ ID NO: 185943 - DNA, 25 bp, Saccharomyces pastorianus
actggctatagttgtcggatggcaa

SEQ ID NO: 185944 - DNA, 25 bp, Saccharomyces pastorianus
ggctatagttgtcggatggcaatcc

SEQ ID NO: 185945 - DNA, 25 bp, Saccharomyces pastorianus
taagagtgcaactaggcccgactat

SEQ ID NO: 185946 - DNA, 25 bp, Saccharomyces pastorianus
ttaagagtgcaactaggcccgacta

SEQ ID NO: 185947 - DNA, 25 bp, Saccharomyces pastorianus
gtcggatggcaatccattattatgt

SEQ ID NO: 185948 - DNA, 25 bp, Saccharomyces pastorianus
ggcaatccattattatgtataccgt

SEQ ID NO: 185949 - DNA, 25 bp, Saccharomyces pastorianus
tattaagagtgcaactaggcccgac

SEQ ID NO: 185950 - DNA, 25 bp, Saccharomyces pastorianus
gttgtcggatggcaatccattatta

SEQ ID NO: 185951 - DNA, 25 bp, Saccharomyces pastorianus
ctgtgtacgttgttgactgtgtcat

SEQ ID NO: 185952 - DNA, 25 bp, Saccharomyces pastorianus
gatactacgactatgaccacggttc

SEQ ID NO: 185953 - DNA, 25 bp, Saccharomyces pastorianus
tgtcatcagtactcgctaccccagt

SEQ ID NO: 185954 - DNA, 25 bp, Saccharomyces pastorianus
tacgactatgaccacggttccctcg

SEQ ID NO: 185955 - DNA, 25 bp, Saccharomyces pastorianus
agacccttcttccattcaatttgtt

SEQ ID NO: 185956 - DNA, 25 bp, Saccharomyces pastorianus
gactgtgtcatcagtactcgctacc

SEQ ID NO: 185957 - DNA, 25 bp, Saccharomyces pastorianus
cccttcttccattcaatttgttcat

SEQ ID NO: 185958 - DNA, 25 bp, Saccharomyces pastorianus
tcgcttaaaacgttactgtgtacgt

SEQ ID NO: 185959 - DNA, 25 bp, Saccharomyces pastorianus
gttactgtgtacgttgttgactgtg

SEQ ID NO: 185960 - DNA, 25 bp, Saccharomyces pastorianus
aaagatactacgactatgaccacgg

SEQ ID NO: 185961 - DNA, 25 bp, Saccharomyces pastorianus
gttccctcggagaaccaatccgtgg

SEQ ID NO: 185962 - DNA, 25 bp, Saccharomyces pastorianus
ggtgctgatttagctcagagtttac

SEQ ID NO: 185963 - DNA, 25 bp, Saccharomyces pastorianus
tacaatccaaagttcttcctccgaa

SEQ ID NO: 185964 - DNA, 25 bp, Saccharomyces pastorianus
gaagccagctcgacaaactctgttc

SEQ ID NO: 185965 - DNA, 25 bp, Saccharomyces pastorianus
gggtggtgtcgcaacatcaagtaat

SEQ ID NO: 185966 - DNA, 25 bp, Saccharomyces pastorianus
gtatcatcggacagtcctgtacaag

SEQ ID NO: 185967 - DNA, 25 bp, Saccharomyces pastorianus
cccaacaatcttccgtatcatcgga

SEQ ID NO: 185968 - DNA, 25 bp, Saccharomyces pastorianus
accagttctactacccaaatatcaa

SEQ ID NO: 185969 - DNA, 25 bp, Saccharomyces pastorianus
gtgagtccattatttcctccactaa

SEQ ID NO: 185970 - DNA, 25 bp, Saccharomyces pastorianus
taatgacgtgaccagttctactacc

SEQ ID NO: 185971 - DNA, 25 bp, Saccharomyces pastorianus
gttcaaatttctaacggtgctgatt

SEQ ID NO: 185972 - DNA, 25 bp, Saccharomyces pastorianus
actaggtctacagttgccccaacta

SEQ ID NO: 185973 - DNA, 25 bp, Saccharomyces pastorianus
actctcactttccactccatcaccc

SEQ ID NO: 185974 - DNA, 25 bp, Saccharomyces pastorianus
tctcactttccactccatcacccat

SEQ ID NO: 185975 - DNA, 25 bp, Saccharomyces pastorianus
cactttccactccatcacccatctc

SEQ ID NO: 185976 - DNA, 25 bp, Saccharomyces pastorianus
actttccactccatcacccatctct

SEQ ID NO: 185977 - DNA, 25 bp, Saccharomyces pastorianus
tcactttccactccatcacccatct

SEQ ID NO: 185978 - DNA, 25 bp, Saccharomyces pastorianus
ctactctcactttccactccatcac

SEQ ID NO: 185979 - DNA, 25 bp, Saccharomyces pastorianus
ctctcactttccactccatcaccca

SEQ ID NO: 185980 - DNA, 25 bp, Saccharomyces pastorianus
tactctcactttccactccatcacc

SEQ ID NO: 185981 - DNA, 25 bp, Saccharomyces pastorianus
cctactctcactttccactccatca

SEQ ID NO: 185982 - DNA, 25 bp, Saccharomyces pastorianus
ccatcacccatctctcaccatcagt

SEQ ID NO: 185983 - DNA, 25 bp, Saccharomyces pastorianus
tttccactccatcacccatctctca

SEQ ID NO: 185984 - DNA, 25 bp, Saccharomyces pastorianus
tcagtctcgagaaggatttggcaat

SEQ ID NO: 185985 - DNA, 25 bp, Saccharomyces pastorianus
gaaggttcttcatttgaccaaaaat

SEQ ID NO: 185986 - DNA, 25 bp, Saccharomyces pastorianus
gagcgcactactgagtccaaattca

SEQ ID NO: 185987 - DNA, 25 bp, Saccharomyces pastorianus
ctggccagaagttgagcgcactact

SEQ ID NO: 185988 - DNA, 25 bp, Saccharomyces pastorianus
aatggaaccaataccgctggccaga

SEQ ID NO: 185989 - DNA, 25 bp, Saccharomyces pastorianus
ctgctgtcccgtcaatttcagaaga

SEQ ID NO: 185990 - DNA, 25 bp, Saccharomyces pastorianus
gtaaccgttatatatcctgctgtcc

SEQ ID NO: 185991 - DNA, 25 bp, Saccharomyces pastorianus
gaccccgaccgacttaaatgatgca

SEQ ID NO: 185992 - DNA, 25 bp, Saccharomyces pastorianus
gagtcaaattcatgtacacggctga

SEQ ID NO: 185993 - DNA, 25 bp, Saccharomyces pastorianus
gctgcagagatgatcaactcccaaa

SEQ ID NO: 185994 - DNA, 25 bp, Saccharomyces pastorianus
atttcacaacgatttccaacgcttc

SEQ ID NO: 185995 - DNA, 25 bp, Saccharomyces pastorianus
aggccacgtaggatccgttcagata

SEQ ID NO: 185996 - DNA, 25 bp, Saccharomyces pastorianus
gaacttaaattcatggctgcgtctg

SEQ ID NO: 185997 - DNA, 25 bp, Saccharomyces pastorianus
tccaccccgggatcagtatcattaa

SEQ ID NO: 185998 - DNA, 25 bp, Saccharomyces pastorianus
gaaggccttgaactactcggttgga

SEQ ID NO: 185999 - DNA, 25 bp, Saccharomyces pastorianus
gctggtacctcaattaggccacgta

SEQ ID NO: 186000 - DNA, 25 bp, Saccharomyces pastorianus
aattacttctctctgaccgtatcac

SEQ ID NO: 186001 - DNA, 25 bp, Saccharomyces pastorianus
agatgcatcgtccagtacacttttt

SEQ ID NO: 186002 - DNA, 25 bp, Saccharomyces pastorianus
aagcgcttataacctgaccgacgaa

SEQ ID NO: 186003 - DNA, 25 bp, Saccharomyces pastorianus
aagcaacatccctgacatcggagac

SEQ ID NO: 186004 - DNA, 25 bp, Saccharomyces pastorianus
tcaagactgttgtgctggtacctca

SEQ ID NO: 186005 - DNA, 25 bp, Saccharomyces pastorianus
tcggttggatccatacccagacaga

SEQ ID NO: 186006 - DNA, 25 bp, Saccharomyces pastorianus
gttggaagtctgcttgttcttacca

SEQ ID NO: 186007 - DNA, 25 bp, Saccharomyces pastorianus
tgttcttaccagtttcacccaagta

SEQ ID NO: 186008 - DNA, 25 bp, Saccharomyces pastorianus
gtcatccaattcaaccaacttagag

SEQ ID NO: 186009 - DNA, 25 bp, Saccharomyces pastorianus
caagtatctgttctttggaccaaaa

SEQ ID NO: 186010 - DNA, 25 bp, Saccharomyces pastorianus
aattcttttcaagttggcgacagtg

SEQ ID NO: 186011 - DNA, 25 bp, Saccharomyces pastorianus
tcttgctcgaaatctggatggtggt

SEQ ID NO: 186012 - DNA, 25 bp, Saccharomyces pastorianus
gtttcacccaagtatctgttctttg

SEQ ID NO: 186013 - DNA, 25 bp, Saccharomyces pastorianus
gaagtgcttagattcttgctcgaaa

SEQ ID NO: 186014 - DNA, 25 bp, Saccharomyces pastorianus
aagttggcgacagtgttcttgatgt

SEQ ID NO: 186015 - DNA, 25 bp, Saccharomyces pastorianus
ggtggaacggttagagacttcatta

SEQ ID NO: 186016 - DNA, 25 bp, Saccharomyces pastorianus
cgacaatgtcgatacctctgtttct

SEQ ID NO: 186017 - DNA, 25 bp, Saccharomyces pastorianus
atgccaatattacgattattcctca

SEQ ID NO: 186018 - DNA, 25 bp, Saccharomyces pastorianus
tctatatttctatatgccaatatta

SEQ ID NO: 186019 - DNA, 25 bp, Saccharomyces pastorianus
tatatgccaatattacgattattcc

SEQ ID NO: 186020 - DNA, 25 bp, Saccharomyces pastorianus
ccaatattacgattattcctcattc

SEQ ID NO: 186021 - DNA, 25 bp, Saccharomyces pastorianus
tatgccaatattacgattattcctc

SEQ ID NO: 186022 - DNA, 25 bp, Saccharomyces pastorianus
caatattacgattattcctcattcc

SEQ ID NO: 186023 - DNA, 25 bp, Saccharomyces pastorianus
atatgccaatattacgattattcct

SEQ ID NO: 186024 - DNA, 25 bp, Saccharomyces pastorianus
ctatatgccaatattacgattattc

SEQ ID NO: 186025 - DNA, 25 bp, Saccharomyces pastorianus
tgccaatattacgattattcctcat

SEQ ID NO: 186026 - DNA, 25 bp, Saccharomyces pastorianus
gccaatattacgattattcctcatt

SEQ ID NO: 186027 - DNA, 25 bp, Saccharomyces pastorianus
tctatatgccaatattacgattatt

SEQ ID NO: 186028 - DNA, 25 bp, Saccharomyces pastorianus
cgcggtcattttgttagtatctctt

SEQ ID NO: 186029 - DNA, 25 bp, Saccharomyces pastorianus
tcaacttgggcagcacaatttcacg

SEQ ID NO: 186030 - DNA, 25 bp, Saccharomyces pastorianus
cattttgttagtatctcttctcaac

SEQ ID NO: 186031 - DNA, 25 bp, Saccharomyces pastorianus
ttgttagtatctcttctcaacttgg

SEQ ID NO: 186032 - DNA, 25 bp, Saccharomyces pastorianus
caatttcacgatatttaacaggtat

SEQ ID NO: 186033 - DNA, 25 bp, Saccharomyces pastorianus
gttagtatctcttctcaacttgggc

SEQ ID NO: 186034 - DNA, 25 bp, Saccharomyces pastorianus
ggtcattttgttagtatctcttctc

SEQ ID NO: 186035 - DNA, 25 bp, Saccharomyces pastorianus
gtcattttgttagtatctcttctca

SEQ ID NO: 186036 - DNA, 25 bp, Saccharomyces pastorianus
gcggtcattttgttagtatctcttc

SEQ ID NO: 186037 - DNA, 25 bp, Saccharomyces pastorianus
gtatctcttctcaacttgggcagca

SEQ ID NO: 186038 - DNA, 25 bp, Saccharomyces pastorianus
tagtatctcttctcaacttgggcag

SEQ ID NO: 186039 - DNA, 25 bp, Saccharomyces pastorianus
gattcctgaagagttgtcgccatcc

SEQ ID NO: 186040 - DNA, 25 bp, Saccharomyces pastorianus
ctaagtgatgttctggtctttccaa

SEQ ID NO: 186041 - DNA, 25 bp, Saccharomyces pastorianus
tgccctccatcatcctaaagataga

SEQ ID NO: 186042 - DNA, 25 bp, Saccharomyces pastorianus
gttctgggttgtggactgacactat

SEQ ID NO: 186043 - DNA, 25 bp, Saccharomyces pastorianus
gaagacttcagttcggtacttggat

SEQ ID NO: 186044 - DNA, 25 bp, Saccharomyces pastorianus
ttatacaagcaaaacctggccaccc

SEQ ID NO: 186045 - DNA, 25 bp, Saccharomyces pastorianus
ctggccaccctgttttgagggaaat

SEQ ID NO: 186046 - DNA, 25 bp, Saccharomyces pastorianus
gtcgccatccgacattgggttgata

SEQ ID NO: 186047 - DNA, 25 bp, Saccharomyces pastorianus
tgttcagccaattccaaactggatt

SEQ ID NO: 186048 - DNA, 25 bp, Saccharomyces pastorianus
gtttatgctgacatcgacacgttcc

SEQ ID NO: 186049 - DNA, 25 bp, Saccharomyces pastorianus
gacactattttcacgtatttcactg

SEQ ID NO: 186050 - DNA, 25 bp, Saccharomyces pastorianus
gcactacaatctatctcgtcgttaa

SEQ ID NO: 186051 - DNA, 25 bp, Saccharomyces pastorianus
gactttgtcgctgaaatctatggca

SEQ ID NO: 186052 - DNA, 25 bp, Saccharomyces pastorianus
tttaatctcaacaactgccgcacta

SEQ ID NO: 186053 - DNA, 25 bp, Saccharomyces pastorianus
tatctcgtcgttaacaatttccctt

SEQ ID NO: 186054 - DNA, 25 bp, Saccharomyces pastorianus
ttacgcgtccgattatgccagttac

SEQ ID NO: 186055 - DNA, 25 bp, Saccharomyces pastorianus
agcattgccacatatgcatcggtca

SEQ ID NO: 186056 - DNA, 25 bp, Saccharomyces pastorianus
atactatggtatccactgcttggcc

SEQ ID NO: 186057 - DNA, 25 bp, Saccharomyces pastorianus
atccaaagtcatcgattcacctgaa

SEQ ID NO: 186058 - DNA, 25 bp, Saccharomyces pastorianus
tggtcgattctctagcaactttcac

SEQ ID NO: 186059 - DNA, 25 bp, Saccharomyces pastorianus
gcatcggtcacaggtttattcactc

SEQ ID NO: 186060 - DNA, 25 bp, Saccharomyces pastorianus
gtatccactgcttggccgtaagaaa

SEQ ID NO: 186061 - DNA, 25 bp, Saccharomyces pastorianus
aaatactgctcagacaccactaggc

SEQ ID NO: 186062 - DNA, 25 bp, Saccharomyces pastorianus
gacaccactaggcactaaattcttt

SEQ ID NO: 186063 - DNA, 25 bp, Saccharomyces pastorianus
gcacccgtaaatggagctgctattt

SEQ ID NO: 186064 - DNA, 25 bp, Saccharomyces pastorianus
gcaacaacggcaacgacaataacag

SEQ ID NO: 186065 - DNA, 25 bp, Saccharomyces pastorianus
accgggttgactccatacataaata

SEQ ID NO: 186066 - DNA, 25 bp, Saccharomyces pastorianus
tgctgccaccgcatataatggaaat

SEQ ID NO: 186067 - DNA, 25 bp, Saccharomyces pastorianus
gctatttcagaacatactaccgatg

SEQ ID NO: 186068 - DNA, 25 bp, Saccharomyces pastorianus
agtacatatgatgctgctgccaccg

SEQ ID NO: 186069 - DNA, 25 bp, Saccharomyces pastorianus
gtaataatgaacatgcacccgtaaa

SEQ ID NO: 186070 - DNA, 25 bp, Saccharomyces pastorianus
gaacaatcagtccaactcaagtaca

SEQ ID NO: 186071 - DNA, 25 bp, Saccharomyces pastorianus
actaccgatggtgactcgaacaatc

SEQ ID NO: 186072 - DNA, 25 bp, Saccharomyces pastorianus
caggtttcactgatgctaatggcaa

SEQ ID NO: 186073 - DNA, 25 bp, Saccharomyces pastorianus
tgttccattaatggaccgtgttctt

SEQ ID NO: 186074 - DNA, 25 bp, Saccharomyces pastorianus
ttgccgtaggcccaggtttcactga

SEQ ID NO: 186075 - DNA, 25 bp, Saccharomyces pastorianus
aatgtctacccttttgaagtccgct

SEQ ID NO: 186076 - DNA, 25 bp, Saccharomyces pastorianus
gttcatctgccctcgaggaaactaa

SEQ ID NO: 186077 - DNA, 25 bp, Saccharomyces pastorianus
gaggaaactaaaccgaactatcgat

SEQ ID NO: 186078 - DNA, 25 bp, Saccharomyces pastorianus
ctatgttcatctgccctcgaggaaa

SEQ ID NO: 186079 - DNA, 25 bp, Saccharomyces pastorianus
gcttccggtctatatttgcctgaaa

SEQ ID NO: 186080 - DNA, 25 bp, Saccharomyces pastorianus
taggcccaggtttcactgatgctaa

SEQ ID NO: 186081 - DNA, 25 bp, Saccharomyces pastorianus
gcaaaaacagcttccggtctatatt

SEQ ID NO: 186082 - DNA, 25 bp, Saccharomyces pastorianus
ggcaataaggttgttccacaggtta

SEQ ID NO: 186083 - DNA, 25 bp, Saccharomyces pastorianus
ggataagctgtatggtcctttacta

SEQ ID NO: 186084 - DNA, 25 bp, Saccharomyces pastorianus
atctcgataatgctgtactgtggta

SEQ ID NO: 186085 - DNA, 25 bp, Saccharomyces pastorianus
ttgagtttatttgcacctgggttat

SEQ ID NO: 186086 - DNA, 25 bp, Saccharomyces pastorianus
caatctgatccctaaataccatcca

SEQ ID NO: 186087 - DNA, 25 bp, Saccharomyces pastorianus
tatgcatccgaaccatatacctggc

SEQ ID NO: 186088 - DNA, 25 bp, Saccharomyces pastorianus
gacgttcaatcggaggacggtccaa

SEQ ID NO: 186089 - DNA, 25 bp, Saccharomyces pastorianus
tatcgttctggtcagatgcttcgac

SEQ ID NO: 186090 - DNA, 25 bp, Saccharomyces pastorianus
gttcatttcgtggtcatggcattat

SEQ ID NO: 186091 - DNA, 25 bp, Saccharomyces pastorianus
atatacctggcctgcgagtgtatca

SEQ ID NO: 186092 - DNA, 25 bp, Saccharomyces pastorianus
agttcttgtaccattacttgccagc

SEQ ID NO: 186093 - DNA, 25 bp, Saccharomyces pastorianus
acttgccagcccatttgattttgag

SEQ ID NO: 186094 - DNA, 25 bp, Saccharomyces pastorianus
atcactttggcttccgaatgtgtta

SEQ ID NO: 186095 - DNA, 25 bp, Saccharomyces pastorianus
cgaatgtgttaaatcgatcctacgt

SEQ ID NO: 186096 - DNA, 25 bp, Saccharomyces pastorianus
tatctgtcagacgatccggtactac

SEQ ID NO: 186097 - DNA, 25 bp, Saccharomyces pastorianus
gatccggtactacaaacacttatga

SEQ ID NO: 186098 - DNA, 25 bp, Saccharomyces pastorianus
acctgtactggttagcacaagcgca

SEQ ID NO: 186099 - DNA, 25 bp, Saccharomyces pastorianus
gaacgatggtatatctgtcagacga

SEQ ID NO: 186100 - DNA, 25 bp, Saccharomyces pastorianus
acagaattgcgttctaaacatgaga

SEQ ID NO: 186101 - DNA, 25 bp, Saccharomyces pastorianus
acatattttacaacctgtactggtt

SEQ ID NO: 186102 - DNA, 25 bp, Saccharomyces pastorianus
tggttagcacaagcgcaatcacttt

SEQ ID NO: 186103 - DNA, 25 bp, Saccharomyces pastorianus
aagcgcaatcactttggcttccgaa

SEQ ID NO: 186104 - DNA, 25 bp, Saccharomyces pastorianus
caaggttgttacagaattgcgttct

SEQ ID NO: 186105 - DNA, 25 bp, Saccharomyces pastorianus
cattctaggcaaggatcagtggcta

SEQ ID NO: 186106 - DNA, 25 bp, Saccharomyces pastorianus
aattcgctgcgaatggattccattc

SEQ ID NO: 186107 - DNA, 25 bp, Saccharomyces pastorianus
tcagtggctagcgaggcaatgtccc

SEQ ID NO: 186108 - DNA, 25 bp, Saccharomyces pastorianus
atccttcggccaattcgctgcgaat

SEQ ID NO: 186109 - DNA, 25 bp, Saccharomyces pastorianus
caattttctcaacagcagccataca

SEQ ID NO: 186110 - DNA, 25 bp, Saccharomyces pastorianus
acagcagccatacaatccatcgata

SEQ ID NO: 186111 - DNA, 25 bp, Saccharomyces pastorianus
atcgatatcatccttcggccaattc

SEQ ID NO: 186112 - DNA, 25 bp, Saccharomyces pastorianus
tagcgaggcaatgtcccccagtgcg

SEQ ID NO: 186113 - DNA, 25 bp, Saccharomyces pastorianus
aatggattccattctaggcaaggat

SEQ ID NO: 186114 - DNA, 25 bp, Saccharomyces pastorianus
acaatccatcgatatcatccttcgg

SEQ ID NO: 186115 - DNA, 25 bp, Saccharomyces pastorianus
attctcaattttctcaacagcagcc

SEQ ID NO: 186116 - DNA, 25 bp, Saccharomyces pastorianus
tattacccatagttgagcagctttt

SEQ ID NO: 186117 - DNA, 25 bp, Saccharomyces pastorianus
aggatttattactctctgtctcctg

SEQ ID NO: 186118 - DNA, 25 bp, Saccharomyces pastorianus
gacggtaagccaattccagagagtg

SEQ ID NO: 186119 - DNA, 25 bp, Saccharomyces pastorianus
gtttccttcacaatcgataacacag

SEQ ID NO: 186120 - DNA, 25 bp, Saccharomyces pastorianus
gcgcaacagtggcatatctcaaata

SEQ ID NO: 186121 - DNA, 25 bp, Saccharomyces pastorianus
aagccgtaacagtattgagcgcaac

SEQ ID NO: 186122 - DNA, 25 bp, Saccharomyces pastorianus
gcacgatttggtagcaagccgtaac

SEQ ID NO: 186123 - DNA, 25 bp, Saccharomyces pastorianus
aaagttctatcttccagattcagta

SEQ ID NO: 186124 - DNA, 25 bp, Saccharomyces pastorianus
atggacctttgcacgatttggtagc

SEQ ID NO: 186125 - DNA, 25 bp, Saccharomyces pastorianus
ttgagcagctttttccttctaacac

SEQ ID NO: 186126 - DNA, 25 bp, Saccharomyces pastorianus
gtgtgaccaatgatcagctactaaa

SEQ ID NO: 186127 - DNA, 25 bp, Saccharomyces pastorianus
ctaaatcagtaaatatgcacccaca

SEQ ID NO: 186128 - DNA, 25 bp, Saccharomyces pastorianus
acagttatataccatctcagcttta

SEQ ID NO: 186129 - DNA, 25 bp, Saccharomyces pastorianus
atcagtaaatatgcacccacatcat

SEQ ID NO: 186130 - DNA, 25 bp, Saccharomyces pastorianus
ttatataccatctcagctttaccct

SEQ ID NO: 186131 - DNA, 25 bp, Saccharomyces pastorianus
atctcagctttaccctgcccattct

SEQ ID NO: 186132 - DNA, 25 bp, Saccharomyces pastorianus
tatataccatctcagctttaccctg

SEQ ID NO: 186133 - DNA, 25 bp, Saccharomyces pastorianus
cagttatataccatctcagctttac

SEQ ID NO: 186134 - DNA, 25 bp, Saccharomyces pastorianus
ctacagttatataccatctcagctt

SEQ ID NO: 186135 - DNA, 25 bp, Saccharomyces pastorianus
tacagttatataccatctcagcttt

SEQ ID NO: 186136 - DNA, 25 bp, Saccharomyces pastorianus
atataccatctcagctttaccctgc

SEQ ID NO: 186137 - DNA, 25 bp, Saccharomyces pastorianus
gttatataccatctcagctttaccc

SEQ ID NO: 186138 - DNA, 25 bp, Saccharomyces pastorianus
tctagcgggatcgaaccgctgatcc

SEQ ID NO: 186139 - DNA, 25 bp, Saccharomyces pastorianus
cgaaccgctgatccccgcgttatta

SEQ ID NO: 186140 - DNA, 25 bp, Saccharomyces pastorianus
gtctctagcgggatcgaaccgctga

SEQ ID NO: 186141 - DNA, 25 bp, Saccharomyces pastorianus
atggtctctagcgggatcgaaccgc

SEQ ID NO: 186142 - DNA, 25 bp, Saccharomyces pastorianus
tctctagcgggatcgaaccgctgat

SEQ ID NO: 186143 - DNA, 25 bp, Saccharomyces pastorianus
ctctagcgggatcgaaccgctgatc

SEQ ID NO: 186144 - DNA, 25 bp, Saccharomyces pastorianus
ggtctctagcgggatcgaaccgctg

SEQ ID NO: 186145 - DNA, 25 bp, Saccharomyces pastorianus
ggatcgaaccgctgatccccgcgtt

SEQ ID NO: 186146 - DNA, 25 bp, Saccharomyces pastorianus
tagcgggatcgaaccgctgatcccc

SEQ ID NO: 186147 - DNA, 25 bp, Saccharomyces pastorianus
atcgaaccgctgatccccgcgttat

SEQ ID NO: 186148 - DNA, 25 bp, Saccharomyces pastorianus
gctgatccccgcgttattagcacgg

SEQ ID NO: 186149 - DNA, 25 bp, Saccharomyces pastorianus
catcgttcttccttttcagttcctt

SEQ ID NO: 186150 - DNA, 25 bp, Saccharomyces pastorianus
tgcctcctgttctagtttctgttta

SEQ ID NO: 186151 - DNA, 25 bp, Saccharomyces pastorianus
gtttagctttattttccttttgcag

SEQ ID NO: 186152 - DNA, 25 bp, Saccharomyces pastorianus
tgcaattgttgctttttcctctcct

SEQ ID NO: 186153 - DNA, 25 bp, Saccharomyces pastorianus
gcttatttttgttttgctctttcag

SEQ ID NO: 186154 - DNA, 25 bp, Saccharomyces pastorianus
ttttccttgaatcttgttcctcctg

SEQ ID NO: 186155 - DNA, 25 bp, Saccharomyces pastorianus
agttgtaacttctgttctttggcca

SEQ ID NO: 186156 - DNA, 25 bp, Saccharomyces pastorianus
ttttcttggcctctgcatcgttctt

SEQ ID NO: 186157 - DNA, 25 bp, Saccharomyces pastorianus
gttctttggccagttttttctgcaa

SEQ ID NO: 186158 - DNA, 25 bp, Saccharomyces pastorianus
tcttcctttcttttcaatcgcagtg

SEQ ID NO: 186159 - DNA, 25 bp, Saccharomyces pastorianus
tcagttttttcagttcttcctttct

SEQ ID NO: 186160 - DNA, 25 bp, Saccharomyces pastorianus
aatatatgcgctcgttgtacccgtt

SEQ ID NO: 186161 - DNA, 25 bp, Saccharomyces pastorianus
acgggtacgctctgcagacgatagt

SEQ ID NO: 186162 - DNA, 25 bp, Saccharomyces pastorianus
cgccccagcaagacgtacggtataa

SEQ ID NO: 186163 - DNA, 25 bp, Saccharomyces pastorianus
gtggctatcaaacatcaatcacata

SEQ ID NO: 186164 - DNA, 25 bp, Saccharomyces pastorianus
gcccaacgggaaccaaacacaggag

SEQ ID NO: 186165 - DNA, 25 bp, Saccharomyces pastorianus
tagccaattttgaaagcccaacggg

SEQ ID NO: 186166 - DNA, 25 bp, Saccharomyces pastorianus
caacacaaccggcttttcacgaatc

SEQ ID NO: 186167 - DNA, 25 bp, Saccharomyces pastorianus
acatatcatcaacacaaccggcttt

SEQ ID NO: 186168 - DNA, 25 bp, Saccharomyces pastorianus
acttagaaaccgcagtggctatcaa

SEQ ID NO: 186169 - DNA, 25 bp, Saccharomyces pastorianus
atagaagtccgccaacaaggatcat

SEQ ID NO: 186170 - DNA, 25 bp, Saccharomyces pastorianus
gacgatagtcgtagccaattttgaa

SEQ ID NO: 186171 - DNA, 25 bp, Saccharomyces pastorianus
tcacatcattatgcacggcacttgc

SEQ ID NO: 186172 - DNA, 25 bp, Saccharomyces pastorianus
tcattatgcacggcacttgcctcag

SEQ ID NO: 186173 - DNA, 25 bp, Saccharomyces pastorianus
cacatcattatgcacggcacttgcc

SEQ ID NO: 186174 - DNA, 25 bp, Saccharomyces pastorianus
actcacatcattatgcacggcactt

SEQ ID NO: 186175 - DNA, 25 bp, Saccharomyces pastorianus
acatcattatgcacggcacttgcct

SEQ ID NO: 186176 - DNA, 25 bp, Saccharomyces pastorianus
atcattatgcacggcacttgcctca

SEQ ID NO: 186177 - DNA, 25 bp, Saccharomyces pastorianus
ctcacatcattatgcacggcacttg

SEQ ID NO: 186178 - DNA, 25 bp, Saccharomyces pastorianus
cactcacatcattatgcacggcact

SEQ ID NO: 186179 - DNA, 25 bp, Saccharomyces pastorianus
catcattatgcacggcacttgcctc

SEQ ID NO: 186180 - DNA, 25 bp, Saccharomyces pastorianus
cggcaccatcgcatttaaaacttca

SEQ ID NO: 186181 - DNA, 25 bp, Saccharomyces pastorianus
gaaatagtcccttttggtgctgaat

SEQ ID NO: 186182 - DNA, 25 bp, Saccharomyces pastorianus
gtgctctaaggttgactgttccgat

SEQ ID NO: 186183 - DNA, 25 bp, Saccharomyces pastorianus
ttttgccctgtgaaatagtcccttt

SEQ ID NO: 186184 - DNA, 25 bp, Saccharomyces pastorianus
caaatgatcgccattgtcctctaaa

SEQ ID NO: 186185 - DNA, 25 bp, Saccharomyces pastorianus
aaaatcaaatccatcgcgtagcaag

SEQ ID NO: 186186 - DNA, 25 bp, Saccharomyces pastorianus
aacttagaaagcctgcagcccctta

SEQ ID NO: 186187 - DNA, 25 bp, Saccharomyces pastorianus
aacaaaaactttcccttcagctgag

SEQ ID NO: 186188 - DNA, 25 bp, Saccharomyces pastorianus
gactgttccgatattcatgcaaatg

SEQ ID NO: 186189 - DNA, 25 bp, Saccharomyces pastorianus
gaatgtccacatattgctgtcggag

SEQ ID NO: 186190 - DNA, 25 bp, Saccharomyces pastorianus
agccccttacaagcgagtcgatctg

SEQ ID NO: 186191 - DNA, 25 bp, Saccharomyces pastorianus
ttagcttcagcttcagctctggcac

SEQ ID NO: 186192 - DNA, 25 bp, Saccharomyces pastorianus
ttgttctttttcttggcggccttag

SEQ ID NO: 186193 - DNA, 25 bp, Saccharomyces pastorianus
gcttccttagccttctttttgtcag

SEQ ID NO: 186194 - DNA, 25 bp, Saccharomyces pastorianus
agattcagctttagccttggcttca

SEQ ID NO: 186195 - DNA, 25 bp, Saccharomyces pastorianus
gttagccttggcttcagattcagct

SEQ ID NO: 186196 - DNA, 25 bp, Saccharomyces pastorianus
gacagctctttcaacaagtttgacc

SEQ ID NO: 186197 - DNA, 25 bp, Saccharomyces pastorianus
gtttgaccaatctagcgttatcagc

SEQ ID NO: 186198 - DNA, 25 bp, Saccharomyces pastorianus
ttggcggccttagcagcttccttag

SEQ ID NO: 186199 - DNA, 25 bp, Saccharomyces pastorianus
ggatcttcactgacagctctttcaa

SEQ ID NO: 186200 - DNA, 25 bp, Saccharomyces pastorianus
ttttgtcagcttttgcggaggcgtt

SEQ ID NO: 186201 - DNA, 25 bp, Saccharomyces pastorianus
tcttctcttcttctttgaacatttt

SEQ ID NO: 186202 - DNA, 25 bp, Saccharomyces pastorianus
ggtatatatcaatcgttggcaggtc

SEQ ID NO: 186203 - DNA, 25 bp, Saccharomyces pastorianus
gaatcccattggctttgaaggatgt

SEQ ID NO: 186204 - DNA, 25 bp, Saccharomyces pastorianus
agggtaaatctccaattagcggcat

SEQ ID NO: 186205 - DNA, 25 bp, Saccharomyces pastorianus
ggatgttagttaccttgtcgaagag

SEQ ID NO: 186206 - DNA, 25 bp, Saccharomyces pastorianus
gatgtttatgatgccaaagttctaa

SEQ ID NO: 186207 - DNA, 25 bp, Saccharomyces pastorianus
tatccgataaacctctagaacctgt

SEQ ID NO: 186208 - DNA, 25 bp, Saccharomyces pastorianus
aagtgcacgaagaccgtgtcttgaa

SEQ ID NO: 186209 - DNA, 25 bp, Saccharomyces pastorianus
gtataccgagccaaagaatcccatt

SEQ ID NO: 186210 - DNA, 25 bp, Saccharomyces pastorianus
aatcgttggcaggtcaaatgagcag

SEQ ID NO: 186211 - DNA, 25 bp, Saccharomyces pastorianus
ggattgaccatcactacgtggattt

SEQ ID NO: 186212 - DNA, 25 bp, Saccharomyces pastorianus
ctctttgcaaaatgtggtagtacta

SEQ ID NO: 186213 - DNA, 25 bp, Saccharomyces pastorianus
cgggttcaacacaatcttttccaag

SEQ ID NO: 186214 - DNA, 25 bp, Saccharomyces pastorianus
tggatccccttaactttagtactct

SEQ ID NO: 186215 - DNA, 25 bp, Saccharomyces pastorianus
tagtactcttattatgtttcacatt

SEQ ID NO: 186216 - DNA, 25 bp, Saccharomyces pastorianus
aattctgcccaaatgaccgtggatg

SEQ ID NO: 186217 - DNA, 25 bp, Saccharomyces pastorianus
ggagattgggccagataattctgcc

SEQ ID NO: 186218 - DNA, 25 bp, Saccharomyces pastorianus
aactgggaacttggtagcaaatctg

SEQ ID NO: 186219 - DNA, 25 bp, Saccharomyces pastorianus
cgtttaaatgacgagctcccaaagt

SEQ ID NO: 186220 - DNA, 25 bp, Saccharomyces pastorianus
gtggatgattctcaaacttcttctg

SEQ ID NO: 186221 - DNA, 25 bp, Saccharomyces pastorianus
ttggtttagccaaggtactactagg

SEQ ID NO: 186222 - DNA, 25 bp, Saccharomyces pastorianus
gaagctttacaggtcgggttcaaca

SEQ ID NO: 186223 - DNA, 25 bp, Saccharomyces pastorianus
gacgagctcccaaagtatgaagact

SEQ ID NO: 186224 - DNA, 25 bp, Saccharomyces pastorianus
gagattgaacaacagattaggaaac

SEQ ID NO: 186225 - DNA, 25 bp, Saccharomyces pastorianus
ttttaaaggatcagcaagtcaaggg

SEQ ID NO: 186226 - DNA, 25 bp, Saccharomyces pastorianus
gtcccgagaggatttatgaatcgtt

SEQ ID NO: 186227 - DNA, 25 bp, Saccharomyces pastorianus
aacaacagtcgtttgatgatcctac

SEQ ID NO: 186228 - DNA, 25 bp, Saccharomyces pastorianus
gttcagcaatcaacggctctaatgc

SEQ ID NO: 186229 - DNA, 25 bp, Saccharomyces pastorianus
aacagtcgtttgatgatcctacgaa

SEQ ID NO: 186230 - DNA, 25 bp, Saccharomyces pastorianus
gatgatgggcccaaatttttaaagg

SEQ ID NO: 186231 - DNA, 25 bp, Saccharomyces pastorianus
ggctctaatgcaatacgagatcata

SEQ ID NO: 186232 - DNA, 25 bp, Saccharomyces pastorianus
tgcctaaaattacaaaagtcccgag

SEQ ID NO: 186233 - DNA, 25 bp, Saccharomyces pastorianus
gaatcgttcagcaatcaacggctct

SEQ ID NO: 186234 - DNA, 25 bp, Saccharomyces pastorianus
aatcaacggctctaatgcaatacga

SEQ ID NO: 186235 - DNA, 25 bp, Saccharomyces pastorianus
acagcctccatgtcggttgctgcgt

SEQ ID NO: 186236 - DNA, 25 bp, Saccharomyces pastorianus
atgtcggttgctgcgttaccgtcta

SEQ ID NO: 186237 - DNA, 25 bp, Saccharomyces pastorianus
atgaggacagcaacgcgggcgttca

SEQ ID NO: 186238 - DNA, 25 bp, Saccharomyces pastorianus
ccgtctagttcccaggagagaaata

SEQ ID NO: 186239 - DNA, 25 bp, Saccharomyces pastorianus
ctgcgttaccgtctagttcccagga

SEQ ID NO: 186240 - DNA, 25 bp, Saccharomyces pastorianus
agaaaatcaggccacagcctccatg

SEQ ID NO: 186241 - DNA, 25 bp, Saccharomyces pastorianus
agcaacgcgggcgttcatgttagta

SEQ ID NO: 186242 - DNA, 25 bp, Saccharomyces pastorianus
ttaccgtctagttcccaggagagaa

SEQ ID NO: 186243 - DNA, 25 bp, Saccharomyces pastorianus
ggttgctgcgttaccgtctagttcc

SEQ ID NO: 186244 - DNA, 25 bp, Saccharomyces pastorianus
gttcccaggagagaaatagcagtga

SEQ ID NO: 186245 - DNA, 25 bp, Saccharomyces pastorianus
ttggcagaaaatcaggccacagcct

SEQ ID NO: 186246 - DNA, 25 bp, Saccharomyces pastorianus
agccgtccagttggcaatggcaaat

SEQ ID NO: 186247 - DNA, 25 bp, Saccharomyces pastorianus
agattggctgggtcggatacactga

SEQ ID NO: 186248 - DNA, 25 bp, Saccharomyces pastorianus
gaatactacagtttctcctttcatt

SEQ ID NO: 186249 - DNA, 25 bp, Saccharomyces pastorianus
aataggctgtacaggctccgacgga

SEQ ID NO: 186250 - DNA, 25 bp, Saccharomyces pastorianus
aaaggctcgcatcccatatcaaaaa

SEQ ID NO: 186251 - DNA, 25 bp, Saccharomyces pastorianus
aagttctgatagattctcgtgacat

SEQ ID NO: 186252 - DNA, 25 bp, Saccharomyces pastorianus
gtggcttcccaccaaatgtgctgta

SEQ ID NO: 186253 - DNA, 25 bp, Saccharomyces pastorianus
gaatcgtttaagcaagccgtccagt

SEQ ID NO: 186254 - DNA, 25 bp, Saccharomyces pastorianus
aattgctgtcgcaagcatcgatggc

SEQ ID NO: 186255 - DNA, 25 bp, Saccharomyces pastorianus
cgacggaacctcgaattgtggcttc

SEQ ID NO: 186256 - DNA, 25 bp, Saccharomyces pastorianus
atgtgctgtactgtcagcctcagat

SEQ ID NO: 186257 - DNA, 25 bp, Saccharomyces pastorianus
gatctcgctatttagaaccatttgg

SEQ ID NO: 186258 - DNA, 25 bp, Saccharomyces pastorianus
acccaattcggtatcccgtgatatg

SEQ ID NO: 186259 - DNA, 25 bp, Saccharomyces pastorianus
ggcaagatgttctagcgttacaatt

SEQ ID NO: 186260 - DNA, 25 bp, Saccharomyces pastorianus
tgtcccaggtggtatcaagtttgaa

SEQ ID NO: 186261 - DNA, 25 bp, Saccharomyces pastorianus
attggcttggatgtctacgtttttc

SEQ ID NO: 186262 - DNA, 25 bp, Saccharomyces pastorianus
tacgtttttccctacagagttactg

SEQ ID NO: 186263 - DNA, 25 bp, Saccharomyces pastorianus
tgtcatcgatgtgctacccaattcg

SEQ ID NO: 186264 - DNA, 25 bp, Saccharomyces pastorianus
gcaagctgctatcttcaaagtcggt

SEQ ID NO: 186265 - DNA, 25 bp, Saccharomyces pastorianus
caaaggcgccttttatggcgacctt

SEQ ID NO: 186266 - DNA, 25 bp, Saccharomyces pastorianus
tcaatctcacgcaaaggcgcctttt

SEQ ID NO: 186267 - DNA, 25 bp, Saccharomyces pastorianus
agagttactgcgacggcaccgggtt

SEQ ID NO: 186268 - DNA, 25 bp, Saccharomyces pastorianus
acaggagcatgatacttcgtccagc

SEQ ID NO: 186269 - DNA, 25 bp, Saccharomyces pastorianus
tataccaggtagtatagacactggc

SEQ ID NO: 186270 - DNA, 25 bp, Saccharomyces pastorianus
attcacaggagcatgatacttcgtc

SEQ ID NO: 186271 - DNA, 25 bp, Saccharomyces pastorianus
gattctcattcacaggagcatgata

SEQ ID NO: 186272 - DNA, 25 bp, Saccharomyces pastorianus
aatatatgacctatttcccaataag

SEQ ID NO: 186273 - DNA, 25 bp, Saccharomyces pastorianus
tgacctatttcccaataagcataat

SEQ ID NO: 186274 - DNA, 25 bp, Saccharomyces pastorianus
acagattctcattcacaggagcatg

SEQ ID NO: 186275 - DNA, 25 bp, Saccharomyces pastorianus
atatgacctatttcccaataagcat

SEQ ID NO: 186276 - DNA, 25 bp, Saccharomyces pastorianus
tttcccaataagcataatatccaat

SEQ ID NO: 186277 - DNA, 25 bp, Saccharomyces pastorianus
tagtatagacactggcattttaaag

SEQ ID NO: 186278 - DNA, 25 bp, Saccharomyces pastorianus
ggtagtatagacactggcattttaa

SEQ ID NO: 186279 - DNA, 25 bp, Saccharomyces pastorianus
gcgcaatttagatcggattttcctg

SEQ ID NO: 186280 - DNA, 25 bp, Saccharomyces pastorianus
gagtttcttctgtccaattctaaaa

SEQ ID NO: 186281 - DNA, 25 bp, Saccharomyces pastorianus
aggacttattcagtcggcacgttaa

SEQ ID NO: 186282 - DNA, 25 bp, Saccharomyces pastorianus
ggcacgttaagacttttattcctct

SEQ ID NO: 186283 - DNA, 25 bp, Saccharomyces pastorianus
gatgatattgagtttcttctgtcca

SEQ ID NO: 186284 - DNA, 25 bp, Saccharomyces pastorianus
ttatcactctgggaaatgcatggta

SEQ ID NO: 186285 - DNA, 25 bp, Saccharomyces pastorianus
gacaatactacggtaccaatcaatg

SEQ ID NO: 186286 - DNA, 25 bp, Saccharomyces pastorianus
atttcccgccaagctttgacaattt

SEQ ID NO: 186287 - DNA, 25 bp, Saccharomyces pastorianus
attaagcttagttttgcgcaattta

SEQ ID NO: 186288 - DNA, 25 bp, Saccharomyces pastorianus
aaactctcacacctaaatttcgaag

SEQ ID NO: 186289 - DNA, 25 bp, Saccharomyces pastorianus
gaatctccatccttgcttcaaataa

SEQ ID NO: 186290 - DNA, 25 bp, Saccharomyces pastorianus
agaaatactaatgccggctttcaaa

SEQ ID NO: 186291 - DNA, 25 bp, Saccharomyces pastorianus
tctgttattgagttggatccaccat

SEQ ID NO: 186292 - DNA, 25 bp, Saccharomyces pastorianus
agtagtgggagattccgcattcaaa

SEQ ID NO: 186293 - DNA, 25 bp, Saccharomyces pastorianus
atatccagccgtatcatccgatggg

SEQ ID NO: 186294 - DNA, 25 bp, Saccharomyces pastorianus
ggatccaccatttgctgttgaagac

SEQ ID NO: 186295 - DNA, 25 bp, Saccharomyces pastorianus
tcatgtgagggcttacgcaacgcat

SEQ ID NO: 186296 - DNA, 25 bp, Saccharomyces pastorianus
tagagttggtcgtacagcaagggcc

SEQ ID NO: 186297 - DNA, 25 bp, Saccharomyces pastorianus
agtgggataccaatgctacgacatg

SEQ ID NO: 186298 - DNA, 25 bp, Saccharomyces pastorianus
acgcaacgcatatctctcaagaaaa

SEQ ID NO: 186299 - DNA, 25 bp, Saccharomyces pastorianus
gtgaagttcttacatctaggccatt

SEQ ID NO: 186300 - DNA, 25 bp, Saccharomyces pastorianus
ggccgttaaaggtttcattagtcat

SEQ ID NO: 186301 - DNA, 25 bp, Saccharomyces pastorianus
cagaggtgcagttaccaacttggcc

SEQ ID NO: 186302 - DNA, 25 bp, Saccharomyces pastorianus
taaacgttgcccattgaagtacaca

SEQ ID NO: 186303 - DNA, 25 bp, Saccharomyces pastorianus
aaaactggtctcaaggtgaatccaa

SEQ ID NO: 186304 - DNA, 25 bp, Saccharomyces pastorianus
aggttaacggtgttccagctgagct

SEQ ID NO: 186305 - DNA, 25 bp, Saccharomyces pastorianus
cttggccaacttgtttgttcaaaat

SEQ ID NO: 186306 - DNA, 25 bp, Saccharomyces pastorianus
gttcttcctacgtatctggtggtaa

SEQ ID NO: 186307 - DNA, 25 bp, Saccharomyces pastorianus
gaagctaatgcgtacttaatcaaca

SEQ ID NO: 186308 - DNA, 25 bp, Saccharomyces pastorianus
agctgagctcttgaatcctgctaaa

SEQ ID NO: 186309 - DNA, 25 bp, Saccharomyces pastorianus
tcaatcttcaagtacctaccaaggt

SEQ ID NO: 186310 - DNA, 25 bp, Saccharomyces pastorianus
agggccattctggattctattcatg

SEQ ID NO: 186311 - DNA, 25 bp, Saccharomyces pastorianus
ctattcatgatggttcgttagccaa

SEQ ID NO: 186312 - DNA, 25 bp, Saccharomyces pastorianus
gttacttccttggagattaccgatt

SEQ ID NO: 186313 - DNA, 25 bp, Saccharomyces pastorianus
aatcaagttcttttggcttcggcag

SEQ ID NO: 186314 - DNA, 25 bp, Saccharomyces pastorianus
aacggtaagttatttgctaatcaag

SEQ ID NO: 186315 - DNA, 25 bp, Saccharomyces pastorianus
attaccgattcctttctgttgttca

SEQ ID NO: 186316 - DNA, 25 bp, Saccharomyces pastorianus
gttcaccacggcacaacacaattta

SEQ ID NO: 186317 - DNA, 25 bp, Saccharomyces pastorianus
ctgagttagttgcatttggtatcac

SEQ ID NO: 186318 - DNA, 25 bp, Saccharomyces pastorianus
gattcctttctgttgttcaccacgg

SEQ ID NO: 186319 - DNA, 25 bp, Saccharomyces pastorianus
aaaagagtccataacacatcagcag

SEQ ID NO: 186320 - DNA, 25 bp, Saccharomyces pastorianus
gcttcggcagttacttccttggaga

SEQ ID NO: 186321 - DNA, 25 bp, Saccharomyces pastorianus
tgtgcatttaaattccaccgatttc

SEQ ID NO: 186322 - DNA, 25 bp, Saccharomyces pastorianus
caactggtctgcagaaagttctgag

SEQ ID NO: 186323 - DNA, 25 bp, Saccharomyces pastorianus
gccattctggttgcccgatttagaa

SEQ ID NO: 186324 - DNA, 25 bp, Saccharomyces pastorianus
gaaccctgagaattggcaccgtgac

SEQ ID NO: 186325 - DNA, 25 bp, Saccharomyces pastorianus
ttctttgtacttgcaaggtgtggct

SEQ ID NO: 186326 - DNA, 25 bp, Saccharomyces pastorianus
aaataggcccattaggaaccctgag

SEQ ID NO: 186327 - DNA, 25 bp, Saccharomyces pastorianus
tcgaagttcccctattctgtaatgg

SEQ ID NO: 186328 - DNA, 25 bp, Saccharomyces pastorianus
caccgtgacgatattgattccaata

SEQ ID NO: 186329 - DNA, 25 bp, Saccharomyces pastorianus
gcaggagaatattcgaagttcccct

SEQ ID NO: 186330 - DNA, 25 bp, Saccharomyces pastorianus
aacattttgccattctggttgcccg

SEQ ID NO: 186331 - DNA, 25 bp, Saccharomyces pastorianus
gacatcagaaagaaccctcaggagg

SEQ ID NO: 186332 - DNA, 25 bp, Saccharomyces pastorianus
caaggtgtggcttcactgtttggtg

SEQ ID NO: 186333 - DNA, 25 bp, Saccharomyces pastorianus
gattccaatattcccaacccattga

SEQ ID NO: 186334 - DNA, 25 bp, Saccharomyces pastorianus
tgccttattaaaaatggaatcccaa

SEQ ID NO: 186335 - DNA, 25 bp, Saccharomyces pastorianus
tattgccttattaaaaatggaatcc

SEQ ID NO: 186336 - DNA, 25 bp, Saccharomyces pastorianus
ttgtgtagaattgcagattcccttt

SEQ ID NO: 186337 - DNA, 25 bp, Saccharomyces pastorianus
tctagtacattctacatacctaata

SEQ ID NO: 186338 - DNA, 25 bp, Saccharomyces pastorianus
aacttctagtacattctacatacct

SEQ ID NO: 186339 - DNA, 25 bp, Saccharomyces pastorianus
tatggattcctaaatcctggaggag

SEQ ID NO: 186340 - DNA, 25 bp, Saccharomyces pastorianus
ctagtacattctacatacctaatat

SEQ ID NO: 186341 - DNA, 25 bp, Saccharomyces pastorianus
ttgccttattaaaaatggaatccca

SEQ ID NO: 186342 - DNA, 25 bp, Saccharomyces pastorianus
gcccattgagacagacttgcaggat

SEQ ID NO: 186343 - DNA, 25 bp, Saccharomyces pastorianus
gccttctacaccatatggaactacc

SEQ ID NO: 186344 - DNA, 25 bp, Saccharomyces pastorianus
actgtgcaggattatgtataccgag

SEQ ID NO: 186345 - DNA, 25 bp, Saccharomyces pastorianus
taacgaactgtcacccagggcacta

SEQ ID NO: 186346 - DNA, 25 bp, Saccharomyces pastorianus
gtacgattattcagacgttaaacct

SEQ ID NO: 186347 - DNA, 25 bp, Saccharomyces pastorianus
agggctctgatcagccttaacgaac

SEQ ID NO: 186348 - DNA, 25 bp, Saccharomyces pastorianus
gctaacagccgaaattatcgacgtg

SEQ ID NO: 186349 - DNA, 25 bp, Saccharomyces pastorianus
ggattataagcggttgatgggactc

SEQ ID NO: 186350 - DNA, 25 bp, Saccharomyces pastorianus
ggaactaccgattcaatatcgtcag

SEQ ID NO: 186351 - DNA, 25 bp, Saccharomyces pastorianus
agggcactacagctaacagccgaaa

SEQ ID NO: 186352 - DNA, 25 bp, Saccharomyces pastorianus
cgttaaacctttgcccattgagaca

SEQ ID NO: 186353 - DNA, 25 bp, Saccharomyces pastorianus
aaggtatcggcctgagcgctgatga

SEQ ID NO: 186354 - DNA, 25 bp, Saccharomyces pastorianus
gatgccccttccgtgattggagtca

SEQ ID NO: 186355 - DNA, 25 bp, Saccharomyces pastorianus
ggactgtcacactattctttccaag

SEQ ID NO: 186356 - DNA, 25 bp, Saccharomyces pastorianus
gaaatgacacacaactctgcatcag

SEQ ID NO: 186357 - DNA, 25 bp, Saccharomyces pastorianus
ttgacccaagcgcagatcatcagtg

SEQ ID NO: 186358 - DNA, 25 bp, Saccharomyces pastorianus
aattgcgctctatgaagttgaccca

SEQ ID NO: 186359 - DNA, 25 bp, Saccharomyces pastorianus
gagcaaacgcatatcgcgcatccta

SEQ ID NO: 186360 - DNA, 25 bp, Saccharomyces pastorianus
cgcatcctaacctatacttcgaaag

SEQ ID NO: 186361 - DNA, 25 bp, Saccharomyces pastorianus
cggagattatcatggatgccccttc

SEQ ID NO: 186362 - DNA, 25 bp, Saccharomyces pastorianus
tcatcagtgttctggattcctgcca

SEQ ID NO: 186363 - DNA, 25 bp, Saccharomyces pastorianus
gaataccgttacagcttcaggcata

SEQ ID NO: 186364 - DNA, 25 bp, Saccharomyces pastorianus
cctcattaagtggagtgatcagtta

SEQ ID NO: 186365 - DNA, 25 bp, Saccharomyces pastorianus
gagacaatcttcactcaatgaattt

SEQ ID NO: 186366 - DNA, 25 bp, Saccharomyces pastorianus
accgatatcgaaatgctgttgagtg

SEQ ID NO: 186367 - DNA, 25 bp, Saccharomyces pastorianus
taatggagtcgaagacagcagcaaa

SEQ ID NO: 186368 - DNA, 25 bp, Saccharomyces pastorianus
gacagcagcaaaatgagacaatctt

SEQ ID NO: 186369 - DNA, 25 bp, Saccharomyces pastorianus
acgtattcgtatgtgctgcattcct

SEQ ID NO: 186370 - DNA, 25 bp, Saccharomyces pastorianus
gttgagtgaggcctttatttggcaa

SEQ ID NO: 186371 - DNA, 25 bp, Saccharomyces pastorianus
aatccacccacaaaagactggactg

SEQ ID NO: 186372 - DNA, 25 bp, Saccharomyces pastorianus
cactcaatgaatttcacgtattcgt

SEQ ID NO: 186373 - DNA, 25 bp, Saccharomyces pastorianus
aatgctgttgagtgaggcctttatt

SEQ ID NO: 186374 - DNA, 25 bp, Saccharomyces pastorianus
aagactggactgaaaccgatatcga

SEQ ID NO: 186375 - DNA, 25 bp, Saccharomyces pastorianus
attacgatctcgaacttgcaatccc

SEQ ID NO: 186376 - DNA, 25 bp, Saccharomyces pastorianus
tttcacccttcatttacgactctaa

SEQ ID NO: 186377 - DNA, 25 bp, Saccharomyces pastorianus
taaaaaactaccttctcggtgcacg

SEQ ID NO: 186378 - DNA, 25 bp, Saccharomyces pastorianus
tctacgactgggttcatatgacgat

SEQ ID NO: 186379 - DNA, 25 bp, Saccharomyces pastorianus
gaagttgtcgcttaagtttccatat

SEQ ID NO: 186380 - DNA, 25 bp, Saccharomyces pastorianus
tattatgtttccaggtttcaccctt

SEQ ID NO: 186381 - DNA, 25 bp, Saccharomyces pastorianus
aggctcctttggcagagaagtgtca

SEQ ID NO: 186382 - DNA, 25 bp, Saccharomyces pastorianus
aaccgtgagttgtacattgagcttg

SEQ ID NO: 186383 - DNA, 25 bp, Saccharomyces pastorianus
attcttccaggttcgtttactagca

SEQ ID NO: 186384 - DNA, 25 bp, Saccharomyces pastorianus
tatagttctgtccatgcaatcatca

SEQ ID NO: 186385 - DNA, 25 bp, Saccharomyces pastorianus
gatggcattgcgcatttctttaaaa

SEQ ID NO: 186386 - DNA, 25 bp, Saccharomyces pastorianus
tcacatcacgttctcaccgtggaga

SEQ ID NO: 186387 - DNA, 25 bp, Saccharomyces pastorianus
ggctatcacatcacgttctcaccgt

SEQ ID NO: 186388 - DNA, 25 bp, Saccharomyces pastorianus
gtgtaacggctatcacatcacgttc

SEQ ID NO: 186389 - DNA, 25 bp, Saccharomyces pastorianus
tatcacatcacgttctcaccgtgga

SEQ ID NO: 186390 - DNA, 25 bp, Saccharomyces pastorianus
atcacgttctcaccgtggagaccgg

SEQ ID NO: 186391 - DNA, 25 bp, Saccharomyces pastorianus
acatcacgttctcaccgtggagacc

SEQ ID NO: 186392 - DNA, 25 bp, Saccharomyces pastorianus
aatccgatgtagtgtaacggctatc

SEQ ID NO: 186393 - DNA, 25 bp, Saccharomyces pastorianus
gtagtgtaacggctatcacatcacg

SEQ ID NO: 186394 - DNA, 25 bp, Saccharomyces pastorianus
taacggctatcacatcacgttctca

SEQ ID NO: 186395 - DNA, 25 bp, Saccharomyces pastorianus
taatccgatgtagtgtaacggctat

SEQ ID NO: 186396 - DNA, 25 bp, Saccharomyces pastorianus
ttaatccgatgtagtgtaacggcta

SEQ ID NO: 186397 - DNA, 25 bp, Saccharomyces pastorianus
ttttcgcgtgcctgtgatgcttcca

SEQ ID NO: 186398 - DNA, 25 bp, Saccharomyces pastorianus
tattgtctaagcctttattcggtgt

SEQ ID NO: 186399 - DNA, 25 bp, Saccharomyces pastorianus
attgaaccctcattcagaagcttat

SEQ ID NO: 186400 - DNA, 25 bp, Saccharomyces pastorianus
agaacgtctgaattgaaccctcatt

SEQ ID NO: 186401 - DNA, 25 bp, Saccharomyces pastorianus
ttttctaaacgatctccatggaaga

SEQ ID NO: 186402 - DNA, 25 bp, Saccharomyces pastorianus
tctaagcctttattcggtgttttct

SEQ ID NO: 186403 - DNA, 25 bp, Saccharomyces pastorianus
tgccgagatgtgccttgaaaaaacc

SEQ ID NO: 186404 - DNA, 25 bp, Saccharomyces pastorianus
gcctgtgatgcttccattttggtca

SEQ ID NO: 186405 - DNA, 25 bp, Saccharomyces pastorianus
ttcggtgttttctaaacgatctcca

SEQ ID NO: 186406 - DNA, 25 bp, Saccharomyces pastorianus
gtgttttctaaacgatctccatgga

SEQ ID NO: 186407 - DNA, 25 bp, Saccharomyces pastorianus
gaattgaaccctcattcagaagctt

SEQ ID NO: 186408 - DNA, 25 bp, Saccharomyces pastorianus
ctttgatagacttcgtatgtggagt

SEQ ID NO: 186409 - DNA, 25 bp, Saccharomyces pastorianus
tcatacatctttgatagacttcgta

SEQ ID NO: 186410 - DNA, 25 bp, Saccharomyces pastorianus
ctgttttatggcgcttatgtgtatt

SEQ ID NO: 186411 - DNA, 25 bp, Saccharomyces pastorianus
catctttgatagacttcgtatgtgg

SEQ ID NO: 186412 - DNA, 25 bp, Saccharomyces pastorianus
tactgttttatggcgcttatgtgta

SEQ ID NO: 186413 - DNA, 25 bp, Saccharomyces pastorianus
actgttttatggcgcttatgtgtat

SEQ ID NO: 186414 - DNA, 25 bp, Saccharomyces pastorianus
acatctttgatagacttcgtatgtg

SEQ ID NO: 186415 - DNA, 25 bp, Saccharomyces pastorianus
tctttgatagacttcgtatgtggag

SEQ ID NO: 186416 - DNA, 25 bp, Saccharomyces pastorianus
gtactgttttatggcgcttatgtgt

SEQ ID NO: 186417 - DNA, 25 bp, Saccharomyces pastorianus
atacatctttgatagacttcgtatg

SEQ ID NO: 186418 - DNA, 25 bp, Saccharomyces pastorianus
atctttgatagacttcgtatgtgga

SEQ ID NO: 186419 - DNA, 25 bp, Saccharomyces pastorianus
ttatcactgaaggtacctttccctc

SEQ ID NO: 186420 - DNA, 25 bp, Saccharomyces pastorianus
ggtaacaatgaacttctacaccgtg

SEQ ID NO: 186421 - DNA, 25 bp, Saccharomyces pastorianus
gaccaagattttcaaggctattcat

SEQ ID NO: 186422 - DNA, 25 bp, Saccharomyces pastorianus
gactccgcttctgacaacgtgtata

SEQ ID NO: 186423 - DNA, 25 bp, Saccharomyces pastorianus
cccttgctagggatggtttgcgtta

SEQ ID NO: 186424 - DNA, 25 bp, Saccharomyces pastorianus
gaatgagagcccaacatccaggtaa

SEQ ID NO: 186425 - DNA, 25 bp, Saccharomyces pastorianus
ctgggccgttgaatactacgctcaa

SEQ ID NO: 186426 - DNA, 25 bp, Saccharomyces pastorianus
ggttacgacaatgctccaggtatct

SEQ ID NO: 186427 - DNA, 25 bp, Saccharomyces pastorianus
tattccaaacagagactgggccgtt

SEQ ID NO: 186428 - DNA, 25 bp, Saccharomyces pastorianus
aaatcgttcgcatgggtccaattat

SEQ ID NO: 186429 - DNA, 25 bp, Saccharomyces pastorianus
acgtgctcaaagaccaggaaccttg

SEQ ID NO: 186430 - DNA, 25 bp, Saccharomyces pastorianus
gtactttcgcatctgcttttaacgc

SEQ ID NO: 186431 - DNA, 25 bp, Saccharomyces pastorianus
atggtggcctgatgtttttctttat

SEQ ID NO: 186432 - DNA, 25 bp, Saccharomyces pastorianus
aggcaccgccagttttcgaaatttg

SEQ ID NO: 186433 - DNA, 25 bp, Saccharomyces pastorianus
ggattgaatctttcctttttgcgat

SEQ ID NO: 186434 - DNA, 25 bp, Saccharomyces pastorianus
gtgatattctcctctttattttcag

SEQ ID NO: 186435 - DNA, 25 bp, Saccharomyces pastorianus
aaaacttcgacgtcttggccaatgt

SEQ ID NO: 186436 - DNA, 25 bp, Saccharomyces pastorianus
tgatatttttcactgctacagcagg

SEQ ID NO: 186437 - DNA, 25 bp, Saccharomyces pastorianus
agaggtgttccttatgtttcagtga

SEQ ID NO: 186438 - DNA, 25 bp, Saccharomyces pastorianus
atcctcgttatttagttgttcaaga

SEQ ID NO: 186439 - DNA, 25 bp, Saccharomyces pastorianus
aggttctcggaacgtcaaagattca

SEQ ID NO: 186440 - DNA, 25 bp, Saccharomyces pastorianus
gaactttgggctatgtactttcgca

SEQ ID NO: 186441 - DNA, 25 bp, Saccharomyces pastorianus
cgatattactcaattgatcaggtca

SEQ ID NO: 186442 - DNA, 25 bp, Saccharomyces pastorianus
gaaggagatttttatcctcccgtgg

SEQ ID NO: 186443 - DNA, 25 bp, Saccharomyces pastorianus
aaacacaactgagagagcccttaat

SEQ ID NO: 186444 - DNA, 25 bp, Saccharomyces pastorianus
tggtggattaaaacctctcagaaat

SEQ ID NO: 186445 - DNA, 25 bp, Saccharomyces pastorianus
gaatttgctttatagagaacctgaa

SEQ ID NO: 186446 - DNA, 25 bp, Saccharomyces pastorianus
gaacggaatgatcccataaccaaaa

SEQ ID NO: 186447 - DNA, 25 bp, Saccharomyces pastorianus
gaccaatgtatgtgaacgtcataaa

SEQ ID NO: 186448 - DNA, 25 bp, Saccharomyces pastorianus
caaactgtttcctgtaaagtacgat

SEQ ID NO: 186449 - DNA, 25 bp, Saccharomyces pastorianus
tcctcccgtggtataaagaatttgc

SEQ ID NO: 186450 - DNA, 25 bp, Saccharomyces pastorianus
tgaagactggatcaaaacacaactg

SEQ ID NO: 186451 - DNA, 25 bp, Saccharomyces pastorianus
gagagcccttaataatgaccaatgt

SEQ ID NO: 186452 - DNA, 25 bp, Saccharomyces pastorianus
tacagtggaagaaaccgaggaagat

SEQ ID NO: 186453 - DNA, 25 bp, Saccharomyces pastorianus
aagatacagtggaagacgccgagga

SEQ ID NO: 186454 - DNA, 25 bp, Saccharomyces pastorianus
gtgttttagatgaagtagcggtcga

SEQ ID NO: 186455 - DNA, 25 bp, Saccharomyces pastorianus
tttagatgaagtagcggtcgaagaa

SEQ ID NO: 186456 - DNA, 25 bp, Saccharomyces pastorianus
aagcaagtgttttagatgaagtagc

SEQ ID NO: 186457 - DNA, 25 bp, Saccharomyces pastorianus
agacgccgaggaagatacagtggaa

SEQ ID NO: 186458 - DNA, 25 bp, Saccharomyces pastorianus
agacgccgaggaagatacagtagaa

SEQ ID NO: 186459 - DNA, 25 bp, Saccharomyces pastorianus
gaagaagatacagtggaagaaaccg

SEQ ID NO: 186460 - DNA, 25 bp, Saccharomyces pastorianus
aactagatgtggtggctgatgagga

SEQ ID NO: 186461 - DNA, 25 bp, Saccharomyces pastorianus
tggctgatgaggaagcaagtgtttt

SEQ ID NO: 186462 - DNA, 25 bp, Saccharomyces pastorianus
tagcggtcgaagaagatggagatgt

SEQ ID NO: 186463 - DNA, 25 bp, Saccharomyces pastorianus
tgcctccaacttgcatggtcgaatt

SEQ ID NO: 186464 - DNA, 25 bp, Saccharomyces pastorianus
gagcactattacaatcggctggata

SEQ ID NO: 186465 - DNA, 25 bp, Saccharomyces pastorianus
gtatctactcgtagcactctcatag

SEQ ID NO: 186466 - DNA, 25 bp, Saccharomyces pastorianus
ctttgcagataatttcggccgttta

SEQ ID NO: 186467 - DNA, 25 bp, Saccharomyces pastorianus
agtgcagtgactgtattcgccctat

SEQ ID NO: 186468 - DNA, 25 bp, Saccharomyces pastorianus
tatacggtgtggtatctggtccaat

SEQ ID NO: 186469 - DNA, 25 bp, Saccharomyces pastorianus
gattcctggttattatatgtcctca

SEQ ID NO: 186470 - DNA, 25 bp, Saccharomyces pastorianus
tagctttagcccctctaacgagata

SEQ ID NO: 186471 - DNA, 25 bp, Saccharomyces pastorianus
ttcgccctatggttagtatctactc

SEQ ID NO: 186472 - DNA, 25 bp, Saccharomyces pastorianus
ataaccacatttgtctgtcttctcc

SEQ ID NO: 186473 - DNA, 25 bp, Saccharomyces pastorianus
aaactttgggcttcagctctaacga

SEQ ID NO: 186474 - DNA, 25 bp, Saccharomyces pastorianus
agaccagccatctctagtgctttgt

SEQ ID NO: 186475 - DNA, 25 bp, Saccharomyces pastorianus
accagccatctctagtgctttgtcc

SEQ ID NO: 186476 - DNA, 25 bp, Saccharomyces pastorianus
catggtactctaccagattgagacc

SEQ ID NO: 186477 - DNA, 25 bp, Saccharomyces pastorianus
gagaccagccatctctagtgctttg

SEQ ID NO: 186478 - DNA, 25 bp, Saccharomyces pastorianus
ccatggtactctaccagattgagac

SEQ ID NO: 186479 - DNA, 25 bp, Saccharomyces pastorianus
gtactctaccagattgagaccagcc

SEQ ID NO: 186480 - DNA, 25 bp, Saccharomyces pastorianus
gaccagccatctctagtgctttgtc

SEQ ID NO: 186481 - DNA, 25 bp, Saccharomyces pastorianus
tactctaccagattgagaccagcca

SEQ ID NO: 186482 - DNA, 25 bp, Saccharomyces pastorianus
atggtactctaccagattgagacca

SEQ ID NO: 186483 - DNA, 25 bp, Saccharomyces pastorianus
ggtactctaccagattgagaccagc

SEQ ID NO: 186484 - DNA, 25 bp, Saccharomyces pastorianus
tggtactctaccagattgagaccag

SEQ ID NO: 186485 - DNA, 25 bp, Saccharomyces pastorianus
aacccttttgcgcgcctgcgaagtt

SEQ ID NO: 186486 - DNA, 25 bp, Saccharomyces pastorianus
cttttgcgcgcctgcgaagtttccg

SEQ ID NO: 186487 - DNA, 25 bp, Saccharomyces pastorianus
aaaacccttttgcgcgcctgcgaag

SEQ ID NO: 186488 - DNA, 25 bp, Saccharomyces pastorianus
acccttttgcgcgcctgcgaagttt

SEQ ID NO: 186489 - DNA, 25 bp, Saccharomyces pastorianus
gtgccgaggtgccttgaaaaaccct

SEQ ID NO: 186490 - DNA, 25 bp, Saccharomyces pastorianus
aaacccttttgcgcgcctgcgaagt

SEQ ID NO: 186491 - DNA, 25 bp, Saccharomyces pastorianus
tgccgaggtgccttgaaaaaccctt

SEQ ID NO: 186492 - DNA, 25 bp, Saccharomyces pastorianus
ccaattataggggtgccgaggtgcc

SEQ ID NO: 186493 - DNA, 25 bp, Saccharomyces pastorianus
caattataggggtgccgaggtgcct

SEQ ID NO: 186494 - DNA, 25 bp, Saccharomyces pastorianus
aattataggggtgccgaggtgcctt

SEQ ID NO: 186495 - DNA, 25 bp, Saccharomyces pastorianus
attataggggtgccgaggtgccttg

SEQ ID NO: 186496 - DNA, 25 bp, Saccharomyces pastorianus
gttgccattggtattgaaccataca

SEQ ID NO: 186497 - DNA, 25 bp, Saccharomyces pastorianus
gcacaactttatatatctgtgataa

SEQ ID NO: 186498 - DNA, 25 bp, Saccharomyces pastorianus
aagtttggtttcatagttataggag

SEQ ID NO: 186499 - DNA, 25 bp, Saccharomyces pastorianus
gagaaaagagggttgccattggtat

SEQ ID NO: 186500 - DNA, 25 bp, Saccharomyces pastorianus
tgtcaccgaaaatagcagagaaaag

SEQ ID NO: 186501 - DNA, 25 bp, Saccharomyces pastorianus
agatcaaggtgctttgtttggttcc

SEQ ID NO: 186502 - DNA, 25 bp, Saccharomyces pastorianus
tagttataggagatcaaggtgcttt

SEQ ID NO: 186503 - DNA, 25 bp, Saccharomyces pastorianus
accatacaaacctattagcacaact

SEQ ID NO: 186504 - DNA, 25 bp, Saccharomyces pastorianus
gagggttgccattggtattgaacca

SEQ ID NO: 186505 - DNA, 25 bp, Saccharomyces pastorianus
aaacctattagcacaactttatata

SEQ ID NO: 186506 - DNA, 25 bp, Saccharomyces pastorianus
tggggagattgtcaccgaaaatagc

SEQ ID NO: 186507 - DNA, 25 bp, Saccharomyces pastorianus
ggctagctacgttgaagtccctgat

SEQ ID NO: 186508 - DNA, 25 bp, Saccharomyces pastorianus
gttttttgaacccagcaacgcctgt

SEQ ID NO: 186509 - DNA, 25 bp, Saccharomyces pastorianus
atcttttgcactcatttgtcgggaa

SEQ ID NO: 186510 - DNA, 25 bp, Saccharomyces pastorianus
gacccataggctccaaattgtgctc

SEQ ID NO: 186511 - DNA, 25 bp, Saccharomyces pastorianus
aggtgttcacccatttgtttgaaag

SEQ ID NO: 186512 - DNA, 25 bp, Saccharomyces pastorianus
acatctccaccgcatacgtaaaagt

SEQ ID NO: 186513 - DNA, 25 bp, Saccharomyces pastorianus
gcaacgcctgtcatgttcatgtatg

SEQ ID NO: 186514 - DNA, 25 bp, Saccharomyces pastorianus
tatgcgggctacttgactactgaat

SEQ ID NO: 186515 - DNA, 25 bp, Saccharomyces pastorianus
gaaccagacggtgcaaccacagaca

SEQ ID NO: 186516 - DNA, 25 bp, Saccharomyces pastorianus
gaagtccctgatgctggccataatc

SEQ ID NO: 186517 - DNA, 25 bp, Saccharomyces pastorianus
ggccataatcttttcctggacaacc

SEQ ID NO: 186518 - DNA, 25 bp, Saccharomyces pastorianus
actctcactttccactccatcaccc

SEQ ID NO: 186519 - DNA, 25 bp, Saccharomyces pastorianus
tctcactttccactccatcacccat

SEQ ID NO: 186520 - DNA, 25 bp, Saccharomyces pastorianus
cggccccaaatatagtataactgct

SEQ ID NO: 186521 - DNA, 25 bp, Saccharomyces pastorianus
actttccactccatcacccatctct

SEQ ID NO: 186522 - DNA, 25 bp, Saccharomyces pastorianus
tcactttccactccatcacccatct

SEQ ID NO: 186523 - DNA, 25 bp, Saccharomyces pastorianus
ctactctcactttccactccatcac

SEQ ID NO: 186524 - DNA, 25 bp, Saccharomyces pastorianus
ctctcactttccactccatcaccca

SEQ ID NO: 186525 - DNA, 25 bp, Saccharomyces pastorianus
tactctcactttccactccatcacc

SEQ ID NO: 186526 - DNA, 25 bp, Saccharomyces pastorianus
cctactctcactttccactccatca

SEQ ID NO: 186527 - DNA, 25 bp, Saccharomyces pastorianus
ccatcacccatctctcaccatcagt

SEQ ID NO: 186528 - DNA, 25 bp, Saccharomyces pastorianus
tttccactccatcacccatctctca

SEQ ID NO: 186529 - DNA, 25 bp, Saccharomyces pastorianus
agtatgtagaaatatagattccatt

SEQ ID NO: 186530 - DNA, 25 bp, Saccharomyces pastorianus
tagtatgtagaaatatagattccat

SEQ ID NO: 186531 - DNA, 25 bp, Saccharomyces pastorianus
gtagaaatatagattccattttatg

SEQ ID NO: 186532 - DNA, 25 bp, Saccharomyces pastorianus
gtatgtagaaatatagattccattt

SEQ ID NO: 186533 - DNA, 25 bp, Saccharomyces pastorianus
tgtagaaatatagattccattttat

SEQ ID NO: 186534 - DNA, 25 bp, Saccharomyces pastorianus
atatagattccattttatggattcc

SEQ ID NO: 186535 - DNA, 25 bp, Saccharomyces pastorianus
gaaatatagattccattttatggat

SEQ ID NO: 186536 - DNA, 25 bp, Saccharomyces pastorianus
ttagtatgtagaaatatagattcca

SEQ ID NO: 186537 - DNA, 25 bp, Saccharomyces pastorianus
atagattccattttatggattccta

SEQ ID NO: 186538 - DNA, 25 bp, Saccharomyces pastorianus
agaaatatagattccattttatgga

SEQ ID NO: 186539 - DNA, 25 bp, Saccharomyces pastorianus
atgtagaaatatagattccatttta

SEQ ID NO: 186540 - DNA, 25 bp, Saccharomyces pastorianus
aataagcaacgatattgtttttcaa

SEQ ID NO: 186541 - DNA, 25 bp, Saccharomyces pastorianus
gatttggcaacaacacatcacagta

SEQ ID NO: 186542 - DNA, 25 bp, Saccharomyces pastorianus
cattctattttacctattccatcca

SEQ ID NO: 186543 - DNA, 25 bp, Saccharomyces pastorianus
tccatccaactcgtctctgagaaat

SEQ ID NO: 186544 - DNA, 25 bp, Saccharomyces pastorianus
tattttacctattccatccaactcg

SEQ ID NO: 186545 - DNA, 25 bp, Saccharomyces pastorianus
tcatactacctttgaataacctttt

SEQ ID NO: 186546 - DNA, 25 bp, Saccharomyces pastorianus
tgctcaattcattcttgtctaactg

SEQ ID NO: 186547 - DNA, 25 bp, Saccharomyces pastorianus
aattataattcgatttggcaacaac

SEQ ID NO: 186548 - DNA, 25 bp, Saccharomyces pastorianus
gttcgtcgccgataatcatactacc

SEQ ID NO: 186549 - DNA, 25 bp, Saccharomyces pastorianus
aagatgttttaagttcgtcgccgat

SEQ ID NO: 186550 - DNA, 25 bp, Saccharomyces pastorianus
cattcttgtctaactgtctgaacag

SEQ ID NO: 186551 - DNA, 25 bp, Saccharomyces pastorianus
ttcctgcttcgttgttagcgtttgt

SEQ ID NO: 186552 - DNA, 25 bp, Saccharomyces pastorianus
gggttggcttcatctggatttccaa

SEQ ID NO: 186553 - DNA, 25 bp, Saccharomyces pastorianus
atttcaacacattcccttggtcaat

SEQ ID NO: 186554 - DNA, 25 bp, Saccharomyces pastorianus
gccttgttagcctcatgcggtatgg

SEQ ID NO: 186555 - DNA, 25 bp, Saccharomyces pastorianus
aaggcagtttcatcttcaggcttgt

SEQ ID NO: 186556 - DNA, 25 bp, Saccharomyces pastorianus
ggcacttttgtctcacatactgtgt

SEQ ID NO: 186557 - DNA, 25 bp, Saccharomyces pastorianus
gtaggcgcttttatctccagaggtg

SEQ ID NO: 186558 - DNA, 25 bp, Saccharomyces pastorianus
aactattgctactattcttctatgg

SEQ ID NO: 186559 - DNA, 25 bp, Saccharomyces pastorianus
gcaatcatcattattcccttggtgc

SEQ ID NO: 186560 - DNA, 25 bp, Saccharomyces pastorianus
tatccgatccaaaggcagctccaat

SEQ ID NO: 186561 - DNA, 25 bp, Saccharomyces pastorianus
aagtgcttttggatcgtccggtgaa

SEQ ID NO: 186562 - DNA, 25 bp, Saccharomyces pastorianus
gtgtcgtcgccatcgcttccggtgc

SEQ ID NO: 186563 - DNA, 25 bp, Saccharomyces pastorianus
ggtgtcgtcgccatcgcttccggtg

SEQ ID NO: 186564 - DNA, 25 bp, Saccharomyces pastorianus
accagccatctccagcgccttgtcc

SEQ ID NO: 186565 - DNA, 25 bp, Saccharomyces pastorianus
ccaccaccaccctagctcaatccga

SEQ ID NO: 186566 - DNA, 25 bp, Saccharomyces pastorianus
tgtcgtcgccatcgcttccggtgcc

SEQ ID NO: 186567 - DNA, 25 bp, Saccharomyces pastorianus
gtcgtcgccatcgcttccggtgccg

SEQ ID NO: 186568 - DNA, 25 bp, Saccharomyces pastorianus
tggtgtcgtcgccatcgcttccggt

SEQ ID NO: 186569 - DNA, 25 bp, Saccharomyces pastorianus
tcgtcgccatcgcttccggtgccgc

SEQ ID NO: 186570 - DNA, 25 bp, Saccharomyces pastorianus
gtcgccatcgcttccggtgccgccg

SEQ ID NO: 186571 - DNA, 25 bp, Saccharomyces pastorianus
tcgccatcgcttccggtgccgccgc

SEQ ID NO: 186572 - DNA, 25 bp, Saccharomyces pastorianus
atcgcttccggtgccgccgccgcca

SEQ ID NO: 186573 - DNA, 25 bp, Saccharomyces pastorianus
gaagattgtatttttcttgtgcatc

SEQ ID NO: 186574 - DNA, 25 bp, Saccharomyces pastorianus
cgtctattaagtactattcgtgtta

SEQ ID NO: 186575 - DNA, 25 bp, Saccharomyces pastorianus
aagtactattcgtgttactggtata

SEQ ID NO: 186576 - DNA, 25 bp, Saccharomyces pastorianus
gtgcatcatataatcttaggaagaa

SEQ ID NO: 186577 - DNA, 25 bp, Saccharomyces pastorianus
ttcttgtgcatcatataatcttagg

SEQ ID NO: 186578 - DNA, 25 bp, Saccharomyces pastorianus
attaagtactattcgtgttactggt

SEQ ID NO: 186579 - DNA, 25 bp, Saccharomyces pastorianus
ggacactattatataaatatcgtct

SEQ ID NO: 186580 - DNA, 25 bp, Saccharomyces pastorianus
atcgtctattaagtactattcgtgt

SEQ ID NO: 186581 - DNA, 25 bp, Saccharomyces pastorianus
aatcttaggaagaaggacactatta

SEQ ID NO: 186582 - DNA, 25 bp, Saccharomyces pastorianus
atatcgtctattaagtactattcgt

SEQ ID NO: 186583 - DNA, 25 bp, Saccharomyces pastorianus
cttgtgcatcatataatcttaggaa

SEQ ID NO: 186584 - DNA, 25 bp, Saccharomyces pastorianus
taccaaagtacgctgttttcttagt

SEQ ID NO: 186585 - DNA, 25 bp, Saccharomyces pastorianus
tgttttcttagtaatcatcgcgagt

SEQ ID NO: 186586 - DNA, 25 bp, Saccharomyces pastorianus
gacttttcttggtaataatgtcatt

SEQ ID NO: 186587 - DNA, 25 bp, Saccharomyces pastorianus
ttgtgacttttcttggtaataatgt

SEQ ID NO: 186588 - DNA, 25 bp, Saccharomyces pastorianus
aagtacgctgttttcttagtaatca

SEQ ID NO: 186589 - DNA, 25 bp, Saccharomyces pastorianus
gtgattgtgacttttcttggtaata

SEQ ID NO: 186590 - DNA, 25 bp, Saccharomyces pastorianus
acgctgttttcttagtaatcatcgc

SEQ ID NO: 186591 - DNA, 25 bp, Saccharomyces pastorianus
tgggtaccaaagtacgctgttttct

SEQ ID NO: 186592 - DNA, 25 bp, Saccharomyces pastorianus
gagtgggtaccaaagtacgctgttt

SEQ ID NO: 186593 - DNA, 25 bp, Saccharomyces pastorianus
gctgttttcttagtaatcatcgcga

SEQ ID NO: 186594 - DNA, 25 bp, Saccharomyces pastorianus
attatgagaaatgggagtgggtacc

SEQ ID NO: 186595 - DNA, 25 bp, Saccharomyces pastorianus
actgttggcggtgtcgctacagaat

SEQ ID NO: 186596 - DNA, 25 bp, Saccharomyces pastorianus
accacaactgttggcggtgtcgcta

SEQ ID NO: 186597 - DNA, 25 bp, Saccharomyces pastorianus
gtttctacagctaccacaactgttg

SEQ ID NO: 186598 - DNA, 25 bp, Saccharomyces pastorianus
caactgttggcggtgtcgctacaga

SEQ ID NO: 186599 - DNA, 25 bp, Saccharomyces pastorianus
tgttggcggtgtcgctacagaatac

SEQ ID NO: 186600 - DNA, 25 bp, Saccharomyces pastorianus
tggcggtgtcgctacagaatacact

SEQ ID NO: 186601 - DNA, 25 bp, Saccharomyces pastorianus
tgaaactacctctcctgctatcgtt

SEQ ID NO: 186602 - DNA, 25 bp, Saccharomyces pastorianus
tacagctaccacaactgttggcggt

SEQ ID NO: 186603 - DNA, 25 bp, Saccharomyces pastorianus
tctacagctaccacaactgttggcg

SEQ ID NO: 186604 - DNA, 25 bp, Saccharomyces pastorianus
tgttctgaaactacctctcctgcta

SEQ ID NO: 186605 - DNA, 25 bp, Saccharomyces pastorianus
agctaccacaactgttggcggtgtc

SEQ ID NO: 186606 - DNA, 25 bp, Saccharomyces pastorianus
gggcagccttctgcgttacaacaga

SEQ ID NO: 186607 - DNA, 25 bp, Saccharomyces pastorianus
cagccttctgcgttacaacagaaag

SEQ ID NO: 186608 - DNA, 25 bp, Saccharomyces pastorianus
tcgctttgggcagccttctgcgtta

SEQ ID NO: 186609 - DNA, 25 bp, Saccharomyces pastorianus
tttgggcagccttctgcgttacaac

SEQ ID NO: 186610 - DNA, 25 bp, Saccharomyces pastorianus
gcagccttctgcgttacaacagaaa

SEQ ID NO: 186611 - DNA, 25 bp, Saccharomyces pastorianus
agccttctgcgttacaacagaaaga

SEQ ID NO: 186612 - DNA, 25 bp, Saccharomyces pastorianus
ttgggcagccttctgcgttacaaca

SEQ ID NO: 186613 - DNA, 25 bp, Saccharomyces pastorianus
ctttgggcagccttctgcgttacaa

SEQ ID NO: 186614 - DNA, 25 bp, Saccharomyces pastorianus
gctttgggcagccttctgcgttaca

SEQ ID NO: 186615 - DNA, 25 bp, Saccharomyces pastorianus
tgggcagccttctgcgttacaacag

SEQ ID NO: 186616 - DNA, 25 bp, Saccharomyces pastorianus
gccttctgcgttacaacagaaagac

SEQ ID NO: 186617 - DNA, 25 bp, Saccharomyces pastorianus
agttgggtctttgttctgctctatc

SEQ ID NO: 186618 - DNA, 25 bp, Saccharomyces pastorianus
ctgcgagtttttccagaggtccgga

SEQ ID NO: 186619 - DNA, 25 bp, Saccharomyces pastorianus
atctactggttcatgcacactgagc

SEQ ID NO: 186620 - DNA, 25 bp, Saccharomyces pastorianus
cacactgagcaattcccggtataca

SEQ ID NO: 186621 - DNA, 25 bp, Saccharomyces pastorianus
catgcttgcttgttgggctggccaa

SEQ ID NO: 186622 - DNA, 25 bp, Saccharomyces pastorianus
gaagcatgacccatctatttctgac

SEQ ID NO: 186623 - DNA, 25 bp, Saccharomyces pastorianus
tatgtaattactgtcgcctgcgagt

SEQ ID NO: 186624 - DNA, 25 bp, Saccharomyces pastorianus
ccttcgtctttggttgcatcggtga

SEQ ID NO: 186625 - DNA, 25 bp, Saccharomyces pastorianus
ccaacctaaggcctctgtttatatc

SEQ ID NO: 186626 - DNA, 25 bp, Saccharomyces pastorianus
gaaatctgatcttcacggccttcgt

SEQ ID NO: 186627 - DNA, 25 bp, Saccharomyces pastorianus
agtggtaagttcttgatgcctcctt

SEQ ID NO: 186628 - DNA, 25 bp, Saccharomyces pastorianus
aaatttcgacccacttggtgttcat

SEQ ID NO: 186629 - DNA, 25 bp, Saccharomyces pastorianus
taggctcaggtttcgctaacaatgc

SEQ ID NO: 186630 - DNA, 25 bp, Saccharomyces pastorianus
actggttatcccttagcatacactg

SEQ ID NO: 186631 - DNA, 25 bp, Saccharomyces pastorianus
ttgtcagatctgcatacgctttggg

SEQ ID NO: 186632 - DNA, 25 bp, Saccharomyces pastorianus
atacgctttgggtgggttaggctca

SEQ ID NO: 186633 - DNA, 25 bp, Saccharomyces pastorianus
attctatggtttttgctccttcgca

SEQ ID NO: 186634 - DNA, 25 bp, Saccharomyces pastorianus
aaatgaaggaacttgccgcacagtc

SEQ ID NO: 186635 - DNA, 25 bp, Saccharomyces pastorianus
atacgctttgcaacctgatgggcta

SEQ ID NO: 186636 - DNA, 25 bp, Saccharomyces pastorianus
gttggccccacaaattcttgttgaa

SEQ ID NO: 186637 - DNA, 25 bp, Saccharomyces pastorianus
tcatatgttaagatccgccgcaatt

SEQ ID NO: 186638 - DNA, 25 bp, Saccharomyces pastorianus
gcattggcgtctaaggccactggtt

SEQ ID NO: 186639 - DNA, 25 bp, Saccharomyces pastorianus
ctcctcagatactactaagatgttt

SEQ ID NO: 186640 - DNA, 25 bp, Saccharomyces pastorianus
aaacaatcaaccctctcctcagata

SEQ ID NO: 186641 - DNA, 25 bp, Saccharomyces pastorianus
tactactaagatgtttgtactgata

SEQ ID NO: 186642 - DNA, 25 bp, Saccharomyces pastorianus
tcctcagatactactaagatgtttg

SEQ ID NO: 186643 - DNA, 25 bp, Saccharomyces pastorianus
gatactactaagatgtttgtactga

SEQ ID NO: 186644 - DNA, 25 bp, Saccharomyces pastorianus
tctcctcagatactactaagatgtt

SEQ ID NO: 186645 - DNA, 25 bp, Saccharomyces pastorianus
atgagcccgaaaaacaaatatgtat

SEQ ID NO: 186646 - DNA, 25 bp, Saccharomyces pastorianus
cctcagatactactaagatgtttgt

SEQ ID NO: 186647 - DNA, 25 bp, Saccharomyces pastorianus
ctctcctcagatactactaagatgt

SEQ ID NO: 186648 - DNA, 25 bp, Saccharomyces pastorianus
aatacataaacaatcaaccctctcc

SEQ ID NO: 186649 - DNA, 25 bp, Saccharomyces pastorianus
aaccctctcctcagatactactaag

SEQ ID NO: 186650 - DNA, 25 bp, Saccharomyces pastorianus
gtcattggatcctcattcatgcaat

SEQ ID NO: 186651 - DNA, 25 bp, Saccharomyces pastorianus
aattttattccatttctgcatccaa

SEQ ID NO: 186652 - DNA, 25 bp, Saccharomyces pastorianus
tattccatttctgcatccaatctgg

SEQ ID NO: 186653 - DNA, 25 bp, Saccharomyces pastorianus
gcatccaatctggtatttggtcaat

SEQ ID NO: 186654 - DNA, 25 bp, Saccharomyces pastorianus
ttccatttctgcatccaatctggta

SEQ ID NO: 186655 - DNA, 25 bp, Saccharomyces pastorianus
ttggatcctcattcatgcaataata

SEQ ID NO: 186656 - DNA, 25 bp, Saccharomyces pastorianus
ccatttctgcatccaatctggtatt

SEQ ID NO: 186657 - DNA, 25 bp, Saccharomyces pastorianus
gtcaatacggcgtcattggatcctc

SEQ ID NO: 186658 - DNA, 25 bp, Saccharomyces pastorianus
atttctgcatccaatctggtatttg

SEQ ID NO: 186659 - DNA, 25 bp, Saccharomyces pastorianus
ttattccatttctgcatccaatctg

SEQ ID NO: 186660 - DNA, 25 bp, Saccharomyces pastorianus
tatttggtcaatacggcgtcattgg

SEQ ID NO: 186661 - DNA, 25 bp, Saccharomyces pastorianus
tcatcatcttcatctcctacatctt

SEQ ID NO: 186662 - DNA, 25 bp, Saccharomyces pastorianus
tcagtcacatcttcaaactcatcct

SEQ ID NO: 186663 - DNA, 25 bp, Saccharomyces pastorianus
tccacctttgtatctgcagcagttg

SEQ ID NO: 186664 - DNA, 25 bp, Saccharomyces pastorianus
tagcatttgattttgcgcctgcttc

SEQ ID NO: 186665 - DNA, 25 bp, Saccharomyces pastorianus
ttttcagccgcatcttcatcatctt

SEQ ID NO: 186666 - DNA, 25 bp, Saccharomyces pastorianus
aagcggcagatgtttttgagttttc

SEQ ID NO: 186667 - DNA, 25 bp, Saccharomyces pastorianus
gtatcagttgcatcagtcacatctt

SEQ ID NO: 186668 - DNA, 25 bp, Saccharomyces pastorianus
attactgtcttttggttctgttttg

SEQ ID NO: 186669 - DNA, 25 bp, Saccharomyces pastorianus
aactcatcctcgaatgcgttttcag

SEQ ID NO: 186670 - DNA, 25 bp, Saccharomyces pastorianus
atcgtcatcatcgtcattagcattt

SEQ ID NO: 186671 - DNA, 25 bp, Saccharomyces pastorianus
tttcttcgatattgctgtcattggg

SEQ ID NO: 186672 - DNA, 25 bp, Saccharomyces pastorianus
gagacggaacttgcctttgaaattt

SEQ ID NO: 186673 - DNA, 25 bp, Saccharomyces pastorianus
gttctacaaccatattaccctgcta

SEQ ID NO: 186674 - DNA, 25 bp, Saccharomyces pastorianus
accatcctgcatgcggtgaaagaga

SEQ ID NO: 186675 - DNA, 25 bp, Saccharomyces pastorianus
tacgttaacagtttggagtacttct

SEQ ID NO: 186676 - DNA, 25 bp, Saccharomyces pastorianus
aaagaagattccacaactacaccat

SEQ ID NO: 186677 - DNA, 25 bp, Saccharomyces pastorianus
tcgatccgtttcatggttctacaac

SEQ ID NO: 186678 - DNA, 25 bp, Saccharomyces pastorianus
attttgagcaagacaacgctgacag

SEQ ID NO: 186679 - DNA, 25 bp, Saccharomyces pastorianus
gcgcatttcttcaagcctgatattc

SEQ ID NO: 186680 - DNA, 25 bp, Saccharomyces pastorianus
gagtacttcttgatggaattcaggt

SEQ ID NO: 186681 - DNA, 25 bp, Saccharomyces pastorianus
ttcgggaatccaaaagaacctggca

SEQ ID NO: 186682 - DNA, 25 bp, Saccharomyces pastorianus
gaatgcgcatttcttcaagcctgat

SEQ ID NO: 186683 - DNA, 25 bp, Saccharomyces pastorianus
gggtgatggacattctaggcttccc

SEQ ID NO: 186684 - DNA, 25 bp, Saccharomyces pastorianus
ggatcaagcatctgcggagcctaca

SEQ ID NO: 186685 - DNA, 25 bp, Saccharomyces pastorianus
atatgtatccgaactctccgtatta

SEQ ID NO: 186686 - DNA, 25 bp, Saccharomyces pastorianus
aaggatcccgagctggcaaattcta

SEQ ID NO: 186687 - DNA, 25 bp, Saccharomyces pastorianus
aacttcatcatgtagcccctcataa

SEQ ID NO: 186688 - DNA, 25 bp, Saccharomyces pastorianus
attacataccgccagttcatcagaa

SEQ ID NO: 186689 - DNA, 25 bp, Saccharomyces pastorianus
gaatatatcttatgcaccagcgctt

SEQ ID NO: 186690 - DNA, 25 bp, Saccharomyces pastorianus
ttaatgcagcttactcacctcatat

SEQ ID NO: 186691 - DNA, 25 bp, Saccharomyces pastorianus
gaataccggttatactcctcaactt

SEQ ID NO: 186692 - DNA, 25 bp, Saccharomyces pastorianus
tacatactccggaacgctgtcagat

SEQ ID NO: 186693 - DNA, 25 bp, Saccharomyces pastorianus
tacgagtcctcccaattatacagaa

SEQ ID NO: 186694 - DNA, 25 bp, Saccharomyces pastorianus
gtgaaagtacgcatcgtagagctgt

SEQ ID NO: 186695 - DNA, 25 bp, Saccharomyces pastorianus
tggcactcgctatttcgtaacaacg

SEQ ID NO: 186696 - DNA, 25 bp, Saccharomyces pastorianus
tcgtaacaacgttccaggacacgga

SEQ ID NO: 186697 - DNA, 25 bp, Saccharomyces pastorianus
ctcgctatttcgtaacaacgttcca

SEQ ID NO: 186698 - DNA, 25 bp, Saccharomyces pastorianus
tttcgtaacaacgttccaggacacg

SEQ ID NO: 186699 - DNA, 25 bp, Saccharomyces pastorianus
cactcgctatttcgtaacaacgttc

SEQ ID NO: 186700 - DNA, 25 bp, Saccharomyces pastorianus
tatttcgtaacaacgttccaggaca

SEQ ID NO: 186701 - DNA, 25 bp, Saccharomyces pastorianus
gctatttcgtaacaacgttccagga

SEQ ID NO: 186702 - DNA, 25 bp, Saccharomyces pastorianus
gcactcgctatttcgtaacaacgtt

SEQ ID NO: 186703 - DNA, 25 bp, Saccharomyces pastorianus
ggcactcgctatttcgtaacaacgt

SEQ ID NO: 186704 - DNA, 25 bp, Saccharomyces pastorianus
ctggcactcgctatttcgtaacaac

SEQ ID NO: 186705 - DNA, 25 bp, Saccharomyces pastorianus
ggtcaaatctagggccatgtcgatt

SEQ ID NO: 186706 - DNA, 25 bp, Saccharomyces pastorianus
tttgatcgggtttttcacaccattc

SEQ ID NO: 186707 - DNA, 25 bp, Saccharomyces pastorianus
cgaaggtcaaatctagggccatgtc

SEQ ID NO: 186708 - DNA, 25 bp, Saccharomyces pastorianus
aggtcaaatctagggccatgtcgat

SEQ ID NO: 186709 - DNA, 25 bp, Saccharomyces pastorianus
ggccatgtcgatttcgactgcatgc

SEQ ID NO: 186710 - DNA, 25 bp, Saccharomyces pastorianus
aaggtcaaatctagggccatgtcga

SEQ ID NO: 186711 - DNA, 25 bp, Saccharomyces pastorianus
ctaggagaggtatttcttcggaaga

SEQ ID NO: 186712 - DNA, 25 bp, Saccharomyces pastorianus
aaatgtctgttatttggtgcagctg

SEQ ID NO: 186713 - DNA, 25 bp, Saccharomyces pastorianus
tgggtcccaccttctaggagaggta

SEQ ID NO: 186714 - DNA, 25 bp, Saccharomyces pastorianus
gaaggtcaaatctagggccatgtcg

SEQ ID NO: 186715 - DNA, 25 bp, Saccharomyces pastorianus
gcaactggttgtggcaatttttgat

SEQ ID NO: 186716 - DNA, 25 bp, Saccharomyces pastorianus
gtgtgtttcttctgctggagcctca

SEQ ID NO: 186717 - DNA, 25 bp, Saccharomyces pastorianus
cattttggtcaagctcgtgtgtttc

SEQ ID NO: 186718 - DNA, 25 bp, Saccharomyces pastorianus
gtgtgttccccttcgtcgttctcat

SEQ ID NO: 186719 - DNA, 25 bp, Saccharomyces pastorianus
gtcgttctcatcctcttcttcgttc

SEQ ID NO: 186720 - DNA, 25 bp, Saccharomyces pastorianus
taatcttgccctcttgcgtgtgttc

SEQ ID NO: 186721 - DNA, 25 bp, Saccharomyces pastorianus
gtttcttctgctggagcctcaccgg

SEQ ID NO: 186722 - DNA, 25 bp, Saccharomyces pastorianus
tttggtcaagctcgtgtgtttcttc

SEQ ID NO: 186723 - DNA, 25 bp, Saccharomyces pastorianus
aagctcgtgtgtttcttctgctgga

SEQ ID NO: 186724 - DNA, 25 bp, Saccharomyces pastorianus
gagcctcaccggcatcgccggtaat

SEQ ID NO: 186725 - DNA, 25 bp, Saccharomyces pastorianus
gaggtcattttggtcaagctcgtgt

SEQ ID NO: 186726 - DNA, 25 bp, Saccharomyces pastorianus
gcatcgccggtaatcttgccctctt

SEQ ID NO: 186727 - DNA, 25 bp, Saccharomyces pastorianus
ataactgcattcaccaaggccgtct

SEQ ID NO: 186728 - DNA, 25 bp, Saccharomyces pastorianus
tgtccccaattccagccaataaaat

SEQ ID NO: 186729 - DNA, 25 bp, Saccharomyces pastorianus
gcatcaaatcattcacaattgcggt

SEQ ID NO: 186730 - DNA, 25 bp, Saccharomyces pastorianus
gtaaacaacacttctacctgtcctg

SEQ ID NO: 186731 - DNA, 25 bp, Saccharomyces pastorianus
atgtttttggaactgctgcctccga

SEQ ID NO: 186732 - DNA, 25 bp, Saccharomyces pastorianus
tagtcaaagaatactgtccccaatt

SEQ ID NO: 186733 - DNA, 25 bp, Saccharomyces pastorianus
cttggaccctaagctattggacgtt

SEQ ID NO: 186734 - DNA, 25 bp, Saccharomyces pastorianus
aacactatcagtacgctcgatcttg

SEQ ID NO: 186735 - DNA, 25 bp, Saccharomyces pastorianus
gatcggaatccacaggagcccttgg

SEQ ID NO: 186736 - DNA, 25 bp, Saccharomyces pastorianus
ctacctgtcctgaatcacttgcaaa

SEQ ID NO: 186737 - DNA, 25 bp, Saccharomyces pastorianus
gagcgtgagctaacatcagccttat

SEQ ID NO: 186738 - DNA, 25 bp, Saccharomyces pastorianus
gtatgttggaatgtggatcgactat

SEQ ID NO: 186739 - DNA, 25 bp, Saccharomyces pastorianus
tggtatgttggaatgtggatcgact

SEQ ID NO: 186740 - DNA, 25 bp, Saccharomyces pastorianus
aatgtggatcgactatcatctacta

SEQ ID NO: 186741 - DNA, 25 bp, Saccharomyces pastorianus
atgtggatcgactatcatctactaa

SEQ ID NO: 186742 - DNA, 25 bp, Saccharomyces pastorianus
gttggaatgtggatcgactatcatc

SEQ ID NO: 186743 - DNA, 25 bp, Saccharomyces pastorianus
ggaatgtggatcgactatcatctac

SEQ ID NO: 186744 - DNA, 25 bp, Saccharomyces pastorianus
atgttggaatgtggatcgactatca

SEQ ID NO: 186745 - DNA, 25 bp, Saccharomyces pastorianus
ttggaatgtggatcgactatcatct

SEQ ID NO: 186746 - DNA, 25 bp, Saccharomyces pastorianus
tggaatgtggatcgactatcatcta

SEQ ID NO: 186747 - DNA, 25 bp, Saccharomyces pastorianus
tatgttggaatgtggatcgactatc

SEQ ID NO: 186748 - DNA, 25 bp, Saccharomyces pastorianus
gaatgtggatcgactatcatctact

SEQ ID NO: 186749 - DNA, 25 bp, Saccharomyces pastorianus
ttcagccttcgatgcgtgtcataat

SEQ ID NO: 186750 - DNA, 25 bp, Saccharomyces pastorianus
atttcctcaacctcatccagaaaga

SEQ ID NO: 186751 - DNA, 25 bp, Saccharomyces pastorianus
atatcgccggtattgaaattcctga

SEQ ID NO: 186752 - DNA, 25 bp, Saccharomyces pastorianus
gcttcttcaagatcccaaatttcct

SEQ ID NO: 186753 - DNA, 25 bp, Saccharomyces pastorianus
atcgtcaatacagcacatccggttg

SEQ ID NO: 186754 - DNA, 25 bp, Saccharomyces pastorianus
taatggtgcatcttttttcaaactg

SEQ ID NO: 186755 - DNA, 25 bp, Saccharomyces pastorianus
gcctgactcaggtatttttccgtgt

SEQ ID NO: 186756 - DNA, 25 bp, Saccharomyces pastorianus
atgacaatcggttacgtagccgtaa

SEQ ID NO: 186757 - DNA, 25 bp, Saccharomyces pastorianus
aaactgcttcaagagcctgactcag

SEQ ID NO: 186758 - DNA, 25 bp, Saccharomyces pastorianus
ttctgttgacaaatccaccgtgttt

SEQ ID NO: 186759 - DNA, 25 bp, Saccharomyces pastorianus
taggcggtgctattggatcccctca

SEQ ID NO: 186760 - DNA, 25 bp, Saccharomyces pastorianus
acaacagcagcagcagcagcagcag

SEQ ID NO: 186761 - DNA, 25 bp, Saccharomyces pastorianus
aacaaaagcaacaacaacagcagca

SEQ ID NO: 186762 - DNA, 25 bp, Saccharomyces pastorianus
cagcagcagcagcaaggacaaatac

SEQ ID NO: 186763 - DNA, 25 bp, Saccharomyces pastorianus
gcagcagcatcagcaacaacaacaa

SEQ ID NO: 186764 - DNA, 25 bp, Saccharomyces pastorianus
acaaaagcaacaacaacagcagcag

SEQ ID NO: 186765 - DNA, 25 bp, Saccharomyces pastorianus
caacaaaagcaacaacaacagcagc

SEQ ID NO: 186766 - DNA, 25 bp, Saccharomyces pastorianus
caacagcagcaacaaaagcaacaac

SEQ ID NO: 186767 - DNA, 25 bp, Saccharomyces pastorianus
cagcaacagcagcaacagcaacagc

SEQ ID NO: 186768 - DNA, 25 bp, Saccharomyces pastorianus
agcagcatcagcaacaacaacaaca

SEQ ID NO: 186769 - DNA, 25 bp, Saccharomyces pastorianus
gcaacaaaagcaacaacaacagcag

SEQ ID NO: 186770 - DNA, 25 bp, Saccharomyces pastorianus
agcagcaacaacaacagcaacaaca

SEQ ID NO: 186771 - DNA, 25 bp, Saccharomyces pastorianus
ggaatgtcgcaccattaacgggcgc

SEQ ID NO: 186772 - DNA, 25 bp, Saccharomyces pastorianus
gcggacctaaccattgttggcccaa

SEQ ID NO: 186773 - DNA, 25 bp, Saccharomyces pastorianus
aatgtcgcaccattaacgggcgcgg

SEQ ID NO: 186774 - DNA, 25 bp, Saccharomyces pastorianus
tgtcgcaccattaacgggcgcggac

SEQ ID NO: 186775 - DNA, 25 bp, Saccharomyces pastorianus
ttaacgggcgcggacctaaccattg

SEQ ID NO: 186776 - DNA, 25 bp, Saccharomyces pastorianus
cccagaaatctcatgactaattcaa

SEQ ID NO: 186777 - DNA, 25 bp, Saccharomyces pastorianus
acgtcaggaatgtcgcaccattaac

SEQ ID NO: 186778 - DNA, 25 bp, Saccharomyces pastorianus
acgggcgcggacctaaccattgttg

SEQ ID NO: 186779 - DNA, 25 bp, Saccharomyces pastorianus
gaaatctcatgactaattcaaacgt

SEQ ID NO: 186780 - DNA, 25 bp, Saccharomyces pastorianus
tcaaacgtcaggaatgtcgcaccat

SEQ ID NO: 186781 - DNA, 25 bp, Saccharomyces pastorianus
gggcgcggacctaaccattgttggc

SEQ ID NO: 186782 - DNA, 25 bp, Saccharomyces pastorianus
gtgcttgcttctgttcaagttcttt

SEQ ID NO: 186783 - DNA, 25 bp, Saccharomyces pastorianus
tctggaccagattccgccttttgtt

SEQ ID NO: 186784 - DNA, 25 bp, Saccharomyces pastorianus
atttcatcaacattctccaaaggag

SEQ ID NO: 186785 - DNA, 25 bp, Saccharomyces pastorianus
tcggaaaattctgctctttcggctt

SEQ ID NO: 186786 - DNA, 25 bp, Saccharomyces pastorianus
caattctgggacttcttcttcacta

SEQ ID NO: 186787 - DNA, 25 bp, Saccharomyces pastorianus
tttcgttggcctgttctggaccaga

SEQ ID NO: 186788 - DNA, 25 bp, Saccharomyces pastorianus
ttctaattcattctcttcatcctct

SEQ ID NO: 186789 - DNA, 25 bp, Saccharomyces pastorianus
aatagcagcccatgacatcttcttt

SEQ ID NO: 186790 - DNA, 25 bp, Saccharomyces pastorianus
tcgtcttcttcgttcaattctggga

SEQ ID NO: 186791 - DNA, 25 bp, Saccharomyces pastorianus
gttcttccttcttaatttcacttat

SEQ ID NO: 186792 - DNA, 25 bp, Saccharomyces pastorianus
cacttatttccttcttcatttcatc

SEQ ID NO: 186793 - DNA, 25 bp, Saccharomyces pastorianus
agatctgcagtacctcggtagcaag

SEQ ID NO: 186794 - DNA, 25 bp, Saccharomyces pastorianus
tttcttccgcaacgatcaaacgatc

SEQ ID NO: 186795 - DNA, 25 bp, Saccharomyces pastorianus
attagggatttcttccgcaacgatc

SEQ ID NO: 186796 - DNA, 25 bp, Saccharomyces pastorianus
gcaagtaccccatgttttcgggata

SEQ ID NO: 186797 - DNA, 25 bp, Saccharomyces pastorianus
caagtctggtattagcattgctaag

SEQ ID NO: 186798 - DNA, 25 bp, Saccharomyces pastorianus
taatccaacccttaatcgagagaag

SEQ ID NO: 186799 - DNA, 25 bp, Saccharomyces pastorianus
gtttcaattgacaccagatctgcag

SEQ ID NO: 186800 - DNA, 25 bp, Saccharomyces pastorianus
tacccctagcactgctcaaggtgaa

SEQ ID NO: 186801 - DNA, 25 bp, Saccharomyces pastorianus
tttcgggatattctgggtatgttca

SEQ ID NO: 186802 - DNA, 25 bp, Saccharomyces pastorianus
ggtatgttcaaagttcaagtctggt

SEQ ID NO: 186803 - DNA, 25 bp, Saccharomyces pastorianus
gtacatctaaggctatttgggtttt

SEQ ID NO: 186804 - DNA, 25 bp, Saccharomyces pastorianus
aagtggcgctcttttaatggtcgtc

SEQ ID NO: 186805 - DNA, 25 bp, Saccharomyces pastorianus
aacttgggaattgctcctgtcgttt

SEQ ID NO: 186806 - DNA, 25 bp, Saccharomyces pastorianus
ggaaatatcgtggtcgcggttttga

SEQ ID NO: 186807 - DNA, 25 bp, Saccharomyces pastorianus
gatttgatctctacgcttgtggact

SEQ ID NO: 186808 - DNA, 25 bp, Saccharomyces pastorianus
taggcggcttgggatgctctgacac

SEQ ID NO: 186809 - DNA, 25 bp, Saccharomyces pastorianus
tctgatgacatcacccctaaagatc

SEQ ID NO: 186810 - DNA, 25 bp, Saccharomyces pastorianus
tggtattgccgcgacatttttatcc

SEQ ID NO: 186811 - DNA, 25 bp, Saccharomyces pastorianus
gctgtctttgatctgcccgaaactg

SEQ ID NO: 186812 - DNA, 25 bp, Saccharomyces pastorianus
cttccagaccgttatgctgttcatt

SEQ ID NO: 186813 - DNA, 25 bp, Saccharomyces pastorianus
gatatggaagctttcgccgaggaga

SEQ ID NO: 186814 - DNA, 25 bp, Saccharomyces pastorianus
taatggtcgtcgcattctcttacaa

SEQ ID NO: 186815 - DNA, 25 bp, Saccharomyces pastorianus
caacgtcaacctaaagggccagagc

SEQ ID NO: 186816 - DNA, 25 bp, Saccharomyces pastorianus
gttcttgaccatggccagacagatc

SEQ ID NO: 186817 - DNA, 25 bp, Saccharomyces pastorianus
ggacgcgttcttgaccatggccaga

SEQ ID NO: 186818 - DNA, 25 bp, Saccharomyces pastorianus
gggcaacgtcaacctaaagggccag

SEQ ID NO: 186819 - DNA, 25 bp, Saccharomyces pastorianus
gcgttcttgaccatggccagacaga

SEQ ID NO: 186820 - DNA, 25 bp, Saccharomyces pastorianus
gtcgaggacgcgttcttgaccatgg

SEQ ID NO: 186821 - DNA, 25 bp, Saccharomyces pastorianus
tggccagacagatcaaggagagtat

SEQ ID NO: 186822 - DNA, 25 bp, Saccharomyces pastorianus
tgaccatggccagacagatcaagga

SEQ ID NO: 186823 - DNA, 25 bp, Saccharomyces pastorianus
gaggacgcgttcttgaccatggcca

SEQ ID NO: 186824 - DNA, 25 bp, Saccharomyces pastorianus
gacaagggcaacgtcaacctaaagg

SEQ ID NO: 186825 - DNA, 25 bp, Saccharomyces pastorianus
gatgacaagggcaacgtcaacctaa

SEQ ID NO: 186826 - DNA, 25 bp, Saccharomyces pastorianus
ggaaacgatagcctatccacgtata

SEQ ID NO: 186827 - DNA, 25 bp, Saccharomyces pastorianus
gaccgcatagaactggaaagcttcc

SEQ ID NO: 186828 - DNA, 25 bp, Saccharomyces pastorianus
agttactgcccgaccgcatagaact

SEQ ID NO: 186829 - DNA, 25 bp, Saccharomyces pastorianus
aagccgtactaagcactctcaagga

SEQ ID NO: 186830 - DNA, 25 bp, Saccharomyces pastorianus
agcactctcaaggaaatgggatata

SEQ ID NO: 186831 - DNA, 25 bp, Saccharomyces pastorianus
gttaatgctatacgcaatgtcaggg

SEQ ID NO: 186832 - DNA, 25 bp, Saccharomyces pastorianus
tcggcaaagccgtactaagcactct

SEQ ID NO: 186833 - DNA, 25 bp, Saccharomyces pastorianus
gaagtatttcccaagagcgtagtta

SEQ ID NO: 186834 - DNA, 25 bp, Saccharomyces pastorianus
gaaagcttccccatgatcggcaaag

SEQ ID NO: 186835 - DNA, 25 bp, Saccharomyces pastorianus
gaatggcatgcggtgagtgactatt

SEQ ID NO: 186836 - DNA, 25 bp, Saccharomyces pastorianus
tccacgtatacaccaccagttactg

SEQ ID NO: 186837 - DNA, 25 bp, Saccharomyces pastorianus
tgcaacgctctaccactaagctaag

SEQ ID NO: 186838 - DNA, 25 bp, Saccharomyces pastorianus
tttgcattacaagtgcaacgctcta

SEQ ID NO: 186839 - DNA, 25 bp, Saccharomyces pastorianus
aacgctctaccactaagctaaggag

SEQ ID NO: 186840 - DNA, 25 bp, Saccharomyces pastorianus
gtgcaacgctctaccactaagctaa

SEQ ID NO: 186841 - DNA, 25 bp, Saccharomyces pastorianus
acgctctaccactaagctaaggagg

SEQ ID NO: 186842 - DNA, 25 bp, Saccharomyces pastorianus
caacgctctaccactaagctaagga

SEQ ID NO: 186843 - DNA, 25 bp, Saccharomyces pastorianus
aagtgcaacgctctaccactaagct

SEQ ID NO: 186844 - DNA, 25 bp, Saccharomyces pastorianus
gcattacaagtgcaacgctctacca

SEQ ID NO: 186845 - DNA, 25 bp, Saccharomyces pastorianus
agtgcaacgctctaccactaagcta

SEQ ID NO: 186846 - DNA, 25 bp, Saccharomyces pastorianus
gcaacgctctaccactaagctaagg

SEQ ID NO: 186847 - DNA, 25 bp, Saccharomyces pastorianus
attacaagtgcaacgctctaccact

SEQ ID NO: 186848 - DNA, 25 bp, Saccharomyces pastorianus
cagattaaagccagccatctccagt

SEQ ID NO: 186849 - DNA, 25 bp, Saccharomyces pastorianus
aaagccagccatctccagtgctcta

SEQ ID NO: 186850 - DNA, 25 bp, Saccharomyces pastorianus
ttccatggtactccagcagattaaa

SEQ ID NO: 186851 - DNA, 25 bp, Saccharomyces pastorianus
tgatcaccggtgttccatggtactc

SEQ ID NO: 186852 - DNA, 25 bp, Saccharomyces pastorianus
agattaaagccagccatctccagtg

SEQ ID NO: 186853 - DNA, 25 bp, Saccharomyces pastorianus
attaaagccagccatctccagtgct

SEQ ID NO: 186854 - DNA, 25 bp, Saccharomyces pastorianus
gattaaagccagccatctccagtgc

SEQ ID NO: 186855 - DNA, 25 bp, Saccharomyces pastorianus
tccatggtactccagcagattaaag

SEQ ID NO: 186856 - DNA, 25 bp, Saccharomyces pastorianus
atgatcaccggtgttccatggtact

SEQ ID NO: 186857 - DNA, 25 bp, Saccharomyces pastorianus
taaagccagccatctccagtgctct

SEQ ID NO: 186858 - DNA, 25 bp, Saccharomyces pastorianus
ttaaagccagccatctccagtgctc

SEQ ID NO: 186859 - DNA, 25 bp, Saccharomyces pastorianus
tcaatcaatcattcgtcggcagtgg

SEQ ID NO: 186860 - DNA, 25 bp, Saccharomyces pastorianus
atccatcttccacaataaacgccag

SEQ ID NO: 186861 - DNA, 25 bp, Saccharomyces pastorianus
aacgaaccagttgatctgctgtcag

SEQ ID NO: 186862 - DNA, 25 bp, Saccharomyces pastorianus
aatggctcttcatctatcaccaatg

SEQ ID NO: 186863 - DNA, 25 bp, Saccharomyces pastorianus
actaggccagttatatccatcttcc

SEQ ID NO: 186864 - DNA, 25 bp, Saccharomyces pastorianus
ggaggcaaactcaggtgtcacctta

SEQ ID NO: 186865 - DNA, 25 bp, Saccharomyces pastorianus
aacgccagccaaatttgcaagcagt

SEQ ID NO: 186866 - DNA, 25 bp, Saccharomyces pastorianus
atgacattgctcagctgcccaaaaa

SEQ ID NO: 186867 - DNA, 25 bp, Saccharomyces pastorianus
gaatgtatatgcttccttgctctct

SEQ ID NO: 186868 - DNA, 25 bp, Saccharomyces pastorianus
gcaaggcttctactggcgacaatgt

SEQ ID NO: 186869 - DNA, 25 bp, Saccharomyces pastorianus
gtgtcaccttaccattggatgccaa

SEQ ID NO: 186870 - DNA, 25 bp, Saccharomyces pastorianus
atctattacattatgggtggtatgt

SEQ ID NO: 186871 - DNA, 25 bp, Saccharomyces pastorianus
ctattacattatgggtggtatgttg

SEQ ID NO: 186872 - DNA, 25 bp, Saccharomyces pastorianus
cattatgggtggtatgttggaataa

SEQ ID NO: 186873 - DNA, 25 bp, Saccharomyces pastorianus
tctattacattatgggtggtatgtt

SEQ ID NO: 186874 - DNA, 25 bp, Saccharomyces pastorianus
cattagatctattacattatgggtg

SEQ ID NO: 186875 - DNA, 25 bp, Saccharomyces pastorianus
ttagatctattacattatgggtggt

SEQ ID NO: 186876 - DNA, 25 bp, Saccharomyces pastorianus
attatgggtggtatgttggaataaa

SEQ ID NO: 186877 - DNA, 25 bp, Saccharomyces pastorianus
tcattagatctattacattatgggt

SEQ ID NO: 186878 - DNA, 25 bp, Saccharomyces pastorianus
gatctattacattatgggtggtatg

SEQ ID NO: 186879 - DNA, 25 bp, Saccharomyces pastorianus
ttcattagatctattacattatggg

SEQ ID NO: 186880 - DNA, 25 bp, Saccharomyces pastorianus
attagatctattacattatgggtgg

SEQ ID NO: 186881 - DNA, 25 bp, Saccharomyces pastorianus
tcacttggcccaatactacatgttc

SEQ ID NO: 186882 - DNA, 25 bp, Saccharomyces pastorianus
aatactacatgttccaagccgccca

SEQ ID NO: 186883 - DNA, 25 bp, Saccharomyces pastorianus
tacatgttccaagccgcccacccaa

SEQ ID NO: 186884 - DNA, 25 bp, Saccharomyces pastorianus
cacttggcccaatactacatgttcc

SEQ ID NO: 186885 - DNA, 25 bp, Saccharomyces pastorianus
atactacatgttccaagccgcccac

SEQ ID NO: 186886 - DNA, 25 bp, Saccharomyces pastorianus
acttggcccaatactacatgttcca

SEQ ID NO: 186887 - DNA, 25 bp, Saccharomyces pastorianus
gccatcgctgctactgcttctgcaa

SEQ ID NO: 186888 - DNA, 25 bp, Saccharomyces pastorianus
tactacatgttccaagccgcccacc

SEQ ID NO: 186889 - DNA, 25 bp, Saccharomyces pastorianus
ttctgcaaccaccactctagctcaa

SEQ ID NO: 186890 - DNA, 25 bp, Saccharomyces pastorianus
tactgcttctgcaaccaccactcta

SEQ ID NO: 186891 - DNA, 25 bp, Saccharomyces pastorianus
cttggcccaatactacatgttccaa

SEQ ID NO: 186892 - DNA, 25 bp, Saccharomyces pastorianus
ttgaatgaccctaatgcacgctttg

SEQ ID NO: 186893 - DNA, 25 bp, Saccharomyces pastorianus
tatgctgcaggctttcaacaccttc

SEQ ID NO: 186894 - DNA, 25 bp, Saccharomyces pastorianus
aggccgatacctcttactgtaaatc

SEQ ID NO: 186895 - DNA, 25 bp, Saccharomyces pastorianus
aacaccttcgattctgagtttgcag

SEQ ID NO: 186896 - DNA, 25 bp, Saccharomyces pastorianus
gatgaattgggaacgccctccggta

SEQ ID NO: 186897 - DNA, 25 bp, Saccharomyces pastorianus
aattacgagctcacagcaactgctt

SEQ ID NO: 186898 - DNA, 25 bp, Saccharomyces pastorianus
aagcatcttgtttggcgctgttgac

SEQ ID NO: 186899 - DNA, 25 bp, Saccharomyces pastorianus
cgtatcgcttccttctgcagaagaa

SEQ ID NO: 186900 - DNA, 25 bp, Saccharomyces pastorianus
gcaactgcttctgagatttcctcta

SEQ ID NO: 186901 - DNA, 25 bp, Saccharomyces pastorianus
taaggcttctaatacaccctgctcg

SEQ ID NO: 186902 - DNA, 25 bp, Saccharomyces pastorianus
atggtggcattttaggcgtatcgct

SEQ ID NO: 186903 - DNA, 25 bp, Saccharomyces pastorianus
atggatttatcccttcttagctacc

SEQ ID NO: 186904 - DNA, 25 bp, Saccharomyces pastorianus
gtactaccaaaggatatcttcagaa

SEQ ID NO: 186905 - DNA, 25 bp, Saccharomyces pastorianus
acttggttctgttacgagacttaca

SEQ ID NO: 186906 - DNA, 25 bp, Saccharomyces pastorianus
aattcatttacttggttctgttacg

SEQ ID NO: 186907 - DNA, 25 bp, Saccharomyces pastorianus
gaatcacaaaacatcgtactaccaa

SEQ ID NO: 186908 - DNA, 25 bp, Saccharomyces pastorianus
ttatcgtctaagagtgttgaatcac

SEQ ID NO: 186909 - DNA, 25 bp, Saccharomyces pastorianus
ctcactgcttggtggaaggtgtcca

SEQ ID NO: 186910 - DNA, 25 bp, Saccharomyces pastorianus
gagacttacaagtccctagcgtttc

SEQ ID NO: 186911 - DNA, 25 bp, Saccharomyces pastorianus
aagtccctagcgtttcgtatctggt

SEQ ID NO: 186912 - DNA, 25 bp, Saccharomyces pastorianus
ttatggttgccgctcactgcttggt

SEQ ID NO: 186913 - DNA, 25 bp, Saccharomyces pastorianus
agagcgtaggcttattatcgtctaa

SEQ ID NO: 186914 - DNA, 25 bp, Saccharomyces pastorianus
atagctacgaatctatcagcccgta

SEQ ID NO: 186915 - DNA, 25 bp, Saccharomyces pastorianus
tacagcatagctacgaatctatcag

SEQ ID NO: 186916 - DNA, 25 bp, Saccharomyces pastorianus
agctacgaatctatcagcccgtaac

SEQ ID NO: 186917 - DNA, 25 bp, Saccharomyces pastorianus
acgaatctatcagcccgtaacttaa

SEQ ID NO: 186918 - DNA, 25 bp, Saccharomyces pastorianus
gaatctatcagcccgtaacttaaac

SEQ ID NO: 186919 - DNA, 25 bp, Saccharomyces pastorianus
atgctacagcatagctacgaatcta

SEQ ID NO: 186920 - DNA, 25 bp, Saccharomyces pastorianus
gctacgaatctatcagcccgtaact

SEQ ID NO: 186921 - DNA, 25 bp, Saccharomyces pastorianus
ctacgaatctatcagcccgtaactt

SEQ ID NO: 186922 - DNA, 25 bp, Saccharomyces pastorianus
gctacagcatagctacgaatctatc

SEQ ID NO: 186923 - DNA, 25 bp, Saccharomyces pastorianus
tcatgctacagcatagctacgaatc

SEQ ID NO: 186924 - DNA, 25 bp, Saccharomyces pastorianus
catagctacgaatctatcagcccgt

SEQ ID NO: 186925 - DNA, 25 bp, Saccharomyces pastorianus
gacacattcagttcacatctgagtt

SEQ ID NO: 186926 - DNA, 25 bp, Saccharomyces pastorianus
gagtttgatctcattgattgtgctt

SEQ ID NO: 186927 - DNA, 25 bp, Saccharomyces pastorianus
gcagcattcacattcgggaaagcga

SEQ ID NO: 186928 - DNA, 25 bp, Saccharomyces pastorianus
gctcttcccgaagacacattcagtt

SEQ ID NO: 186929 - DNA, 25 bp, Saccharomyces pastorianus
atgatcatcataatcgtgagtttga

SEQ ID NO: 186930 - DNA, 25 bp, Saccharomyces pastorianus
gttcacatctgagttatgtacttta

SEQ ID NO: 186931 - DNA, 25 bp, Saccharomyces pastorianus
gttatgtactttatgaaattgctca

SEQ ID NO: 186932 - DNA, 25 bp, Saccharomyces pastorianus
gattgtgctttttcatgataacgac

SEQ ID NO: 186933 - DNA, 25 bp, Saccharomyces pastorianus
tggtggttgcagcattcacattcgg

SEQ ID NO: 186934 - DNA, 25 bp, Saccharomyces pastorianus
agagaatgtagctcttcccgaagac

SEQ ID NO: 186935 - DNA, 25 bp, Saccharomyces pastorianus
gaaattgctcattgtaaaccgatca

SEQ ID NO: 186936 - DNA, 25 bp, Saccharomyces pastorianus
ggagaacttctagtactttctacat

SEQ ID NO: 186937 - DNA, 25 bp, Saccharomyces pastorianus
tgccttattaaaaatggaatcccaa

SEQ ID NO: 186938 - DNA, 25 bp, Saccharomyces pastorianus
tattgccttattaaaaatggaatcc

SEQ ID NO: 186939 - DNA, 25 bp, Saccharomyces pastorianus
tctagtactttctacatacctaata

SEQ ID NO: 186940 - DNA, 25 bp, Saccharomyces pastorianus
ctagtactttctacatacctaatat

SEQ ID NO: 186941 - DNA, 25 bp, Saccharomyces pastorianus
aacttctagtactttctacatacct

SEQ ID NO: 186942 - DNA, 25 bp, Saccharomyces pastorianus
cttttatggattcctaaatcctcga

SEQ ID NO: 186943 - DNA, 25 bp, Saccharomyces pastorianus
ttgccttattaaaaatggaatccca

SEQ ID NO: 186944 - DNA, 25 bp, Saccharomyces pastorianus
agaattgtgtagaattgcagattcc

SEQ ID NO: 186945 - DNA, 25 bp, Saccharomyces pastorianus
gcatacatccattgacagacgcgaa

SEQ ID NO: 186946 - DNA, 25 bp, Saccharomyces pastorianus
gacagacgcgaaagttgataacata

SEQ ID NO: 186947 - DNA, 25 bp, Saccharomyces pastorianus
tgcatttagggctctgcctcaatat

SEQ ID NO: 186948 - DNA, 25 bp, Saccharomyces pastorianus
gggagctcaatttgttactagtaga

SEQ ID NO: 186949 - DNA, 25 bp, Saccharomyces pastorianus
gggctctgcctcaatatttgcagta

SEQ ID NO: 186950 - DNA, 25 bp, Saccharomyces pastorianus
gatccgtgacggttctgacactgaa

SEQ ID NO: 186951 - DNA, 25 bp, Saccharomyces pastorianus
taacatactcttgcatttagggctc

SEQ ID NO: 186952 - DNA, 25 bp, Saccharomyces pastorianus
gaaaataggttagtacagggcctgt

SEQ ID NO: 186953 - DNA, 25 bp, Saccharomyces pastorianus
tatttgttaaaatgatccgtgacgg

SEQ ID NO: 186954 - DNA, 25 bp, Saccharomyces pastorianus
gagctggaagcatttaaatcggaaa

SEQ ID NO: 186955 - DNA, 25 bp, Saccharomyces pastorianus
acttgacggcaaattatggtatgat

SEQ ID NO: 186956 - DNA, 25 bp, Saccharomyces pastorianus
gcaatcgaggtctttgaaggccatg

SEQ ID NO: 186957 - DNA, 25 bp, Saccharomyces pastorianus
gtttctaccacgcaatcgaggtctt

SEQ ID NO: 186958 - DNA, 25 bp, Saccharomyces pastorianus
ttctaccacgcaatcgaggtctttg

SEQ ID NO: 186959 - DNA, 25 bp, Saccharomyces pastorianus
gctaacatatgggtccatagtggca

SEQ ID NO: 186960 - DNA, 25 bp, Saccharomyces pastorianus
tgggtccatagtggcacaattgtgc

SEQ ID NO: 186961 - DNA, 25 bp, Saccharomyces pastorianus
atggtttctaccacgcaatcgaggt

SEQ ID NO: 186962 - DNA, 25 bp, Saccharomyces pastorianus
aatcaatacagaattatttacgcta

SEQ ID NO: 186963 - DNA, 25 bp, Saccharomyces pastorianus
cgcaatcgaggtctttgaaggccat

SEQ ID NO: 186964 - DNA, 25 bp, Saccharomyces pastorianus
atttacgctaacatatgggtccata

SEQ ID NO: 186965 - DNA, 25 bp, Saccharomyces pastorianus
ttatttacgctaacatatgggtcca

SEQ ID NO: 186966 - DNA, 25 bp, Saccharomyces pastorianus
acaattgtgccaagattatgaacgg

SEQ ID NO: 186967 - DNA, 25 bp, Saccharomyces pastorianus
taactcgccggcaagttgagcgtgc

SEQ ID NO: 186968 - DNA, 25 bp, Saccharomyces pastorianus
tatcgcggagataagacccttgccc

SEQ ID NO: 186969 - DNA, 25 bp, Saccharomyces pastorianus
agatggcacatctgtttctacaaag

SEQ ID NO: 186970 - DNA, 25 bp, Saccharomyces pastorianus
gcagactttggagcgctgcgtaagt

SEQ ID NO: 186971 - DNA, 25 bp, Saccharomyces pastorianus
tgcactatgcacagaagcccgatca

SEQ ID NO: 186972 - DNA, 25 bp, Saccharomyces pastorianus
gaactagactatccgcgagagggca

SEQ ID NO: 186973 - DNA, 25 bp, Saccharomyces pastorianus
ggacttgttccgatcagcattacat

SEQ ID NO: 186974 - DNA, 25 bp, Saccharomyces pastorianus
aagtcgctacacacgtacattgctg

SEQ ID NO: 186975 - DNA, 25 bp, Saccharomyces pastorianus
agggcggccgaatctcgaggacaca

SEQ ID NO: 186976 - DNA, 25 bp, Saccharomyces pastorianus
aaacgcaggtgggtggccatctact

SEQ ID NO: 186977 - DNA, 25 bp, Saccharomyces pastorianus
agggcaaactgttccgcaccaagga

SEQ ID NO: 186978 - DNA, 25 bp, Saccharomyces pastorianus
cattgcaactgctcctgtaatatat

SEQ ID NO: 186979 - DNA, 25 bp, Saccharomyces pastorianus
agaggtccgaagtccattaggttga

SEQ ID NO: 186980 - DNA, 25 bp, Saccharomyces pastorianus
aaaggccgtgtagcagttgcctaca

SEQ ID NO: 186981 - DNA, 25 bp, Saccharomyces pastorianus
tgcttgcggctctatcacgataatt

SEQ ID NO: 186982 - DNA, 25 bp, Saccharomyces pastorianus
gagggttcccaaaaagctaatcgat

SEQ ID NO: 186983 - DNA, 25 bp, Saccharomyces pastorianus
gaaagcggtcctaacaccattgcaa

SEQ ID NO: 186984 - DNA, 25 bp, Saccharomyces pastorianus
gctgtcgtattcgtcgagtgaaatg

SEQ ID NO: 186985 - DNA, 25 bp, Saccharomyces pastorianus
actaagcaaacatgcgccaagcagg

SEQ ID NO: 186986 - DNA, 25 bp, Saccharomyces pastorianus
agcaggcatgcgactgctgtcgtat

SEQ ID NO: 186987 - DNA, 25 bp, Saccharomyces pastorianus
taatcgatcagtgcttgcggctcta

SEQ ID NO: 186988 - DNA, 25 bp, Saccharomyces pastorianus
gcacttatctgcaaccgtcgagaaa

SEQ ID NO: 186989 - DNA, 25 bp, Saccharomyces pastorianus
ttgatcagaataacaaagctctaag

SEQ ID NO: 186990 - DNA, 25 bp, Saccharomyces pastorianus
atgaccctgtcaacatggctaaaag

SEQ ID NO: 186991 - DNA, 25 bp, Saccharomyces pastorianus
caaaactggaagtaataatgccgac

SEQ ID NO: 186992 - DNA, 25 bp, Saccharomyces pastorianus
attggcttatgaccctgtcaacatg

SEQ ID NO: 186993 - DNA, 25 bp, Saccharomyces pastorianus
gaacacaaaaggagatctttgatca

SEQ ID NO: 186994 - DNA, 25 bp, Saccharomyces pastorianus
gatcttcattggcttatgaccctgt

SEQ ID NO: 186995 - DNA, 25 bp, Saccharomyces pastorianus
ggaggtcatgacagcaaaactggaa

SEQ ID NO: 186996 - DNA, 25 bp, Saccharomyces pastorianus
gcaagtaaggacaaggcttcgctca

SEQ ID NO: 186997 - DNA, 25 bp, Saccharomyces pastorianus
acatggctaaaaggttgagaacaca

SEQ ID NO: 186998 - DNA, 25 bp, Saccharomyces pastorianus
aggacaaggcttcgctcaataaaaa

SEQ ID NO: 186999 - DNA, 25 bp, Saccharomyces pastorianus
caaagctctaagaaagggaggtcat

SEQ ID NO: 187000 - DNA, 25 bp, Saccharomyces pastorianus
gtctgctaaactgggccatactgtg

SEQ ID NO: 187001 - DNA, 25 bp, Saccharomyces pastorianus
accatctctagcatacttagttgaa

SEQ ID NO: 187002 - DNA, 25 bp, Saccharomyces pastorianus
tctagcatacttagttgaacacgcc

SEQ ID NO: 187003 - DNA, 25 bp, Saccharomyces pastorianus
aaccatctctagcatacttagttga

SEQ ID NO: 187004 - DNA, 25 bp, Saccharomyces pastorianus
aaggagaagtctgctaaactgggcc

SEQ ID NO: 187005 - DNA, 25 bp, Saccharomyces pastorianus
gagaagtctgctaaactgggccata

SEQ ID NO: 187006 - DNA, 25 bp, Saccharomyces pastorianus
agaagtctgctaaactgggccatac

SEQ ID NO: 187007 - DNA, 25 bp, Saccharomyces pastorianus
acaaccatctctagcatacttagtt

SEQ ID NO: 187008 - DNA, 25 bp, Saccharomyces pastorianus
agtctgctaaactgggccatactgt

SEQ ID NO: 187009 - DNA, 25 bp, Saccharomyces pastorianus
catctctagcatacttagttgaaca

SEQ ID NO: 187010 - DNA, 25 bp, Saccharomyces pastorianus
tctctagcatacttagttgaacacg

SEQ ID NO: 187011 - DNA, 25 bp, Saccharomyces pastorianus
ggtcttttatatgtttcattatcct

SEQ ID NO: 187012 - DNA, 25 bp, Saccharomyces pastorianus
gcctgcaggtcttttatatgtttca

SEQ ID NO: 187013 - DNA, 25 bp, Saccharomyces pastorianus
tcttttatatgtttcattatcctat

SEQ ID NO: 187014 - DNA, 25 bp, Saccharomyces pastorianus
gcaggtcttttatatgtttcattat

SEQ ID NO: 187015 - DNA, 25 bp, Saccharomyces pastorianus
gtcttttatatgtttcattatccta

SEQ ID NO: 187016 - DNA, 25 bp, Saccharomyces pastorianus
aggtcttttatatgtttcattatcc

SEQ ID NO: 187017 - DNA, 25 bp, Saccharomyces pastorianus
caggtcttttatatgtttcattatc

SEQ ID NO: 187018 - DNA, 25 bp, Saccharomyces pastorianus
cctgcaggtcttttatatgtttcat

SEQ ID NO: 187019 - DNA, 25 bp, Saccharomyces pastorianus
ctgcaggtcttttatatgtttcatt

SEQ ID NO: 187020 - DNA, 25 bp, Saccharomyces pastorianus
tgcaggtcttttatatgtttcatta

SEQ ID NO: 187021 - DNA, 25 bp, Saccharomyces pastorianus
cttttatatgtttcattatcctatt

SEQ ID NO: 187022 - DNA, 25 bp, Saccharomyces pastorianus
tagagggaccctttgttttttcatg

SEQ ID NO: 187023 - DNA, 25 bp, Saccharomyces pastorianus
taacgttacgagtttctggcgtgaa

SEQ ID NO: 187024 - DNA, 25 bp, Saccharomyces pastorianus
gagcatttgctgaaggtggatccca

SEQ ID NO: 187025 - DNA, 25 bp, Saccharomyces pastorianus
gccatttgtgcagtatggtttgcaa

SEQ ID NO: 187026 - DNA, 25 bp, Saccharomyces pastorianus
cgttgtctcgtttcaccttgataga

SEQ ID NO: 187027 - DNA, 25 bp, Saccharomyces pastorianus
gtttcaccttgatagagggaccctt

SEQ ID NO: 187028 - DNA, 25 bp, Saccharomyces pastorianus
aaattgcggtagctgccatttgtgc

SEQ ID NO: 187029 - DNA, 25 bp, Saccharomyces pastorianus
aaggtggatcccatccccgatgtga

SEQ ID NO: 187030 - DNA, 25 bp, Saccharomyces pastorianus
actttgggcatcgtgtccgttttgg

SEQ ID NO: 187031 - DNA, 25 bp, Saccharomyces pastorianus
gcatcgtgtccgttttggtattata

SEQ ID NO: 187032 - DNA, 25 bp, Saccharomyces pastorianus
aaaactcctttgtagcgttgtctcg

SEQ ID NO: 187033 - DNA, 25 bp, Saccharomyces pastorianus
gatcgggccaaacttctgaactgat

SEQ ID NO: 187034 - DNA, 25 bp, Saccharomyces pastorianus
caaaattccttctctgatgtctcta

SEQ ID NO: 187035 - DNA, 25 bp, Saccharomyces pastorianus
attatgcgggtttaagatcgggcca

SEQ ID NO: 187036 - DNA, 25 bp, Saccharomyces pastorianus
taaatgttgcgcctttacgccttca

SEQ ID NO: 187037 - DNA, 25 bp, Saccharomyces pastorianus
tggacctggaatttatccggccggt

SEQ ID NO: 187038 - DNA, 25 bp, Saccharomyces pastorianus
ttacgccttcacgtggatcaagaca

SEQ ID NO: 187039 - DNA, 25 bp, Saccharomyces pastorianus
acagttctccgatgtttcttctgga

SEQ ID NO: 187040 - DNA, 25 bp, Saccharomyces pastorianus
gatgaacccgatgagtctaactctg

SEQ ID NO: 187041 - DNA, 25 bp, Saccharomyces pastorianus
ggccggtcgactttttgcaagcagt

SEQ ID NO: 187042 - DNA, 25 bp, Saccharomyces pastorianus
attatcgataatgttcccacgtccg

SEQ ID NO: 187043 - DNA, 25 bp, Saccharomyces pastorianus
gaaccgatgtgtagtttccatttac

SEQ ID NO: 187044 - DNA, 25 bp, Saccharomyces pastorianus
gtgatgaggaaagcgacacgtgcat

SEQ ID NO: 187045 - DNA, 25 bp, Saccharomyces pastorianus
agtaccaatacgactaccaactcca

SEQ ID NO: 187046 - DNA, 25 bp, Saccharomyces pastorianus
tgccagtaccaatacgactaccaac

SEQ ID NO: 187047 - DNA, 25 bp, Saccharomyces pastorianus
gctaatgccagtaccaatacgacta

SEQ ID NO: 187048 - DNA, 25 bp, Saccharomyces pastorianus
ctaatgccagtaccaatacgactac

SEQ ID NO: 187049 - DNA, 25 bp, Saccharomyces pastorianus
taatgccagtaccaatacgactacc

SEQ ID NO: 187050 - DNA, 25 bp, Saccharomyces pastorianus
aatgccagtaccaatacgactacca

SEQ ID NO: 187051 - DNA, 25 bp, Saccharomyces pastorianus
gccagtaccaatacgactaccaact

SEQ ID NO: 187052 - DNA, 25 bp, Saccharomyces pastorianus
atgccagtaccaatacgactaccaa

SEQ ID NO: 187053 - DNA, 25 bp, Saccharomyces pastorianus
tgctaatgccagtaccaatacgact

SEQ ID NO: 187054 - DNA, 25 bp, Saccharomyces pastorianus
gtaccaatacgactaccaactccag

SEQ ID NO: 187055 - DNA, 25 bp, Saccharomyces pastorianus
gatttgttaccccaggctgaagcac

SEQ ID NO: 187056 - DNA, 25 bp, Saccharomyces pastorianus
gaagcaccaccccaagtagaagtag

SEQ ID NO: 187057 - DNA, 25 bp, Saccharomyces pastorianus
gtcataccaccgctaagaccagaag

SEQ ID NO: 187058 - DNA, 25 bp, Saccharomyces pastorianus
gtggaagcaccaccccatgaggaga

SEQ ID NO: 187059 - DNA, 25 bp, Saccharomyces pastorianus
tgaggagacaccaccaccacctgag

SEQ ID NO: 187060 - DNA, 25 bp, Saccharomyces pastorianus
tgcaccgccccaacttgatttgtta

SEQ ID NO: 187061 - DNA, 25 bp, Saccharomyces pastorianus
agaagtagcaccagtaccttggccg

SEQ ID NO: 187062 - DNA, 25 bp, Saccharomyces pastorianus
aagcggatgcacctccattaccttg

SEQ ID NO: 187063 - DNA, 25 bp, Saccharomyces pastorianus
gaaggagctccatcctggtgtcata

SEQ ID NO: 187064 - DNA, 25 bp, Saccharomyces pastorianus
gtgttttgccaccatcgaaggagct

SEQ ID NO: 187065 - DNA, 25 bp, Saccharomyces pastorianus
catgcgcatttacagctggtgtttt

SEQ ID NO: 187066 - DNA, 25 bp, Saccharomyces pastorianus
gggcggtgtcgtgtacacaattaca

SEQ ID NO: 187067 - DNA, 25 bp, Saccharomyces pastorianus
caccttgctgagtgagtacgcatat

SEQ ID NO: 187068 - DNA, 25 bp, Saccharomyces pastorianus
aatgtcttgagaggtaacgctatga

SEQ ID NO: 187069 - DNA, 25 bp, Saccharomyces pastorianus
gtgtacacaattacagacgtcaaag

SEQ ID NO: 187070 - DNA, 25 bp, Saccharomyces pastorianus
ggaacaatacagcttcaaaacatgg

SEQ ID NO: 187071 - DNA, 25 bp, Saccharomyces pastorianus
gacgtcaaagacctgcatgagtgga

SEQ ID NO: 187072 - DNA, 25 bp, Saccharomyces pastorianus
ggatagaattattgccttaaggaac

SEQ ID NO: 187073 - DNA, 25 bp, Saccharomyces pastorianus
gaagagcatcctttatttgaacggt

SEQ ID NO: 187074 - DNA, 25 bp, Saccharomyces pastorianus
tttgtttccccgatcctcatttcaa

SEQ ID NO: 187075 - DNA, 25 bp, Saccharomyces pastorianus
gaaaagggccagctttctaaaatgt

SEQ ID NO: 187076 - DNA, 25 bp, Saccharomyces pastorianus
ccccgatcctcatttcaaacaaaga

SEQ ID NO: 187077 - DNA, 25 bp, Saccharomyces pastorianus
aactgggccaagagaccaagaactt

SEQ ID NO: 187078 - DNA, 25 bp, Saccharomyces pastorianus
caactgggccaagagaccaagaact

SEQ ID NO: 187079 - DNA, 25 bp, Saccharomyces pastorianus
ccaactgggccaagagaccaagaac

SEQ ID NO: 187080 - DNA, 25 bp, Saccharomyces pastorianus
cccgcgttattagcacggtgcctta

SEQ ID NO: 187081 - DNA, 25 bp, Saccharomyces pastorianus
tattagcacggtgccttaaccaact

SEQ ID NO: 187082 - DNA, 25 bp, Saccharomyces pastorianus
aaccaactgggccaagagaccaaga

SEQ ID NO: 187083 - DNA, 25 bp, Saccharomyces pastorianus
accaactgggccaagagaccaagaa

SEQ ID NO: 187084 - DNA, 25 bp, Saccharomyces pastorianus
cgcgttattagcacggtgccttaac

SEQ ID NO: 187085 - DNA, 25 bp, Saccharomyces pastorianus
actgggccaagagaccaagaacttg

SEQ ID NO: 187086 - DNA, 25 bp, Saccharomyces pastorianus
gttattagcacggtgccttaaccaa

SEQ ID NO: 187087 - DNA, 25 bp, Saccharomyces pastorianus
ccgcgttattagcacggtgccttaa

SEQ ID NO: 187088 - DNA, 25 bp, Saccharomyces pastorianus
gagctggttattcaaatttctaaaa

SEQ ID NO: 187089 - DNA, 25 bp, Saccharomyces pastorianus
gtgactacctattatggtccgaata

SEQ ID NO: 187090 - DNA, 25 bp, Saccharomyces pastorianus
gaaattttatgaccaacgcattgaa

SEQ ID NO: 187091 - DNA, 25 bp, Saccharomyces pastorianus
atcaatgctttcttaatggatacat

SEQ ID NO: 187092 - DNA, 25 bp, Saccharomyces pastorianus
gtgccattacaagttttttgtcagt

SEQ ID NO: 187093 - DNA, 25 bp, Saccharomyces pastorianus
aaacttgctaaaacagtgccattac

SEQ ID NO: 187094 - DNA, 25 bp, Saccharomyces pastorianus
ggtccgaataaaatcaatgctttct

SEQ ID NO: 187095 - DNA, 25 bp, Saccharomyces pastorianus
ggatacatttatcttaaacttgcta

SEQ ID NO: 187096 - DNA, 25 bp, Saccharomyces pastorianus
tcgattgtgacttagtcattctgct

SEQ ID NO: 187097 - DNA, 25 bp, Saccharomyces pastorianus
gatggtattggtctagaacttttag

SEQ ID NO: 187098 - DNA, 25 bp, Saccharomyces pastorianus
gtcagtaatatctctgagctggtta

SEQ ID NO: 187099 - DNA, 25 bp, Saccharomyces pastorianus
atgttctaaacaccttgagcgatat

SEQ ID NO: 187100 - DNA, 25 bp, Saccharomyces pastorianus
agtccagactgtcagaaccatggtt

SEQ ID NO: 187101 - DNA, 25 bp, Saccharomyces pastorianus
gaatactttctctgagctgttggtt

SEQ ID NO: 187102 - DNA, 25 bp, Saccharomyces pastorianus
gcagagaacgtttttcaagacttaa

SEQ ID NO: 187103 - DNA, 25 bp, Saccharomyces pastorianus
tttaccatctgtgtcgttaaccgag

SEQ ID NO: 187104 - DNA, 25 bp, Saccharomyces pastorianus
gtttccaattaagtgcatccgctgt

SEQ ID NO: 187105 - DNA, 25 bp, Saccharomyces pastorianus
ggatacttttcagccatttttaact

SEQ ID NO: 187106 - DNA, 25 bp, Saccharomyces pastorianus
accatggttgatgactggaacttca

SEQ ID NO: 187107 - DNA, 25 bp, Saccharomyces pastorianus
ttatttacaaacttcctgacagatg

SEQ ID NO: 187108 - DNA, 25 bp, Saccharomyces pastorianus
gctgttggttccctacctgttaaag

SEQ ID NO: 187109 - DNA, 25 bp, Saccharomyces pastorianus
taagtgcatccgctgttagtgaaat

SEQ ID NO: 187110 - DNA, 25 bp, Saccharomyces pastorianus
aacgccgcctcaaacatgctgggaa

SEQ ID NO: 187111 - DNA, 25 bp, Saccharomyces pastorianus
gatccatatttcaacgcatctcaaa

SEQ ID NO: 187112 - DNA, 25 bp, Saccharomyces pastorianus
atatttcaacgcatctcaaatgggt

SEQ ID NO: 187113 - DNA, 25 bp, Saccharomyces pastorianus
gatgtcgggtgctgagcaagatcca

SEQ ID NO: 187114 - DNA, 25 bp, Saccharomyces pastorianus
gcctcaaacatgctgggaaccaacg

SEQ ID NO: 187115 - DNA, 25 bp, Saccharomyces pastorianus
gtcaatttcgcatcgggcgataaca

SEQ ID NO: 187116 - DNA, 25 bp, Saccharomyces pastorianus
gataaagtcaatttcgcatcgggcg

SEQ ID NO: 187117 - DNA, 25 bp, Saccharomyces pastorianus
gggtgctgagcaagatccatatttc

SEQ ID NO: 187118 - DNA, 25 bp, Saccharomyces pastorianus
tgctgggaaccaacgaagacgtgat

SEQ ID NO: 187119 - DNA, 25 bp, Saccharomyces pastorianus
atcgggcgataacaacgccgcctca

SEQ ID NO: 187120 - DNA, 25 bp, Saccharomyces pastorianus
caacgaagacgtgatgatgtcgggt

SEQ ID NO: 187121 - DNA, 25 bp, Saccharomyces pastorianus
gtggttgtccaagcaagagtggcaa

SEQ ID NO: 187122 - DNA, 25 bp, Saccharomyces pastorianus
tccaagcaagagtggcaagaaagtg

SEQ ID NO: 187123 - DNA, 25 bp, Saccharomyces pastorianus
tgtggttgtccaagcaagagtggca

SEQ ID NO: 187124 - DNA, 25 bp, Saccharomyces pastorianus
atgtggttgtccaagcaagagtggc

SEQ ID NO: 187125 - DNA, 25 bp, Saccharomyces pastorianus
caagcaagagtggcaagaaagtggg

SEQ ID NO: 187126 - DNA, 25 bp, Saccharomyces pastorianus
gttgtccaagcaagagtggcaagaa

SEQ ID NO: 187127 - DNA, 25 bp, Saccharomyces pastorianus
tggttgtccaagcaagagtggcaag

SEQ ID NO: 187128 - DNA, 25 bp, Saccharomyces pastorianus
ttgtccaagcaagagtggcaagaaa

SEQ ID NO: 187129 - DNA, 25 bp, Saccharomyces pastorianus
ccaagcaagagtggcaagaaagtgg

SEQ ID NO: 187130 - DNA, 25 bp, Saccharomyces pastorianus
gtccaagcaagagtggcaagaaagt

SEQ ID NO: 187131 - DNA, 25 bp, Saccharomyces pastorianus
ggttgtccaagcaagagtggcaaga

SEQ ID NO: 187132 - DNA, 25 bp, Saccharomyces pastorianus
atactgggaccaccagatgatgacg

SEQ ID NO: 187133 - DNA, 25 bp, Saccharomyces pastorianus
gggtcttcatactgggaccaccaga

SEQ ID NO: 187134 - DNA, 25 bp, Saccharomyces pastorianus
agatacagggaatgacagtgacagt

SEQ ID NO: 187135 - DNA, 25 bp, Saccharomyces pastorianus
ggaacaactgtgtttatccacggaa

SEQ ID NO: 187136 - DNA, 25 bp, Saccharomyces pastorianus
gacagtaatggtggcggtcaattga

SEQ ID NO: 187137 - DNA, 25 bp, Saccharomyces pastorianus
gatcaacgttgagtctttagaggaa

SEQ ID NO: 187138 - DNA, 25 bp, Saccharomyces pastorianus
gaagacgttgataacaagaacacag

SEQ ID NO: 187139 - DNA, 25 bp, Saccharomyces pastorianus
cggaatcagatttacacaacaagtt

SEQ ID NO: 187140 - DNA, 25 bp, Saccharomyces pastorianus
ggtggcggtcaattgatcaacgttg

SEQ ID NO: 187141 - DNA, 25 bp, Saccharomyces pastorianus
gaaatgtttgattcagatacaggga

SEQ ID NO: 187142 - DNA, 25 bp, Saccharomyces pastorianus
aactgtgtttatccacggaatcaga

SEQ ID NO: 187143 - DNA, 25 bp, Saccharomyces pastorianus
gggaatgtcttagaagcctttcagg

SEQ ID NO: 187144 - DNA, 25 bp, Saccharomyces pastorianus
gaaaatcatccggaatacctggaaa

SEQ ID NO: 187145 - DNA, 25 bp, Saccharomyces pastorianus
gacgcatgtaaccactagattcttg

SEQ ID NO: 187146 - DNA, 25 bp, Saccharomyces pastorianus
gctttccttacatgagtctctattg

SEQ ID NO: 187147 - DNA, 25 bp, Saccharomyces pastorianus
atgtctccactatttcagcgtacga

SEQ ID NO: 187148 - DNA, 25 bp, Saccharomyces pastorianus
gaaagtttaccttctctgaaattca

SEQ ID NO: 187149 - DNA, 25 bp, Saccharomyces pastorianus
aagcctttcaggatgcattcttaaa

SEQ ID NO: 187150 - DNA, 25 bp, Saccharomyces pastorianus
atattgcagcgaacgtcatttacaa

SEQ ID NO: 187151 - DNA, 25 bp, Saccharomyces pastorianus
aacaaacgccgaatccaaggatagc

SEQ ID NO: 187152 - DNA, 25 bp, Saccharomyces pastorianus
gacagagtcacatccaaatttcaag

SEQ ID NO: 187153 - DNA, 25 bp, Saccharomyces pastorianus
gacattgtcatgcatacctggctca

SEQ ID NO: 187154 - DNA, 25 bp, Saccharomyces pastorianus
agatgattatctggtctctgattca

SEQ ID NO: 187155 - DNA, 25 bp, Saccharomyces pastorianus
ctggtctctgattcacttgtaagga

SEQ ID NO: 187156 - DNA, 25 bp, Saccharomyces pastorianus
atgattatctggtctctgattcact

SEQ ID NO: 187157 - DNA, 25 bp, Saccharomyces pastorianus
gatgattatctggtctctgattcac

SEQ ID NO: 187158 - DNA, 25 bp, Saccharomyces pastorianus
atctggtctctgattcacttgtaag

SEQ ID NO: 187159 - DNA, 25 bp, Saccharomyces pastorianus
gattatctggtctctgattcacttg

SEQ ID NO: 187160 - DNA, 25 bp, Saccharomyces pastorianus
ttatctggtctctgattcacttgta

SEQ ID NO: 187161 - DNA, 25 bp, Saccharomyces pastorianus
tctggtctctgattcacttgtaagg

SEQ ID NO: 187162 - DNA, 25 bp, Saccharomyces pastorianus
ctctgattcacttgtaaggacttgt

SEQ ID NO: 187163 - DNA, 25 bp, Saccharomyces pastorianus
ggtctctgattcacttgtaaggact

SEQ ID NO: 187164 - DNA, 25 bp, Saccharomyces pastorianus
tatctggtctctgattcacttgtaa

SEQ ID NO: 187165 - DNA, 25 bp, Saccharomyces pastorianus
tgaccaattcaaaggcgtacgccgt

SEQ ID NO: 187166 - DNA, 25 bp, Saccharomyces pastorianus
aattgccaccacgacaagtattcct

SEQ ID NO: 187167 - DNA, 25 bp, Saccharomyces pastorianus
gtcaaatcctcagaacacttacgtg

SEQ ID NO: 187168 - DNA, 25 bp, Saccharomyces pastorianus
gaaaatcttaaccaggtcggtgatg

SEQ ID NO: 187169 - DNA, 25 bp, Saccharomyces pastorianus
gctatctttggctatcgaaccgtta

SEQ ID NO: 187170 - DNA, 25 bp, Saccharomyces pastorianus
gatatcgtcatcaatgccaacgtgg

SEQ ID NO: 187171 - DNA, 25 bp, Saccharomyces pastorianus
gagatgtgccagagaggcccaatat

SEQ ID NO: 187172 - DNA, 25 bp, Saccharomyces pastorianus
tacgccgttactacattacctcaag

SEQ ID NO: 187173 - DNA, 25 bp, Saccharomyces pastorianus
gaggcccaatatttcttcgaggatt

SEQ ID NO: 187174 - DNA, 25 bp, Saccharomyces pastorianus
tttgaccctggtgaagagatgtgcc

SEQ ID NO: 187175 - DNA, 25 bp, Saccharomyces pastorianus
gtattcctctgaaccaattctactt

SEQ ID NO: 187176 - DNA, 25 bp, Saccharomyces pastorianus
gactcagtatattctaaaccggtta

SEQ ID NO: 187177 - DNA, 25 bp, Saccharomyces pastorianus
tatattacatccctgcattcttcca

SEQ ID NO: 187178 - DNA, 25 bp, Saccharomyces pastorianus
gaattgggcgccattgaacaacttt

SEQ ID NO: 187179 - DNA, 25 bp, Saccharomyces pastorianus
tacactctaaattcttgacggactt

SEQ ID NO: 187180 - DNA, 25 bp, Saccharomyces pastorianus
tatttgccgcagacacttctattgt

SEQ ID NO: 187181 - DNA, 25 bp, Saccharomyces pastorianus
aaccggttaaagtagctctcatatt

SEQ ID NO: 187182 - DNA, 25 bp, Saccharomyces pastorianus
tagtatctttactcgaccacgtatc

SEQ ID NO: 187183 - DNA, 25 bp, Saccharomyces pastorianus
gattagttcccaaacagcttcttga

SEQ ID NO: 187184 - DNA, 25 bp, Saccharomyces pastorianus
gagggctgacatgatggacttcaaa

SEQ ID NO: 187185 - DNA, 25 bp, Saccharomyces pastorianus
acttctgcggtagaattgggcgcca

SEQ ID NO: 187186 - DNA, 25 bp, Saccharomyces pastorianus
tcttccatctattcgcatctttgag

SEQ ID NO: 187187 - DNA, 25 bp, Saccharomyces pastorianus
ttgttgctgtgacatttgctgctgt

SEQ ID NO: 187188 - DNA, 25 bp, Saccharomyces pastorianus
gtgacatttgttgctgtgacatttg

SEQ ID NO: 187189 - DNA, 25 bp, Saccharomyces pastorianus
ctgtgacatttgctgctgtggttgt

SEQ ID NO: 187190 - DNA, 25 bp, Saccharomyces pastorianus
ctgtgacatttgttgctgtgacatt

SEQ ID NO: 187191 - DNA, 25 bp, Saccharomyces pastorianus
gacatttgttgctgtgacatttgct

SEQ ID NO: 187192 - DNA, 25 bp, Saccharomyces pastorianus
gttgctgtgacatttgctgctgtgg

SEQ ID NO: 187193 - DNA, 25 bp, Saccharomyces pastorianus
tttgttgctgtgacatttgctgctg

SEQ ID NO: 187194 - DNA, 25 bp, Saccharomyces pastorianus
tgtggtcgaggatgctgtgacattt

SEQ ID NO: 187195 - DNA, 25 bp, Saccharomyces pastorianus
tgctgtgacatttgttgctgtgaca

SEQ ID NO: 187196 - DNA, 25 bp, Saccharomyces pastorianus
tgctgtgacatttgctgctgtggtt

SEQ ID NO: 187197 - DNA, 25 bp, Saccharomyces pastorianus
catttgttgctgtgacatttgctgc

SEQ ID NO: 187198 - DNA, 25 bp, Saccharomyces pastorianus
tgaagataatcctatcgaatcgctc

SEQ ID NO: 187199 - DNA, 25 bp, Saccharomyces pastorianus
ctgaggcagctcttttgaaattggc

SEQ ID NO: 187200 - DNA, 25 bp, Saccharomyces pastorianus
gacgacattggcttgataagtgagt

SEQ ID NO: 187201 - DNA, 25 bp, Saccharomyces pastorianus
gacgtggacgacattggcttgataa

SEQ ID NO: 187202 - DNA, 25 bp, Saccharomyces pastorianus
gtgagttttttcttacagaatttgt

SEQ ID NO: 187203 - DNA, 25 bp, Saccharomyces pastorianus
aattggccagggacgtggacgacat

SEQ ID NO: 187204 - DNA, 25 bp, Saccharomyces pastorianus
aagatactgaggcagctcttttgaa

SEQ ID NO: 187205 - DNA, 25 bp, Saccharomyces pastorianus
aggcagctcttttgaaattggccag

SEQ ID NO: 187206 - DNA, 25 bp, Saccharomyces pastorianus
cagaatttgttgtgttggatgaaga

SEQ ID NO: 187207 - DNA, 25 bp, Saccharomyces pastorianus
ggatatactggaagatactgaggca

SEQ ID NO: 187208 - DNA, 25 bp, Saccharomyces pastorianus
gataagtgagttttttcttacagaa

SEQ ID NO: 187209 - DNA, 25 bp, Saccharomyces pastorianus
cagtttgtatgcatttgacctgtac

SEQ ID NO: 187210 - DNA, 25 bp, Saccharomyces pastorianus
attttggctcttcgaggtgacccac

SEQ ID NO: 187211 - DNA, 25 bp, Saccharomyces pastorianus
ggtggtactactgcggaaaagactc

SEQ ID NO: 187212 - DNA, 25 bp, Saccharomyces pastorianus
attggctagattctcaatcgaacga

SEQ ID NO: 187213 - DNA, 25 bp, Saccharomyces pastorianus
cttccttggcacagcagacactaaa

SEQ ID NO: 187214 - DNA, 25 bp, Saccharomyces pastorianus
atccactgtttatcacggttacttg

SEQ ID NO: 187215 - DNA, 25 bp, Saccharomyces pastorianus
gaacgaatcaccttttaaatatgcg

SEQ ID NO: 187216 - DNA, 25 bp, Saccharomyces pastorianus
caggaatcaggaatattttggctct

SEQ ID NO: 187217 - DNA, 25 bp, Saccharomyces pastorianus
gatttatatcatgcgagggcttccc

SEQ ID NO: 187218 - DNA, 25 bp, Saccharomyces pastorianus
agaattcttccctccaaagactgaa

SEQ ID NO: 187219 - DNA, 25 bp, Saccharomyces pastorianus
gtatgactgctttagatccactgtt

SEQ ID NO: 187220 - DNA, 25 bp, Saccharomyces pastorianus
aacttgcttggatagctcatctacg

SEQ ID NO: 187221 - DNA, 25 bp, Saccharomyces pastorianus
ccacgtaaacttgcttggatagctc

SEQ ID NO: 187222 - DNA, 25 bp, Saccharomyces pastorianus
gccacgtaaacttgcttggatagct

SEQ ID NO: 187223 - DNA, 25 bp, Saccharomyces pastorianus
taaacttgcttggatagctcatcta

SEQ ID NO: 187224 - DNA, 25 bp, Saccharomyces pastorianus
aaacttgcttggatagctcatctac

SEQ ID NO: 187225 - DNA, 25 bp, Saccharomyces pastorianus
ttcgccacgtaaacttgcttggata

SEQ ID NO: 187226 - DNA, 25 bp, Saccharomyces pastorianus
gtaaacttgcttggatagctcatct

SEQ ID NO: 187227 - DNA, 25 bp, Saccharomyces pastorianus
cgccacgtaaacttgcttggatagc

SEQ ID NO: 187228 - DNA, 25 bp, Saccharomyces pastorianus
cgtaaacttgcttggatagctcatc

SEQ ID NO: 187229 - DNA, 25 bp, Saccharomyces pastorianus
acgtaaacttgcttggatagctcat

SEQ ID NO: 187230 - DNA, 25 bp, Saccharomyces pastorianus
tcgccacgtaaacttgcttggatag

SEQ ID NO: 187231 - DNA, 25 bp, Saccharomyces pastorianus
agaaggtatcccatggacgtttcaa

SEQ ID NO: 187232 - DNA, 25 bp, Saccharomyces pastorianus
ggtatcccatggacgtttcaaaatg

SEQ ID NO: 187233 - DNA, 25 bp, Saccharomyces pastorianus
aaattgaacaagctcttgcccaggg

SEQ ID NO: 187234 - DNA, 25 bp, Saccharomyces pastorianus
ggtcatttaacatttgaaaactcaa

SEQ ID NO: 187235 - DNA, 25 bp, Saccharomyces pastorianus
gcaagtcgtcggatatagaaggtat

SEQ ID NO: 187236 - DNA, 25 bp, Saccharomyces pastorianus
gatacaggtaccaaagaaccaacga

SEQ ID NO: 187237 - DNA, 25 bp, Saccharomyces pastorianus
atgcccttattaaatctttcgttga

SEQ ID NO: 187238 - DNA, 25 bp, Saccharomyces pastorianus
catggacgtttcaaaatggtcattt

SEQ ID NO: 187239 - DNA, 25 bp, Saccharomyces pastorianus
tgattttataatccccctaacaata

SEQ ID NO: 187240 - DNA, 25 bp, Saccharomyces pastorianus
gataatttttcatataaaccggtag

SEQ ID NO: 187241 - DNA, 25 bp, Saccharomyces pastorianus
aaaccggtagagaatgacattgaga

SEQ ID NO: 187242 - DNA, 25 bp, Saccharomyces pastorianus
gcaactgcctttcatacccaaaaaa

SEQ ID NO: 187243 - DNA, 25 bp, Saccharomyces pastorianus
aaaaatcatggtctgtggtgatgca

SEQ ID NO: 187244 - DNA, 25 bp, Saccharomyces pastorianus
aatctaccggtgtattccgcttata

SEQ ID NO: 187245 - DNA, 25 bp, Saccharomyces pastorianus
gaaagaagcaggaccggaaatctac

SEQ ID NO: 187246 - DNA, 25 bp, Saccharomyces pastorianus
gcatgagctcataggaaacaacaat

SEQ ID NO: 187247 - DNA, 25 bp, Saccharomyces pastorianus
cggtgtattccgcttataaaaatgg

SEQ ID NO: 187248 - DNA, 25 bp, Saccharomyces pastorianus
attcaactaagaaatgacttgcagg

SEQ ID NO: 187249 - DNA, 25 bp, Saccharomyces pastorianus
aagacctactacgtggaaagaagca

SEQ ID NO: 187250 - DNA, 25 bp, Saccharomyces pastorianus
gacttgcaggagcaactgcctttca

SEQ ID NO: 187251 - DNA, 25 bp, Saccharomyces pastorianus
aggtaacaaaattatcacggagatc

SEQ ID NO: 187252 - DNA, 25 bp, Saccharomyces pastorianus
aattattatcaagggcaatgcagta

SEQ ID NO: 187253 - DNA, 25 bp, Saccharomyces pastorianus
ctattgaagatccatttgccgaaga

SEQ ID NO: 187254 - DNA, 25 bp, Saccharomyces pastorianus
tgaagaagtacccaattgtctctat

SEQ ID NO: 187255 - DNA, 25 bp, Saccharomyces pastorianus
atggctgcctccagagctgctgccg

SEQ ID NO: 187256 - DNA, 25 bp, Saccharomyces pastorianus
aagtacccaattgtctctattgaag

SEQ ID NO: 187257 - DNA, 25 bp, Saccharomyces pastorianus
gtacccaattgtctctattgaagat

SEQ ID NO: 187258 - DNA, 25 bp, Saccharomyces pastorianus
gaagtacccaattgtctctattgaa

SEQ ID NO: 187259 - DNA, 25 bp, Saccharomyces pastorianus
gtctctattgaagatccatttgccg

SEQ ID NO: 187260 - DNA, 25 bp, Saccharomyces pastorianus
ctctattgaagatccatttgccgaa

SEQ ID NO: 187261 - DNA, 25 bp, Saccharomyces pastorianus
gaagaagtacccaattgtctctatt

SEQ ID NO: 187262 - DNA, 25 bp, Saccharomyces pastorianus
tattgaagatccatttgccgaagat

SEQ ID NO: 187263 - DNA, 25 bp, Saccharomyces pastorianus
ctgcctccagagctgctgccgctga

SEQ ID NO: 187264 - DNA, 25 bp, Saccharomyces pastorianus
ggcggttatttgcattctcattcac

SEQ ID NO: 187265 - DNA, 25 bp, Saccharomyces pastorianus
gatgtcggcattggctccattatca

SEQ ID NO: 187266 - DNA, 25 bp, Saccharomyces pastorianus
gatgtttttcattgcagctgcagtc

SEQ ID NO: 187267 - DNA, 25 bp, Saccharomyces pastorianus
tgttggacgccccattgatgttttt

SEQ ID NO: 187268 - DNA, 25 bp, Saccharomyces pastorianus
tgggttggtcttttcacggttacat

SEQ ID NO: 187269 - DNA, 25 bp, Saccharomyces pastorianus
aagtcttccaagtccatcttcaaag

SEQ ID NO: 187270 - DNA, 25 bp, Saccharomyces pastorianus
ggtcttcttttatatccacttccaa

SEQ ID NO: 187271 - DNA, 25 bp, Saccharomyces pastorianus
aactcgctcaatgcttacaagtcct

SEQ ID NO: 187272 - DNA, 25 bp, Saccharomyces pastorianus
attgctcttggtatggcatcttcat

SEQ ID NO: 187273 - DNA, 25 bp, Saccharomyces pastorianus
aagtccttgcttgctactggtattg

SEQ ID NO: 187274 - DNA, 25 bp, Saccharomyces pastorianus
gcaagcttcttttcgcctgaattta

SEQ ID NO: 187275 - DNA, 25 bp, Saccharomyces pastorianus
aaggcgccactgataccatccaaat

SEQ ID NO: 187276 - DNA, 25 bp, Saccharomyces pastorianus
tgttttgaaaagtacccgcctggcg

SEQ ID NO: 187277 - DNA, 25 bp, Saccharomyces pastorianus
gcccgtattattgccgcgcttcaag

SEQ ID NO: 187278 - DNA, 25 bp, Saccharomyces pastorianus
gtcactgaggacgagttgcatgcac

SEQ ID NO: 187279 - DNA, 25 bp, Saccharomyces pastorianus
aacttccgtggcatctttgcagcac

SEQ ID NO: 187280 - DNA, 25 bp, Saccharomyces pastorianus
ggacgagttgcatgcacgcgttcat

SEQ ID NO: 187281 - DNA, 25 bp, Saccharomyces pastorianus
gtgcacgtgcactgttttgaaaagt

SEQ ID NO: 187282 - DNA, 25 bp, Saccharomyces pastorianus
atccaaatgccatgggtgcacgtgc

SEQ ID NO: 187283 - DNA, 25 bp, Saccharomyces pastorianus
tttgcagcacacaccaaaggcgcca

SEQ ID NO: 187284 - DNA, 25 bp, Saccharomyces pastorianus
atgcacgcgttcatgcccgtattat

SEQ ID NO: 187285 - DNA, 25 bp, Saccharomyces pastorianus
cgcctggcgaccaagtcactgagga

SEQ ID NO: 187286 - DNA, 25 bp, Saccharomyces pastorianus
aactgtaccagtgaaaattgaagac

SEQ ID NO: 187287 - DNA, 25 bp, Saccharomyces pastorianus
ctttatttatcgttcgcggatatca

SEQ ID NO: 187288 - DNA, 25 bp, Saccharomyces pastorianus
gttgtattttcctcgtactggcaaa

SEQ ID NO: 187289 - DNA, 25 bp, Saccharomyces pastorianus
cttattctttatttatcgttcgcgg

SEQ ID NO: 187290 - DNA, 25 bp, Saccharomyces pastorianus
tccaaaactcaagaactgtaccagt

SEQ ID NO: 187291 - DNA, 25 bp, Saccharomyces pastorianus
acggtgatcttactttgcttattct

SEQ ID NO: 187292 - DNA, 25 bp, Saccharomyces pastorianus
tcctcgtactggcaaaaagtttcca

SEQ ID NO: 187293 - DNA, 25 bp, Saccharomyces pastorianus
ggtcatatcctttatcctggttgta

SEQ ID NO: 187294 - DNA, 25 bp, Saccharomyces pastorianus
tttcggtcatatcctttatcctggt

SEQ ID NO: 187295 - DNA, 25 bp, Saccharomyces pastorianus
gcggatatcaaatattttcggtcat

SEQ ID NO: 187296 - DNA, 25 bp, Saccharomyces pastorianus
tatcctggttgtattttcctcgtac

SEQ ID NO: 187297 - DNA, 25 bp, Saccharomyces pastorianus
gaactctggcatgaaagagatcatt

SEQ ID NO: 187298 - DNA, 25 bp, Saccharomyces pastorianus
gagtacctcacggattttagattta

SEQ ID NO: 187299 - DNA, 25 bp, Saccharomyces pastorianus
cttacatttcgtatttaaagcgcaa

SEQ ID NO: 187300 - DNA, 25 bp, Saccharomyces pastorianus
ggcagaagatgaactctggcatgaa

SEQ ID NO: 187301 - DNA, 25 bp, Saccharomyces pastorianus
agcgcaagaggaaaaatatacgact

SEQ ID NO: 187302 - DNA, 25 bp, Saccharomyces pastorianus
gatttaaatcttgatcaacctttgg

SEQ ID NO: 187303 - DNA, 25 bp, Saccharomyces pastorianus
atgttcaacttcgtgagtacctcac

SEQ ID NO: 187304 - DNA, 25 bp, Saccharomyces pastorianus
caacctttggcagaagatgaactct

SEQ ID NO: 187305 - DNA, 25 bp, Saccharomyces pastorianus
aatcttgatcaacctttggcagaag

SEQ ID NO: 187306 - DNA, 25 bp, Saccharomyces pastorianus
agagatcattcttacatttcgtatt

SEQ ID NO: 187307 - DNA, 25 bp, Saccharomyces pastorianus
atttcgtatttaaagcgcaagagga

SEQ ID NO: 187308 - DNA, 25 bp, Saccharomyces pastorianus
ttccctgtatatatcaatcgcggta

SEQ ID NO: 187309 - DNA, 25 bp, Saccharomyces pastorianus
ttttctttttatcttttcgctggag

SEQ ID NO: 187310 - DNA, 25 bp, Saccharomyces pastorianus
gaacaacggaccttttctgggatca

SEQ ID NO: 187311 - DNA, 25 bp, Saccharomyces pastorianus
ttcgctggagaatatctgccgtatg

SEQ ID NO: 187312 - DNA, 25 bp, Saccharomyces pastorianus
ccaacctccgtttgagtcatttcaa

SEQ ID NO: 187313 - DNA, 25 bp, Saccharomyces pastorianus
tctgggatcactacgatagctccat

SEQ ID NO: 187314 - DNA, 25 bp, Saccharomyces pastorianus
tggtacactattttcgagcctcttg

SEQ ID NO: 187315 - DNA, 25 bp, Saccharomyces pastorianus
catgaagtttggtgggctgcctcca

SEQ ID NO: 187316 - DNA, 25 bp, Saccharomyces pastorianus
atgcgccagattgcaaacagctctt

SEQ ID NO: 187317 - DNA, 25 bp, Saccharomyces pastorianus
tgtctccaatacctcagtctgctta

SEQ ID NO: 187318 - DNA, 25 bp, Saccharomyces pastorianus
acaacaaatgctgtgccgagtttag

SEQ ID NO: 187319 - DNA, 25 bp, Saccharomyces pastorianus
aacacagcgttaaccacatccgata

SEQ ID NO: 187320 - DNA, 25 bp, Saccharomyces pastorianus
cggataatcacccttcgccgtttct

SEQ ID NO: 187321 - DNA, 25 bp, Saccharomyces pastorianus
gaaagcataacacaatcagcaccat

SEQ ID NO: 187322 - DNA, 25 bp, Saccharomyces pastorianus
tttcagcaatcagagcggtcgccgc

SEQ ID NO: 187323 - DNA, 25 bp, Saccharomyces pastorianus
gtcgccgccataatattaactgcat

SEQ ID NO: 187324 - DNA, 25 bp, Saccharomyces pastorianus
aatcagcaccatccaacacagcgtt

SEQ ID NO: 187325 - DNA, 25 bp, Saccharomyces pastorianus
ttaactgcattcaccggataatcac

SEQ ID NO: 187326 - DNA, 25 bp, Saccharomyces pastorianus
ttcgccgtttctccagaaagcataa

SEQ ID NO: 187327 - DNA, 25 bp, Saccharomyces pastorianus
gcgttaaccacatccgatacttcgg

SEQ ID NO: 187328 - DNA, 25 bp, Saccharomyces pastorianus
agcggtcgccgccataatattaact

SEQ ID NO: 187329 - DNA, 25 bp, Saccharomyces pastorianus
ggcgatagtactttcagcaatcaga

SEQ ID NO: 187330 - DNA, 25 bp, Saccharomyces pastorianus
aatacagtccatgctaaattctggg

SEQ ID NO: 187331 - DNA, 25 bp, Saccharomyces pastorianus
aagatcggcctccatcagcggcatt

SEQ ID NO: 187332 - DNA, 25 bp, Saccharomyces pastorianus
ctgccgatacggttcacaaagttgg

SEQ ID NO: 187333 - DNA, 25 bp, Saccharomyces pastorianus
atgagggctcaaacgcaaacagcga

SEQ ID NO: 187334 - DNA, 25 bp, Saccharomyces pastorianus
ggcatttcagaccaccaacaggaag

SEQ ID NO: 187335 - DNA, 25 bp, Saccharomyces pastorianus
tgcggcggttacgtcagagatgaat

SEQ ID NO: 187336 - DNA, 25 bp, Saccharomyces pastorianus
atttgaatgagatctccacccgttc

SEQ ID NO: 187337 - DNA, 25 bp, Saccharomyces pastorianus
gaaactaccacattcgttccattag

SEQ ID NO: 187338 - DNA, 25 bp, Saccharomyces pastorianus
agatgggtctaaccatatccgctgc

SEQ ID NO: 187339 - DNA, 25 bp, Saccharomyces pastorianus
aaacagcgactctctcaagatgggt

SEQ ID NO: 187340 - DNA, 25 bp, Saccharomyces pastorianus
taaaggttcttcaatgtcgccaaaa

SEQ ID NO: 187341 - DNA, 25 bp, Saccharomyces pastorianus
gaatcctaagggtactgacaaattt

SEQ ID NO: 187342 - DNA, 25 bp, Saccharomyces pastorianus
atttggaactatttccatcgggatt

SEQ ID NO: 187343 - DNA, 25 bp, Saccharomyces pastorianus
tgaatcctaagggtactgacaaatt

SEQ ID NO: 187344 - DNA, 25 bp, Saccharomyces pastorianus
gctatgtaatcatttcacactatta

SEQ ID NO: 187345 - DNA, 25 bp, Saccharomyces pastorianus
gaacacgctatgtaatcatttcaca

SEQ ID NO: 187346 - DNA, 25 bp, Saccharomyces pastorianus
atcatttcacactattaacatttgg

SEQ ID NO: 187347 - DNA, 25 bp, Saccharomyces pastorianus
tggaactatttccatcgggattata

SEQ ID NO: 187348 - DNA, 25 bp, Saccharomyces pastorianus
tcacactattaacatttggaactat

SEQ ID NO: 187349 - DNA, 25 bp, Saccharomyces pastorianus
cacgctatgtaatcatttcacacta

SEQ ID NO: 187350 - DNA, 25 bp, Saccharomyces pastorianus
aacatttggaactatttccatcggg

SEQ ID NO: 187351 - DNA, 25 bp, Saccharomyces pastorianus
taagggtactgacaaatttagcatc

SEQ ID NO: 187352 - DNA, 25 bp, Saccharomyces pastorianus
atctattacattatgggtggtatgt

SEQ ID NO: 187353 - DNA, 25 bp, Saccharomyces pastorianus
ctattacattatgggtggtatgttg

SEQ ID NO: 187354 - DNA, 25 bp, Saccharomyces pastorianus
cattatgggtggtatgttggaataa

SEQ ID NO: 187355 - DNA, 25 bp, Saccharomyces pastorianus
cattagatctattacattatgggtg

SEQ ID NO: 187356 - DNA, 25 bp, Saccharomyces pastorianus
tctattacattatgggtggtatgtt

SEQ ID NO: 187357 - DNA, 25 bp, Saccharomyces pastorianus
ttagatctattacattatgggtggt

SEQ ID NO: 187358 - DNA, 25 bp, Saccharomyces pastorianus
attatgggtggtatgttggaataaa

SEQ ID NO: 187359 - DNA, 25 bp, Saccharomyces pastorianus
tcattagatctattacattatgggt

SEQ ID NO: 187360 - DNA, 25 bp, Saccharomyces pastorianus
gatctattacattatgggtggtatg

SEQ ID NO: 187361 - DNA, 25 bp, Saccharomyces pastorianus
ttcattagatctattacattatggg

SEQ ID NO: 187362 - DNA, 25 bp, Saccharomyces pastorianus
attagatctattacattatgggtgg

SEQ ID NO: 187363 - DNA, 25 bp, Saccharomyces pastorianus
atgccttgctttttttaattgtatc

SEQ ID NO: 187364 - DNA, 25 bp, Saccharomyces pastorianus
tttactttcttccattatgccttgc

SEQ ID NO: 187365 - DNA, 25 bp, Saccharomyces pastorianus
gtggtaatctttctcttcatggtgt

SEQ ID NO: 187366 - DNA, 25 bp, Saccharomyces pastorianus
gtacggtggtaatctttctcttcat

SEQ ID NO: 187367 - DNA, 25 bp, Saccharomyces pastorianus
actttcttccattatgccttgcttt

SEQ ID NO: 187368 - DNA, 25 bp, Saccharomyces pastorianus
cactatttactttcttccattatgc

SEQ ID NO: 187369 - DNA, 25 bp, Saccharomyces pastorianus
tgatgaccttatatcagatttcttg

SEQ ID NO: 187370 - DNA, 25 bp, Saccharomyces pastorianus
aattgtatctacacgtcacgaaatg

SEQ ID NO: 187371 - DNA, 25 bp, Saccharomyces pastorianus
taatctttctcttcatggtgtggct

SEQ ID NO: 187372 - DNA, 25 bp, Saccharomyces pastorianus
atcagatttcttgtgtacggtggta

SEQ ID NO: 187373 - DNA, 25 bp, Saccharomyces pastorianus
acacgtcacgaaatgatgaccttat

SEQ ID NO: 187374 - DNA, 25 bp, Saccharomyces pastorianus
aatcgaacttggctatccctaccaa

SEQ ID NO: 187375 - DNA, 25 bp, Saccharomyces pastorianus
gaacagcgaaggatcgagcgtattt

SEQ ID NO: 187376 - DNA, 25 bp, Saccharomyces pastorianus
gaacttggctatccctaccaacttc

SEQ ID NO: 187377 - DNA, 25 bp, Saccharomyces pastorianus
tcaagtcgactctgcctccaaggaa

SEQ ID NO: 187378 - DNA, 25 bp, Saccharomyces pastorianus
tatccctaccaacttcaagtcgact

SEQ ID NO: 187379 - DNA, 25 bp, Saccharomyces pastorianus
ctaactagtaattcgcaatcgaact

SEQ ID NO: 187380 - DNA, 25 bp, Saccharomyces pastorianus
aacttcaagtcgactctgcctccaa

SEQ ID NO: 187381 - DNA, 25 bp, Saccharomyces pastorianus
gactgattttgaactaactagtaat

SEQ ID NO: 187382 - DNA, 25 bp, Saccharomyces pastorianus
ttggctatccctaccaacttcaagt

SEQ ID NO: 187383 - DNA, 25 bp, Saccharomyces pastorianus
agcgaaggatcgagcgtattttgag

SEQ ID NO: 187384 - DNA, 25 bp, Saccharomyces pastorianus
aactaactagtaattcgcaatcgaa

SEQ ID NO: 187385 - DNA, 25 bp, Saccharomyces pastorianus
ccaagaaaaaagccttgttggcgca

SEQ ID NO: 187386 - DNA, 25 bp, Saccharomyces pastorianus
agaaaaaagccttgttggcgcaatc

SEQ ID NO: 187387 - DNA, 25 bp, Saccharomyces pastorianus
aaaagccttgttggcgcaatcggta

SEQ ID NO: 187388 - DNA, 25 bp, Saccharomyces pastorianus
aagccttgttggcgcaatcggtagc

SEQ ID NO: 187389 - DNA, 25 bp, Saccharomyces pastorianus
gaaaaaagccttgttggcgcaatcg

SEQ ID NO: 187390 - DNA, 25 bp, Saccharomyces pastorianus
aaaaagccttgttggcgcaatcggt

SEQ ID NO: 187391 - DNA, 25 bp, Saccharomyces pastorianus
aagaaaaaagccttgttggcgcaat

SEQ ID NO: 187392 - DNA, 25 bp, Saccharomyces pastorianus
aaaaaagccttgttggcgcaatcgg

SEQ ID NO: 187393 - DNA, 25 bp, Saccharomyces pastorianus
tcccaagaaaaaagccttgttggcg

SEQ ID NO: 187394 - DNA, 25 bp, Saccharomyces pastorianus
caagaaaaaagccttgttggcgcaa

SEQ ID NO: 187395 - DNA, 25 bp, Saccharomyces pastorianus
aaagccttgttggcgcaatcggtag

SEQ ID NO: 187396 - DNA, 25 bp, Saccharomyces pastorianus
taagtttgatgaccgtttctcaatc

SEQ ID NO: 187397 - DNA, 25 bp, Saccharomyces pastorianus
tatcttacttcatcatcaatcctcg

SEQ ID NO: 187398 - DNA, 25 bp, Saccharomyces pastorianus
atcctcgtgtctctgcttatattaa

SEQ ID NO: 187399 - DNA, 25 bp, Saccharomyces pastorianus
ttcatcatcaatcctcgtgtctctg

SEQ ID NO: 187400 - DNA, 25 bp, Saccharomyces pastorianus
gtcgtacattatcttacttcatcat

SEQ ID NO: 187401 - DNA, 25 bp, Saccharomyces pastorianus
cctcgtgtctctgcttatattaagt

SEQ ID NO: 187402 - DNA, 25 bp, Saccharomyces pastorianus
tattttttcttccttgtcgtacatt

SEQ ID NO: 187403 - DNA, 25 bp, Saccharomyces pastorianus
gtgtctctgcttatattaagtttga

SEQ ID NO: 187404 - DNA, 25 bp, Saccharomyces pastorianus
ttacttcatcatcaatcctcgtgtc

SEQ ID NO: 187405 - DNA, 25 bp, Saccharomyces pastorianus
atcaatcctcgtgtctctgcttata

SEQ ID NO: 187406 - DNA, 25 bp, Saccharomyces pastorianus
tcttccttgtcgtacattatcttac

SEQ ID NO: 187407 - DNA, 25 bp, Saccharomyces pastorianus
tatataaccgcaatgactacagtca

SEQ ID NO: 187408 - DNA, 25 bp, Saccharomyces pastorianus
agtcatgagcggagcatcctatgca

SEQ ID NO: 187409 - DNA, 25 bp, Saccharomyces pastorianus
actacagtcatgagcggagcatcct

SEQ ID NO: 187410 - DNA, 25 bp, Saccharomyces pastorianus
gaagagaactttttcagaatgtttt

SEQ ID NO: 187411 - DNA, 25 bp, Saccharomyces pastorianus
atctaggatatataaccgcaatgac

SEQ ID NO: 187412 - DNA, 25 bp, Saccharomyces pastorianus
gaaacggatgagacttttgagaaga

SEQ ID NO: 187413 - DNA, 25 bp, Saccharomyces pastorianus
agcgacgaggaaacggatgagactt

SEQ ID NO: 187414 - DNA, 25 bp, Saccharomyces pastorianus
tatgaaaagcaagcaagcgacgagg

SEQ ID NO: 187415 - DNA, 25 bp, Saccharomyces pastorianus
atgatatatcttggaactggtgtat

SEQ ID NO: 187416 - DNA, 25 bp, Saccharomyces pastorianus
ggaactggtgtattgttacttctat

SEQ ID NO: 187417 - DNA, 25 bp, Saccharomyces pastorianus
gaatgtttttacttatctaggatat

SEQ ID NO: 187418 - DNA, 25 bp, Saccharomyces pastorianus
agatcacttgactaatcagccagta

SEQ ID NO: 187419 - DNA, 25 bp, Saccharomyces pastorianus
actcaggaaccaaacagctcttata

SEQ ID NO: 187420 - DNA, 25 bp, Saccharomyces pastorianus
aagccatggtcattgtggtcccaaa

SEQ ID NO: 187421 - DNA, 25 bp, Saccharomyces pastorianus
gaacgaacccactacgaatcaagag

SEQ ID NO: 187422 - DNA, 25 bp, Saccharomyces pastorianus
agcctgttcctaactcggatcatag

SEQ ID NO: 187423 - DNA, 25 bp, Saccharomyces pastorianus
gactcctgaaacgataaccccagtg

SEQ ID NO: 187424 - DNA, 25 bp, Saccharomyces pastorianus
tggacaaccagaacgccgagcctgt

SEQ ID NO: 187425 - DNA, 25 bp, Saccharomyces pastorianus
gattccgataaaactgagactcctg

SEQ ID NO: 187426 - DNA, 25 bp, Saccharomyces pastorianus
tcctaaccctgtcccattggatttt

SEQ ID NO: 187427 - DNA, 25 bp, Saccharomyces pastorianus
atagcagttcaaaccgcgaccaaga

SEQ ID NO: 187428 - DNA, 25 bp, Saccharomyces pastorianus
gaagaaagccacctcgatgatataa

SEQ ID NO: 187429 - DNA, 25 bp, Saccharomyces pastorianus
agctcagggatgacatcgcatcttt

SEQ ID NO: 187430 - DNA, 25 bp, Saccharomyces pastorianus
tcaatttggcagaaagctacctctg

SEQ ID NO: 187431 - DNA, 25 bp, Saccharomyces pastorianus
gattgcttgatcgacacgttcaatt

SEQ ID NO: 187432 - DNA, 25 bp, Saccharomyces pastorianus
gttcaatttggcagaaagctacctc

SEQ ID NO: 187433 - DNA, 25 bp, Saccharomyces pastorianus
atgacatcgcatctttgcaaggatt

SEQ ID NO: 187434 - DNA, 25 bp, Saccharomyces pastorianus
aaggattgcttgatcgacacgttca

SEQ ID NO: 187435 - DNA, 25 bp, Saccharomyces pastorianus
gacacgttcaatttggcagaaagct

SEQ ID NO: 187436 - DNA, 25 bp, Saccharomyces pastorianus
gatcgacacgttcaatttggcagaa

SEQ ID NO: 187437 - DNA, 25 bp, Saccharomyces pastorianus
gggagctcagggatgacatcgcatc

SEQ ID NO: 187438 - DNA, 25 bp, Saccharomyces pastorianus
cagggatgacatcgcatctttgcaa

SEQ ID NO: 187439 - DNA, 25 bp, Saccharomyces pastorianus
catcgcatctttgcaaggattgctt

SEQ ID NO: 187440 - DNA, 25 bp, Saccharomyces pastorianus
acttgtagcaccttctatagaggaa

SEQ ID NO: 187441 - DNA, 25 bp, Saccharomyces pastorianus
aaatacggcaccatttgtcgtcgat

SEQ ID NO: 187442 - DNA, 25 bp, Saccharomyces pastorianus
gacggatgatcattattctcgacat

SEQ ID NO: 187443 - DNA, 25 bp, Saccharomyces pastorianus
atcccaacgaattaagagctcttag

SEQ ID NO: 187444 - DNA, 25 bp, Saccharomyces pastorianus
gacattgtccgaaggctatccagtg

SEQ ID NO: 187445 - DNA, 25 bp, Saccharomyces pastorianus
gaggtgggtcattacaggtcacaat

SEQ ID NO: 187446 - DNA, 25 bp, Saccharomyces pastorianus
aggattgtccccatataatatgttc

SEQ ID NO: 187447 - DNA, 25 bp, Saccharomyces pastorianus
gcagggtagatattttggcgtaagc

SEQ ID NO: 187448 - DNA, 25 bp, Saccharomyces pastorianus
aactcctccagataaacttgtagca

SEQ ID NO: 187449 - DNA, 25 bp, Saccharomyces pastorianus
aagttcagtgcgctctttgtaagag

SEQ ID NO: 187450 - DNA, 25 bp, Saccharomyces pastorianus
tttgtcgtcgatacggcacccacaa

SEQ ID NO: 187451 - DNA, 25 bp, Saccharomyces pastorianus
tataccaggaagtcaactcccagac

SEQ ID NO: 187452 - DNA, 25 bp, Saccharomyces pastorianus
atcctcaaaatgaagacgatagttt

SEQ ID NO: 187453 - DNA, 25 bp, Saccharomyces pastorianus
gaatataccaggaagtcaactccca

SEQ ID NO: 187454 - DNA, 25 bp, Saccharomyces pastorianus
gaagtcaactcccagaccttgaaat

SEQ ID NO: 187455 - DNA, 25 bp, Saccharomyces pastorianus
gaagacgatagttttacataataat

SEQ ID NO: 187456 - DNA, 25 bp, Saccharomyces pastorianus
tcccagaccttgaaatcctcaaaat

SEQ ID NO: 187457 - DNA, 25 bp, Saccharomyces pastorianus
atttgcgcatatataacagagatag

SEQ ID NO: 187458 - DNA, 25 bp, Saccharomyces pastorianus
aggaagtcaactcccagaccttgaa

SEQ ID NO: 187459 - DNA, 25 bp, Saccharomyces pastorianus
aattgttgggatttcacaactattg

SEQ ID NO: 187460 - DNA, 25 bp, Saccharomyces pastorianus
gggatttcacaactattgaaggcta

SEQ ID NO: 187461 - DNA, 25 bp, Saccharomyces pastorianus
aactcccagaccttgaaatcctcaa

SEQ ID NO: 187462 - DNA, 25 bp, Saccharomyces pastorianus
gttcctagagaacatatttgacccg

SEQ ID NO: 187463 - DNA, 25 bp, Saccharomyces pastorianus
atcaggctacggaactcggagagca

SEQ ID NO: 187464 - DNA, 25 bp, Saccharomyces pastorianus
aagatattttcatcgtctgagagac

SEQ ID NO: 187465 - DNA, 25 bp, Saccharomyces pastorianus
aaggatgtcaactcgatgcaaacaa

SEQ ID NO: 187466 - DNA, 25 bp, Saccharomyces pastorianus
tttgcctggccttcaaagatgccgg

SEQ ID NO: 187467 - DNA, 25 bp, Saccharomyces pastorianus
gtatgatgctcttcacaacaggcag

SEQ ID NO: 187468 - DNA, 25 bp, Saccharomyces pastorianus
agatgccggagccatatttagtcat

SEQ ID NO: 187469 - DNA, 25 bp, Saccharomyces pastorianus
aatgctgaaaaagtcgatccttcta

SEQ ID NO: 187470 - DNA, 25 bp, Saccharomyces pastorianus
gcaggtcctgccaaatatcaggcta

SEQ ID NO: 187471 - DNA, 25 bp, Saccharomyces pastorianus
gatgacagtaatgccgccaaagatt

SEQ ID NO: 187472 - DNA, 25 bp, Saccharomyces pastorianus
gtacttctgaagatcctagtttgtt

SEQ ID NO: 187473 - DNA, 25 bp, Saccharomyces pastorianus
gaacctagcagcgaatctgtcaaga

SEQ ID NO: 187474 - DNA, 25 bp, Saccharomyces pastorianus
tagttaagcgttgtacctccggaag

SEQ ID NO: 187475 - DNA, 25 bp, Saccharomyces pastorianus
gtacctccggaagaccagaagatct

SEQ ID NO: 187476 - DNA, 25 bp, Saccharomyces pastorianus
gaagatgttagagttcccgatgaag

SEQ ID NO: 187477 - DNA, 25 bp, Saccharomyces pastorianus
gagcttggaaatcttgacgctccaa

SEQ ID NO: 187478 - DNA, 25 bp, Saccharomyces pastorianus
gaaggcgataaaatcaccggcaaag

SEQ ID NO: 187479 - DNA, 25 bp, Saccharomyces pastorianus
gactcctgagtctccaaaagtagtt

SEQ ID NO: 187480 - DNA, 25 bp, Saccharomyces pastorianus
agaagaagatcccaaatcccagcgc

SEQ ID NO: 187481 - DNA, 25 bp, Saccharomyces pastorianus
agcaagtgatgttggaactgccgaa

SEQ ID NO: 187482 - DNA, 25 bp, Saccharomyces pastorianus
tgaagctactgaggctgcgagcgaa

SEQ ID NO: 187483 - DNA, 25 bp, Saccharomyces pastorianus
atcccagcgcgttcaaatttcaaca

SEQ ID NO: 187484 - DNA, 25 bp, Saccharomyces pastorianus
tgtggttaagtttgttttctccctg

SEQ ID NO: 187485 - DNA, 25 bp, Saccharomyces pastorianus
cacgactaaatgtcaaagtgctcta

SEQ ID NO: 187486 - DNA, 25 bp, Saccharomyces pastorianus
aagtgctctaattactctgcctatc

SEQ ID NO: 187487 - DNA, 25 bp, Saccharomyces pastorianus
ggatgttgtaaaccactatgaccaa

SEQ ID NO: 187488 - DNA, 25 bp, Saccharomyces pastorianus
gtcgaaattgccagggatatgctag

SEQ ID NO: 187489 - DNA, 25 bp, Saccharomyces pastorianus
tactctgcctatcacgagacttttg

SEQ ID NO: 187490 - DNA, 25 bp, Saccharomyces pastorianus
caatgcccacataccagtcgaaatt

SEQ ID NO: 187491 - DNA, 25 bp, Saccharomyces pastorianus
tttctccctgaaatactgtgatcct

SEQ ID NO: 187492 - DNA, 25 bp, Saccharomyces pastorianus
cttggaatgttttgcgcgatgtggt

SEQ ID NO: 187493 - DNA, 25 bp, Saccharomyces pastorianus
cacgagacttttgcaatcaagcgtt

SEQ ID NO: 187494 - DNA, 25 bp, Saccharomyces pastorianus
gttcacggtcctgggatatcagcaa

SEQ ID NO: 187495 - DNA, 25 bp, Saccharomyces pastorianus
cagatccgaatatgcgcgcttgtat

SEQ ID NO: 187496 - DNA, 25 bp, Saccharomyces pastorianus
gaagcgcaaagtaagatctgttatt

SEQ ID NO: 187497 - DNA, 25 bp, Saccharomyces pastorianus
aggacaatctatggataactcaatt

SEQ ID NO: 187498 - DNA, 25 bp, Saccharomyces pastorianus
tgaaaccttggtcgagaagcgcaaa

SEQ ID NO: 187499 - DNA, 25 bp, Saccharomyces pastorianus
aattgaagacttagcggttatgtat

SEQ ID NO: 187500 - DNA, 25 bp, Saccharomyces pastorianus
gcgcgcttgtattataggacaatct

SEQ ID NO: 187501 - DNA, 25 bp, Saccharomyces pastorianus
agctaagcacttgtttttttatggt

SEQ ID NO: 187502 - DNA, 25 bp, Saccharomyces pastorianus
aactcaattgaagacttagcggtta

SEQ ID NO: 187503 - DNA, 25 bp, Saccharomyces pastorianus
caaaatacttgaaaccttggtcgag

SEQ ID NO: 187504 - DNA, 25 bp, Saccharomyces pastorianus
aatatgcgcgcttgtattataggac

SEQ ID NO: 187505 - DNA, 25 bp, Saccharomyces pastorianus
tcaccgatagcagatccgaatatgc

SEQ ID NO: 187506 - DNA, 25 bp, Saccharomyces pastorianus
ttttagttccagatcgttcaccgag

SEQ ID NO: 187507 - DNA, 25 bp, Saccharomyces pastorianus
atggcgcagcttgccgatctgtaaa

SEQ ID NO: 187508 - DNA, 25 bp, Saccharomyces pastorianus
atcatctttttcgtttctcaggtca

SEQ ID NO: 187509 - DNA, 25 bp, Saccharomyces pastorianus
ttacttccagatccttttctcttaa

SEQ ID NO: 187510 - DNA, 25 bp, Saccharomyces pastorianus
aacatgctgttttgattcttcctcg

SEQ ID NO: 187511 - DNA, 25 bp, Saccharomyces pastorianus
gttcaccgagttttgcaatgctgtt

SEQ ID NO: 187512 - DNA, 25 bp, Saccharomyces pastorianus
ttcctcgtatttttccttcatagac

SEQ ID NO: 187513 - DNA, 25 bp, Saccharomyces pastorianus
aattcctcttcctttttgctgacaa

SEQ ID NO: 187514 - DNA, 25 bp, Saccharomyces pastorianus
atccacggattctgagtcgcttgac

SEQ ID NO: 187515 - DNA, 25 bp, Saccharomyces pastorianus
atatcattgttgtgtgcttccagct

SEQ ID NO: 187516 - DNA, 25 bp, Saccharomyces pastorianus
aatgctgttttctcactttcgtgta

SEQ ID NO: 187517 - DNA, 25 bp, Saccharomyces pastorianus
atagcgcccctaccaatgaagatat

SEQ ID NO: 187518 - DNA, 25 bp, Saccharomyces pastorianus
aaggaggttctacaaaattcacaat

SEQ ID NO: 187519 - DNA, 25 bp, Saccharomyces pastorianus
gggtctcagctagaacaaagcattg

SEQ ID NO: 187520 - DNA, 25 bp, Saccharomyces pastorianus
gccatgtccgtagctagctatttga

SEQ ID NO: 187521 - DNA, 25 bp, Saccharomyces pastorianus
aacccgttcgcggtgagagatcctc

SEQ ID NO: 187522 - DNA, 25 bp, Saccharomyces pastorianus
aattcacaatgcctgcgtgcaatta

SEQ ID NO: 187523 - DNA, 25 bp, Saccharomyces pastorianus
gggaggcaataaaagtcatctacga

SEQ ID NO: 187524 - DNA, 25 bp, Saccharomyces pastorianus
gagatcctctccagctaaggaggtt

SEQ ID NO: 187525 - DNA, 25 bp, Saccharomyces pastorianus
aaaagtcatctacgatagcgcccct

SEQ ID NO: 187526 - DNA, 25 bp, Saccharomyces pastorianus
tatggtcaagaatgggtctcagcta

SEQ ID NO: 187527 - DNA, 25 bp, Saccharomyces pastorianus
cctgcgtgcaattaagggaggcaat

SEQ ID NO: 187528 - DNA, 25 bp, Saccharomyces pastorianus
gtcccgaacagttgaagagccctga

SEQ ID NO: 187529 - DNA, 25 bp, Saccharomyces pastorianus
atgggctcattccagctcaatacat

SEQ ID NO: 187530 - DNA, 25 bp, Saccharomyces pastorianus
aagtgctcgctcgtgatatcacatc

SEQ ID NO: 187531 - DNA, 25 bp, Saccharomyces pastorianus
gggacgttaatgattctccaattat

SEQ ID NO: 187532 - DNA, 25 bp, Saccharomyces pastorianus
acttgatcatccacttactactacg

SEQ ID NO: 187533 - DNA, 25 bp, Saccharomyces pastorianus
agcaagtactcttctgccgatgggc

SEQ ID NO: 187534 - DNA, 25 bp, Saccharomyces pastorianus
atacatcttaaacgctacacacttg

SEQ ID NO: 187535 - DNA, 25 bp, Saccharomyces pastorianus
gctgtcattaagctctcaaatcggt

SEQ ID NO: 187536 - DNA, 25 bp, Saccharomyces pastorianus
aaacagcgacttacatttgcaaatt

SEQ ID NO: 187537 - DNA, 25 bp, Saccharomyces pastorianus
aagttagcatctttaaccagcgaga

SEQ ID NO: 187538 - DNA, 25 bp, Saccharomyces pastorianus
aatcactgacggttttattagcaag

SEQ ID NO: 187539 - DNA, 25 bp, Saccharomyces pastorianus
gtacatttatcgtcggtgatgtgtt

SEQ ID NO: 187540 - DNA, 25 bp, Saccharomyces pastorianus
acagggcatctgtgagtttcttgaa

SEQ ID NO: 187541 - DNA, 25 bp, Saccharomyces pastorianus
gttacccagaaaccattggtacatt

SEQ ID NO: 187542 - DNA, 25 bp, Saccharomyces pastorianus
cccggatttgcaacctattaagtcg

SEQ ID NO: 187543 - DNA, 25 bp, Saccharomyces pastorianus
gcatctgtgagtttcttgaagaacc

SEQ ID NO: 187544 - DNA, 25 bp, Saccharomyces pastorianus
taggtgttggattaagttacccaga

SEQ ID NO: 187545 - DNA, 25 bp, Saccharomyces pastorianus
ccattggtacatttatcgtcggtga

SEQ ID NO: 187546 - DNA, 25 bp, Saccharomyces pastorianus
agtctccagggctttgagatttttg

SEQ ID NO: 187547 - DNA, 25 bp, Saccharomyces pastorianus
attggcaaactcgtgtcctggttac

SEQ ID NO: 187548 - DNA, 25 bp, Saccharomyces pastorianus
tttcggtagtaaagtctccagggct

SEQ ID NO: 187549 - DNA, 25 bp, Saccharomyces pastorianus
gaccattattttcacattggcaaac

SEQ ID NO: 187550 - DNA, 25 bp, Saccharomyces pastorianus
atatgtggttgtccaagcaagagtg

SEQ ID NO: 187551 - DNA, 25 bp, Saccharomyces pastorianus
gataaggatcatatgtggttgtcca

SEQ ID NO: 187552 - DNA, 25 bp, Saccharomyces pastorianus
ataaggatcatatgtggttgtccaa

SEQ ID NO: 187553 - DNA, 25 bp, Saccharomyces pastorianus
tcatatgtggttgtccaagcaagag

SEQ ID NO: 187554 - DNA, 25 bp, Saccharomyces pastorianus
ctgataaggatcatatgtggttgtc

SEQ ID NO: 187555 - DNA, 25 bp, Saccharomyces pastorianus
taaggatcatatgtggttgtccaag

SEQ ID NO: 187556 - DNA, 25 bp, Saccharomyces pastorianus
gatcatatgtggttgtccaagcaag

SEQ ID NO: 187557 - DNA, 25 bp, Saccharomyces pastorianus
tgataaggatcatatgtggttgtcc

SEQ ID NO: 187558 - DNA, 25 bp, Saccharomyces pastorianus
ggatcatatgtggttgtccaagcaa

SEQ ID NO: 187559 - DNA, 25 bp, Saccharomyces pastorianus
gtccaagcaagagtggcaagaaagt

SEQ ID NO: 187560 - DNA, 25 bp, Saccharomyces pastorianus
aaggatcatatgtggttgtccaagc

SEQ ID NO: 187561 - DNA, 25 bp, Saccharomyces pastorianus
gagatttggttcctccaattgggct

SEQ ID NO: 187562 - DNA, 25 bp, Saccharomyces pastorianus
gatgcctatggatatcttcaaccat

SEQ ID NO: 187563 - DNA, 25 bp, Saccharomyces pastorianus
tgccggtgcgttcttctgtggtctt

SEQ ID NO: 187564 - DNA, 25 bp, Saccharomyces pastorianus
ggtgcctccacctgtgacaaactat

SEQ ID NO: 187565 - DNA, 25 bp, Saccharomyces pastorianus
tatgatctcgtactggttcggttcc

SEQ ID NO: 187566 - DNA, 25 bp, Saccharomyces pastorianus
tttttggtgttattggtgcctccac

SEQ ID NO: 187567 - DNA, 25 bp, Saccharomyces pastorianus
gtggtctttcatttgtcctatctca

SEQ ID NO: 187568 - DNA, 25 bp, Saccharomyces pastorianus
accatctgtgcattgttaattccaa

SEQ ID NO: 187569 - DNA, 25 bp, Saccharomyces pastorianus
tcctatctcaaatgtcctacaccat

SEQ ID NO: 187570 - DNA, 25 bp, Saccharomyces pastorianus
tggctccaccaaagcttgggcttgg

SEQ ID NO: 187571 - DNA, 25 bp, Saccharomyces pastorianus
taattccaaccactttaatcccagt

SEQ ID NO: 187572 - DNA, 25 bp, Saccharomyces pastorianus
gtgcctgtgaagtttccgctttcgg

SEQ ID NO: 187573 - DNA, 25 bp, Saccharomyces pastorianus
tgtgaagtttccgctttcggtcaaa

SEQ ID NO: 187574 - DNA, 25 bp, Saccharomyces pastorianus
cctgtgaagtttccgctttcggtca

SEQ ID NO: 187575 - DNA, 25 bp, Saccharomyces pastorianus
catacatctttcataggtttcgtat

SEQ ID NO: 187576 - DNA, 25 bp, Saccharomyces pastorianus
cgtgcctgtgaagtttccgctttcg

SEQ ID NO: 187577 - DNA, 25 bp, Saccharomyces pastorianus
catctttcataggtttcgtatgtgg

SEQ ID NO: 187578 - DNA, 25 bp, Saccharomyces pastorianus
atcatacatctttcataggtttcgt

SEQ ID NO: 187579 - DNA, 25 bp, Saccharomyces pastorianus
gaatcatacatctttcataggtttc

SEQ ID NO: 187580 - DNA, 25 bp, Saccharomyces pastorianus
ctgtgaagtttccgctttcggtcaa

SEQ ID NO: 187581 - DNA, 25 bp, Saccharomyces pastorianus
ccgtgcctgtgaagtttccgctttc

SEQ ID NO: 187582 - DNA, 25 bp, Saccharomyces pastorianus
gcctgtgaagtttccgctttcggtc

SEQ ID NO: 187583 - DNA, 25 bp, Saccharomyces pastorianus
gcctgtgatacttccttttttggta

SEQ ID NO: 187584 - DNA, 25 bp, Saccharomyces pastorianus
tacttccttttttggtatagcagaa

SEQ ID NO: 187585 - DNA, 25 bp, Saccharomyces pastorianus
gtgatacttccttttttggtatagc

SEQ ID NO: 187586 - DNA, 25 bp, Saccharomyces pastorianus
ttccgtgcctgtgatacttcctttt

SEQ ID NO: 187587 - DNA, 25 bp, Saccharomyces pastorianus
aaacgaggcatgtatctttatagat

SEQ ID NO: 187588 - DNA, 25 bp, Saccharomyces pastorianus
ccttttttggtatagcagaatgtct

SEQ ID NO: 187589 - DNA, 25 bp, Saccharomyces pastorianus
cactatgaagatgtttttgttttta

SEQ ID NO: 187590 - DNA, 25 bp, Saccharomyces pastorianus
cgtgcctgtgatacttccttttttg

SEQ ID NO: 187591 - DNA, 25 bp, Saccharomyces pastorianus
gtttttaaacgaggcatgtatcttt

SEQ ID NO: 187592 - DNA, 25 bp, Saccharomyces pastorianus
atagattctgtatgcgaaggtattg

SEQ ID NO: 187593 - DNA, 25 bp, Saccharomyces pastorianus
gtatctttatagattctgtatgcga

SEQ ID NO: 187594 - DNA, 25 bp, Saccharomyces pastorianus
actttgttccggtcatggatgccaa

SEQ ID NO: 187595 - DNA, 25 bp, Saccharomyces pastorianus
accgcatgtggctaagtactcagaa

SEQ ID NO: 187596 - DNA, 25 bp, Saccharomyces pastorianus
gatcgactcgaatttcagtttttgc

SEQ ID NO: 187597 - DNA, 25 bp, Saccharomyces pastorianus
gaagctgcccgattctagtgatgaa

SEQ ID NO: 187598 - DNA, 25 bp, Saccharomyces pastorianus
atgatgctagcatgtttcccacatc

SEQ ID NO: 187599 - DNA, 25 bp, Saccharomyces pastorianus
atgccaaccggaacactcattcaat

SEQ ID NO: 187600 - DNA, 25 bp, Saccharomyces pastorianus
aatggctgggtaccatgttccagga

SEQ ID NO: 187601 - DNA, 25 bp, Saccharomyces pastorianus
gacgacacagacgatttccacacag

SEQ ID NO: 187602 - DNA, 25 bp, Saccharomyces pastorianus
gggcttgtgaacttgcaggccaacg

SEQ ID NO: 187603 - DNA, 25 bp, Saccharomyces pastorianus
gcgccatcttcaaggagccaacgag

SEQ ID NO: 187604 - DNA, 25 bp, Saccharomyces pastorianus
ttcaagcccatggtgatggcgactt

SEQ ID NO: 187605 - DNA, 25 bp, Saccharomyces pastorianus
aagatattagttcttgccctcgaag

SEQ ID NO: 187606 - DNA, 25 bp, Saccharomyces pastorianus
tcaaggagcttttcaccaataccat

SEQ ID NO: 187607 - DNA, 25 bp, Saccharomyces pastorianus
gtggagctcacgtcgaaaagactat

SEQ ID NO: 187608 - DNA, 25 bp, Saccharomyces pastorianus
tccatgggatgttcctggtatgcca

SEQ ID NO: 187609 - DNA, 25 bp, Saccharomyces pastorianus
gacgcctactacgatcttgagttac

SEQ ID NO: 187610 - DNA, 25 bp, Saccharomyces pastorianus
atccaaagctgatgcctgggtatct

SEQ ID NO: 187611 - DNA, 25 bp, Saccharomyces pastorianus
ttgccctcgaagacctaaaagatgt

SEQ ID NO: 187612 - DNA, 25 bp, Saccharomyces pastorianus
gaaattactcccgaagaggctacga

SEQ ID NO: 187613 - DNA, 25 bp, Saccharomyces pastorianus
ggaaaccttatcacacgtcaatttg

SEQ ID NO: 187614 - DNA, 25 bp, Saccharomyces pastorianus
gaggctacgaccatattttctgtta

SEQ ID NO: 187615 - DNA, 25 bp, Saccharomyces pastorianus
acgtcaatttgaaggccgttctaat

SEQ ID NO: 187616 - DNA, 25 bp, Saccharomyces pastorianus
tttccatttggtcttttcactacag

SEQ ID NO: 187617 - DNA, 25 bp, Saccharomyces pastorianus
ttcgaatgtcgatttgagctccaaa

SEQ ID NO: 187618 - DNA, 25 bp, Saccharomyces pastorianus
tcgtgccatttacagacagacccta

SEQ ID NO: 187619 - DNA, 25 bp, Saccharomyces pastorianus
gtagaataccacctagtacaggcca

SEQ ID NO: 187620 - DNA, 25 bp, Saccharomyces pastorianus
gtgccttattcgtgatatgcctaga

SEQ ID NO: 187621 - DNA, 25 bp, Saccharomyces pastorianus
agaagcctacaagcatcatcgtcgc

SEQ ID NO: 187622 - DNA, 25 bp, Saccharomyces pastorianus
atggcacttgcttaaatcgttggta

SEQ ID NO: 187623 - DNA, 25 bp, Saccharomyces pastorianus
aagtctatgctatgcggcacttcga

SEQ ID NO: 187624 - DNA, 25 bp, Saccharomyces pastorianus
gtacaggccaagagtcgtgccattt

SEQ ID NO: 187625 - DNA, 25 bp, Saccharomyces pastorianus
gccgattacgttaagtttgcagcat

SEQ ID NO: 187626 - DNA, 25 bp, Saccharomyces pastorianus
aattcgcctattttttcaacatctg

SEQ ID NO: 187627 - DNA, 25 bp, Saccharomyces pastorianus
tctcactttccactccatcacccat

SEQ ID NO: 187628 - DNA, 25 bp, Saccharomyces pastorianus
cactttccactccatcacccatctc

SEQ ID NO: 187629 - DNA, 25 bp, Saccharomyces pastorianus
aatctcactttccactccatcaccc

SEQ ID NO: 187630 - DNA, 25 bp, Saccharomyces pastorianus
actttccactccatcacccatctct

SEQ ID NO: 187631 - DNA, 25 bp, Saccharomyces pastorianus
tcactttccactccatcacccatct

SEQ ID NO: 187632 - DNA, 25 bp, Saccharomyces pastorianus
ctaatctcactttccactccatcac

SEQ ID NO: 187633 - DNA, 25 bp, Saccharomyces pastorianus
taatctcactttccactccatcacc

SEQ ID NO: 187634 - DNA, 25 bp, Saccharomyces pastorianus
atctcactttccactccatcaccca

SEQ ID NO: 187635 - DNA, 25 bp, Saccharomyces pastorianus
ccatcacccatctctcaccatcagt

SEQ ID NO: 187636 - DNA, 25 bp, Saccharomyces pastorianus
cctaatctcactttccactccatca

SEQ ID NO: 187637 - DNA, 25 bp, Saccharomyces pastorianus
tttccactccatcacccatctctca

SEQ ID NO: 187638 - DNA, 25 bp, Saccharomyces pastorianus
aagccgcattgtacaggttatctgg

SEQ ID NO: 187639 - DNA, 25 bp, Saccharomyces pastorianus
tttcccaggtgatactctaaaggtt

SEQ ID NO: 187640 - DNA, 25 bp, Saccharomyces pastorianus
aatattttaagctctgcacgccgac

SEQ ID NO: 187641 - DNA, 25 bp, Saccharomyces pastorianus
gggcgcacatgtacctccagaaaag

SEQ ID NO: 187642 - DNA, 25 bp, Saccharomyces pastorianus
ggttatctggcgatttcaatccttt

SEQ ID NO: 187643 - DNA, 25 bp, Saccharomyces pastorianus
gctcggttgtcgtttttcaaacaat

SEQ ID NO: 187644 - DNA, 25 bp, Saccharomyces pastorianus
tcaatcctttacatatcgatcccac

SEQ ID NO: 187645 - DNA, 25 bp, Saccharomyces pastorianus
gttaaatttcctacgccaattctgc

SEQ ID NO: 187646 - DNA, 25 bp, Saccharomyces pastorianus
gccaattctgcatgggctttgtaca

SEQ ID NO: 187647 - DNA, 25 bp, Saccharomyces pastorianus
cgctttagttgttggtggcttcgaa

SEQ ID NO: 187648 - DNA, 25 bp, Saccharomyces pastorianus
gatcccacgctagccaaagcagtta

SEQ ID NO: 187649 - DNA, 25 bp, Saccharomyces pastorianus
gagaattacaggtatacggtctgct

SEQ ID NO: 187650 - DNA, 25 bp, Saccharomyces pastorianus
ggtatacggtctgctttacaacgta

SEQ ID NO: 187651 - DNA, 25 bp, Saccharomyces pastorianus
caggtatacggtctgctttacaacg

SEQ ID NO: 187652 - DNA, 25 bp, Saccharomyces pastorianus
gaattacaggtatacggtctgcttt

SEQ ID NO: 187653 - DNA, 25 bp, Saccharomyces pastorianus
actgctgtacaaaatggagaattac

SEQ ID NO: 187654 - DNA, 25 bp, Saccharomyces pastorianus
tacaggtatacggtctgctttacaa

SEQ ID NO: 187655 - DNA, 25 bp, Saccharomyces pastorianus
cctactgtgcaaactgctgtacaaa

SEQ ID NO: 187656 - DNA, 25 bp, Saccharomyces pastorianus
gtgcaaactgctgtacaaaatggag

SEQ ID NO: 187657 - DNA, 25 bp, Saccharomyces pastorianus
gcaaactgctgtacaaaatggagaa

SEQ ID NO: 187658 - DNA, 25 bp, Saccharomyces pastorianus
attacaggtatacggtctgctttac

SEQ ID NO: 187659 - DNA, 25 bp, Saccharomyces pastorianus
tactgtgcaaactgctgtacaaaat

SEQ ID NO: 187660 - DNA, 25 bp, Saccharomyces pastorianus
gggaccaggctatgacgtcgtcaga

SEQ ID NO: 187661 - DNA, 25 bp, Saccharomyces pastorianus
gtgacatctgtaacatcttcaccaa

SEQ ID NO: 187662 - DNA, 25 bp, Saccharomyces pastorianus
tgttccaatgacacctatgttagat

SEQ ID NO: 187663 - DNA, 25 bp, Saccharomyces pastorianus
aagttccagtgttccaatgacacct

SEQ ID NO: 187664 - DNA, 25 bp, Saccharomyces pastorianus
aacgctagaggttacagtgacatct

SEQ ID NO: 187665 - DNA, 25 bp, Saccharomyces pastorianus
ggtgtgcatatgaaataaacgctag

SEQ ID NO: 187666 - DNA, 25 bp, Saccharomyces pastorianus
acttattatcaaacgggaccaggct

SEQ ID NO: 187667 - DNA, 25 bp, Saccharomyces pastorianus
gaactatttgaccactatcggcata

SEQ ID NO: 187668 - DNA, 25 bp, Saccharomyces pastorianus
tatgacgtcgtcagatccgtcggtg

SEQ ID NO: 187669 - DNA, 25 bp, Saccharomyces pastorianus
aacttgaccgccgaacatgttccat

SEQ ID NO: 187670 - DNA, 25 bp, Saccharomyces pastorianus
gaccactatcggcataatcgatgac

SEQ ID NO: 187671 - DNA, 25 bp, Saccharomyces pastorianus
gatactgccagtgccactttgctgg

SEQ ID NO: 187672 - DNA, 25 bp, Saccharomyces pastorianus
ttggcttctttatcctatatggtga

SEQ ID NO: 187673 - DNA, 25 bp, Saccharomyces pastorianus
agtaccagtgatactgccagtgcca

SEQ ID NO: 187674 - DNA, 25 bp, Saccharomyces pastorianus
agaaaaccacatcttatcctgcgtc

SEQ ID NO: 187675 - DNA, 25 bp, Saccharomyces pastorianus
acgttctattgctggttgtgttcca

SEQ ID NO: 187676 - DNA, 25 bp, Saccharomyces pastorianus
ggttgtgttccaagaatttcagtaa

SEQ ID NO: 187677 - DNA, 25 bp, Saccharomyces pastorianus
attgatgaaagcactagaaaaccac

SEQ ID NO: 187678 - DNA, 25 bp, Saccharomyces pastorianus
atagttattcatttttctccattac

SEQ ID NO: 187679 - DNA, 25 bp, Saccharomyces pastorianus
atcctgcgtcgttaccggatttatt

SEQ ID NO: 187680 - DNA, 25 bp, Saccharomyces pastorianus
ttttctccattactaaaggctcttc

SEQ ID NO: 187681 - DNA, 25 bp, Saccharomyces pastorianus
aaaggctcttcatggcatttagatg

SEQ ID NO: 187682 - DNA, 25 bp, Saccharomyces pastorianus
aactggtcagcggtgaggctactcc

SEQ ID NO: 187683 - DNA, 25 bp, Saccharomyces pastorianus
aacgttgctgacatgaccttggact

SEQ ID NO: 187684 - DNA, 25 bp, Saccharomyces pastorianus
gaatttccgggagatctagctgtaa

SEQ ID NO: 187685 - DNA, 25 bp, Saccharomyces pastorianus
aatcctcttgatgacctttacattg

SEQ ID NO: 187686 - DNA, 25 bp, Saccharomyces pastorianus
cacactgcccaatgaatttccggga

SEQ ID NO: 187687 - DNA, 25 bp, Saccharomyces pastorianus
tcagctccttccatctcaagaagta

SEQ ID NO: 187688 - DNA, 25 bp, Saccharomyces pastorianus
gacgaatcacacgtacttcaattta

SEQ ID NO: 187689 - DNA, 25 bp, Saccharomyces pastorianus
ggacctcatcagttgacagtgaaca

SEQ ID NO: 187690 - DNA, 25 bp, Saccharomyces pastorianus
gaaacaccaaccacagtagcatcag

SEQ ID NO: 187691 - DNA, 25 bp, Saccharomyces pastorianus
ggctactcccatcaacatgacgaat

SEQ ID NO: 187692 - DNA, 25 bp, Saccharomyces pastorianus
ttcagtatggaagatggacctcatc

SEQ ID NO: 187693 - DNA, 25 bp, Saccharomyces pastorianus
gtcaggttcactggaagcattacag

SEQ ID NO: 187694 - DNA, 25 bp, Saccharomyces pastorianus
attccagccaagaagcgtattctga

SEQ ID NO: 187695 - DNA, 25 bp, Saccharomyces pastorianus
gcgtattctgatacaacatccacga

SEQ ID NO: 187696 - DNA, 25 bp, Saccharomyces pastorianus
gaatgcaaagatacatgttcccaaa

SEQ ID NO: 187697 - DNA, 25 bp, Saccharomyces pastorianus
cgaacacttctagaatcgcagatca

SEQ ID NO: 187698 - DNA, 25 bp, Saccharomyces pastorianus
caaacacagtgatggttcaccacta

SEQ ID NO: 187699 - DNA, 25 bp, Saccharomyces pastorianus
acatgttcccaaacacagtgatggt

SEQ ID NO: 187700 - DNA, 25 bp, Saccharomyces pastorianus
caaacagtaaggaagtcaggttcac

SEQ ID NO: 187701 - DNA, 25 bp, Saccharomyces pastorianus
gggattctaattccagccaagaagc

SEQ ID NO: 187702 - DNA, 25 bp, Saccharomyces pastorianus
atacaacatccacgaacacttctag

SEQ ID NO: 187703 - DNA, 25 bp, Saccharomyces pastorianus
gaatcgcagatcaaaatcaacttaa

SEQ ID NO: 187704 - DNA, 25 bp, Saccharomyces pastorianus
tatgaaacccttttccgtgcctgtt

SEQ ID NO: 187705 - DNA, 25 bp, Saccharomyces pastorianus
tgccttatgaaacccttttccgtgc

SEQ ID NO: 187706 - DNA, 25 bp, Saccharomyces pastorianus
ataggggtgccggggtgccttatga

SEQ ID NO: 187707 - DNA, 25 bp, Saccharomyces pastorianus
gtgccttatgaaacccttttccgtg

SEQ ID NO: 187708 - DNA, 25 bp, Saccharomyces pastorianus
tataggggtgccggggtgccttatg

SEQ ID NO: 187709 - DNA, 25 bp, Saccharomyces pastorianus
cttatgaaacccttttccgtgcctg

SEQ ID NO: 187710 - DNA, 25 bp, Saccharomyces pastorianus
gtgccggggtgccttatgaaaccct

SEQ ID NO: 187711 - DNA, 25 bp, Saccharomyces pastorianus
ttataggggtgccggggtgccttat

SEQ ID NO: 187712 - DNA, 25 bp, Saccharomyces pastorianus
tgccggggtgccttatgaaaccctt

SEQ ID NO: 187713 - DNA, 25 bp, Saccharomyces pastorianus
taggggtgccggggtgccttatgaa

SEQ ID NO: 187714 - DNA, 25 bp, Saccharomyces pastorianus
ttatgaaacccttttccgtgcctgt

SEQ ID NO: 187715 - DNA, 25 bp, Saccharomyces pastorianus
gatacagtggattcttcagtcgata

SEQ ID NO: 187716 - DNA, 25 bp, Saccharomyces pastorianus
aacttcaagctgtcaaccagtgctc

SEQ ID NO: 187717 - DNA, 25 bp, Saccharomyces pastorianus
ctagagagacattggccagcattga

SEQ ID NO: 187718 - DNA, 25 bp, Saccharomyces pastorianus
agcctactcggttaacgttgctagt

SEQ ID NO: 187719 - DNA, 25 bp, Saccharomyces pastorianus
gtgccagtctacacgcaacatcagt

SEQ ID NO: 187720 - DNA, 25 bp, Saccharomyces pastorianus
gagaacgttaattcacacactccta

SEQ ID NO: 187721 - DNA, 25 bp, Saccharomyces pastorianus
atagcatctggtttcaacttcaagc

SEQ ID NO: 187722 - DNA, 25 bp, Saccharomyces pastorianus
accagtgctccgagtgagaacgtta

SEQ ID NO: 187723 - DNA, 25 bp, Saccharomyces pastorianus
gtgaaaaccgtgtactggacgactt

SEQ ID NO: 187724 - DNA, 25 bp, Saccharomyces pastorianus
gcaagaaccatgttgacccagcagc

SEQ ID NO: 187725 - DNA, 25 bp, Saccharomyces pastorianus
gtagtgacgaagatgcctttcccaa

SEQ ID NO: 187726 - DNA, 25 bp, Saccharomyces pastorianus
cgctgctaacgttatgggtactcaa

SEQ ID NO: 187727 - DNA, 25 bp, Saccharomyces pastorianus
atcggtatgggtctttacgttgcat

SEQ ID NO: 187728 - DNA, 25 bp, Saccharomyces pastorianus
cactatgggtctctgtttctttgga

SEQ ID NO: 187729 - DNA, 25 bp, Saccharomyces pastorianus
aaatgggcggctatttctctctttt

SEQ ID NO: 187730 - DNA, 25 bp, Saccharomyces pastorianus
gatatggctgcaactatttccgttt

SEQ ID NO: 187731 - DNA, 25 bp, Saccharomyces pastorianus
gttctttacatcttacaccttcgtt

SEQ ID NO: 187732 - DNA, 25 bp, Saccharomyces pastorianus
tacagagactgggtctacctctcaa

SEQ ID NO: 187733 - DNA, 25 bp, Saccharomyces pastorianus
tattacttctgctgtttggaccaaa

SEQ ID NO: 187734 - DNA, 25 bp, Saccharomyces pastorianus
ggaccaaagaattgcctggcgcctt

SEQ ID NO: 187735 - DNA, 25 bp, Saccharomyces pastorianus
gttgctgctgcgttgattgttacta

SEQ ID NO: 187736 - DNA, 25 bp, Saccharomyces pastorianus
gagtctttaactcttatctggcaag

SEQ ID NO: 187737 - DNA, 25 bp, Saccharomyces pastorianus
attgccaacaccaagaccgggtcaa

SEQ ID NO: 187738 - DNA, 25 bp, Saccharomyces pastorianus
tctaccgccttgaaaatcttagccg

SEQ ID NO: 187739 - DNA, 25 bp, Saccharomyces pastorianus
tttagaagcccatgtaactcaccgt

SEQ ID NO: 187740 - DNA, 25 bp, Saccharomyces pastorianus
caccaagaccgggtcaagtccttgg

SEQ ID NO: 187741 - DNA, 25 bp, Saccharomyces pastorianus
gaaacgctacatcaaaattttacag

SEQ ID NO: 187742 - DNA, 25 bp, Saccharomyces pastorianus
ggtattggtaagtctaccgccttga

SEQ ID NO: 187743 - DNA, 25 bp, Saccharomyces pastorianus
gaaaagttatctggtggtgaactgc

SEQ ID NO: 187744 - DNA, 25 bp, Saccharomyces pastorianus
gtttcaaactgcacagattgccaac

SEQ ID NO: 187745 - DNA, 25 bp, Saccharomyces pastorianus
caaggctataatcaaacctcaatat

SEQ ID NO: 187746 - DNA, 25 bp, Saccharomyces pastorianus
aaattacttcaccaagatgctggaa

SEQ ID NO: 187747 - DNA, 25 bp, Saccharomyces pastorianus
aagtcctgaagatgtgaaacgctac

SEQ ID NO: 187748 - DNA, 25 bp, Saccharomyces pastorianus
ctacagaatgagcaacacagtgaac

SEQ ID NO: 187749 - DNA, 25 bp, Saccharomyces pastorianus
gcccaataggtataccgaggagttt

SEQ ID NO: 187750 - DNA, 25 bp, Saccharomyces pastorianus
tcggtcaagccactacaactcacaa

SEQ ID NO: 187751 - DNA, 25 bp, Saccharomyces pastorianus
ggagtttcggtcaagccactacaac

SEQ ID NO: 187752 - DNA, 25 bp, Saccharomyces pastorianus
gggccctttgcgaagagtacgcggt

SEQ ID NO: 187753 - DNA, 25 bp, Saccharomyces pastorianus
aacacagtgaacaccgagcccaata

SEQ ID NO: 187754 - DNA, 25 bp, Saccharomyces pastorianus
acaccgagcccaataggtataccga

SEQ ID NO: 187755 - DNA, 25 bp, Saccharomyces pastorianus
acctttcatgccctttgcatcatcg

SEQ ID NO: 187756 - DNA, 25 bp, Saccharomyces pastorianus
cgaggagtttcggtcaagccactac

SEQ ID NO: 187757 - DNA, 25 bp, Saccharomyces pastorianus
aactcacaacctttcatgccctttg

SEQ ID NO: 187758 - DNA, 25 bp, Saccharomyces pastorianus
tgcatcatcgcctccttgtaacggg

SEQ ID NO: 187759 - DNA, 25 bp, Saccharomyces pastorianus
gtttgtcgtacacacagaattaacc

SEQ ID NO: 187760 - DNA, 25 bp, Saccharomyces pastorianus
gaattaaccttgatattttgcatga

SEQ ID NO: 187761 - DNA, 25 bp, Saccharomyces pastorianus
agaggcgtttattgtttgtcgtaca

SEQ ID NO: 187762 - DNA, 25 bp, Saccharomyces pastorianus
ttgcatgactatgcgccagagttat

SEQ ID NO: 187763 - DNA, 25 bp, Saccharomyces pastorianus
atgcgccagagttatttattgaaaa

SEQ ID NO: 187764 - DNA, 25 bp, Saccharomyces pastorianus
gtttattgtttgtcgtacacacaga

SEQ ID NO: 187765 - DNA, 25 bp, Saccharomyces pastorianus
gatattttgcatgactatgcgccag

SEQ ID NO: 187766 - DNA, 25 bp, Saccharomyces pastorianus
gactatgcgccagagttatttattg

SEQ ID NO: 187767 - DNA, 25 bp, Saccharomyces pastorianus
atcggaagggttgattatctcaatt

SEQ ID NO: 187768 - DNA, 25 bp, Saccharomyces pastorianus
ggcgtttattgtttgtcgtacacac

SEQ ID NO: 187769 - DNA, 25 bp, Saccharomyces pastorianus
tatttatcaaccaaatcggaagggt

SEQ ID NO: 187770 - DNA, 25 bp, Saccharomyces pastorianus
agtgctgcagccgttgatctattca

SEQ ID NO: 187771 - DNA, 25 bp, Saccharomyces pastorianus
taaggaagctgttattggcccaata

SEQ ID NO: 187772 - DNA, 25 bp, Saccharomyces pastorianus
gacggatgactggtttcgttaacat

SEQ ID NO: 187773 - DNA, 25 bp, Saccharomyces pastorianus
ttattgggcacacaatccatctctg

SEQ ID NO: 187774 - DNA, 25 bp, Saccharomyces pastorianus
aatgcatttgattggtctacttcta

SEQ ID NO: 187775 - DNA, 25 bp, Saccharomyces pastorianus
gcaactgccactgcattgatggaca

SEQ ID NO: 187776 - DNA, 25 bp, Saccharomyces pastorianus
gaagcggcggactcaattattagaa

SEQ ID NO: 187777 - DNA, 25 bp, Saccharomyces pastorianus
aagcctcgtatttcacatttttcgg

SEQ ID NO: 187778 - DNA, 25 bp, Saccharomyces pastorianus
tttacgccgttgtagttaagcctcg

SEQ ID NO: 187779 - DNA, 25 bp, Saccharomyces pastorianus
agatttggtgactctcatctgcaca

SEQ ID NO: 187780 - DNA, 25 bp, Saccharomyces pastorianus
aaatacttccttcgctatatgtcaa

SEQ ID NO: 187781 - DNA, 25 bp, Saccharomyces pastorianus
cggatactccagtacgtgggtgcat

SEQ ID NO: 187782 - DNA, 25 bp, Saccharomyces pastorianus
ataccaaccaattcattccaccgaa

SEQ ID NO: 187783 - DNA, 25 bp, Saccharomyces pastorianus
gtagttccagtgaaacgaccaccaa

SEQ ID NO: 187784 - DNA, 25 bp, Saccharomyces pastorianus
gagattatctctgacagtgtcccag

SEQ ID NO: 187785 - DNA, 25 bp, Saccharomyces pastorianus
gggtgcatacgcctggtagtcccat

SEQ ID NO: 187786 - DNA, 25 bp, Saccharomyces pastorianus
aatcacgaagtttctcttgctcagg

SEQ ID NO: 187787 - DNA, 25 bp, Saccharomyces pastorianus
gttcttcctcaagcggtagtagttc

SEQ ID NO: 187788 - DNA, 25 bp, Saccharomyces pastorianus
ttcgggttacagatgccgtcgttca

SEQ ID NO: 187789 - DNA, 25 bp, Saccharomyces pastorianus
ggacctcctattcagagttttcaca

SEQ ID NO: 187790 - DNA, 25 bp, Saccharomyces pastorianus
ttctcgatgtaagttggacctccta

SEQ ID NO: 187791 - DNA, 25 bp, Saccharomyces pastorianus
ggtgatgggactagttcttcctcaa

SEQ ID NO: 187792 - DNA, 25 bp, Saccharomyces pastorianus
ctacgaccgaagcatggactggcac

SEQ ID NO: 187793 - DNA, 25 bp, Saccharomyces pastorianus
aactacgaccgaagcatggactggc

SEQ ID NO: 187794 - DNA, 25 bp, Saccharomyces pastorianus
acgaccgaagcatggactggcactt

SEQ ID NO: 187795 - DNA, 25 bp, Saccharomyces pastorianus
cacttttacatctacatccacagaa

SEQ ID NO: 187796 - DNA, 25 bp, Saccharomyces pastorianus
ataactacgaccgaagcatggactg

SEQ ID NO: 187797 - DNA, 25 bp, Saccharomyces pastorianus
gcacttttacatctacatccacaga

SEQ ID NO: 187798 - DNA, 25 bp, Saccharomyces pastorianus
tacgaccgaagcatggactggcact

SEQ ID NO: 187799 - DNA, 25 bp, Saccharomyces pastorianus
actacgaccgaagcatggactggca

SEQ ID NO: 187800 - DNA, 25 bp, Saccharomyces pastorianus
ggcacttttacatctacatccacag

SEQ ID NO: 187801 - DNA, 25 bp, Saccharomyces pastorianus
tggcacttttacatctacatccaca

SEQ ID NO: 187802 - DNA, 25 bp, Saccharomyces pastorianus
ggctgcgatcgtgttaagccgattt

SEQ ID NO: 187803 - DNA, 25 bp, Saccharomyces pastorianus
taagccgatttgtgggaactgtatg

SEQ ID NO: 187804 - DNA, 25 bp, Saccharomyces pastorianus
gccaagtagccaacggtccgtactt

SEQ ID NO: 187805 - DNA, 25 bp, Saccharomyces pastorianus
ttgcagaaaaatccagaactggctt

SEQ ID NO: 187806 - DNA, 25 bp, Saccharomyces pastorianus
aaaatggactgcttttatccggacg

SEQ ID NO: 187807 - DNA, 25 bp, Saccharomyces pastorianus
cctgcatgcgtgcagtgccgtaaga

SEQ ID NO: 187808 - DNA, 25 bp, Saccharomyces pastorianus
tatccggacgttcccggacaatacg

SEQ ID NO: 187809 - DNA, 25 bp, Saccharomyces pastorianus
caatacgttccctctagttcttcct

SEQ ID NO: 187810 - DNA, 25 bp, Saccharomyces pastorianus
taaactcttattacgcttctcgtcg

SEQ ID NO: 187811 - DNA, 25 bp, Saccharomyces pastorianus
ggaagataggctgcgatcgtgttaa

SEQ ID NO: 187812 - DNA, 25 bp, Saccharomyces pastorianus
cgtgcagtgccgtaagaggaagata

SEQ ID NO: 187813 - DNA, 25 bp, Saccharomyces pastorianus
aagcaacttcgaaataaacgctgaa

SEQ ID NO: 187814 - DNA, 25 bp, Saccharomyces pastorianus
accaccgcctggatacgaaatcgaa

SEQ ID NO: 187815 - DNA, 25 bp, Saccharomyces pastorianus
actggataatccgatggtgccatca

SEQ ID NO: 187816 - DNA, 25 bp, Saccharomyces pastorianus
caccgcctggatacgaaatcgaaga

SEQ ID NO: 187817 - DNA, 25 bp, Saccharomyces pastorianus
agaggacagcgacttagcacttcca

SEQ ID NO: 187818 - DNA, 25 bp, Saccharomyces pastorianus
aaatgaggatacattccttccgcct

SEQ ID NO: 187819 - DNA, 25 bp, Saccharomyces pastorianus
atggtgccatcatcggtaaatgagg

SEQ ID NO: 187820 - DNA, 25 bp, Saccharomyces pastorianus
acctcctccaagcaacttcgaaata

SEQ ID NO: 187821 - DNA, 25 bp, Saccharomyces pastorianus
tgaggatacattccttccgcctcca

SEQ ID NO: 187822 - DNA, 25 bp, Saccharomyces pastorianus
gatacgaaatcgaagaactggataa

SEQ ID NO: 187823 - DNA, 25 bp, Saccharomyces pastorianus
ggacagcgacttagcacttccacca

SEQ ID NO: 187824 - DNA, 25 bp, Saccharomyces pastorianus
taggttatctgccacaatattcacg

SEQ ID NO: 187825 - DNA, 25 bp, Saccharomyces pastorianus
taatcaataggttatctgccacaat

SEQ ID NO: 187826 - DNA, 25 bp, Saccharomyces pastorianus
ctgccacaatattcacgtctttgca

SEQ ID NO: 187827 - DNA, 25 bp, Saccharomyces pastorianus
tattttactgttgatccctcggata

SEQ ID NO: 187828 - DNA, 25 bp, Saccharomyces pastorianus
tgatccctcggataatcaataggtt

SEQ ID NO: 187829 - DNA, 25 bp, Saccharomyces pastorianus
tatctgccacaatattcacgtcttt

SEQ ID NO: 187830 - DNA, 25 bp, Saccharomyces pastorianus
tttattttactgttgatccctcgga

SEQ ID NO: 187831 - DNA, 25 bp, Saccharomyces pastorianus
actgttgatccctcggataatcaat

SEQ ID NO: 187832 - DNA, 25 bp, Saccharomyces pastorianus
tttactgttgatccctcggataatc

SEQ ID NO: 187833 - DNA, 25 bp, Saccharomyces pastorianus
gttatctgccacaatattcacgtct

SEQ ID NO: 187834 - DNA, 25 bp, Saccharomyces pastorianus
ccacaatattcacgtctttgcactc

SEQ ID NO: 187835 - DNA, 25 bp, Saccharomyces pastorianus
tccggaagaatttgtcggcgctctt

SEQ ID NO: 187836 - DNA, 25 bp, Saccharomyces pastorianus
gaagcattgcttaccagacagcgaa

SEQ ID NO: 187837 - DNA, 25 bp, Saccharomyces pastorianus
agcccacctcagaaagttcgtctaa

SEQ ID NO: 187838 - DNA, 25 bp, Saccharomyces pastorianus
gtattttcctcatcttgcaaaggct

SEQ ID NO: 187839 - DNA, 25 bp, Saccharomyces pastorianus
ggtcagaatacttgcctcgaagcat

SEQ ID NO: 187840 - DNA, 25 bp, Saccharomyces pastorianus
cccacaccaacggagtttgattttg

SEQ ID NO: 187841 - DNA, 25 bp, Saccharomyces pastorianus
gttcgtctaatgataagcgttcgga

SEQ ID NO: 187842 - DNA, 25 bp, Saccharomyces pastorianus
aattggatatggagcccacctcaga

SEQ ID NO: 187843 - DNA, 25 bp, Saccharomyces pastorianus
aaatctaccgtcatgattccggaag

SEQ ID NO: 187844 - DNA, 25 bp, Saccharomyces pastorianus
tagaaatccaaggtctgccatcctc

SEQ ID NO: 187845 - DNA, 25 bp, Saccharomyces pastorianus
ggccaaacttggctgcatatttccc

SEQ ID NO: 187846 - DNA, 25 bp, Saccharomyces pastorianus
agatggccaatccagacacacacat

SEQ ID NO: 187847 - DNA, 25 bp, Saccharomyces pastorianus
gacactaacgcttatatcgtcggtt

SEQ ID NO: 187848 - DNA, 25 bp, Saccharomyces pastorianus
tcccgatgatccaagagctgttatt

SEQ ID NO: 187849 - DNA, 25 bp, Saccharomyces pastorianus
tgcttacatgtacgctcccgatgat

SEQ ID NO: 187850 - DNA, 25 bp, Saccharomyces pastorianus
aagattgcctatacacccttgtgga

SEQ ID NO: 187851 - DNA, 25 bp, Saccharomyces pastorianus
atacacccttgtggagcgtggtatc

SEQ ID NO: 187852 - DNA, 25 bp, Saccharomyces pastorianus
ttgacggtcacagaaaacggttact

SEQ ID NO: 187853 - DNA, 25 bp, Saccharomyces pastorianus
taatgacagatgctcccgagattat

SEQ ID NO: 187854 - DNA, 25 bp, Saccharomyces pastorianus
gcagatgcacttatgcgcgatgcca

SEQ ID NO: 187855 - DNA, 25 bp, Saccharomyces pastorianus
acacacattgtttctttgacggtca

SEQ ID NO: 187856 - DNA, 25 bp, Saccharomyces pastorianus
gcgcgatgccatgaaggcccaagat

SEQ ID NO: 187857 - DNA, 25 bp, Saccharomyces pastorianus
attgtcgtttccgtcatggtcggga

SEQ ID NO: 187858 - DNA, 25 bp, Saccharomyces pastorianus
aaaattgtcgtttccgtcatggtcg

SEQ ID NO: 187859 - DNA, 25 bp, Saccharomyces pastorianus
ttttccgtgtcctggaacgttgtca

SEQ ID NO: 187860 - DNA, 25 bp, Saccharomyces pastorianus
aaattgtcgtttccgtcatggtcgg

SEQ ID NO: 187861 - DNA, 25 bp, Saccharomyces pastorianus
tgagttttccgtgtcctggaacgtt

SEQ ID NO: 187862 - DNA, 25 bp, Saccharomyces pastorianus
gtttccgtcatggtcgggaaaaatg

SEQ ID NO: 187863 - DNA, 25 bp, Saccharomyces pastorianus
gagttttccgtgtcctggaacgttg

SEQ ID NO: 187864 - DNA, 25 bp, Saccharomyces pastorianus
aatgtacaaaagttcctgacgtttg

SEQ ID NO: 187865 - DNA, 25 bp, Saccharomyces pastorianus
tgtcgtttccgtcatggtcgggaaa

SEQ ID NO: 187866 - DNA, 25 bp, Saccharomyces pastorianus
caaaagttcctgacgtttgttgaag

SEQ ID NO: 187867 - DNA, 25 bp, Saccharomyces pastorianus
gaaaaaattgtcgtttccgtcatgg

SEQ ID NO: 187868 - DNA, 25 bp, Saccharomyces pastorianus
caactgggccaagagacctattttt

SEQ ID NO: 187869 - DNA, 25 bp, Saccharomyces pastorianus
ttaaccaactgggccaagagaccta

SEQ ID NO: 187870 - DNA, 25 bp, Saccharomyces pastorianus
ccaactgggccaagagacctatttt

SEQ ID NO: 187871 - DNA, 25 bp, Saccharomyces pastorianus
aaccaactgggccaagagacctatt

SEQ ID NO: 187872 - DNA, 25 bp, Saccharomyces pastorianus
gccttaaccaactgggccaagagac

SEQ ID NO: 187873 - DNA, 25 bp, Saccharomyces pastorianus
accaactgggccaagagacctattt

SEQ ID NO: 187874 - DNA, 25 bp, Saccharomyces pastorianus
tgccttaaccaactgggccaagaga

SEQ ID NO: 187875 - DNA, 25 bp, Saccharomyces pastorianus
cttaaccaactgggccaagagacct

SEQ ID NO: 187876 - DNA, 25 bp, Saccharomyces pastorianus
tgggccaagagacctatttttttcg

SEQ ID NO: 187877 - DNA, 25 bp, Saccharomyces pastorianus
taaccaactgggccaagagacctat

SEQ ID NO: 187878 - DNA, 25 bp, Saccharomyces pastorianus
gggccatcacctgttggacatttta

SEQ ID NO: 187879 - DNA, 25 bp, Saccharomyces pastorianus
aaaggagattcacacgtacaacggg

SEQ ID NO: 187880 - DNA, 25 bp, Saccharomyces pastorianus
tactactacgtcaataaacctggag

SEQ ID NO: 187881 - DNA, 25 bp, Saccharomyces pastorianus
caacttcactattcctgtactatca

SEQ ID NO: 187882 - DNA, 25 bp, Saccharomyces pastorianus
attgtaggacggtaggtgccttaat

SEQ ID NO: 187883 - DNA, 25 bp, Saccharomyces pastorianus
gaaacaaatctcttgcaggctcgat

SEQ ID NO: 187884 - DNA, 25 bp, Saccharomyces pastorianus
gttcaactgggatgacaacttcact

SEQ ID NO: 187885 - DNA, 25 bp, Saccharomyces pastorianus
gctgcattgagcgaaggtattgatt

SEQ ID NO: 187886 - DNA, 25 bp, Saccharomyces pastorianus
cattgttcctactgagttggtccga

SEQ ID NO: 187887 - DNA, 25 bp, Saccharomyces pastorianus
agccgccgcgacgatcggaaggaaa

SEQ ID NO: 187888 - DNA, 25 bp, Saccharomyces pastorianus
gacgttactttgatatcattgttcc

SEQ ID NO: 187889 - DNA, 25 bp, Saccharomyces pastorianus
gattctattgatgttgaccaacctg

SEQ ID NO: 187890 - DNA, 25 bp, Saccharomyces pastorianus
atctgagggttgcattatttctgtc

SEQ ID NO: 187891 - DNA, 25 bp, Saccharomyces pastorianus
aaacagtttccacagatttcgatga

SEQ ID NO: 187892 - DNA, 25 bp, Saccharomyces pastorianus
aacattgccttgaaactttacgata

SEQ ID NO: 187893 - DNA, 25 bp, Saccharomyces pastorianus
atgggtaccaatccaaacgatattg

SEQ ID NO: 187894 - DNA, 25 bp, Saccharomyces pastorianus
ggacgccgttgcttataatggtaat

SEQ ID NO: 187895 - DNA, 25 bp, Saccharomyces pastorianus
ttaactaccctgtgttgattcgtcc

SEQ ID NO: 187896 - DNA, 25 bp, Saccharomyces pastorianus
gcattatttctgtcggtggtcaatt

SEQ ID NO: 187897 - DNA, 25 bp, Saccharomyces pastorianus
atgtcttggtacatgccatttccga

SEQ ID NO: 187898 - DNA, 25 bp, Saccharomyces pastorianus
taactttggcatctgacgtttctcc

SEQ ID NO: 187899 - DNA, 25 bp, Saccharomyces pastorianus
accacccagtcgtcatgtctaaatt

SEQ ID NO: 187900 - DNA, 25 bp, Saccharomyces pastorianus
ttatcatttgctttcgcatcgtcac

SEQ ID NO: 187901 - DNA, 25 bp, Saccharomyces pastorianus
attgtcacttgccactgtcgcctgc

SEQ ID NO: 187902 - DNA, 25 bp, Saccharomyces pastorianus
tgccaccgctattgccattatcatt

SEQ ID NO: 187903 - DNA, 25 bp, Saccharomyces pastorianus
gctctctaggctaacgtacgcattt

SEQ ID NO: 187904 - DNA, 25 bp, Saccharomyces pastorianus
tattgccattatcatttgctttcgc

SEQ ID NO: 187905 - DNA, 25 bp, Saccharomyces pastorianus
gccattatcatttgctttcgcatcg

SEQ ID NO: 187906 - DNA, 25 bp, Saccharomyces pastorianus
atcgtcaccgatttaaagctctcta

SEQ ID NO: 187907 - DNA, 25 bp, Saccharomyces pastorianus
atttgctttcgcatcgtcaccgatt

SEQ ID NO: 187908 - DNA, 25 bp, Saccharomyces pastorianus
gctttcgcatcgtcaccgatttaaa

SEQ ID NO: 187909 - DNA, 25 bp, Saccharomyces pastorianus
taaagctctctaggctaacgtacgc

SEQ ID NO: 187910 - DNA, 25 bp, Saccharomyces pastorianus
gtcaccgatttaaagctctctaggc

SEQ ID NO: 187911 - DNA, 25 bp, Saccharomyces pastorianus
tgcagcgggctgaaagtcgaatacc

SEQ ID NO: 187912 - DNA, 25 bp, Saccharomyces pastorianus
ccgtattgcacatgcagcgggctga

SEQ ID NO: 187913 - DNA, 25 bp, Saccharomyces pastorianus
gctgaaagtcgaatacctgaaggtc

SEQ ID NO: 187914 - DNA, 25 bp, Saccharomyces pastorianus
agctgcagtaccagtcgttcccttg

SEQ ID NO: 187915 - DNA, 25 bp, Saccharomyces pastorianus
tcgttcccttgggtccgatacaaga

SEQ ID NO: 187916 - DNA, 25 bp, Saccharomyces pastorianus
agccacagctgcagtaccagtcgtt

SEQ ID NO: 187917 - DNA, 25 bp, Saccharomyces pastorianus
tcccttgggtccgatacaagaccat

SEQ ID NO: 187918 - DNA, 25 bp, Saccharomyces pastorianus
cagtcgttcccttgggtccgataca

SEQ ID NO: 187919 - DNA, 25 bp, Saccharomyces pastorianus
gcgggctgaaagtcgaatacctgaa

SEQ ID NO: 187920 - DNA, 25 bp, Saccharomyces pastorianus
gtcgaatacctgaaggtcgaagagc

SEQ ID NO: 187921 - DNA, 25 bp, Saccharomyces pastorianus
gtattgcacatgcagcgggctgaaa

SEQ ID NO: 187922 - DNA, 25 bp, Saccharomyces pastorianus
ggtgcattgaccaagcaagttgctc

SEQ ID NO: 187923 - DNA, 25 bp, Saccharomyces pastorianus
gatattcatgttccactattgcctg

SEQ ID NO: 187924 - DNA, 25 bp, Saccharomyces pastorianus
tacttctccagtcggtccttattat

SEQ ID NO: 187925 - DNA, 25 bp, Saccharomyces pastorianus
atgcatcttacctcaactacaagct

SEQ ID NO: 187926 - DNA, 25 bp, Saccharomyces pastorianus
tgctgtcgtttcacctatcaaggaa

SEQ ID NO: 187927 - DNA, 25 bp, Saccharomyces pastorianus
actggtttcaaagccgtacgtcttg

SEQ ID NO: 187928 - DNA, 25 bp, Saccharomyces pastorianus
gaaggaattggttaccgctccatta

SEQ ID NO: 187929 - DNA, 25 bp, Saccharomyces pastorianus
ctctgttttaacattggctcgtgac

SEQ ID NO: 187930 - DNA, 25 bp, Saccharomyces pastorianus
acactattactgaagtcgccactag

SEQ ID NO: 187931 - DNA, 25 bp, Saccharomyces pastorianus
aaatctatggttgttcggcccagaa

SEQ ID NO: 187932 - DNA, 25 bp, Saccharomyces pastorianus
ggttggtactatgaacgtgttcttc

SEQ ID NO: 187933 - DNA, 25 bp, Saccharomyces pastorianus
atcctcttcgtcgtcaaacgcagcc

SEQ ID NO: 187934 - DNA, 25 bp, Saccharomyces pastorianus
gagaggcgttctcttcatccgcgtc

SEQ ID NO: 187935 - DNA, 25 bp, Saccharomyces pastorianus
ttctctgtacattgctgctccttct

SEQ ID NO: 187936 - DNA, 25 bp, Saccharomyces pastorianus
tcttagacgagaggcgttctcttca

SEQ ID NO: 187937 - DNA, 25 bp, Saccharomyces pastorianus
tgtacattgctgctccttctctttt

SEQ ID NO: 187938 - DNA, 25 bp, Saccharomyces pastorianus
gtcaaacgcagcctcctcttcttca

SEQ ID NO: 187939 - DNA, 25 bp, Saccharomyces pastorianus
attgctgctccttctctttttaaat

SEQ ID NO: 187940 - DNA, 25 bp, Saccharomyces pastorianus
agacgagaggcgttctcttcatccg

SEQ ID NO: 187941 - DNA, 25 bp, Saccharomyces pastorianus
tctctttttaaatttcttagacgag

SEQ ID NO: 187942 - DNA, 25 bp, Saccharomyces pastorianus
tcttctctgtacattgctgctcctt

SEQ ID NO: 187943 - DNA, 25 bp, Saccharomyces pastorianus
aatttcttagacgagaggcgttctc

SEQ ID NO: 187944 - DNA, 25 bp, Saccharomyces pastorianus
agtattatcatcaactatggttcca

SEQ ID NO: 187945 - DNA, 25 bp, Saccharomyces pastorianus
tggcctactcatgtcctggttacga

SEQ ID NO: 187946 - DNA, 25 bp, Saccharomyces pastorianus
tcgtgtgcactgtccgagggactga

SEQ ID NO: 187947 - DNA, 25 bp, Saccharomyces pastorianus
gtggtctttgtattaacgtgatctc

SEQ ID NO: 187948 - DNA, 25 bp, Saccharomyces pastorianus
gactgagttattcagagactatcgg

SEQ ID NO: 187949 - DNA, 25 bp, Saccharomyces pastorianus
tagtgcctcgtgtgcactgtccgag

SEQ ID NO: 187950 - DNA, 25 bp, Saccharomyces pastorianus
ggattagtgcctcgtgtgcactgtc

SEQ ID NO: 187951 - DNA, 25 bp, Saccharomyces pastorianus
ctgtccgagggactgagttattcag

SEQ ID NO: 187952 - DNA, 25 bp, Saccharomyces pastorianus
tctgtgggtgcctggattagtgcct

SEQ ID NO: 187953 - DNA, 25 bp, Saccharomyces pastorianus
taacgtgatctcagattcctggtct

SEQ ID NO: 187954 - DNA, 25 bp, Saccharomyces pastorianus
ccttctctgtgggtgcctggattag

SEQ ID NO: 187955 - DNA, 25 bp, Saccharomyces pastorianus
gattcgacaatactaccactgcaaa

SEQ ID NO: 187956 - DNA, 25 bp, Saccharomyces pastorianus
cgggttctggtaaatcgacgcaaat

SEQ ID NO: 187957 - DNA, 25 bp, Saccharomyces pastorianus
attgccggtttatcaacacaagagc

SEQ ID NO: 187958 - DNA, 25 bp, Saccharomyces pastorianus
atcctgttacagtgcttattggtga

SEQ ID NO: 187959 - DNA, 25 bp, Saccharomyces pastorianus
cgattaatttggctacccgtgttgc

SEQ ID NO: 187960 - DNA, 25 bp, Saccharomyces pastorianus
tgccctatatcaatgctaatcctgt

SEQ ID NO: 187961 - DNA, 25 bp, Saccharomyces pastorianus
acctcgtcgtgtggcagcgattaat

SEQ ID NO: 187962 - DNA, 25 bp, Saccharomyces pastorianus
gaccaagtgggttattctgttagat

SEQ ID NO: 187963 - DNA, 25 bp, Saccharomyces pastorianus
gaggacgatgatgtctccaacagac

SEQ ID NO: 187964 - DNA, 25 bp, Saccharomyces pastorianus
gaaacacggatccattgctgtcact

SEQ ID NO: 187965 - DNA, 25 bp, Saccharomyces pastorianus
gacgcaaattccacagttcattttg

SEQ ID NO: 187966 - DNA, 25 bp, Saccharomyces pastorianus
cgctgttagatacggttctgagaaa

SEQ ID NO: 187967 - DNA, 25 bp, Saccharomyces pastorianus
agacttgattaggaacgctgttaga

SEQ ID NO: 187968 - DNA, 25 bp, Saccharomyces pastorianus
ttagatacggttctgagaaacctca

SEQ ID NO: 187969 - DNA, 25 bp, Saccharomyces pastorianus
atatctggatcgatcatggaagact

SEQ ID NO: 187970 - DNA, 25 bp, Saccharomyces pastorianus
ggaagacttgattaggaacgctgtt

SEQ ID NO: 187971 - DNA, 25 bp, Saccharomyces pastorianus
tctggatcgatcatggaagacttga

SEQ ID NO: 187972 - DNA, 25 bp, Saccharomyces pastorianus
attaggaacgctgttagatacggtt

SEQ ID NO: 187973 - DNA, 25 bp, Saccharomyces pastorianus
tcttaatgatgtcgtagagactgtt

SEQ ID NO: 187974 - DNA, 25 bp, Saccharomyces pastorianus
atatcgcacgatgatcttaatgatg

SEQ ID NO: 187975 - DNA, 25 bp, Saccharomyces pastorianus
cgatgatcttaatgatgtcgtagag

SEQ ID NO: 187976 - DNA, 25 bp, Saccharomyces pastorianus
aacgctgttagatacggttctgaga

SEQ ID NO: 187977 - DNA, 25 bp, Saccharomyces pastorianus
aggattcctcgaaatggaatctata

SEQ ID NO: 187978 - DNA, 25 bp, Saccharomyces pastorianus
taggattcctcgaaatggaatctat

SEQ ID NO: 187979 - DNA, 25 bp, Saccharomyces pastorianus
ataggattcctcgaaatggaatcta

SEQ ID NO: 187980 - DNA, 25 bp, Saccharomyces pastorianus
ggattcctcgaaatggaatctatat

SEQ ID NO: 187981 - DNA, 25 bp, Saccharomyces pastorianus
gattcctcgaaatggaatctatatt

SEQ ID NO: 187982 - DNA, 25 bp, Saccharomyces pastorianus
cgatgatataggattcctcgaaatg

SEQ ID NO: 187983 - DNA, 25 bp, Saccharomyces pastorianus
ctcgatgatataggattcctcgaaa

SEQ ID NO: 187984 - DNA, 25 bp, Saccharomyces pastorianus
atgatataggattcctcgaaatgga

SEQ ID NO: 187985 - DNA, 25 bp, Saccharomyces pastorianus
tgatataggattcctcgaaatggaa

SEQ ID NO: 187986 - DNA, 25 bp, Saccharomyces pastorianus
tcgatgatataggattcctcgaaat

SEQ ID NO: 187987 - DNA, 25 bp, Saccharomyces pastorianus
gatgatataggattcctcgaaatgg

SEQ ID NO: 187988 - DNA, 25 bp, Saccharomyces pastorianus
gggactttggaaatacatccaagaa

SEQ ID NO: 187989 - DNA, 25 bp, Saccharomyces pastorianus
gactttggaaatacatccaagaagc

SEQ ID NO: 187990 - DNA, 25 bp, Saccharomyces pastorianus
tgtgtgggttattaaacgtgggact

SEQ ID NO: 187991 - DNA, 25 bp, Saccharomyces pastorianus
ggactttggaaatacatccaagaag

SEQ ID NO: 187992 - DNA, 25 bp, Saccharomyces pastorianus
acgtgggactttggaaatacatcca

SEQ ID NO: 187993 - DNA, 25 bp, Saccharomyces pastorianus
gtgggactttggaaatacatccaag

SEQ ID NO: 187994 - DNA, 25 bp, Saccharomyces pastorianus
tttggaaatacatccaagaagcaca

SEQ ID NO: 187995 - DNA, 25 bp, Saccharomyces pastorianus
ctttggaaatacatccaagaagcac

SEQ ID NO: 187996 - DNA, 25 bp, Saccharomyces pastorianus
cgtgggactttggaaatacatccaa

SEQ ID NO: 187997 - DNA, 25 bp, Saccharomyces pastorianus
ttggaaatacatccaagaagcacaa

SEQ ID NO: 187998 - DNA, 25 bp, Saccharomyces pastorianus
tgggactttggaaatacatccaaga

SEQ ID NO: 187999 - DNA, 25 bp, Saccharomyces pastorianus
gcgtactataatgtgtgcgatgcca

SEQ ID NO: 188000 - DNA, 25 bp, Saccharomyces pastorianus
ggctcaaatatacagacaggtattc

SEQ ID NO: 188001 - DNA, 25 bp, Saccharomyces pastorianus
tattctggcgtactataatgtgtgc

SEQ ID NO: 188002 - DNA, 25 bp, Saccharomyces pastorianus
actataatgtgtgcgatgccatcga

SEQ ID NO: 188003 - DNA, 25 bp, Saccharomyces pastorianus
gagacatggctcaaatatacagaca

SEQ ID NO: 188004 - DNA, 25 bp, Saccharomyces pastorianus
tctggcgtactataatgtgtgcgat

SEQ ID NO: 188005 - DNA, 25 bp, Saccharomyces pastorianus
gacaggtattctggcgtactataat

SEQ ID NO: 188006 - DNA, 25 bp, Saccharomyces pastorianus
catggctcaaatatacagacaggta

SEQ ID NO: 188007 - DNA, 25 bp, Saccharomyces pastorianus
tggctcaaatatacagacaggtatt

SEQ ID NO: 188008 - DNA, 25 bp, Saccharomyces pastorianus
atggctcaaatatacagacaggtat

SEQ ID NO: 188009 - DNA, 25 bp, Saccharomyces pastorianus
aatgtgtgcgatgccatcgagcaag

SEQ ID NO: 188010 - DNA, 25 bp, Saccharomyces pastorianus
ggcggctacgcataccagtacgtgg

SEQ ID NO: 188011 - DNA, 25 bp, Saccharomyces pastorianus
agaaacgtgaccgtgctgcgaaaga

SEQ ID NO: 188012 - DNA, 25 bp, Saccharomyces pastorianus
cgttccattgcgactacatcgaggt

SEQ ID NO: 188013 - DNA, 25 bp, Saccharomyces pastorianus
caagagctcgccatggtggatccgc

SEQ ID NO: 188014 - DNA, 25 bp, Saccharomyces pastorianus
atccagaacctggtgcgcaagctga

SEQ ID NO: 188015 - DNA, 25 bp, Saccharomyces pastorianus
tgacgctggacttggagctggacct

SEQ ID NO: 188016 - DNA, 25 bp, Saccharomyces pastorianus
aaacagtctcaagcgcaagcagctc

SEQ ID NO: 188017 - DNA, 25 bp, Saccharomyces pastorianus
gcgagcgagctgtctggtttcagaa

SEQ ID NO: 188018 - DNA, 25 bp, Saccharomyces pastorianus
tacatcgaggtgaacgcgtgccccg

SEQ ID NO: 188019 - DNA, 25 bp, Saccharomyces pastorianus
gacatcgtcgagtaccgcctgcaga

SEQ ID NO: 188020 - DNA, 25 bp, Saccharomyces pastorianus
tggacttgaagtctctcccgctgga

SEQ ID NO: 188021 - DNA, 25 bp, Saccharomyces pastorianus
tatacccaggaaaggctaagtcgca

SEQ ID NO: 188022 - DNA, 25 bp, Saccharomyces pastorianus
tattcttggagctttctacgccttg

SEQ ID NO: 188023 - DNA, 25 bp, Saccharomyces pastorianus
ctacgccttgcctatttttcagaga

SEQ ID NO: 188024 - DNA, 25 bp, Saccharomyces pastorianus
tgttcatgttgagttcagtccggat

SEQ ID NO: 188025 - DNA, 25 bp, Saccharomyces pastorianus
ggacggcttagatattgttcatgtt

SEQ ID NO: 188026 - DNA, 25 bp, Saccharomyces pastorianus
agggtacgacacagctattcttgga

SEQ ID NO: 188027 - DNA, 25 bp, Saccharomyces pastorianus
agcttggtcactattggtctctaca

SEQ ID NO: 188028 - DNA, 25 bp, Saccharomyces pastorianus
agagatatttgacgctactgaggat

SEQ ID NO: 188029 - DNA, 25 bp, Saccharomyces pastorianus
gttcagtccggatacaagagcgcca

SEQ ID NO: 188030 - DNA, 25 bp, Saccharomyces pastorianus
ctaagtcgcatgaacccagctggat

SEQ ID NO: 188031 - DNA, 25 bp, Saccharomyces pastorianus
aagtgactcgaatgtatacccagga

SEQ ID NO: 188032 - DNA, 25 bp, Saccharomyces pastorianus
gactcggacgtagacgatgatgctg

SEQ ID NO: 188033 - DNA, 25 bp, Saccharomyces pastorianus
agttgaagctgtagaggtgattgtc

SEQ ID NO: 188034 - DNA, 25 bp, Saccharomyces pastorianus
agaagtggacgatggtgtagatgaa

SEQ ID NO: 188035 - DNA, 25 bp, Saccharomyces pastorianus
tgacgactcggacgtagacgatgat

SEQ ID NO: 188036 - DNA, 25 bp, Saccharomyces pastorianus
ttgaagctgtagaggtgattgtcga

SEQ ID NO: 188037 - DNA, 25 bp, Saccharomyces pastorianus
gatgttgatgacgactcggacgtag

SEQ ID NO: 188038 - DNA, 25 bp, Saccharomyces pastorianus
ggacgtagacgatgatgctgaagac

SEQ ID NO: 188039 - DNA, 25 bp, Saccharomyces pastorianus
aaagatgttgatgacgactcggacg

SEQ ID NO: 188040 - DNA, 25 bp, Saccharomyces pastorianus
gatgacgactcggacgtagacgatg

SEQ ID NO: 188041 - DNA, 25 bp, Saccharomyces pastorianus
cgatgatgctgaagacgttgaggtt

SEQ ID NO: 188042 - DNA, 25 bp, Saccharomyces pastorianus
gttgatgacgactcggacgtagacg

SEQ ID NO: 188043 - DNA, 25 bp, Saccharomyces pastorianus
tgcttttagggctaattcccttgcc

SEQ ID NO: 188044 - DNA, 25 bp, Saccharomyces pastorianus
tacctggttctactatgggatctac

SEQ ID NO: 188045 - DNA, 25 bp, Saccharomyces pastorianus
gagcgtaggttcattttcgtctaaa

SEQ ID NO: 188046 - DNA, 25 bp, Saccharomyces pastorianus
ctggctagtgctatggttgctgatc

SEQ ID NO: 188047 - DNA, 25 bp, Saccharomyces pastorianus
gtattgcgctaccaaaggacgtttt

SEQ ID NO: 188048 - DNA, 25 bp, Saccharomyces pastorianus
attggctttatcctttcatggcttc

SEQ ID NO: 188049 - DNA, 25 bp, Saccharomyces pastorianus
tgggatctacaagtcattcgccttt

SEQ ID NO: 188050 - DNA, 25 bp, Saccharomyces pastorianus
catggcttccagatttgtgctttta

SEQ ID NO: 188051 - DNA, 25 bp, Saccharomyces pastorianus
aattcccttgccctatattgtaaag

SEQ ID NO: 188052 - DNA, 25 bp, Saccharomyces pastorianus
attcgcctttcgtatctggctagtg

SEQ ID NO: 188053 - DNA, 25 bp, Saccharomyces pastorianus
gtcttgaaacccaaagtattgcgct

SEQ ID NO: 188054 - DNA, 25 bp, Saccharomyces pastorianus
ggaggatataacacgccttcaccac

SEQ ID NO: 188055 - DNA, 25 bp, Saccharomyces pastorianus
gaaattcgattctgtgccggttgat

SEQ ID NO: 188056 - DNA, 25 bp, Saccharomyces pastorianus
ggttgatgcatcctcgatcgaattt

SEQ ID NO: 188057 - DNA, 25 bp, Saccharomyces pastorianus
attagcagtcatgtgcctgcgaacg

SEQ ID NO: 188058 - DNA, 25 bp, Saccharomyces pastorianus
gttcgacaacttcatcattcggagg

SEQ ID NO: 188059 - DNA, 25 bp, Saccharomyces pastorianus
atggcagtaccaacacaccgcaatt

SEQ ID NO: 188060 - DNA, 25 bp, Saccharomyces pastorianus
gaaaattccatgattccttcccgat

SEQ ID NO: 188061 - DNA, 25 bp, Saccharomyces pastorianus
aattgagtcttaccccatatgcaaa

SEQ ID NO: 188062 - DNA, 25 bp, Saccharomyces pastorianus
agcttccgtgcagcaaagttcgaca

SEQ ID NO: 188063 - DNA, 25 bp, Saccharomyces pastorianus
actggacaggttcattgccgcatac

SEQ ID NO: 188064 - DNA, 25 bp, Saccharomyces pastorianus
ttcttcgcacttatcctctaatgaa

SEQ ID NO: 188065 - DNA, 25 bp, Saccharomyces pastorianus
tcgaggagaacttttagtactttct

SEQ ID NO: 188066 - DNA, 25 bp, Saccharomyces pastorianus
tattattgccttattaaaaatggaa

SEQ ID NO: 188067 - DNA, 25 bp, Saccharomyces pastorianus
ggagaacttttagtactttctacat

SEQ ID NO: 188068 - DNA, 25 bp, Saccharomyces pastorianus
tgccttattaaaaatggaatcccaa

SEQ ID NO: 188069 - DNA, 25 bp, Saccharomyces pastorianus
tattgccttattaaaaatggaatcc

SEQ ID NO: 188070 - DNA, 25 bp, Saccharomyces pastorianus
gagaacttttagtactttctacata

SEQ ID NO: 188071 - DNA, 25 bp, Saccharomyces pastorianus
atattattgccttattaaaaatgga

SEQ ID NO: 188072 - DNA, 25 bp, Saccharomyces pastorianus
ttattgccttattaaaaatggaatc

SEQ ID NO: 188073 - DNA, 25 bp, Saccharomyces pastorianus
attattgccttattaaaaatggaat

SEQ ID NO: 188074 - DNA, 25 bp, Saccharomyces pastorianus
ttgccttattaaaaatggaatccca

SEQ ID NO: 188075 - DNA, 25 bp, Saccharomyces pastorianus
ttttagtactttctacatacctaat

SEQ ID NO: 188076 - DNA, 25 bp, Saccharomyces pastorianus
cagcctgataaggtttttgagctca

SEQ ID NO: 188077 - DNA, 25 bp, Saccharomyces pastorianus
acatgtacgaactctaagggactta

SEQ ID NO: 188078 - DNA, 25 bp, Saccharomyces pastorianus
tattccctaaacgtctgattgtgtg

SEQ ID NO: 188079 - DNA, 25 bp, Saccharomyces pastorianus
caaagtttattgtacctctaatgag

SEQ ID NO: 188080 - DNA, 25 bp, Saccharomyces pastorianus
tatcacaatttgtcctctacctgcc

SEQ ID NO: 188081 - DNA, 25 bp, Saccharomyces pastorianus
tacctgccagccacaacatgtacga

SEQ ID NO: 188082 - DNA, 25 bp, Saccharomyces pastorianus
gaatttctgcgattgatttcgtacc

SEQ ID NO: 188083 - DNA, 25 bp, Saccharomyces pastorianus
tttggtggacacatttcagcctgat

SEQ ID NO: 188084 - DNA, 25 bp, Saccharomyces pastorianus
gatttcgtacctgacaattgacatg

SEQ ID NO: 188085 - DNA, 25 bp, Saccharomyces pastorianus
gtgattggaggatccagtactgcaa

SEQ ID NO: 188086 - DNA, 25 bp, Saccharomyces pastorianus
gtcgaatgaattcactgatccaagt

SEQ ID NO: 188087 - DNA, 25 bp, Saccharomyces pastorianus
gttttgctctcttccgagtctttaa

SEQ ID NO: 188088 - DNA, 25 bp, Saccharomyces pastorianus
tcctgtgacgcggtcttcaatgata

SEQ ID NO: 188089 - DNA, 25 bp, Saccharomyces pastorianus
ttttctcggcaggtttagcactttc

SEQ ID NO: 188090 - DNA, 25 bp, Saccharomyces pastorianus
agacgactttcgatgtcactagcat

SEQ ID NO: 188091 - DNA, 25 bp, Saccharomyces pastorianus
caacatatctcattccaactctggt

SEQ ID NO: 188092 - DNA, 25 bp, Saccharomyces pastorianus
ttcttcatgtttccttttactgtcc

SEQ ID NO: 188093 - DNA, 25 bp, Saccharomyces pastorianus
agatcgtcatcaccggaacttagtt

SEQ ID NO: 188094 - DNA, 25 bp, Saccharomyces pastorianus
tactgtccttcttgttgtttttctt

SEQ ID NO: 188095 - DNA, 25 bp, Saccharomyces pastorianus
tgataataccgccttccagtagctt

SEQ ID NO: 188096 - DNA, 25 bp, Saccharomyces pastorianus
agtctttaactttctctgctttctt

SEQ ID NO: 188097 - DNA, 25 bp, Saccharomyces pastorianus
aactctggtaccctttttggcatgt

SEQ ID NO: 188098 - DNA, 25 bp, Saccharomyces pastorianus
ggtttgggtgttgcggctatttatc

SEQ ID NO: 188099 - DNA, 25 bp, Saccharomyces pastorianus
agcgaaatcactgttgcatgtctca

SEQ ID NO: 188100 - DNA, 25 bp, Saccharomyces pastorianus
cggttccacatatcgctaagctaaa

SEQ ID NO: 188101 - DNA, 25 bp, Saccharomyces pastorianus
tgcgggccagcaacgtttaacgacg

SEQ ID NO: 188102 - DNA, 25 bp, Saccharomyces pastorianus
gtgcgctcggaaataaaactctcag

SEQ ID NO: 188103 - DNA, 25 bp, Saccharomyces pastorianus
gctatttatccgcactttgtcgaat

SEQ ID NO: 188104 - DNA, 25 bp, Saccharomyces pastorianus
gtggtccaaggtatagactcttcct

SEQ ID NO: 188105 - DNA, 25 bp, Saccharomyces pastorianus
tattaccttttattcctgcgggcca

SEQ ID NO: 188106 - DNA, 25 bp, Saccharomyces pastorianus
ggcccatatggtgtaacggttccac

SEQ ID NO: 188107 - DNA, 25 bp, Saccharomyces pastorianus
tttacggttaccatctactgatcaa

SEQ ID NO: 188108 - DNA, 25 bp, Saccharomyces pastorianus
gattgttaatgacctatcccatttg

SEQ ID NO: 188109 - DNA, 25 bp, Saccharomyces pastorianus
cttcttacaccgcatatgataatac

SEQ ID NO: 188110 - DNA, 25 bp, Saccharomyces pastorianus
tcagcttccattatatttgatgact

SEQ ID NO: 188111 - DNA, 25 bp, Saccharomyces pastorianus
cagcttccattatatttgatgactg

SEQ ID NO: 188112 - DNA, 25 bp, Saccharomyces pastorianus
tatatttgatgactgtttctcaatc

SEQ ID NO: 188113 - DNA, 25 bp, Saccharomyces pastorianus
ttatatttgatgactgtttctcaat

SEQ ID NO: 188114 - DNA, 25 bp, Saccharomyces pastorianus
tcttacaccgcatatgataatacat

SEQ ID NO: 188115 - DNA, 25 bp, Saccharomyces pastorianus
tttcagcttccattatatttgatga

SEQ ID NO: 188116 - DNA, 25 bp, Saccharomyces pastorianus
ttcttacaccgcatatgataataca

SEQ ID NO: 188117 - DNA, 25 bp, Saccharomyces pastorianus
tccattatatttgatgactgtttct

SEQ ID NO: 188118 - DNA, 25 bp, Saccharomyces pastorianus
caatctttatgccatcttcttacac

SEQ ID NO: 188119 - DNA, 25 bp, Saccharomyces pastorianus
attatatttgatgactgtttctcaa

SEQ ID NO: 188120 - DNA, 25 bp, Saccharomyces pastorianus
gtagcctgtatcaccagagacttgt

SEQ ID NO: 188121 - DNA, 25 bp, Saccharomyces pastorianus
gtgacgaacatcagtccgaatatgt

SEQ ID NO: 188122 - DNA, 25 bp, Saccharomyces pastorianus
gaagacccaatcacttggcaagaat

SEQ ID NO: 188123 - DNA, 25 bp, Saccharomyces pastorianus
ggatcggccggtgtagcctgtatca

SEQ ID NO: 188124 - DNA, 25 bp, Saccharomyces pastorianus
attgcgagatcaaaggcgcgccttc

SEQ ID NO: 188125 - DNA, 25 bp, Saccharomyces pastorianus
tatattgtgcccagttgtgacgaac

SEQ ID NO: 188126 - DNA, 25 bp, Saccharomyces pastorianus
atttcaacgatgaccatccggatgg

SEQ ID NO: 188127 - DNA, 25 bp, Saccharomyces pastorianus
gagctggttcccgtggaggaaaact

SEQ ID NO: 188128 - DNA, 25 bp, Saccharomyces pastorianus
aaaggcgcgccttcatttcagggtt

SEQ ID NO: 188129 - DNA, 25 bp, Saccharomyces pastorianus
gaaactctacctgaaaggccttgta

SEQ ID NO: 188130 - DNA, 25 bp, Saccharomyces pastorianus
tcatttcagggttttccggatcggc

SEQ ID NO: 188131 - DNA, 25 bp, Saccharomyces pastorianus
aagtcggtagcagctgacaaatctt

SEQ ID NO: 188132 - DNA, 25 bp, Saccharomyces pastorianus
actgcagtcaaagacatcccattga

SEQ ID NO: 188133 - DNA, 25 bp, Saccharomyces pastorianus
tcaccattcatgttactgcagtcaa

SEQ ID NO: 188134 - DNA, 25 bp, Saccharomyces pastorianus
gacgaaagtgctgccatcaacggtt

SEQ ID NO: 188135 - DNA, 25 bp, Saccharomyces pastorianus
ggcacatgagccaacaaaacatttt

SEQ ID NO: 188136 - DNA, 25 bp, Saccharomyces pastorianus
tttacttactgttagcgactttgct

SEQ ID NO: 188137 - DNA, 25 bp, Saccharomyces pastorianus
aatttggacttcaactggcacatga

SEQ ID NO: 188138 - DNA, 25 bp, Saccharomyces pastorianus
atgtcacttctgtgtcctggatcaa

SEQ ID NO: 188139 - DNA, 25 bp, Saccharomyces pastorianus
gacaaatcttattctgacctcgtta

SEQ ID NO: 188140 - DNA, 25 bp, Saccharomyces pastorianus
ccatcaacggttgtcccaatttgga

SEQ ID NO: 188141 - DNA, 25 bp, Saccharomyces pastorianus
agacaacgtttaccaaatcaccatt

SEQ ID NO: 188142 - DNA, 25 bp, Saccharomyces pastorianus
gtcaagaccgtcatttgtatgcaat

SEQ ID NO: 188143 - DNA, 25 bp, Saccharomyces pastorianus
gagtctgcacatcattcacaacatc

SEQ ID NO: 188144 - DNA, 25 bp, Saccharomyces pastorianus
aagcactactagtcatggatcgtat

SEQ ID NO: 188145 - DNA, 25 bp, Saccharomyces pastorianus
gtgaagaatctatatccatcgttgt

SEQ ID NO: 188146 - DNA, 25 bp, Saccharomyces pastorianus
atggttcaaaggcatactaccgtta

SEQ ID NO: 188147 - DNA, 25 bp, Saccharomyces pastorianus
tcgttgtatcttccaaacataggca

SEQ ID NO: 188148 - DNA, 25 bp, Saccharomyces pastorianus
gaatacccagtgatggacctatttc

SEQ ID NO: 188149 - DNA, 25 bp, Saccharomyces pastorianus
atcaggccgaagctctagacttttt

SEQ ID NO: 188150 - DNA, 25 bp, Saccharomyces pastorianus
actaccgttaccaccattatatcat

SEQ ID NO: 188151 - DNA, 25 bp, Saccharomyces pastorianus
tttggccccgtgactgctaatgggt

SEQ ID NO: 188152 - DNA, 25 bp, Saccharomyces pastorianus
agaatgctccatgggattgggtcaa

SEQ ID NO: 188153 - DNA, 25 bp, Saccharomyces pastorianus
gagaccaatttggatcgaaagttaa

SEQ ID NO: 188154 - DNA, 25 bp, Saccharomyces pastorianus
caagagaccaatttggatcgaaagt

SEQ ID NO: 188155 - DNA, 25 bp, Saccharomyces pastorianus
caactgggccaagagaccaatttgg

SEQ ID NO: 188156 - DNA, 25 bp, Saccharomyces pastorianus
ccaactgggccaagagaccaatttg

SEQ ID NO: 188157 - DNA, 25 bp, Saccharomyces pastorianus
ccaatttggatcgaaagttaaccat

SEQ ID NO: 188158 - DNA, 25 bp, Saccharomyces pastorianus
aaccaactgggccaagagaccaatt

SEQ ID NO: 188159 - DNA, 25 bp, Saccharomyces pastorianus
accaactgggccaagagaccaattt

SEQ ID NO: 188160 - DNA, 25 bp, Saccharomyces pastorianus
agagaccaatttggatcgaaagtta

SEQ ID NO: 188161 - DNA, 25 bp, Saccharomyces pastorianus
caatttggatcgaaagttaaccatt

SEQ ID NO: 188162 - DNA, 25 bp, Saccharomyces pastorianus
ccaagagaccaatttggatcgaaag

SEQ ID NO: 188163 - DNA, 25 bp, Saccharomyces pastorianus
aagagaccaatttggatcgaaagtt

SEQ ID NO: 188164 - DNA, 25 bp, Saccharomyces pastorianus
aacgccctttctgccttaaatatag

SEQ ID NO: 188165 - DNA, 25 bp, Saccharomyces pastorianus
aaacctttacttgttgcagctccag

SEQ ID NO: 188166 - DNA, 25 bp, Saccharomyces pastorianus
cttgccggacaatcttacatggaca

SEQ ID NO: 188167 - DNA, 25 bp, Saccharomyces pastorianus
aatcctgctgctttaaatgacgtca

SEQ ID NO: 188168 - DNA, 25 bp, Saccharomyces pastorianus
agtaaatgacttcgatcccaccata

SEQ ID NO: 188169 - DNA, 25 bp, Saccharomyces pastorianus
gactacatgtattccgatccagata

SEQ ID NO: 188170 - DNA, 25 bp, Saccharomyces pastorianus
atgacgtcagcgatggagacctaac

SEQ ID NO: 188171 - DNA, 25 bp, Saccharomyces pastorianus
atcaaattctgctgttccggagaca

SEQ ID NO: 188172 - DNA, 25 bp, Saccharomyces pastorianus
gaaatggagatctagcttgccggac

SEQ ID NO: 188173 - DNA, 25 bp, Saccharomyces pastorianus
gactggcgtttaggattgtccatga

SEQ ID NO: 188174 - DNA, 25 bp, Saccharomyces pastorianus
gcatggtatttttcaggactggcgt

SEQ ID NO: 188175 - DNA, 25 bp, Saccharomyces pastorianus
gatcgtccctgtctttcaattaata

SEQ ID NO: 188176 - DNA, 25 bp, Saccharomyces pastorianus
gctttcaaagcgaccgtattctttt

SEQ ID NO: 188177 - DNA, 25 bp, Saccharomyces pastorianus
ggttgcttttgattgtacgctcatt

SEQ ID NO: 188178 - DNA, 25 bp, Saccharomyces pastorianus
gtgaaaagccttttgagtgcgtaca

SEQ ID NO: 188179 - DNA, 25 bp, Saccharomyces pastorianus
aaacactgacgctttgctaaactcc

SEQ ID NO: 188180 - DNA, 25 bp, Saccharomyces pastorianus
atcggcgaattgtcgttcttaaaag

SEQ ID NO: 188181 - DNA, 25 bp, Saccharomyces pastorianus
tccctgtttgaattgatcgtccctg

SEQ ID NO: 188182 - DNA, 25 bp, Saccharomyces pastorianus
gaggtttacgctcaaaattctaact

SEQ ID NO: 188183 - DNA, 25 bp, Saccharomyces pastorianus
tgctaaactccaccacagaacatat

SEQ ID NO: 188184 - DNA, 25 bp, Saccharomyces pastorianus
tcgaacggcgtttccctgtttgaat

SEQ ID NO: 188185 - DNA, 25 bp, Saccharomyces pastorianus
tattctttttaattcgtgtggccga

SEQ ID NO: 188186 - DNA, 25 bp, Saccharomyces pastorianus
caatgcgtttgggatagcgtagata

SEQ ID NO: 188187 - DNA, 25 bp, Saccharomyces pastorianus
tcgagcaatgcgtttgggatagcgt

SEQ ID NO: 188188 - DNA, 25 bp, Saccharomyces pastorianus
atagatatgcttccaccacggttgt

SEQ ID NO: 188189 - DNA, 25 bp, Saccharomyces pastorianus
gcgtagatagatatgcttccaccac

SEQ ID NO: 188190 - DNA, 25 bp, Saccharomyces pastorianus
acggttgtgccagtgagtacgctaa

SEQ ID NO: 188191 - DNA, 25 bp, Saccharomyces pastorianus
aaggcgatggccaaacaaaagagaa

SEQ ID NO: 188192 - DNA, 25 bp, Saccharomyces pastorianus
ttcccaatgttgtcgagcaatgcgt

SEQ ID NO: 188193 - DNA, 25 bp, Saccharomyces pastorianus
tgcctgtatggcagaaaacttccca

SEQ ID NO: 188194 - DNA, 25 bp, Saccharomyces pastorianus
ggcagaaaacttcccaatgttgtcg

SEQ ID NO: 188195 - DNA, 25 bp, Saccharomyces pastorianus
ttccaccacggttgtgccagtgagt

SEQ ID NO: 188196 - DNA, 25 bp, Saccharomyces pastorianus
gagtacgctaaaggcgatggccaaa

SEQ ID NO: 188197 - DNA, 25 bp, Saccharomyces pastorianus
ggcataagcccaaaccatgctaggc

SEQ ID NO: 188198 - DNA, 25 bp, Saccharomyces pastorianus
gacaataaacctattggttcgggtg

SEQ ID NO: 188199 - DNA, 25 bp, Saccharomyces pastorianus
agcaagatacggatgttgccccttc

SEQ ID NO: 188200 - DNA, 25 bp, Saccharomyces pastorianus
cagtcaccattttcccaacgagaat

SEQ ID NO: 188201 - DNA, 25 bp, Saccharomyces pastorianus
gtccacttgacggataatttcgtat

SEQ ID NO: 188202 - DNA, 25 bp, Saccharomyces pastorianus
aacaatatagtgtccacttgacgga

SEQ ID NO: 188203 - DNA, 25 bp, Saccharomyces pastorianus
gtttataatccatacggcataagcc

SEQ ID NO: 188204 - DNA, 25 bp, Saccharomyces pastorianus
cgaacgattttttgcccgaagatat

SEQ ID NO: 188205 - DNA, 25 bp, Saccharomyces pastorianus
gcatttgcagacactctgaatacga

SEQ ID NO: 188206 - DNA, 25 bp, Saccharomyces pastorianus
cttccaattgctaatccgaacgatt

SEQ ID NO: 188207 - DNA, 25 bp, Saccharomyces pastorianus
gatgttgccccttccaattgctaat

SEQ ID NO: 188208 - DNA, 25 bp, Saccharomyces pastorianus
tcattgtagatgagtttcacaactt

SEQ ID NO: 188209 - DNA, 25 bp, Saccharomyces pastorianus
caggatagctgcgtgggagaatatt

SEQ ID NO: 188210 - DNA, 25 bp, Saccharomyces pastorianus
ttgtagatgagtttcacaactttga

SEQ ID NO: 188211 - DNA, 25 bp, Saccharomyces pastorianus
ctcattgtagatgagtttcacaact

SEQ ID NO: 188212 - DNA, 25 bp, Saccharomyces pastorianus
ggagaatattgttgagtgcaccttt

SEQ ID NO: 188213 - DNA, 25 bp, Saccharomyces pastorianus
attgtagatgagtttcacaactttg

SEQ ID NO: 188214 - DNA, 25 bp, Saccharomyces pastorianus
gatagctgcgtgggagaatattgtt

SEQ ID NO: 188215 - DNA, 25 bp, Saccharomyces pastorianus
tgtagatgagtttcacaactttgaa

SEQ ID NO: 188216 - DNA, 25 bp, Saccharomyces pastorianus
tgcacctttaggaccaacaacgtaa

SEQ ID NO: 188217 - DNA, 25 bp, Saccharomyces pastorianus
cattgtagatgagtttcacaacttt

SEQ ID NO: 188218 - DNA, 25 bp, Saccharomyces pastorianus
cctcattgtagatgagtttcacaac

SEQ ID NO: 188219 - DNA, 25 bp, Saccharomyces pastorianus
tccctggcacagtactacgacatga

SEQ ID NO: 188220 - DNA, 25 bp, Saccharomyces pastorianus
attttttcgaaacgcagttccgctg

SEQ ID NO: 188221 - DNA, 25 bp, Saccharomyces pastorianus
agaaggtttccatcacgctgtcaga

SEQ ID NO: 188222 - DNA, 25 bp, Saccharomyces pastorianus
agccaaagccattctgttttcctag

SEQ ID NO: 188223 - DNA, 25 bp, Saccharomyces pastorianus
gaagagatcctactgcgcagccaaa

SEQ ID NO: 188224 - DNA, 25 bp, Saccharomyces pastorianus
agttggcctccatgctactgaacgt

SEQ ID NO: 188225 - DNA, 25 bp, Saccharomyces pastorianus
aagccattgctgtccgcggtgtgtc

SEQ ID NO: 188226 - DNA, 25 bp, Saccharomyces pastorianus
gggcaggatcgtgtccatcaacaag

SEQ ID NO: 188227 - DNA, 25 bp, Saccharomyces pastorianus
ggagaagatcatcgcccacaaggac

SEQ ID NO: 188228 - DNA, 25 bp, Saccharomyces pastorianus
gacaagttcctcgtggtgagcgttt

SEQ ID NO: 188229 - DNA, 25 bp, Saccharomyces pastorianus
tgaacgtcaagtcgccacagcaaga

SEQ ID NO: 188230 - DNA, 25 bp, Saccharomyces pastorianus
tgctcaggcaagttttaaaaatcgc

SEQ ID NO: 188231 - DNA, 25 bp, Saccharomyces pastorianus
caggcaagttttaaaaatcgcgaag

SEQ ID NO: 188232 - DNA, 25 bp, Saccharomyces pastorianus
atgacatagaaaacccacggacttt

SEQ ID NO: 188233 - DNA, 25 bp, Saccharomyces pastorianus
cacggactttcaatgctcaggcaag

SEQ ID NO: 188234 - DNA, 25 bp, Saccharomyces pastorianus
gaaaacccacggactttcaatgctc

SEQ ID NO: 188235 - DNA, 25 bp, Saccharomyces pastorianus
gactttcaatgctcaggcaagtttt

SEQ ID NO: 188236 - DNA, 25 bp, Saccharomyces pastorianus
aaacccacggactttcaatgctcag

SEQ ID NO: 188237 - DNA, 25 bp, Saccharomyces pastorianus
gtctatgacatagaaaacccacgga

SEQ ID NO: 188238 - DNA, 25 bp, Saccharomyces pastorianus
aacccacggactttcaatgctcagg

SEQ ID NO: 188239 - DNA, 25 bp, Saccharomyces pastorianus
ccacggactttcaatgctcaggcaa

SEQ ID NO: 188240 - DNA, 25 bp, Saccharomyces pastorianus
cggactttcaatgctcaggcaagtt

SEQ ID NO: 188241 - DNA, 25 bp, Saccharomyces pastorianus
tagcatctactattaccctcggtga

SEQ ID NO: 188242 - DNA, 25 bp, Saccharomyces pastorianus
cactctgcggtctcgttatcagata

SEQ ID NO: 188243 - DNA, 25 bp, Saccharomyces pastorianus
agaagagcctctacattcgtccatt

SEQ ID NO: 188244 - DNA, 25 bp, Saccharomyces pastorianus
gcaggcagtctgcagcacgacccaa

SEQ ID NO: 188245 - DNA, 25 bp, Saccharomyces pastorianus
agcacgacccaagcgtactggcaag

SEQ ID NO: 188246 - DNA, 25 bp, Saccharomyces pastorianus
ttaccctcggtgaagacaccgtact

SEQ ID NO: 188247 - DNA, 25 bp, Saccharomyces pastorianus
aagcgtactggcaagcccattcggc

SEQ ID NO: 188248 - DNA, 25 bp, Saccharomyces pastorianus
gttaaacaccatggccaatgacgac

SEQ ID NO: 188249 - DNA, 25 bp, Saccharomyces pastorianus
ccactccgaggcaccatgataaggt

SEQ ID NO: 188250 - DNA, 25 bp, Saccharomyces pastorianus
ggaccccagcaagatgttaaacacc

SEQ ID NO: 188251 - DNA, 25 bp, Saccharomyces pastorianus
tggtggaccagagactggaccccag

SEQ ID NO: 188252 - DNA, 25 bp, Saccharomyces pastorianus
aaggagttctccttaaggacatacg

SEQ ID NO: 188253 - DNA, 25 bp, Saccharomyces pastorianus
gccattgctgttagagatcatagta

SEQ ID NO: 188254 - DNA, 25 bp, Saccharomyces pastorianus
tttgggatgccattgctgttagaga

SEQ ID NO: 188255 - DNA, 25 bp, Saccharomyces pastorianus
ggacatacgaatccacaaaagggta

SEQ ID NO: 188256 - DNA, 25 bp, Saccharomyces pastorianus
gaggtaatttttgggatgccattgc

SEQ ID NO: 188257 - DNA, 25 bp, Saccharomyces pastorianus
ggagttctccttaaggacatacgaa

SEQ ID NO: 188258 - DNA, 25 bp, Saccharomyces pastorianus
ggtgcacaaaatgaacaaggagttc

SEQ ID NO: 188259 - DNA, 25 bp, Saccharomyces pastorianus
aatttttgggatgccattgctgtta

SEQ ID NO: 188260 - DNA, 25 bp, Saccharomyces pastorianus
ttctccttaaggacatacgaatcca

SEQ ID NO: 188261 - DNA, 25 bp, Saccharomyces pastorianus
ggatgccattgctgttagagatcat

SEQ ID NO: 188262 - DNA, 25 bp, Saccharomyces pastorianus
gagatcatagtattaggtgcacaaa

SEQ ID NO: 188263 - DNA, 25 bp, Saccharomyces pastorianus
ggcccgatttccacgaactgataaa

SEQ ID NO: 188264 - DNA, 25 bp, Saccharomyces pastorianus
tggtcgacgacgtaagaaacaccgt

SEQ ID NO: 188265 - DNA, 25 bp, Saccharomyces pastorianus
aaacagtcatcgaccaccctggaag

SEQ ID NO: 188266 - DNA, 25 bp, Saccharomyces pastorianus
acatcaggcacacaaggcccgattt

SEQ ID NO: 188267 - DNA, 25 bp, Saccharomyces pastorianus
gacaagttttgtacacatcaggcac

SEQ ID NO: 188268 - DNA, 25 bp, Saccharomyces pastorianus
gcccgccttggtcgacgacgtaaga

SEQ ID NO: 188269 - DNA, 25 bp, Saccharomyces pastorianus
agtcatcgaccaccctggaaggatt

SEQ ID NO: 188270 - DNA, 25 bp, Saccharomyces pastorianus
atgaagaatgggagtccagcggact

SEQ ID NO: 188271 - DNA, 25 bp, Saccharomyces pastorianus
tccacgaactgataaacgagtcaat

SEQ ID NO: 188272 - DNA, 25 bp, Saccharomyces pastorianus
agcggactccgtagcaatcgtatgc

SEQ ID NO: 188273 - DNA, 25 bp, Saccharomyces pastorianus
gtagcaatcgtatgctgcggcccgc

SEQ ID NO: 188274 - DNA, 25 bp, Saccharomyces pastorianus
accacactttctcctaagtctgtat

SEQ ID NO: 188275 - DNA, 25 bp, Saccharomyces pastorianus
atgggatcgtctagttttgctcttt

SEQ ID NO: 188276 - DNA, 25 bp, Saccharomyces pastorianus
ctttctcctaagtctgtatcaccaa

SEQ ID NO: 188277 - DNA, 25 bp, Saccharomyces pastorianus
gttttgctctttcgtataagtcagg

SEQ ID NO: 188278 - DNA, 25 bp, Saccharomyces pastorianus
cgtctagttttgctctttcgtataa

SEQ ID NO: 188279 - DNA, 25 bp, Saccharomyces pastorianus
aagtctgtatcaccaatatccgtcg

SEQ ID NO: 188280 - DNA, 25 bp, Saccharomyces pastorianus
aagagtggtgttacgtcaacagcaa

SEQ ID NO: 188281 - DNA, 25 bp, Saccharomyces pastorianus
agcaaatttagacttaccgtccatt

SEQ ID NO: 188282 - DNA, 25 bp, Saccharomyces pastorianus
ataagtcaggaagtagcaccaccac

SEQ ID NO: 188283 - DNA, 25 bp, Saccharomyces pastorianus
gtatcaccaatatccgtcgtcgaaa

SEQ ID NO: 188284 - DNA, 25 bp, Saccharomyces pastorianus
aggaagtagcaccaccacactttct

SEQ ID NO: 188285 - DNA, 25 bp, Saccharomyces pastorianus
actccacacatcaagccttacggta

SEQ ID NO: 188286 - DNA, 25 bp, Saccharomyces pastorianus
agccttacggtaatctttctcttga

SEQ ID NO: 188287 - DNA, 25 bp, Saccharomyces pastorianus
tccatcagaacactcgctactggtg

SEQ ID NO: 188288 - DNA, 25 bp, Saccharomyces pastorianus
agtgttcggccagacattcaccgat

SEQ ID NO: 188289 - DNA, 25 bp, Saccharomyces pastorianus
gaagaattagtgttcggccagacat

SEQ ID NO: 188290 - DNA, 25 bp, Saccharomyces pastorianus
acccatctgcttgtgtattccatta

SEQ ID NO: 188291 - DNA, 25 bp, Saccharomyces pastorianus
gtaatctttctcttgacccatctgc

SEQ ID NO: 188292 - DNA, 25 bp, Saccharomyces pastorianus
attcaccgatcatatgttgaccatt

SEQ ID NO: 188293 - DNA, 25 bp, Saccharomyces pastorianus
gttgcagagacattccttgaagttg

SEQ ID NO: 188294 - DNA, 25 bp, Saccharomyces pastorianus
gttgaccattccttggtcagccaaa

SEQ ID NO: 188295 - DNA, 25 bp, Saccharomyces pastorianus
tggtgccccattagatgcatccaaa

SEQ ID NO: 188296 - DNA, 25 bp, Saccharomyces pastorianus
aagacaccgagactcgcgctatgat

SEQ ID NO: 188297 - DNA, 25 bp, Saccharomyces pastorianus
accaccatcttgttcgatctgaacg

SEQ ID NO: 188298 - DNA, 25 bp, Saccharomyces pastorianus
ttgactgtcactgcccaatggattg

SEQ ID NO: 188299 - DNA, 25 bp, Saccharomyces pastorianus
attgcacaagtttatccaaccccaa

SEQ ID NO: 188300 - DNA, 25 bp, Saccharomyces pastorianus
atctttgggccatctacttatccat

SEQ ID NO: 188301 - DNA, 25 bp, Saccharomyces pastorianus
gtcgcgtccaagattgttttcacta

SEQ ID NO: 188302 - DNA, 25 bp, Saccharomyces pastorianus
tttccaccgctctttgtgaaaacta

SEQ ID NO: 188303 - DNA, 25 bp, Saccharomyces pastorianus
atacatccctaggtatctgggcgga

SEQ ID NO: 188304 - DNA, 25 bp, Saccharomyces pastorianus
tgaacaccagccattgaacgatcca

SEQ ID NO: 188305 - DNA, 25 bp, Saccharomyces pastorianus
atggctctttggacgtccatctgaa

SEQ ID NO: 188306 - DNA, 25 bp, Saccharomyces pastorianus
ttgttttgaggctcactacccggaa

SEQ ID NO: 188307 - DNA, 25 bp, Saccharomyces pastorianus
acacattaggcgaatgcttcacaag

SEQ ID NO: 188308 - DNA, 25 bp, Saccharomyces pastorianus
gatctgtgacaatttcctcattagg

SEQ ID NO: 188309 - DNA, 25 bp, Saccharomyces pastorianus
tgaaaaggaatcctctacttccagt

SEQ ID NO: 188310 - DNA, 25 bp, Saccharomyces pastorianus
gaactacctgagttgacaaaaacta

SEQ ID NO: 188311 - DNA, 25 bp, Saccharomyces pastorianus
attaggcgaatgcttcacaagtgga

SEQ ID NO: 188312 - DNA, 25 bp, Saccharomyces pastorianus
gtcgtaatgacacctattatcactg

SEQ ID NO: 188313 - DNA, 25 bp, Saccharomyces pastorianus
gagctctttcggtgtcgtaatgaca

SEQ ID NO: 188314 - DNA, 25 bp, Saccharomyces pastorianus
agagctccgatgatgaactacctga

SEQ ID NO: 188315 - DNA, 25 bp, Saccharomyces pastorianus
aagtgtttgaaattgttcatcagaa

SEQ ID NO: 188316 - DNA, 25 bp, Saccharomyces pastorianus
tcctcattaggaagagacaatactc

SEQ ID NO: 188317 - DNA, 25 bp, Saccharomyces pastorianus
atacaaacctgagagctccgatgat

SEQ ID NO: 188318 - DNA, 25 bp, Saccharomyces pastorianus
atgcttctgtctatccggtggtgga

SEQ ID NO: 188319 - DNA, 25 bp, Saccharomyces pastorianus
taaaagctggtgttcgtagtgcgaa

SEQ ID NO: 188320 - DNA, 25 bp, Saccharomyces pastorianus
gtagtcttgagtcgcactggtccag

SEQ ID NO: 188321 - DNA, 25 bp, Saccharomyces pastorianus
attgcactctaggatattgcctaaa

SEQ ID NO: 188322 - DNA, 25 bp, Saccharomyces pastorianus
actacacgattccatattgcactct

SEQ ID NO: 188323 - DNA, 25 bp, Saccharomyces pastorianus
actggtccagtcttcgatttgtgtt

SEQ ID NO: 188324 - DNA, 25 bp, Saccharomyces pastorianus
gcaaattatgcttctgtctatccgg

SEQ ID NO: 188325 - DNA, 25 bp, Saccharomyces pastorianus
agtcataacttctattacgggtgga

SEQ ID NO: 188326 - DNA, 25 bp, Saccharomyces pastorianus
tagtgcgaatgaagacggtacgttt

SEQ ID NO: 188327 - DNA, 25 bp, Saccharomyces pastorianus
gatgagcgtgcgtccgatttaagaa

SEQ ID NO: 188328 - DNA, 25 bp, Saccharomyces pastorianus
ttttccgtcttgtatcccgatgaat

SEQ ID NO: 188329 - DNA, 25 bp, Saccharomyces pastorianus
tatcatgatatccaaggctgccaga

SEQ ID NO: 188330 - DNA, 25 bp, Saccharomyces pastorianus
gaaacagcgacaaagccaatgctat

SEQ ID NO: 188331 - DNA, 25 bp, Saccharomyces pastorianus
gatcagcgacccgatttcaaaaatg

SEQ ID NO: 188332 - DNA, 25 bp, Saccharomyces pastorianus
ataggtgtggcaattcttccccata

SEQ ID NO: 188333 - DNA, 25 bp, Saccharomyces pastorianus
caatagcaaatagcatggtctcctt

SEQ ID NO: 188334 - DNA, 25 bp, Saccharomyces pastorianus
taaagcagagatcagcgacccgatt

SEQ ID NO: 188335 - DNA, 25 bp, Saccharomyces pastorianus
agcatggtctccttgaatccgatag

SEQ ID NO: 188336 - DNA, 25 bp, Saccharomyces pastorianus
gagcgtttggtaagctatacccggt

SEQ ID NO: 188337 - DNA, 25 bp, Saccharomyces pastorianus
gtttagctacttcttcaatgattgt

SEQ ID NO: 188338 - DNA, 25 bp, Saccharomyces pastorianus
agagtacgatccaaactgtttagct

SEQ ID NO: 188339 - DNA, 25 bp, Saccharomyces pastorianus
aaataaccacccgatctcagagtac

SEQ ID NO: 188340 - DNA, 25 bp, Saccharomyces pastorianus
gtcaatatcacagaaaaatcacctc

SEQ ID NO: 188341 - DNA, 25 bp, Saccharomyces pastorianus
aatatcacagaaaaatcacctccaa

SEQ ID NO: 188342 - DNA, 25 bp, Saccharomyces pastorianus
caatatcacagaaaaatcacctcca

SEQ ID NO: 188343 - DNA, 25 bp, Saccharomyces pastorianus
cagaaaaatcacctccaaaatcacc

SEQ ID NO: 188344 - DNA, 25 bp, Saccharomyces pastorianus
tgctcttaatatatgcgttatacca

SEQ ID NO: 188345 - DNA, 25 bp, Saccharomyces pastorianus
tatcacagaaaaatcacctccaaaa

SEQ ID NO: 188346 - DNA, 25 bp, Saccharomyces pastorianus
cacagaaaaatcacctccaaaatca

SEQ ID NO: 188347 - DNA, 25 bp, Saccharomyces pastorianus
atatcacagaaaaatcacctccaaa

SEQ ID NO: 188348 - DNA, 25 bp, Saccharomyces pastorianus
tcaatatcacagaaaaatcacctcc

SEQ ID NO: 188349 - DNA, 25 bp, Saccharomyces pastorianus
atcacagaaaaatcacctccaaaat

SEQ ID NO: 188350 - DNA, 25 bp, Saccharomyces pastorianus
tcacagaaaaatcacctccaaaatc

SEQ ID NO: 188351 - DNA, 25 bp, Saccharomyces pastorianus
ttcatcgcaatgacaaaccccgtga

SEQ ID NO: 188352 - DNA, 25 bp, Saccharomyces pastorianus
gatgtggatagctcggcaagcgcca

SEQ ID NO: 188353 - DNA, 25 bp, Saccharomyces pastorianus
ttgtacgcgccaaccacagatgaaa

SEQ ID NO: 188354 - DNA, 25 bp, Saccharomyces pastorianus
ttaccgaagcgcgaggaccgacaac

SEQ ID NO: 188355 - DNA, 25 bp, Saccharomyces pastorianus
aaaccccgtgaatccttcagtggat

SEQ ID NO: 188356 - DNA, 25 bp, Saccharomyces pastorianus
aaccgattcctttctgcatacagtt

SEQ ID NO: 188357 - DNA, 25 bp, Saccharomyces pastorianus
aagattcgggactcgagcgattcga

SEQ ID NO: 188358 - DNA, 25 bp, Saccharomyces pastorianus
agacctcaaggccagttaccgaagc

SEQ ID NO: 188359 - DNA, 25 bp, Saccharomyces pastorianus
agcccctgtcctagttgaaaacgag

SEQ ID NO: 188360 - DNA, 25 bp, Saccharomyces pastorianus
gtggattttctcaaggttcattcga

SEQ ID NO: 188361 - DNA, 25 bp, Saccharomyces pastorianus
tgaactcaatgctgctcaaggcgac

SEQ ID NO: 188362 - DNA, 25 bp, Saccharomyces pastorianus
ctgagctactgaagctatctgttat

SEQ ID NO: 188363 - DNA, 25 bp, Saccharomyces pastorianus
tgagctactgaagctatctgttatt

SEQ ID NO: 188364 - DNA, 25 bp, Saccharomyces pastorianus
gagctactgaagctatctgttattg

SEQ ID NO: 188365 - DNA, 25 bp, Saccharomyces pastorianus
gctactgaagctatctgttattgaa

SEQ ID NO: 188366 - DNA, 25 bp, Saccharomyces pastorianus
ctactgaagctatctgttattgaag

SEQ ID NO: 188367 - DNA, 25 bp, Saccharomyces pastorianus
agctactgaagctatctgttattga

SEQ ID NO: 188368 - DNA, 25 bp, Saccharomyces pastorianus
tactgaagctatctgttattgaaga

SEQ ID NO: 188369 - DNA, 25 bp, Saccharomyces pastorianus
actgaagctatctgttattgaagat

SEQ ID NO: 188370 - DNA, 25 bp, Saccharomyces pastorianus
tcagcttccattagggttgataact

SEQ ID NO: 188371 - DNA, 25 bp, Saccharomyces pastorianus
tttcattatgctattacattatcaa

SEQ ID NO: 188372 - DNA, 25 bp, Saccharomyces pastorianus
tgctattacattatcaatcttgcat

SEQ ID NO: 188373 - DNA, 25 bp, Saccharomyces pastorianus
tatatgtttcattatgctattacat

SEQ ID NO: 188374 - DNA, 25 bp, Saccharomyces pastorianus
ttcattatgctattacattatcaat

SEQ ID NO: 188375 - DNA, 25 bp, Saccharomyces pastorianus
ttcagcttccattagggttgataac

SEQ ID NO: 188376 - DNA, 25 bp, Saccharomyces pastorianus
gttttatatgtttcattatgctatt

SEQ ID NO: 188377 - DNA, 25 bp, Saccharomyces pastorianus
cgttttatatgtttcattatgctat

SEQ ID NO: 188378 - DNA, 25 bp, Saccharomyces pastorianus
gtttcattatgctattacattatca

SEQ ID NO: 188379 - DNA, 25 bp, Saccharomyces pastorianus
ttatatgtttcattatgctattaca

SEQ ID NO: 188380 - DNA, 25 bp, Saccharomyces pastorianus
tttatatgtttcattatgctattac

SEQ ID NO: 188381 - DNA, 25 bp, Saccharomyces pastorianus
gagaacgttacgaaggccatcacca

SEQ ID NO: 188382 - DNA, 25 bp, Saccharomyces pastorianus
ttcattttctgtcttcgcccaaaga

SEQ ID NO: 188383 - DNA, 25 bp, Saccharomyces pastorianus
aagcagtgcctctagcggcttggat

SEQ ID NO: 188384 - DNA, 25 bp, Saccharomyces pastorianus
ggagagatggccacttttatcccgg

SEQ ID NO: 188385 - DNA, 25 bp, Saccharomyces pastorianus
ttggatcgtgatcttttggtgcctg

SEQ ID NO: 188386 - DNA, 25 bp, Saccharomyces pastorianus
ccctgttggtgccttgatatcgtat

SEQ ID NO: 188387 - DNA, 25 bp, Saccharomyces pastorianus
gtgtttcaccttcgcactggaacta

SEQ ID NO: 188388 - DNA, 25 bp, Saccharomyces pastorianus
attgggacgggcctcataattggta

SEQ ID NO: 188389 - DNA, 25 bp, Saccharomyces pastorianus
aattggtattggtccgccattggca

SEQ ID NO: 188390 - DNA, 25 bp, Saccharomyces pastorianus
ttatcccggttacatcttcattttc

SEQ ID NO: 188391 - DNA, 25 bp, Saccharomyces pastorianus
atttactccgttacacaatcgttag

SEQ ID NO: 188392 - DNA, 25 bp, Saccharomyces pastorianus
taggccactagagctttgtccaata

SEQ ID NO: 188393 - DNA, 25 bp, Saccharomyces pastorianus
tttcatggcatgactaggccactag

SEQ ID NO: 188394 - DNA, 25 bp, Saccharomyces pastorianus
actaggccactagagctttgtccaa

SEQ ID NO: 188395 - DNA, 25 bp, Saccharomyces pastorianus
agagctttgtccaataatcgaagaa

SEQ ID NO: 188396 - DNA, 25 bp, Saccharomyces pastorianus
agctgtttaataggttttcatggca

SEQ ID NO: 188397 - DNA, 25 bp, Saccharomyces pastorianus
gcatgactaggccactagagctttg

SEQ ID NO: 188398 - DNA, 25 bp, Saccharomyces pastorianus
gtttaataggttttcatggcatgac

SEQ ID NO: 188399 - DNA, 25 bp, Saccharomyces pastorianus
atggcatgactaggccactagagct

SEQ ID NO: 188400 - DNA, 25 bp, Saccharomyces pastorianus
ggccactagagctttgtccaataat

SEQ ID NO: 188401 - DNA, 25 bp, Saccharomyces pastorianus
actagagctttgtccaataatcgaa

SEQ ID NO: 188402 - DNA, 25 bp, Saccharomyces pastorianus
ggttttcatggcatgactaggccac

SEQ ID NO: 188403 - DNA, 25 bp, Saccharomyces pastorianus
ggcggagccaaaagcattgatgatt

SEQ ID NO: 188404 - DNA, 25 bp, Saccharomyces pastorianus
gaatggaccaagaattacgacgact

SEQ ID NO: 188405 - DNA, 25 bp, Saccharomyces pastorianus
tcgatttgacgtttggtagttcctt

SEQ ID NO: 188406 - DNA, 25 bp, Saccharomyces pastorianus
ggcgttggattgtcgcgatgaacaa

SEQ ID NO: 188407 - DNA, 25 bp, Saccharomyces pastorianus
taagccacggtaaagtcgatttgac

SEQ ID NO: 188408 - DNA, 25 bp, Saccharomyces pastorianus
cacgccgccgatgttgaaggtttgt

SEQ ID NO: 188409 - DNA, 25 bp, Saccharomyces pastorianus
aatgagtttctgattcacgccgccg

SEQ ID NO: 188410 - DNA, 25 bp, Saccharomyces pastorianus
aaaattgtttatgccggcggagcca

SEQ ID NO: 188411 - DNA, 25 bp, Saccharomyces pastorianus
actgacctcgagcttaacgcggaaa

SEQ ID NO: 188412 - DNA, 25 bp, Saccharomyces pastorianus
gcaaagaccgtattgttgtagattt

SEQ ID NO: 188413 - DNA, 25 bp, Saccharomyces pastorianus
aagtggcagaccttgactgacctcg

SEQ ID NO: 188414 - DNA, 25 bp, Saccharomyces pastorianus
gtgccaatccaggtgaatggagtat

SEQ ID NO: 188415 - DNA, 25 bp, Saccharomyces pastorianus
tcgtgtagtaggtgccaatccaggt

SEQ ID NO: 188416 - DNA, 25 bp, Saccharomyces pastorianus
cggtcgtgtagtaggtgccaatcca

SEQ ID NO: 188417 - DNA, 25 bp, Saccharomyces pastorianus
acgtgtgtgctggatggtgtatttt

SEQ ID NO: 188418 - DNA, 25 bp, Saccharomyces pastorianus
gagtattgatgtcgacaataggaca

SEQ ID NO: 188419 - DNA, 25 bp, Saccharomyces pastorianus
gtagtaggtgccaatccaggtgaat

SEQ ID NO: 188420 - DNA, 25 bp, Saccharomyces pastorianus
aaaatatatcacagacttttggaac

SEQ ID NO: 188421 - DNA, 25 bp, Saccharomyces pastorianus
gtgtgctggatggtgtattttgaaa

SEQ ID NO: 188422 - DNA, 25 bp, Saccharomyces pastorianus
tggtggttgctattcgtgggacgtg

SEQ ID NO: 188423 - DNA, 25 bp, Saccharomyces pastorianus
ggaacaattaataacgaaagtgacg

SEQ ID NO: 188424 - DNA, 25 bp, Saccharomyces pastorianus
ggtgaatggagtattgatgtcgaca

SEQ ID NO: 188425 - DNA, 25 bp, Saccharomyces pastorianus
gtacaagtacaacaacaacaagtac

SEQ ID NO: 188426 - DNA, 25 bp, Saccharomyces pastorianus
caacaacaacaagtacaagtacaac

SEQ ID NO: 188427 - DNA, 25 bp, Saccharomyces pastorianus
agtacaagtacaacaacaacaagta

SEQ ID NO: 188428 - DNA, 25 bp, Saccharomyces pastorianus
aacaagtacaacaacaacaagtaca

SEQ ID NO: 188429 - DNA, 25 bp, Saccharomyces pastorianus
agtacaacaacaacaagtacaacaa

SEQ ID NO: 188430 - DNA, 25 bp, Saccharomyces pastorianus
acaacaacaacaagtacaagtacaa

SEQ ID NO: 188431 - DNA, 25 bp, Saccharomyces pastorianus
acaagtacaacaacaacaagtacaa

SEQ ID NO: 188432 - DNA, 25 bp, Saccharomyces pastorianus
acaagtacaacaacaacaagcacaa

SEQ ID NO: 188433 - DNA, 25 bp, Saccharomyces pastorianus
aagtacaagtacaacaacaacaagt

SEQ ID NO: 188434 - DNA, 25 bp, Saccharomyces pastorianus
aacaagcacaacaacaacaagcaca

SEQ ID NO: 188435 - DNA, 25 bp, Saccharomyces pastorianus
tacaagtacaacaacaacaagtaca

SEQ ID NO: 188436 - DNA, 25 bp, Saccharomyces pastorianus
gggattccattgtttcttaatgtta

SEQ ID NO: 188437 - DNA, 25 bp, Saccharomyces pastorianus
tatgatgatctttgggattccattg

SEQ ID NO: 188438 - DNA, 25 bp, Saccharomyces pastorianus
tattatactagagattctcctcatg

SEQ ID NO: 188439 - DNA, 25 bp, Saccharomyces pastorianus
catttaaattgtatgatgatctttg

SEQ ID NO: 188440 - DNA, 25 bp, Saccharomyces pastorianus
atatattatactagagattctcctc

SEQ ID NO: 188441 - DNA, 25 bp, Saccharomyces pastorianus
atatatattatactagagattctcc

SEQ ID NO: 188442 - DNA, 25 bp, Saccharomyces pastorianus
atattatactagagattctcctcat

SEQ ID NO: 188443 - DNA, 25 bp, Saccharomyces pastorianus
atgatgatctttgggattccattgt

SEQ ID NO: 188444 - DNA, 25 bp, Saccharomyces pastorianus
tatattatactagagattctcctca

SEQ ID NO: 188445 - DNA, 25 bp, Saccharomyces pastorianus
taaattgtatgatgatctttgggat

SEQ ID NO: 188446 - DNA, 25 bp, Saccharomyces pastorianus
tatatattatactagagattctcct

SEQ ID NO: 188447 - DNA, 25 bp, Saccharomyces pastorianus
accggtgtcccatggtactccagca

SEQ ID NO: 188448 - DNA, 25 bp, Saccharomyces pastorianus
atcaccggtgtcccatggtactcca

SEQ ID NO: 188449 - DNA, 25 bp, Saccharomyces pastorianus
cagattaaagccagccatctctagt

SEQ ID NO: 188450 - DNA, 25 bp, Saccharomyces pastorianus
aaagccagccatctctagtgctcta

SEQ ID NO: 188451 - DNA, 25 bp, Saccharomyces pastorianus
tgatcaccggtgtcccatggtactc

SEQ ID NO: 188452 - DNA, 25 bp, Saccharomyces pastorianus
tcccatggtactccagcagattaaa

SEQ ID NO: 188453 - DNA, 25 bp, Saccharomyces pastorianus
gatcaccggtgtcccatggtactcc

SEQ ID NO: 188454 - DNA, 25 bp, Saccharomyces pastorianus
tcaccggtgtcccatggtactccag

SEQ ID NO: 188455 - DNA, 25 bp, Saccharomyces pastorianus
cccatggtactccagcagattaaag

SEQ ID NO: 188456 - DNA, 25 bp, Saccharomyces pastorianus
atgatcaccggtgtcccatggtact

SEQ ID NO: 188457 - DNA, 25 bp, Saccharomyces pastorianus
caccggtgtcccatggtactccagc

SEQ ID NO: 188458 - DNA, 25 bp, Saccharomyces pastorianus
ttgattgcgttctcgttgtgtctaa

SEQ ID NO: 188459 - DNA, 25 bp, Saccharomyces pastorianus
tgttctgtgcccctttgattgcgtt

SEQ ID NO: 188460 - DNA, 25 bp, Saccharomyces pastorianus
gacaccaaggacaatgacccaattc

SEQ ID NO: 188461 - DNA, 25 bp, Saccharomyces pastorianus
tattgttgcgttggtgttctgtgcc

SEQ ID NO: 188462 - DNA, 25 bp, Saccharomyces pastorianus
atacagtcgctgtcgaaaacatcga

SEQ ID NO: 188463 - DNA, 25 bp, Saccharomyces pastorianus
gattggaaactattgttgcgttggt

SEQ ID NO: 188464 - DNA, 25 bp, Saccharomyces pastorianus
gttctcgttgtgtctaagagatcct

SEQ ID NO: 188465 - DNA, 25 bp, Saccharomyces pastorianus
aaattaaccgatacagtcgctgtcg

SEQ ID NO: 188466 - DNA, 25 bp, Saccharomyces pastorianus
gtgaatacgtcgacaccaaggacaa

SEQ ID NO: 188467 - DNA, 25 bp, Saccharomyces pastorianus
atgacccaattcttgactggtttaa

SEQ ID NO: 188468 - DNA, 25 bp, Saccharomyces pastorianus
gtctaagagatcctaaattaaccga

SEQ ID NO: 188469 - DNA, 25 bp, Saccharomyces pastorianus
gtgtactagtcacatacccgaggtt

SEQ ID NO: 188470 - DNA, 25 bp, Saccharomyces pastorianus
gatacttgtccgatactgtggcttc

SEQ ID NO: 188471 - DNA, 25 bp, Saccharomyces pastorianus
atttatcctgataatcctcgcgtta

SEQ ID NO: 188472 - DNA, 25 bp, Saccharomyces pastorianus
ttaatcagtcaaaccgaagcgccct

SEQ ID NO: 188473 - DNA, 25 bp, Saccharomyces pastorianus
aatatgggcgcagctatggaatact

SEQ ID NO: 188474 - DNA, 25 bp, Saccharomyces pastorianus
atgtacacggcattgtgcagccgat

SEQ ID NO: 188475 - DNA, 25 bp, Saccharomyces pastorianus
attacaactgttttccccaatatgg

SEQ ID NO: 188476 - DNA, 25 bp, Saccharomyces pastorianus
aatcatttggccagttgcttgaccg

SEQ ID NO: 188477 - DNA, 25 bp, Saccharomyces pastorianus
tgcttgaccggttcaatcacgaggt

SEQ ID NO: 188478 - DNA, 25 bp, Saccharomyces pastorianus
gaagcgcccttttgcacggagttga

SEQ ID NO: 188479 - DNA, 25 bp, Saccharomyces pastorianus
atttatcgattcagcattgccttct

SEQ ID NO: 188480 - DNA, 25 bp, Saccharomyces pastorianus
tcaaaggcactatcctttttccctt

SEQ ID NO: 188481 - DNA, 25 bp, Saccharomyces pastorianus
gggctgaattggtggtgaactctaa

SEQ ID NO: 188482 - DNA, 25 bp, Saccharomyces pastorianus
cagaatctcctaactgggctgaatt

SEQ ID NO: 188483 - DNA, 25 bp, Saccharomyces pastorianus
tcagtagcgttcatctcattaatca

SEQ ID NO: 188484 - DNA, 25 bp, Saccharomyces pastorianus
tctcgttatcttcgtcagaatctcc

SEQ ID NO: 188485 - DNA, 25 bp, Saccharomyces pastorianus
tcagtattgaaaacctcctgttggt

SEQ ID NO: 188486 - DNA, 25 bp, Saccharomyces pastorianus
aaagtcatgcttttttcctcgctgt

SEQ ID NO: 188487 - DNA, 25 bp, Saccharomyces pastorianus
gtgaactctaagtggtctagctcaa

SEQ ID NO: 188488 - DNA, 25 bp, Saccharomyces pastorianus
gtggtctagctcaaaggcactatcc

SEQ ID NO: 188489 - DNA, 25 bp, Saccharomyces pastorianus
tcatcagtagcgttcatctcattaa

SEQ ID NO: 188490 - DNA, 25 bp, Saccharomyces pastorianus
tttcctcgctgttagcttcatttgc

SEQ ID NO: 188491 - DNA, 25 bp, Saccharomyces pastorianus
atgaacgcgtgcatgcaactcgtcc

SEQ ID NO: 188492 - DNA, 25 bp, Saccharomyces pastorianus
catttggatggtatcagtggcgcct

SEQ ID NO: 188493 - DNA, 25 bp, Saccharomyces pastorianus
gtgcatgcaactcgtcctcagtgac

SEQ ID NO: 188494 - DNA, 25 bp, Saccharomyces pastorianus
tcaaaacagtgcacgtgcacccatg

SEQ ID NO: 188495 - DNA, 25 bp, Saccharomyces pastorianus
gcacgtgcacccatggcatttggat

SEQ ID NO: 188496 - DNA, 25 bp, Saccharomyces pastorianus
tcgtcctcagtgacttggtcgccag

SEQ ID NO: 188497 - DNA, 25 bp, Saccharomyces pastorianus
tttggatggtatcagtggcgccttt

SEQ ID NO: 188498 - DNA, 25 bp, Saccharomyces pastorianus
agtgcacgtgcacccatggcatttg

SEQ ID NO: 188499 - DNA, 25 bp, Saccharomyces pastorianus
cctcagtgacttggtcgccaggcgg

SEQ ID NO: 188500 - DNA, 25 bp, Saccharomyces pastorianus
atgcaactcgtcctcagtgacttgg

SEQ ID NO: 188501 - DNA, 25 bp, Saccharomyces pastorianus
aactcgtcctcagtgacttggtcgc

SEQ ID NO: 188502 - DNA, 25 bp, Saccharomyces pastorianus
cactgctgcaatactttctgtacct

SEQ ID NO: 188503 - DNA, 25 bp, Saccharomyces pastorianus
taccatgaatgcacgtgtcgctgtc

SEQ ID NO: 188504 - DNA, 25 bp, Saccharomyces pastorianus
tagtagcattagcactaccatgaat

SEQ ID NO: 188505 - DNA, 25 bp, Saccharomyces pastorianus
atcactgctgcaatactttctgtac

SEQ ID NO: 188506 - DNA, 25 bp, Saccharomyces pastorianus
gtagtagcattagcactaccatgaa

SEQ ID NO: 188507 - DNA, 25 bp, Saccharomyces pastorianus
actgctgcaatactttctgtacctg

SEQ ID NO: 188508 - DNA, 25 bp, Saccharomyces pastorianus
ctgcaatactttctgtacctgtcac

SEQ ID NO: 188509 - DNA, 25 bp, Saccharomyces pastorianus
tcatcactgctgcaatactttctgt

SEQ ID NO: 188510 - DNA, 25 bp, Saccharomyces pastorianus
catgaatgcacgtgtcgctgtcctc

SEQ ID NO: 188511 - DNA, 25 bp, Saccharomyces pastorianus
tagcactaccatgaatgcacgtgtc

SEQ ID NO: 188512 - DNA, 25 bp, Saccharomyces pastorianus
tcactgctgcaatactttctgtacc

SEQ ID NO: 188513 - DNA, 25 bp, Saccharomyces pastorianus
atgagcttttaaacgtggaacacgg

SEQ ID NO: 188514 - DNA, 25 bp, Saccharomyces pastorianus
ctgtttggaacagattttcaacgta

SEQ ID NO: 188515 - DNA, 25 bp, Saccharomyces pastorianus
aaaatgccattaccatcgggcgcta

SEQ ID NO: 188516 - DNA, 25 bp, Saccharomyces pastorianus
agatctgtcggaagagcttgcggct

SEQ ID NO: 188517 - DNA, 25 bp, Saccharomyces pastorianus
ccaactgccgcaagatctgtcggaa

SEQ ID NO: 188518 - DNA, 25 bp, Saccharomyces pastorianus
gagcttgcggctcaaataacctggc

SEQ ID NO: 188519 - DNA, 25 bp, Saccharomyces pastorianus
agtaccttgccatagaatcgttggt

SEQ ID NO: 188520 - DNA, 25 bp, Saccharomyces pastorianus
accatcgggcgctattccctttgag

SEQ ID NO: 188521 - DNA, 25 bp, Saccharomyces pastorianus
gaatagggaagccaactgccgcaag

SEQ ID NO: 188522 - DNA, 25 bp, Saccharomyces pastorianus
taaccggatataaatggagctgtaa

SEQ ID NO: 188523 - DNA, 25 bp, Saccharomyces pastorianus
taacctggcattgttagtaccttgc

SEQ ID NO: 188524 - DNA, 25 bp, Saccharomyces pastorianus
gtcaaccttctaaatataagcacga

SEQ ID NO: 188525 - DNA, 25 bp, Saccharomyces pastorianus
atttatcaatactgtcaaccttcta

SEQ ID NO: 188526 - DNA, 25 bp, Saccharomyces pastorianus
gagcatcaaacctttcatttatcaa

SEQ ID NO: 188527 - DNA, 25 bp, Saccharomyces pastorianus
aattgtgagcatcaaacctttcatt

SEQ ID NO: 188528 - DNA, 25 bp, Saccharomyces pastorianus
aatactgtcaaccttctaaatataa

SEQ ID NO: 188529 - DNA, 25 bp, Saccharomyces pastorianus
tgtgagcatcaaacctttcatttat

SEQ ID NO: 188530 - DNA, 25 bp, Saccharomyces pastorianus
caggtcgttagctcagaaaattgtg

SEQ ID NO: 188531 - DNA, 25 bp, Saccharomyces pastorianus
atggtcaggtcgttagctcagaaaa

SEQ ID NO: 188532 - DNA, 25 bp, Saccharomyces pastorianus
aaacctttcatttatcaatactgtc

SEQ ID NO: 188533 - DNA, 25 bp, Saccharomyces pastorianus
ggtcaggtcgttagctcagaaaatt

SEQ ID NO: 188534 - DNA, 25 bp, Saccharomyces pastorianus
tatcaatactgtcaaccttctaaat

SEQ ID NO: 188535 - DNA, 25 bp, Saccharomyces pastorianus
gatagatactccagaatgaaacaca

SEQ ID NO: 188536 - DNA, 25 bp, Saccharomyces pastorianus
gtcaaaacaccaaaaatgatttaca

SEQ ID NO: 188537 - DNA, 25 bp, Saccharomyces pastorianus
ccagaatgaaacacattgcctcaaa

SEQ ID NO: 188538 - DNA, 25 bp, Saccharomyces pastorianus
tggaagaattcttccgtcaaaacac

SEQ ID NO: 188539 - DNA, 25 bp, Saccharomyces pastorianus
aaggatggaagaattcttccgtcaa

SEQ ID NO: 188540 - DNA, 25 bp, Saccharomyces pastorianus
tactccagaatgaaacacattgcct

SEQ ID NO: 188541 - DNA, 25 bp, Saccharomyces pastorianus
tagatactccagaatgaaacacatt

SEQ ID NO: 188542 - DNA, 25 bp, Saccharomyces pastorianus
acatattttaaacgaggattcatta

SEQ ID NO: 188543 - DNA, 25 bp, Saccharomyces pastorianus
aaacgaggattcattaaatcagcaa

SEQ ID NO: 188544 - DNA, 25 bp, Saccharomyces pastorianus
cattaaatcagcaatattccccgtt

SEQ ID NO: 188545 - DNA, 25 bp, Saccharomyces pastorianus
taaatcagcaatattccccgttagg

SEQ ID NO: 188546 - DNA, 25 bp, Saccharomyces pastorianus
cccgctggtttcgctgccatcgctg

SEQ ID NO: 188547 - DNA, 25 bp, Saccharomyces pastorianus
ccccgctggtttcgctgccatcgct

SEQ ID NO: 188548 - DNA, 25 bp, Saccharomyces pastorianus
gtaacttcaatccccgctggtttcg

SEQ ID NO: 188549 - DNA, 25 bp, Saccharomyces pastorianus
cttcaatccccgctggtttcgctgc

SEQ ID NO: 188550 - DNA, 25 bp, Saccharomyces pastorianus
ttcaatccccgctggtttcgctgcc

SEQ ID NO: 188551 - DNA, 25 bp, Saccharomyces pastorianus
aatccccgctggtttcgctgccatc

SEQ ID NO: 188552 - DNA, 25 bp, Saccharomyces pastorianus
atccccgctggtttcgctgccatcg

SEQ ID NO: 188553 - DNA, 25 bp, Saccharomyces pastorianus
tcaatccccgctggtttcgctgcca

SEQ ID NO: 188554 - DNA, 25 bp, Saccharomyces pastorianus
caatccccgctggtttcgctgccat

SEQ ID NO: 188555 - DNA, 25 bp, Saccharomyces pastorianus
tccccgctggtttcgctgccatcgc

SEQ ID NO: 188556 - DNA, 25 bp, Saccharomyces pastorianus
aacttcaatccccgctggtttcgct

SEQ ID NO: 188557 - DNA, 25 bp, Saccharomyces pastorianus
ccatccaatcgatcaacgaggcagc

SEQ ID NO: 188558 - DNA, 25 bp, Saccharomyces pastorianus
tatttccatccaatcgatcaacgag

SEQ ID NO: 188559 - DNA, 25 bp, Saccharomyces pastorianus
atttccatccaatcgatcaacgagg

SEQ ID NO: 188560 - DNA, 25 bp, Saccharomyces pastorianus
catccaatcgatcaacgaggcagcc

SEQ ID NO: 188561 - DNA, 25 bp, Saccharomyces pastorianus
tccatccaatcgatcaacgaggcag

SEQ ID NO: 188562 - DNA, 25 bp, Saccharomyces pastorianus
atcgatcaacgaggcagccaacaaa

SEQ ID NO: 188563 - DNA, 25 bp, Saccharomyces pastorianus
aatcgatcaacgaggcagccaacaa

SEQ ID NO: 188564 - DNA, 25 bp, Saccharomyces pastorianus
tccaatcgatcaacgaggcagccaa

SEQ ID NO: 188565 - DNA, 25 bp, Saccharomyces pastorianus
tttccatccaatcgatcaacgaggc

SEQ ID NO: 188566 - DNA, 25 bp, Saccharomyces pastorianus
caatcgatcaacgaggcagccaaca

SEQ ID NO: 188567 - DNA, 25 bp, Saccharomyces pastorianus
ttccatccaatcgatcaacgaggca

SEQ ID NO: 188568 - DNA, 25 bp, Saccharomyces pastorianus
ttgctagactaagatcagacaggtt

SEQ ID NO: 188569 - DNA, 25 bp, Saccharomyces pastorianus
gtactggtactcgatgctatactat

SEQ ID NO: 188570 - DNA, 25 bp, Saccharomyces pastorianus
cagacaggttaatatccatacacaa

SEQ ID NO: 188571 - DNA, 25 bp, Saccharomyces pastorianus
gggccgctcattgctagactaagat

SEQ ID NO: 188572 - DNA, 25 bp, Saccharomyces pastorianus
gatgctatactatttcactcggtcc

SEQ ID NO: 188573 - DNA, 25 bp, Saccharomyces pastorianus
gacttgaaacagttgttgagcataa

SEQ ID NO: 188574 - DNA, 25 bp, Saccharomyces pastorianus
tatttcactcggtcctagctgaaga

SEQ ID NO: 188575 - DNA, 25 bp, Saccharomyces pastorianus
gttaatatccatacacaaacaagag

SEQ ID NO: 188576 - DNA, 25 bp, Saccharomyces pastorianus
tatactatttcactcggtcctagct

SEQ ID NO: 188577 - DNA, 25 bp, Saccharomyces pastorianus
aacaagagaataccctccaaactca

SEQ ID NO: 188578 - DNA, 25 bp, Saccharomyces pastorianus
gaataccctccaaactcaaaagtgt

SEQ ID NO: 188579 - DNA, 25 bp, Saccharomyces pastorianus
ccggtcacttcttctttactgataa

SEQ ID NO: 188580 - DNA, 25 bp, Saccharomyces pastorianus
gaaagcgtattaactcaatggtcaa

SEQ ID NO: 188581 - DNA, 25 bp, Saccharomyces pastorianus
aacgaagaaagctccggtcacttct

SEQ ID NO: 188582 - DNA, 25 bp, Saccharomyces pastorianus
tactgtttgttgacttaatttctag

SEQ ID NO: 188583 - DNA, 25 bp, Saccharomyces pastorianus
aactgtgtagggatattttcagaca

SEQ ID NO: 188584 - DNA, 25 bp, Saccharomyces pastorianus
atttcatcaccgctgttcatatcaa

SEQ ID NO: 188585 - DNA, 25 bp, Saccharomyces pastorianus
agactttgatgttgacttccctata

SEQ ID NO: 188586 - DNA, 25 bp, Saccharomyces pastorianus
gaaatccattaacttttcactccaa

SEQ ID NO: 188587 - DNA, 25 bp, Saccharomyces pastorianus
aacgtacacacgaagggctaactat

SEQ ID NO: 188588 - DNA, 25 bp, Saccharomyces pastorianus
cgctgttcatatcaatacttctaga

SEQ ID NO: 188589 - DNA, 25 bp, Saccharomyces pastorianus
cgaagggctaactatcacagatgaa

SEQ ID NO: 188590 - DNA, 25 bp, Saccharomyces pastorianus
accgggagtcattgatatttctaca

SEQ ID NO: 188591 - DNA, 25 bp, Saccharomyces pastorianus
gagtcattgatatttctacagcaga

SEQ ID NO: 188592 - DNA, 25 bp, Saccharomyces pastorianus
ggagtcattgatatttctacagcag

SEQ ID NO: 188593 - DNA, 25 bp, Saccharomyces pastorianus
aaaataaaccgggagtcattgatat

SEQ ID NO: 188594 - DNA, 25 bp, Saccharomyces pastorianus
aaccgggagtcattgatatttctac

SEQ ID NO: 188595 - DNA, 25 bp, Saccharomyces pastorianus
gggagtcattgatatttctacagca

SEQ ID NO: 188596 - DNA, 25 bp, Saccharomyces pastorianus
ccgggagtcattgatatttctacag

SEQ ID NO: 188597 - DNA, 25 bp, Saccharomyces pastorianus
gatatttctacagcagaggagcagg

SEQ ID NO: 188598 - DNA, 25 bp, Saccharomyces pastorianus
attgatatttctacagcagaggagc

SEQ ID NO: 188599 - DNA, 25 bp, Saccharomyces pastorianus
ataaaccgggagtcattgatatttc

SEQ ID NO: 188600 - DNA, 25 bp, Saccharomyces pastorianus
gtcattgatatttctacagcagagg

SEQ ID NO: 188601 - DNA, 25 bp, Saccharomyces pastorianus
aaaagacggcttcgagttatataga

SEQ ID NO: 188602 - DNA, 25 bp, Saccharomyces pastorianus
gacggcttcgagttatatagataca

SEQ ID NO: 188603 - DNA, 25 bp, Saccharomyces pastorianus
gagagttggctctcttatgaagtcc

SEQ ID NO: 188604 - DNA, 25 bp, Saccharomyces pastorianus
acggcttcgagttatatagatacac

SEQ ID NO: 188605 - DNA, 25 bp, Saccharomyces pastorianus
gttatatagatacactccggaatta

SEQ ID NO: 188606 - DNA, 25 bp, Saccharomyces pastorianus
tatatagatacactccggaattagg

SEQ ID NO: 188607 - DNA, 25 bp, Saccharomyces pastorianus
tatagatacactccggaattaggtg

SEQ ID NO: 188608 - DNA, 25 bp, Saccharomyces pastorianus
aagacggcttcgagttatatagata

SEQ ID NO: 188609 - DNA, 25 bp, Saccharomyces pastorianus
gtaaaaggagagttggctctcttat

SEQ ID NO: 188610 - DNA, 25 bp, Saccharomyces pastorianus
cggcttcgagttatatagatacact

SEQ ID NO: 188611 - DNA, 25 bp, Saccharomyces pastorianus
gcaaaagacggcttcgagttatata

SEQ ID NO: 188612 - DNA, 25 bp, Saccharomyces pastorianus
caggaagattggtactactctcata

SEQ ID NO: 188613 - DNA, 25 bp, Saccharomyces pastorianus
ggcaagaaacgttgacaccttgtct

SEQ ID NO: 188614 - DNA, 25 bp, Saccharomyces pastorianus
gatagacgaagcactgaacaggtta

SEQ ID NO: 188615 - DNA, 25 bp, Saccharomyces pastorianus
gatagttctggtgttagtatccaca

SEQ ID NO: 188616 - DNA, 25 bp, Saccharomyces pastorianus
aaagggacttgttttgatgcagata

SEQ ID NO: 188617 - DNA, 25 bp, Saccharomyces pastorianus
aattccctcaaagctcgtgatcaaa

SEQ ID NO: 188618 - DNA, 25 bp, Saccharomyces pastorianus
tcgcaagaggaagtcatcgcattat

SEQ ID NO: 188619 - DNA, 25 bp, Saccharomyces pastorianus
aaatcgttttcccaaatggcgctgt

SEQ ID NO: 188620 - DNA, 25 bp, Saccharomyces pastorianus
gcagatatggattttcgcgcatcat

SEQ ID NO: 188621 - DNA, 25 bp, Saccharomyces pastorianus
gacgttttcatggaccaggttaaca

SEQ ID NO: 188622 - DNA, 25 bp, Saccharomyces pastorianus
aagccgatgcggtcaaggattattg

SEQ ID NO: 188623 - DNA, 25 bp, Saccharomyces pastorianus
agacagcttgaaactctgctctcat

SEQ ID NO: 188624 - DNA, 25 bp, Saccharomyces pastorianus
agcgtcgttacttcgtctgaatacg

SEQ ID NO: 188625 - DNA, 25 bp, Saccharomyces pastorianus
gaaactctgctctcatttcaacatg

SEQ ID NO: 188626 - DNA, 25 bp, Saccharomyces pastorianus
aaggaatatgctggctaatacaaca

SEQ ID NO: 188627 - DNA, 25 bp, Saccharomyces pastorianus
acatacaaggataacggcgcactcg

SEQ ID NO: 188628 - DNA, 25 bp, Saccharomyces pastorianus
gttgcgtttgatgcttttagtactt

SEQ ID NO: 188629 - DNA, 25 bp, Saccharomyces pastorianus
ttaaagctcagcgtcgttacttcgt

SEQ ID NO: 188630 - DNA, 25 bp, Saccharomyces pastorianus
atttttggcctctattcgcctatat

SEQ ID NO: 188631 - DNA, 25 bp, Saccharomyces pastorianus
ttcagaatcagttcgtacatacaag

SEQ ID NO: 188632 - DNA, 25 bp, Saccharomyces pastorianus
ggcgcactcgaaaatcagctgctag

SEQ ID NO: 188633 - DNA, 25 bp, Saccharomyces pastorianus
cgcctatatcagtaatgtcaccaaa

SEQ ID NO: 188634 - DNA, 25 bp, Saccharomyces pastorianus
catttacccataaagtccatcatta

SEQ ID NO: 188635 - DNA, 25 bp, Saccharomyces pastorianus
tacgttataccacttttgcaccata

SEQ ID NO: 188636 - DNA, 25 bp, Saccharomyces pastorianus
tacagaaaaattaccactaaaatca

SEQ ID NO: 188637 - DNA, 25 bp, Saccharomyces pastorianus
tcaatattacagaaaaattaccact

SEQ ID NO: 188638 - DNA, 25 bp, Saccharomyces pastorianus
caatattacagaaaaattaccacta

SEQ ID NO: 188639 - DNA, 25 bp, Saccharomyces pastorianus
atacgttataccacttttgcaccat

SEQ ID NO: 188640 - DNA, 25 bp, Saccharomyces pastorianus
gtcaatattacagaaaaattaccac

SEQ ID NO: 188641 - DNA, 25 bp, Saccharomyces pastorianus
catacgttataccacttttgcacca

SEQ ID NO: 188642 - DNA, 25 bp, Saccharomyces pastorianus
cgttataccacttttgcaccatata

SEQ ID NO: 188643 - DNA, 25 bp, Saccharomyces pastorianus
ttcggcgacaccaaatattgtataa

SEQ ID NO: 188644 - DNA, 25 bp, Saccharomyces pastorianus
acgttataccacttttgcaccatat

SEQ ID NO: 188645 - DNA, 25 bp, Saccharomyces pastorianus
ttacgtgggcatagatcacgcttca

SEQ ID NO: 188646 - DNA, 25 bp, Saccharomyces pastorianus
acgtgggcatagatcacgcttcagc

SEQ ID NO: 188647 - DNA, 25 bp, Saccharomyces pastorianus
cgtgggcatagatcacgcttcagcc

SEQ ID NO: 188648 - DNA, 25 bp, Saccharomyces pastorianus
gtttacgtgggcatagatcacgctt

SEQ ID NO: 188649 - DNA, 25 bp, Saccharomyces pastorianus
cgcttcagccgctctgtgtcgactt

SEQ ID NO: 188650 - DNA, 25 bp, Saccharomyces pastorianus
tttacgtgggcatagatcacgcttc

SEQ ID NO: 188651 - DNA, 25 bp, Saccharomyces pastorianus
tacgtgggcatagatcacgcttcag

SEQ ID NO: 188652 - DNA, 25 bp, Saccharomyces pastorianus
cttcagccgctctgtgtcgactttc

SEQ ID NO: 188653 - DNA, 25 bp, Saccharomyces pastorianus
atgggtttacgtgggcatagatcac

SEQ ID NO: 188654 - DNA, 25 bp, Saccharomyces pastorianus
tgggtttacgtgggcatagatcacg

SEQ ID NO: 188655 - DNA, 25 bp, Saccharomyces pastorianus
gcttcagccgctctgtgtcgacttt

SEQ ID NO: 188656 - DNA, 25 bp, Saccharomyces pastorianus
gaatttgccttctttgtcaataatc

SEQ ID NO: 188657 - DNA, 25 bp, Saccharomyces pastorianus
tggcattcgacagcaacttcattga

SEQ ID NO: 188658 - DNA, 25 bp, Saccharomyces pastorianus
gcaatctatcgtgtgggaactatgt

SEQ ID NO: 188659 - DNA, 25 bp, Saccharomyces pastorianus
tcaagaaatcctgtactgctacgag

SEQ ID NO: 188660 - DNA, 25 bp, Saccharomyces pastorianus
gggagagccccaaaaatttgcaatt

SEQ ID NO: 188661 - DNA, 25 bp, Saccharomyces pastorianus
ggtacccgtacatcttggcattcga

SEQ ID NO: 188662 - DNA, 25 bp, Saccharomyces pastorianus
attattcattgggagggagagcccc

SEQ ID NO: 188663 - DNA, 25 bp, Saccharomyces pastorianus
tccttgctgataagattcgacttct

SEQ ID NO: 188664 - DNA, 25 bp, Saccharomyces pastorianus
aattaattcgttgcgtccttgctga

SEQ ID NO: 188665 - DNA, 25 bp, Saccharomyces pastorianus
gctttgttacacagaatttgccttc

SEQ ID NO: 188666 - DNA, 25 bp, Saccharomyces pastorianus
gtgggaactatgtttttgctttgtt

SEQ ID NO: 188667 - DNA, 25 bp, Saccharomyces pastorianus
gcttgtcgatcattggctagtgtga

SEQ ID NO: 188668 - DNA, 25 bp, Saccharomyces pastorianus
agccattttcaaccagagagctaaa

SEQ ID NO: 188669 - DNA, 25 bp, Saccharomyces pastorianus
tcacagttagagaaaatgggccaaa

SEQ ID NO: 188670 - DNA, 25 bp, Saccharomyces pastorianus
aaccttacaaagacgaaatggcaag

SEQ ID NO: 188671 - DNA, 25 bp, Saccharomyces pastorianus
ggaatttttaacttttgagaggcat

SEQ ID NO: 188672 - DNA, 25 bp, Saccharomyces pastorianus
gaatctcaaaaggagtgcattgaac

SEQ ID NO: 188673 - DNA, 25 bp, Saccharomyces pastorianus
acttttctattgacaagattcggga

SEQ ID NO: 188674 - DNA, 25 bp, Saccharomyces pastorianus
gctagaggcagccattgaatctcaa

SEQ ID NO: 188675 - DNA, 25 bp, Saccharomyces pastorianus
agattcgggagtttcggaacggcat

SEQ ID NO: 188676 - DNA, 25 bp, Saccharomyces pastorianus
gagaggcattataaccttacaaaga

SEQ ID NO: 188677 - DNA, 25 bp, Saccharomyces pastorianus
cggcatggaaatatcgctagaggca

SEQ ID NO: 188678 - DNA, 25 bp, Saccharomyces pastorianus
ggatctccaagaattcggttctaca

SEQ ID NO: 188679 - DNA, 25 bp, Saccharomyces pastorianus
gagccaccaatcgaaattttctcaa

SEQ ID NO: 188680 - DNA, 25 bp, Saccharomyces pastorianus
ggagtgtattcattcttaaagagcc

SEQ ID NO: 188681 - DNA, 25 bp, Saccharomyces pastorianus
tctaatgagcttgaaaaccgggtta

SEQ ID NO: 188682 - DNA, 25 bp, Saccharomyces pastorianus
ggttgttgataaagccggatctcca

SEQ ID NO: 188683 - DNA, 25 bp, Saccharomyces pastorianus
ggtgagcccgaaggaagccaaatac

SEQ ID NO: 188684 - DNA, 25 bp, Saccharomyces pastorianus
cctgtcctccctgaatacgaaaaat

SEQ ID NO: 188685 - DNA, 25 bp, Saccharomyces pastorianus
agtacattcaccaagcaaatccata

SEQ ID NO: 188686 - DNA, 25 bp, Saccharomyces pastorianus
gagttagcgggcttactcgtccctg

SEQ ID NO: 188687 - DNA, 25 bp, Saccharomyces pastorianus
gattcgaggataacatcacgttcaa

SEQ ID NO: 188688 - DNA, 25 bp, Saccharomyces pastorianus
taatggcgtatgaccccgagttagc

SEQ ID NO: 188689 - DNA, 25 bp, Saccharomyces pastorianus
gaagctctaaaacatcatgatgatt

SEQ ID NO: 188690 - DNA, 25 bp, Saccharomyces pastorianus
gatgattgtgtggattctgatgtaa

SEQ ID NO: 188691 - DNA, 25 bp, Saccharomyces pastorianus
gttggcacttgttggaatgaagctc

SEQ ID NO: 188692 - DNA, 25 bp, Saccharomyces pastorianus
gcacttgttggaatgaagctctaaa

SEQ ID NO: 188693 - DNA, 25 bp, Saccharomyces pastorianus
gattgtgtggattctgatgtaattg

SEQ ID NO: 188694 - DNA, 25 bp, Saccharomyces pastorianus
atgatgattgtgtggattctgatgt

SEQ ID NO: 188695 - DNA, 25 bp, Saccharomyces pastorianus
ctgtgttggcacttgttggaatgaa

SEQ ID NO: 188696 - DNA, 25 bp, Saccharomyces pastorianus
tgctgtgttggcacttgttggaatg

SEQ ID NO: 188697 - DNA, 25 bp, Saccharomyces pastorianus
ggaatgaagctctaaaacatcatga

SEQ ID NO: 188698 - DNA, 25 bp, Saccharomyces pastorianus
ggcacttgttggaatgaagctctaa

SEQ ID NO: 188699 - DNA, 25 bp, Saccharomyces pastorianus
acatcatgatgattgtgtggattct

SEQ ID NO: 188700 - DNA, 25 bp, Saccharomyces pastorianus
gatatggataagttccccagaccct

SEQ ID NO: 188701 - DNA, 25 bp, Saccharomyces pastorianus
gaagaggacatccagccgcagttaa

SEQ ID NO: 188702 - DNA, 25 bp, Saccharomyces pastorianus
agagacgattggacgtgtcgcttct

SEQ ID NO: 188703 - DNA, 25 bp, Saccharomyces pastorianus
aagaatgaggaccacagaccccacg

SEQ ID NO: 188704 - DNA, 25 bp, Saccharomyces pastorianus
gaccccacgactactctgatatgga

SEQ ID NO: 188705 - DNA, 25 bp, Saccharomyces pastorianus
gaagtacgggatcaaggcctcgtct

SEQ ID NO: 188706 - DNA, 25 bp, Saccharomyces pastorianus
gaatcgcattgcaggtccgtcggat

SEQ ID NO: 188707 - DNA, 25 bp, Saccharomyces pastorianus
ggacttcacctactccgagaagtac

SEQ ID NO: 188708 - DNA, 25 bp, Saccharomyces pastorianus
taagctgtcaactcccagggacgag

SEQ ID NO: 188709 - DNA, 25 bp, Saccharomyces pastorianus
gaccgggtcagtctaagctgtcaac

SEQ ID NO: 188710 - DNA, 25 bp, Saccharomyces pastorianus
aattcaggctggtaccgagttcggc

SEQ ID NO: 188711 - DNA, 25 bp, Saccharomyces pastorianus
gaccttttggatatttcgaagaacg

SEQ ID NO: 188712 - DNA, 25 bp, Saccharomyces pastorianus
aacagaccttttggatatttcgaag

SEQ ID NO: 188713 - DNA, 25 bp, Saccharomyces pastorianus
acagaccttttggatatttcgaaga

SEQ ID NO: 188714 - DNA, 25 bp, Saccharomyces pastorianus
agctctaacagaccttttggatatt

SEQ ID NO: 188715 - DNA, 25 bp, Saccharomyces pastorianus
cagaccttttggatatttcgaagaa

SEQ ID NO: 188716 - DNA, 25 bp, Saccharomyces pastorianus
aagctctaacagaccttttggatat

SEQ ID NO: 188717 - DNA, 25 bp, Saccharomyces pastorianus
ctaacagaccttttggatatttcga

SEQ ID NO: 188718 - DNA, 25 bp, Saccharomyces pastorianus
tactacggggcctgctaacaataca

SEQ ID NO: 188719 - DNA, 25 bp, Saccharomyces pastorianus
gctctaacagaccttttggatattt

SEQ ID NO: 188720 - DNA, 25 bp, Saccharomyces pastorianus
atatgaataattccactactacggg

SEQ ID NO: 188721 - DNA, 25 bp, Saccharomyces pastorianus
gggcctgctaacaatacaagctcta

SEQ ID NO: 188722 - DNA, 25 bp, Saccharomyces pastorianus
cacaggcggcacaagcggcgcaagc

SEQ ID NO: 188723 - DNA, 25 bp, Saccharomyces pastorianus
agctcaagctcattctcaggcacag

SEQ ID NO: 188724 - DNA, 25 bp, Saccharomyces pastorianus
agcacaagcacacgctcagcaccag

SEQ ID NO: 188725 - DNA, 25 bp, Saccharomyces pastorianus
acaagcggcgcaagcgcaagcacaa

SEQ ID NO: 188726 - DNA, 25 bp, Saccharomyces pastorianus
acaagcacaagcacacgctcagcac

SEQ ID NO: 188727 - DNA, 25 bp, Saccharomyces pastorianus
aggcacaggcacaggcacaagccca

SEQ ID NO: 188728 - DNA, 25 bp, Saccharomyces pastorianus
agcacaggcggcacaagcggcgcaa

SEQ ID NO: 188729 - DNA, 25 bp, Saccharomyces pastorianus
acaggcggcacaagcggcgcaagcg

SEQ ID NO: 188730 - DNA, 25 bp, Saccharomyces pastorianus
aagcccaggcgcaggcccaagccca

SEQ ID NO: 188731 - DNA, 25 bp, Saccharomyces pastorianus
aagcacacgctcagcaccagccctc

SEQ ID NO: 188732 - DNA, 25 bp, Saccharomyces pastorianus
aagcacaagcacacgctcagcacca

SEQ ID NO: 188733 - DNA, 25 bp, Saccharomyces pastorianus
tgctactgcttctgcaaccaccact

SEQ ID NO: 188734 - DNA, 25 bp, Saccharomyces pastorianus
actgcttctgcaaccaccactctag

SEQ ID NO: 188735 - DNA, 25 bp, Saccharomyces pastorianus
tgcttctgcaaccaccactctagct

SEQ ID NO: 188736 - DNA, 25 bp, Saccharomyces pastorianus
atcgctgctactgcttctgcaacca

SEQ ID NO: 188737 - DNA, 25 bp, Saccharomyces pastorianus
gctgctactgcttctgcaaccacca

SEQ ID NO: 188738 - DNA, 25 bp, Saccharomyces pastorianus
tgccatcgctgctactgcttctgca

SEQ ID NO: 188739 - DNA, 25 bp, Saccharomyces pastorianus
tgtctacgtctctgatatcagacct

SEQ ID NO: 188740 - DNA, 25 bp, Saccharomyces pastorianus
gccatcgctgctactgcttctgcaa

SEQ ID NO: 188741 - DNA, 25 bp, Saccharomyces pastorianus
ttctgcaaccaccactctagctcaa

SEQ ID NO: 188742 - DNA, 25 bp, Saccharomyces pastorianus
ggtggaattgggtgtctacgtctct

SEQ ID NO: 188743 - DNA, 25 bp, Saccharomyces pastorianus
tactgcttctgcaaccaccactcta

SEQ ID NO: 188744 - DNA, 25 bp, Saccharomyces pastorianus
catcccgatttaactcaagagatta

SEQ ID NO: 188745 - DNA, 25 bp, Saccharomyces pastorianus
ttcattcccagagtacatcccgatt

SEQ ID NO: 188746 - DNA, 25 bp, Saccharomyces pastorianus
tcccagagtacatcccgatttaact

SEQ ID NO: 188747 - DNA, 25 bp, Saccharomyces pastorianus
tgacttcattcccagagtacatccc

SEQ ID NO: 188748 - DNA, 25 bp, Saccharomyces pastorianus
tgtcagtcatcttcctccattaggg

SEQ ID NO: 188749 - DNA, 25 bp, Saccharomyces pastorianus
aaatgacttcattcccagagtacat

SEQ ID NO: 188750 - DNA, 25 bp, Saccharomyces pastorianus
gtacatcccgatttaactcaagaga

SEQ ID NO: 188751 - DNA, 25 bp, Saccharomyces pastorianus
gtaaagtggattacgacttggacac

SEQ ID NO: 188752 - DNA, 25 bp, Saccharomyces pastorianus
gggagagtactcatttttaaatgac

SEQ ID NO: 188753 - DNA, 25 bp, Saccharomyces pastorianus
attcccagagtacatcccgatttaa

SEQ ID NO: 188754 - DNA, 25 bp, Saccharomyces pastorianus
aatgtcagtcatcttcctccattag

SEQ ID NO: 188755 - DNA, 25 bp, Saccharomyces pastorianus
gccatcttatcgtcttaccagagga

SEQ ID NO: 188756 - DNA, 25 bp, Saccharomyces pastorianus
gaattatactgctactcaggatgat

SEQ ID NO: 188757 - DNA, 25 bp, Saccharomyces pastorianus
aatgggtgaaatgtgccttatgtcc

SEQ ID NO: 188758 - DNA, 25 bp, Saccharomyces pastorianus
gacgctcaatattacggaacacttc

SEQ ID NO: 188759 - DNA, 25 bp, Saccharomyces pastorianus
gttccagattgggtctagtagtgct

SEQ ID NO: 188760 - DNA, 25 bp, Saccharomyces pastorianus
ggtgttccactatttagacgctcaa

SEQ ID NO: 188761 - DNA, 25 bp, Saccharomyces pastorianus
gaagctgttagtgtaggtgccatct

SEQ ID NO: 188762 - DNA, 25 bp, Saccharomyces pastorianus
ggaacacttctaacaacgtcgagtt

SEQ ID NO: 188763 - DNA, 25 bp, Saccharomyces pastorianus
gattgccctgggaaatatataccca

SEQ ID NO: 188764 - DNA, 25 bp, Saccharomyces pastorianus
aggaatgtccttgcctatgatgcaa

SEQ ID NO: 188765 - DNA, 25 bp, Saccharomyces pastorianus
gatgcaaccggtgttacagaaactt

SEQ ID NO: 188766 - DNA, 25 bp, Saccharomyces pastorianus
ttgatgctggcagtggtagtcgcat

SEQ ID NO: 188767 - DNA, 25 bp, Saccharomyces pastorianus
cctgcaggtctgttggagttggtac

SEQ ID NO: 188768 - DNA, 25 bp, Saccharomyces pastorianus
gcaggtctgttggagttggtacttt

SEQ ID NO: 188769 - DNA, 25 bp, Saccharomyces pastorianus
tgcaggtctgttggagttggtactt

SEQ ID NO: 188770 - DNA, 25 bp, Saccharomyces pastorianus
ctgcaggtctgttggagttggtact

SEQ ID NO: 188771 - DNA, 25 bp, Saccharomyces pastorianus
aggtctgttggagttggtactttca

SEQ ID NO: 188772 - DNA, 25 bp, Saccharomyces pastorianus
gatgctggcagtggtagtcgcatta

SEQ ID NO: 188773 - DNA, 25 bp, Saccharomyces pastorianus
gatgctggcagtggtagtcgcacta

SEQ ID NO: 188774 - DNA, 25 bp, Saccharomyces pastorianus
gtctgttggagttggtactttcagt

SEQ ID NO: 188775 - DNA, 25 bp, Saccharomyces pastorianus
atgctggcagtggtagtcgcattag

SEQ ID NO: 188776 - DNA, 25 bp, Saccharomyces pastorianus
tcggtggtagtcgcactagtcctga

SEQ ID NO: 188777 - DNA, 25 bp, Saccharomyces pastorianus
ctgccaatgcggatgtaagagggtt

SEQ ID NO: 188778 - DNA, 25 bp, Saccharomyces pastorianus
acaactgccacaggaaactgccaat

SEQ ID NO: 188779 - DNA, 25 bp, Saccharomyces pastorianus
gagtgatccagtcgacgcttgcaaa

SEQ ID NO: 188780 - DNA, 25 bp, Saccharomyces pastorianus
taaataatgaactggctgctcttga

SEQ ID NO: 188781 - DNA, 25 bp, Saccharomyces pastorianus
gacgcttgcaaagaaatctccataa

SEQ ID NO: 188782 - DNA, 25 bp, Saccharomyces pastorianus
gggtttttcctcagggataatggca

SEQ ID NO: 188783 - DNA, 25 bp, Saccharomyces pastorianus
ggataatggcataccctttcgcagg

SEQ ID NO: 188784 - DNA, 25 bp, Saccharomyces pastorianus
ctcacctgtgtgttctctacaagaa

SEQ ID NO: 188785 - DNA, 25 bp, Saccharomyces pastorianus
ttctctacaagaagcacaactgcca

SEQ ID NO: 188786 - DNA, 25 bp, Saccharomyces pastorianus
gaaaaatttactgactcacctgtgt

SEQ ID NO: 188787 - DNA, 25 bp, Saccharomyces pastorianus
accctttcgcaggtggaatatccta

SEQ ID NO: 188788 - DNA, 25 bp, Saccharomyces pastorianus
gtactggtacaacttagccaaggca

SEQ ID NO: 188789 - DNA, 25 bp, Saccharomyces pastorianus
aatgacaaggattacgccgccgcag

SEQ ID NO: 188790 - DNA, 25 bp, Saccharomyces pastorianus
cgacgaagctggtgtgaagctgctt

SEQ ID NO: 188791 - DNA, 25 bp, Saccharomyces pastorianus
ccgccgcagtgaagttgaccgtgga

SEQ ID NO: 188792 - DNA, 25 bp, Saccharomyces pastorianus
agcccagttgggacaatgctacaat

SEQ ID NO: 188793 - DNA, 25 bp, Saccharomyces pastorianus
gtacaacttagccaaggcattcaaa

SEQ ID NO: 188794 - DNA, 25 bp, Saccharomyces pastorianus
caagatattgaagcccagttgggac

SEQ ID NO: 188795 - DNA, 25 bp, Saccharomyces pastorianus
ccgtggagctaaagtactggtacaa

SEQ ID NO: 188796 - DNA, 25 bp, Saccharomyces pastorianus
gggacaatgctacaatgacaaggat

SEQ ID NO: 188797 - DNA, 25 bp, Saccharomyces pastorianus
aagttgaccgtggagctaaagtact

SEQ ID NO: 188798 - DNA, 25 bp, Saccharomyces pastorianus
attacgccgccgcagtgaagttgac

SEQ ID NO: 188799 - DNA, 25 bp, Saccharomyces pastorianus
gcttgtgtgcattcgagtctaccaa

SEQ ID NO: 188800 - DNA, 25 bp, Saccharomyces pastorianus
aacagtccactatatgccggtgtca

SEQ ID NO: 188801 - DNA, 25 bp, Saccharomyces pastorianus
cgattattctcacccaattgcattt

SEQ ID NO: 188802 - DNA, 25 bp, Saccharomyces pastorianus
attttctatccttatgcgcttcaga

SEQ ID NO: 188803 - DNA, 25 bp, Saccharomyces pastorianus
tctggtgtagcgcaaacttttggtc

SEQ ID NO: 188804 - DNA, 25 bp, Saccharomyces pastorianus
gaaccggattccaaaactgcacata

SEQ ID NO: 188805 - DNA, 25 bp, Saccharomyces pastorianus
aaccttttcggttatggcatcagtt

SEQ ID NO: 188806 - DNA, 25 bp, Saccharomyces pastorianus
atgcttgcctattttcgtgtattta

SEQ ID NO: 188807 - DNA, 25 bp, Saccharomyces pastorianus
gagggcattttggtgcatcccagaa

SEQ ID NO: 188808 - DNA, 25 bp, Saccharomyces pastorianus
gcccttgctgggtcgattattctca

SEQ ID NO: 188809 - DNA, 25 bp, Saccharomyces pastorianus
gtgtcaagctagttcccctaataat

SEQ ID NO: 188810 - DNA, 25 bp, Saccharomyces pastorianus
tggtgcttccagacgtacagctaaa

SEQ ID NO: 188811 - DNA, 25 bp, Saccharomyces pastorianus
gattgagagagctacgcgcgaagaa

SEQ ID NO: 188812 - DNA, 25 bp, Saccharomyces pastorianus
gctccttctgagacgtcaacacaag

SEQ ID NO: 188813 - DNA, 25 bp, Saccharomyces pastorianus
ggaggagaacccatacgccttttat

SEQ ID NO: 188814 - DNA, 25 bp, Saccharomyces pastorianus
gaatcattcttcaccagatacacag

SEQ ID NO: 188815 - DNA, 25 bp, Saccharomyces pastorianus
aattgcagaattactcgccgattgt

SEQ ID NO: 188816 - DNA, 25 bp, Saccharomyces pastorianus
tatcccagaaatacctgttccagag

SEQ ID NO: 188817 - DNA, 25 bp, Saccharomyces pastorianus
ggtactgcaaagactggtgcttcca

SEQ ID NO: 188818 - DNA, 25 bp, Saccharomyces pastorianus
atgacgtttctgttgctccttctga

SEQ ID NO: 188819 - DNA, 25 bp, Saccharomyces pastorianus
ttgtcgatcccggtttaggcgaagg

SEQ ID NO: 188820 - DNA, 25 bp, Saccharomyces pastorianus
gaatatttggttcagtcagtcggaa

SEQ ID NO: 188821 - DNA, 25 bp, Saccharomyces pastorianus
ttagtagtataccaacccgaggaga

SEQ ID NO: 188822 - DNA, 25 bp, Saccharomyces pastorianus
tttcaagacgaaatgctagccctca

SEQ ID NO: 188823 - DNA, 25 bp, Saccharomyces pastorianus
atgagaaaatcatcacgcccttacc

SEQ ID NO: 188824 - DNA, 25 bp, Saccharomyces pastorianus
tgggaaacccagcttttaagcaaag

SEQ ID NO: 188825 - DNA, 25 bp, Saccharomyces pastorianus
gaaggcacagaagtcattatctaga

SEQ ID NO: 188826 - DNA, 25 bp, Saccharomyces pastorianus
ttcagaggctggcagtagctccgaa

SEQ ID NO: 188827 - DNA, 25 bp, Saccharomyces pastorianus
cggtacttttcccagacgatgatga

SEQ ID NO: 188828 - DNA, 25 bp, Saccharomyces pastorianus
atgctagccctcacggataatcaaa

SEQ ID NO: 188829 - DNA, 25 bp, Saccharomyces pastorianus
ggagattacgaacttcagtgacgat

SEQ ID NO: 188830 - DNA, 25 bp, Saccharomyces pastorianus
ttaagtgattcttcagaggctggca

SEQ ID NO: 188831 - DNA, 25 bp, Saccharomyces pastorianus
aatgaagtgccctacagagctaatg

SEQ ID NO: 188832 - DNA, 25 bp, Saccharomyces pastorianus
catcacgtggtttgtttgaagggat

SEQ ID NO: 188833 - DNA, 25 bp, Saccharomyces pastorianus
gtgtacaccatcacgtggtttgttt

SEQ ID NO: 188834 - DNA, 25 bp, Saccharomyces pastorianus
tggtttgtttgaagggattggtccg

SEQ ID NO: 188835 - DNA, 25 bp, Saccharomyces pastorianus
caacgtgtacaccatcacgtggttt

SEQ ID NO: 188836 - DNA, 25 bp, Saccharomyces pastorianus
tcacgtggtttgtttgaagggattg

SEQ ID NO: 188837 - DNA, 25 bp, Saccharomyces pastorianus
aacaacgtgtacaccatcacgtggt

SEQ ID NO: 188838 - DNA, 25 bp, Saccharomyces pastorianus
ccatcacgtggtttgtttgaaggga

SEQ ID NO: 188839 - DNA, 25 bp, Saccharomyces pastorianus
gaaacaacgtgtacaccatcacgtg

SEQ ID NO: 188840 - DNA, 25 bp, Saccharomyces pastorianus
accatcacgtggtttgtttgaaggg

SEQ ID NO: 188841 - DNA, 25 bp, Saccharomyces pastorianus
gtacaccatcacgtggtttgtttga

SEQ ID NO: 188842 - DNA, 25 bp, Saccharomyces pastorianus
acgtgtacaccatcacgtggtttgt

SEQ ID NO: 188843 - DNA, 25 bp, Saccharomyces pastorianus
atgaccatcccacatatgaaatacg

SEQ ID NO: 188844 - DNA, 25 bp, Saccharomyces pastorianus
gtaagccccacacaagataaagacg

SEQ ID NO: 188845 - DNA, 25 bp, Saccharomyces pastorianus
gccccacacaagataaagacgcgat

SEQ ID NO: 188846 - DNA, 25 bp, Saccharomyces pastorianus
gccgtatcaaagactagcgaaaata

SEQ ID NO: 188847 - DNA, 25 bp, Saccharomyces pastorianus
tcaaatacagtaagccccacacaag

SEQ ID NO: 188848 - DNA, 25 bp, Saccharomyces pastorianus
aaaagtagcacagccggattccttg

SEQ ID NO: 188849 - DNA, 25 bp, Saccharomyces pastorianus
agacgcgatcagaaaacaacccgat

SEQ ID NO: 188850 - DNA, 25 bp, Saccharomyces pastorianus
atcccacatatgaaatacgccgtat

SEQ ID NO: 188851 - DNA, 25 bp, Saccharomyces pastorianus
ataatgatgaaccttcacataagaa

SEQ ID NO: 188852 - DNA, 25 bp, Saccharomyces pastorianus
agaaaacaacccgatgacattataa

SEQ ID NO: 188853 - DNA, 25 bp, Saccharomyces pastorianus
gaaatacgccgtatcaaagactagc

SEQ ID NO: 188854 - DNA, 25 bp, Saccharomyces pastorianus
gagttcagtatttaaattcaacaca

SEQ ID NO: 188855 - DNA, 25 bp, Saccharomyces pastorianus
tccggagcaacttcgtccaaacaag

SEQ ID NO: 188856 - DNA, 25 bp, Saccharomyces pastorianus
gcaacttcgtccaaacaagtctctg

SEQ ID NO: 188857 - DNA, 25 bp, Saccharomyces pastorianus
agaagtactccggagcaacttcgtc

SEQ ID NO: 188858 - DNA, 25 bp, Saccharomyces pastorianus
gtctctgccgagaaacatttgagtt

SEQ ID NO: 188859 - DNA, 25 bp, Saccharomyces pastorianus
gtactccggagcaacttcgtccaaa

SEQ ID NO: 188860 - DNA, 25 bp, Saccharomyces pastorianus
cgtccaaacaagtctctgccgagaa

SEQ ID NO: 188861 - DNA, 25 bp, Saccharomyces pastorianus
gccgagaaacatttgagttcagtat

SEQ ID NO: 188862 - DNA, 25 bp, Saccharomyces pastorianus
taaattcaacacagatctaggtcag

SEQ ID NO: 188863 - DNA, 25 bp, Saccharomyces pastorianus
ttcgtccaaacaagtctctgccgag

SEQ ID NO: 188864 - DNA, 25 bp, Saccharomyces pastorianus
gctgcgaaaaagaagtactccggag

SEQ ID NO: 188865 - DNA, 25 bp, Saccharomyces pastorianus
gccgtatccgctgattttcatgatg

SEQ ID NO: 188866 - DNA, 25 bp, Saccharomyces pastorianus
gtatgaggcaccactactcagagat

SEQ ID NO: 188867 - DNA, 25 bp, Saccharomyces pastorianus
cataggcaatacaggcttcccaatt

SEQ ID NO: 188868 - DNA, 25 bp, Saccharomyces pastorianus
aatggtttcctttgatactgcgccg

SEQ ID NO: 188869 - DNA, 25 bp, Saccharomyces pastorianus
gcattcagcaacttgggtctgtctt

SEQ ID NO: 188870 - DNA, 25 bp, Saccharomyces pastorianus
gctgtgctgcattctcatggtatac

SEQ ID NO: 188871 - DNA, 25 bp, Saccharomyces pastorianus
aagtcttgggtttctcttggatcat

SEQ ID NO: 188872 - DNA, 25 bp, Saccharomyces pastorianus
ggatcatccgccaggtgttgtacgt

SEQ ID NO: 188873 - DNA, 25 bp, Saccharomyces pastorianus
attttggcgtttgtgaccatcgttc

SEQ ID NO: 188874 - DNA, 25 bp, Saccharomyces pastorianus
tcgtgctttgagattgctgtgctgc

SEQ ID NO: 188875 - DNA, 25 bp, Saccharomyces pastorianus
ggatcatgttcaagacctcgagaga

SEQ ID NO: 188876 - DNA, 25 bp, Saccharomyces pastorianus
cacagctgttttcaatgcaagacga

SEQ ID NO: 188877 - DNA, 25 bp, Saccharomyces pastorianus
agacaccattgtaggtgttgtggaa

SEQ ID NO: 188878 - DNA, 25 bp, Saccharomyces pastorianus
taatcttgccaggtggcaggcagac

SEQ ID NO: 188879 - DNA, 25 bp, Saccharomyces pastorianus
tgttcgtcttgtaccgaaaattttg

SEQ ID NO: 188880 - DNA, 25 bp, Saccharomyces pastorianus
gaagctcacagctgttttcaatgca

SEQ ID NO: 188881 - DNA, 25 bp, Saccharomyces pastorianus
gtttctcgtaagaagacaccattgt

SEQ ID NO: 188882 - DNA, 25 bp, Saccharomyces pastorianus
tgtggaaggatattttgttcgtctt

SEQ ID NO: 188883 - DNA, 25 bp, Saccharomyces pastorianus
gtatcaataatcttgccaggtggca

SEQ ID NO: 188884 - DNA, 25 bp, Saccharomyces pastorianus
tggcaggcagacgaggaagctcaca

SEQ ID NO: 188885 - DNA, 25 bp, Saccharomyces pastorianus
gaggactgtatcaataatcttgcca

SEQ ID NO: 188886 - DNA, 25 bp, Saccharomyces pastorianus
gcaagacgaacttttcgtttctcgt

SEQ ID NO: 188887 - DNA, 25 bp, Saccharomyces pastorianus
ataagaacttcccaaatttctgtga

SEQ ID NO: 188888 - DNA, 25 bp, Saccharomyces pastorianus
acttcccaaatttctgtgaaccgat

SEQ ID NO: 188889 - DNA, 25 bp, Saccharomyces pastorianus
taagaacttcccaaatttctgtgaa

SEQ ID NO: 188890 - DNA, 25 bp, Saccharomyces pastorianus
cttcccaaatttctgtgaaccgata

SEQ ID NO: 188891 - DNA, 25 bp, Saccharomyces pastorianus
tgtattgcccgaacacctaattagt

SEQ ID NO: 188892 - DNA, 25 bp, Saccharomyces pastorianus
gaacttcccaaatttctgtgaaccg

SEQ ID NO: 188893 - DNA, 25 bp, Saccharomyces pastorianus
aaatttctgtgaaccgatatcaagt

SEQ ID NO: 188894 - DNA, 25 bp, Saccharomyces pastorianus
ccaaatttctgtgaaccgatatcaa

SEQ ID NO: 188895 - DNA, 25 bp, Saccharomyces pastorianus
accgatatcaagttgtattgcccga

SEQ ID NO: 188896 - DNA, 25 bp, Saccharomyces pastorianus
ttcccaaatttctgtgaaccgatat

SEQ ID NO: 188897 - DNA, 25 bp, Saccharomyces pastorianus
tcccaaatttctgtgaaccgatatc

SEQ ID NO: 188898 - DNA, 25 bp, Saccharomyces pastorianus
aagatgggctcgaaatatcgaagat

SEQ ID NO: 188899 - DNA, 25 bp, Saccharomyces pastorianus
ggtgctctgtttgcaagttccaatg

SEQ ID NO: 188900 - DNA, 25 bp, Saccharomyces pastorianus
tatcgaagatgaaatcgcagatcta

SEQ ID NO: 188901 - DNA, 25 bp, Saccharomyces pastorianus
aacggtgctctgtttgcaagttcca

SEQ ID NO: 188902 - DNA, 25 bp, Saccharomyces pastorianus
gcttgtgaaaagatgggctcgaaat

SEQ ID NO: 188903 - DNA, 25 bp, Saccharomyces pastorianus
ctgggtcgctgtgcttgtgaaaaga

SEQ ID NO: 188904 - DNA, 25 bp, Saccharomyces pastorianus
gctctgtttgcaagttccaatgttt

SEQ ID NO: 188905 - DNA, 25 bp, Saccharomyces pastorianus
atgtttttattctgggtcgctgtgc

SEQ ID NO: 188906 - DNA, 25 bp, Saccharomyces pastorianus
ttctgggtcgctgtgcttgtgaaaa

SEQ ID NO: 188907 - DNA, 25 bp, Saccharomyces pastorianus
tgcaagttccaatgtttttattctg

SEQ ID NO: 188908 - DNA, 25 bp, Saccharomyces pastorianus
aaaaaacggtgctctgtttgcaagt

SEQ ID NO: 188909 - DNA, 25 bp, Saccharomyces pastorianus
ttttcctaataagactaccgtagag

SEQ ID NO: 188910 - DNA, 25 bp, Saccharomyces pastorianus
gccttgttaacgcttctctggaaga

SEQ ID NO: 188911 - DNA, 25 bp, Saccharomyces pastorianus
attgaataatccaaactcggccata

SEQ ID NO: 188912 - DNA, 25 bp, Saccharomyces pastorianus
aacttaatatcgttcccgtcatcta

SEQ ID NO: 188913 - DNA, 25 bp, Saccharomyces pastorianus
gaaaacgatgtgtgcataattgcga

SEQ ID NO: 188914 - DNA, 25 bp, Saccharomyces pastorianus
tggacctagttttcctaataagact

SEQ ID NO: 188915 - DNA, 25 bp, Saccharomyces pastorianus
gttatgcaattttcgctcttgcgga

SEQ ID NO: 188916 - DNA, 25 bp, Saccharomyces pastorianus
gaaatccttcatcaagccttgttaa

SEQ ID NO: 188917 - DNA, 25 bp, Saccharomyces pastorianus
ccgtcatctaatattttcagcgaaa

SEQ ID NO: 188918 - DNA, 25 bp, Saccharomyces pastorianus
aaagatgagctttttggacctagtt

SEQ ID NO: 188919 - DNA, 25 bp, Saccharomyces pastorianus
atcgttcccgtcatctaatattttc

SEQ ID NO: 188920 - DNA, 25 bp, Saccharomyces pastorianus
ttacgtgggcatagatcacgcttca

SEQ ID NO: 188921 - DNA, 25 bp, Saccharomyces pastorianus
acgtgggcatagatcacgcttcagc

SEQ ID NO: 188922 - DNA, 25 bp, Saccharomyces pastorianus
cgtgggcatagatcacgcttcagcc

SEQ ID NO: 188923 - DNA, 25 bp, Saccharomyces pastorianus
gtttacgtgggcatagatcacgctt

SEQ ID NO: 188924 - DNA, 25 bp, Saccharomyces pastorianus
cgcttcagccgctctgtgtcgactt

SEQ ID NO: 188925 - DNA, 25 bp, Saccharomyces pastorianus
tttacgtgggcatagatcacgcttc

SEQ ID NO: 188926 - DNA, 25 bp, Saccharomyces pastorianus
tacgtgggcatagatcacgcttcag

SEQ ID NO: 188927 - DNA, 25 bp, Saccharomyces pastorianus
cttcagccgctctgtgtcgactttc

SEQ ID NO: 188928 - DNA, 25 bp, Saccharomyces pastorianus
atgggtttacgtgggcatagatcac

SEQ ID NO: 188929 - DNA, 25 bp, Saccharomyces pastorianus
tgggtttacgtgggcatagatcacg

SEQ ID NO: 188930 - DNA, 25 bp, Saccharomyces pastorianus
gcttcagccgctctgtgtcgacttt

SEQ ID NO: 188931 - DNA, 25 bp, Saccharomyces pastorianus
gaaatatcctggtcgtgtggcatgg

SEQ ID NO: 188932 - DNA, 25 bp, Saccharomyces pastorianus
ggccctcagattataccggtatcta

SEQ ID NO: 188933 - DNA, 25 bp, Saccharomyces pastorianus
tatcccagcgctgaggtcagacctt

SEQ ID NO: 188934 - DNA, 25 bp, Saccharomyces pastorianus
atctattgcggcgataattctgggt

SEQ ID NO: 188935 - DNA, 25 bp, Saccharomyces pastorianus
ttagggtatgtaaccgccacgacca

SEQ ID NO: 188936 - DNA, 25 bp, Saccharomyces pastorianus
aatgagcggagtatcctacgcatta

SEQ ID NO: 188937 - DNA, 25 bp, Saccharomyces pastorianus
ggactttcaaaaggcctttagctat

SEQ ID NO: 188938 - DNA, 25 bp, Saccharomyces pastorianus
attcctattgggatattgttcgcta

SEQ ID NO: 188939 - DNA, 25 bp, Saccharomyces pastorianus
ggtcgtgtggcatggaattcctatt

SEQ ID NO: 188940 - DNA, 25 bp, Saccharomyces pastorianus
tcagaccttcccaactatcaaaatg

SEQ ID NO: 188941 - DNA, 25 bp, Saccharomyces pastorianus
gtgctactagccataagtgctttgt

SEQ ID NO: 188942 - DNA, 25 bp, Saccharomyces pastorianus
atcagcaccagctgtttctggacaa

SEQ ID NO: 188943 - DNA, 25 bp, Saccharomyces pastorianus
ggattctgcccagcagcagtagcaa

SEQ ID NO: 188944 - DNA, 25 bp, Saccharomyces pastorianus
aaggcctttctggacagcttcgaag

SEQ ID NO: 188945 - DNA, 25 bp, Saccharomyces pastorianus
ggagcagtccatacaattctcgtcg

SEQ ID NO: 188946 - DNA, 25 bp, Saccharomyces pastorianus
atagatctggacgacgagccccgca

SEQ ID NO: 188947 - DNA, 25 bp, Saccharomyces pastorianus
gaggacgccgacgacgacattatat

SEQ ID NO: 188948 - DNA, 25 bp, Saccharomyces pastorianus
aatgcggacaacacgtacatcacga

SEQ ID NO: 188949 - DNA, 25 bp, Saccharomyces pastorianus
tacgggccctgcagacaatgtgagc

SEQ ID NO: 188950 - DNA, 25 bp, Saccharomyces pastorianus
tggacgagatgtttgcccggcagaa

SEQ ID NO: 188951 - DNA, 25 bp, Saccharomyces pastorianus
aatgtgagcgccaacaaggcctttc

SEQ ID NO: 188952 - DNA, 25 bp, Saccharomyces pastorianus
aacaatgacagcagccgcgttgacg

SEQ ID NO: 188953 - DNA, 25 bp, Saccharomyces pastorianus
tcctcgaggagaatttataatatag

SEQ ID NO: 188954 - DNA, 25 bp, Saccharomyces pastorianus
atattatagcttctaacgacaatgg

SEQ ID NO: 188955 - DNA, 25 bp, Saccharomyces pastorianus
gccagttcctcaaaaagatccatgt

SEQ ID NO: 188956 - DNA, 25 bp, Saccharomyces pastorianus
ttgtccgccagttcctcaaaaagat

SEQ ID NO: 188957 - DNA, 25 bp, Saccharomyces pastorianus
ctaacgacaatggaattctaacaat

SEQ ID NO: 188958 - DNA, 25 bp, Saccharomyces pastorianus
tccgccagttcctcaaaaagatcca

SEQ ID NO: 188959 - DNA, 25 bp, Saccharomyces pastorianus
aattgtccgccagttcctcaaaaag

SEQ ID NO: 188960 - DNA, 25 bp, Saccharomyces pastorianus
caaattgtccgccagttcctcaaaa

SEQ ID NO: 188961 - DNA, 25 bp, Saccharomyces pastorianus
attatcaaattgtccgccagttcct

SEQ ID NO: 188962 - DNA, 25 bp, Saccharomyces pastorianus
gttcctcaaaaagatccatgtataa

SEQ ID NO: 188963 - DNA, 25 bp, Saccharomyces pastorianus
tagcttctaacgacaatggaattct

SEQ ID NO: 188964 - DNA, 25 bp, Saccharomyces pastorianus
attaatgacgtatgaccaaagttat

SEQ ID NO: 188965 - DNA, 25 bp, Saccharomyces pastorianus
aacgcttcggacataacgttccaga

SEQ ID NO: 188966 - DNA, 25 bp, Saccharomyces pastorianus
gtggcaacgcttcggacataacgtt

SEQ ID NO: 188967 - DNA, 25 bp, Saccharomyces pastorianus
tccagagacacagtcaggagttcgc

SEQ ID NO: 188968 - DNA, 25 bp, Saccharomyces pastorianus
acataacgttccagagacacagtca

SEQ ID NO: 188969 - DNA, 25 bp, Saccharomyces pastorianus
gtctctgatacgagtggcaacgctt

SEQ ID NO: 188970 - DNA, 25 bp, Saccharomyces pastorianus
gcttcggacataacgttccagagac

SEQ ID NO: 188971 - DNA, 25 bp, Saccharomyces pastorianus
catggatattaatgacgtatgacca

SEQ ID NO: 188972 - DNA, 25 bp, Saccharomyces pastorianus
tagcagcggtaccagaggtctctga

SEQ ID NO: 188973 - DNA, 25 bp, Saccharomyces pastorianus
aacgttccagagacacagtcaggag

SEQ ID NO: 188974 - DNA, 25 bp, Saccharomyces pastorianus
agaggtctctgatacgagtggcaac

SEQ ID NO: 188975 - DNA, 25 bp, Saccharomyces pastorianus
aggcttttacacactacctaggtga

SEQ ID NO: 188976 - DNA, 25 bp, Saccharomyces pastorianus
gaatatcctcttacacttaacctaa

SEQ ID NO: 188977 - DNA, 25 bp, Saccharomyces pastorianus
gttgcacctagccaagtaccttggg

SEQ ID NO: 188978 - DNA, 25 bp, Saccharomyces pastorianus
tgattgacctgaattttccgaccaa

SEQ ID NO: 188979 - DNA, 25 bp, Saccharomyces pastorianus
ttattgttgcaccagataccagccc

SEQ ID NO: 188980 - DNA, 25 bp, Saccharomyces pastorianus
gcaccctggtcacagcatttcaaaa

SEQ ID NO: 188981 - DNA, 25 bp, Saccharomyces pastorianus
ataccagcccacgtggagaagatgt

SEQ ID NO: 188982 - DNA, 25 bp, Saccharomyces pastorianus
gaccatagctattacttcattgcga

SEQ ID NO: 188983 - DNA, 25 bp, Saccharomyces pastorianus
gtgaatgcaacacaagcaccctggt

SEQ ID NO: 188984 - DNA, 25 bp, Saccharomyces pastorianus
ggccaaggcgcaggattctatgtga

SEQ ID NO: 188985 - DNA, 25 bp, Saccharomyces pastorianus
gtatttctgcttttgcaccaattgt

SEQ ID NO: 188986 - DNA, 25 bp, Saccharomyces pastorianus
tacgagaatgctacaccaggtacta

SEQ ID NO: 188987 - DNA, 25 bp, Saccharomyces pastorianus
gacatggacccatattcacgagaat

SEQ ID NO: 188988 - DNA, 25 bp, Saccharomyces pastorianus
ggcgatcctttcaagccaagtttaa

SEQ ID NO: 188989 - DNA, 25 bp, Saccharomyces pastorianus
gatgcgtccatggttcttcatgata

SEQ ID NO: 188990 - DNA, 25 bp, Saccharomyces pastorianus
taccatcataaagctggcgatcctt

SEQ ID NO: 188991 - DNA, 25 bp, Saccharomyces pastorianus
aaggaaactccttcgttcgatgcgt

SEQ ID NO: 188992 - DNA, 25 bp, Saccharomyces pastorianus
gaaaaccgttcttctcaacgatatg

SEQ ID NO: 188993 - DNA, 25 bp, Saccharomyces pastorianus
gattttgatcatgtcgggtacaggc

SEQ ID NO: 188994 - DNA, 25 bp, Saccharomyces pastorianus
gggccagttaatccgttgcgtcgaa

SEQ ID NO: 188995 - DNA, 25 bp, Saccharomyces pastorianus
tgaggacgattctaagggccagtta

SEQ ID NO: 188996 - DNA, 25 bp, Saccharomyces pastorianus
gaacttagagaggtcacgcaactat

SEQ ID NO: 188997 - DNA, 25 bp, Saccharomyces pastorianus
ggcgatgtcattaaccctgatgttg

SEQ ID NO: 188998 - DNA, 25 bp, Saccharomyces pastorianus
gaatagcatgtcaccaagcgcttgg

SEQ ID NO: 188999 - DNA, 25 bp, Saccharomyces pastorianus
gcaggtgctgcctcaagatgttgac

SEQ ID NO: 189000 - DNA, 25 bp, Saccharomyces pastorianus
aagtattgccgatttgtatcctgtc

SEQ ID NO: 189001 - DNA, 25 bp, Saccharomyces pastorianus
aaactacttcgaggatttgccacag

SEQ ID NO: 189002 - DNA, 25 bp, Saccharomyces pastorianus
taaccgctgtgtggcctttgagtga

SEQ ID NO: 189003 - DNA, 25 bp, Saccharomyces pastorianus
agggtgattttattctgcgggtatt

SEQ ID NO: 189004 - DNA, 25 bp, Saccharomyces pastorianus
ttgccagcgccctgatactaatcat

SEQ ID NO: 189005 - DNA, 25 bp, Saccharomyces pastorianus
gacattcctggcattactgatgaca

SEQ ID NO: 189006 - DNA, 25 bp, Saccharomyces pastorianus
ttctcgaaggagtcacgcaggtgct

SEQ ID NO: 189007 - DNA, 25 bp, Saccharomyces pastorianus
aagcgcttggatctttcatgtcaaa

SEQ ID NO: 189008 - DNA, 25 bp, Saccharomyces pastorianus
ccatgtggaacgcttatgatgcatt

SEQ ID NO: 189009 - DNA, 25 bp, Saccharomyces pastorianus
caacgccatgtggaacgcttatgat

SEQ ID NO: 189010 - DNA, 25 bp, Saccharomyces pastorianus
gcagtatcccctcaagacaggtttg

SEQ ID NO: 189011 - DNA, 25 bp, Saccharomyces pastorianus
cgccatgtggaacgcttatgatgca

SEQ ID NO: 189012 - DNA, 25 bp, Saccharomyces pastorianus
aacgccatgtggaacgcttatgatg

SEQ ID NO: 189013 - DNA, 25 bp, Saccharomyces pastorianus
atgtggaacgcttatgatgcattct

SEQ ID NO: 189014 - DNA, 25 bp, Saccharomyces pastorianus
ggaacgcttatgatgcattctccaa

SEQ ID NO: 189015 - DNA, 25 bp, Saccharomyces pastorianus
atatttaatccgcagtatcccctca

SEQ ID NO: 189016 - DNA, 25 bp, Saccharomyces pastorianus
gtttgaaccggttttcaacgccatg

SEQ ID NO: 189017 - DNA, 25 bp, Saccharomyces pastorianus
ccatcatctcctatatttaatccgc

SEQ ID NO: 189018 - DNA, 25 bp, Saccharomyces pastorianus
gtggaacgcttatgatgcattctcc

SEQ ID NO: 189019 - DNA, 25 bp, Saccharomyces pastorianus
agtctgttactagtcctgacagtag

SEQ ID NO: 189020 - DNA, 25 bp, Saccharomyces pastorianus
gttactagtcctgacagtagatgtc

SEQ ID NO: 189021 - DNA, 25 bp, Saccharomyces pastorianus
ctttcagtggtagtctgttactagt

SEQ ID NO: 189022 - DNA, 25 bp, Saccharomyces pastorianus
gctgtcctcatcacctgctgcgata

SEQ ID NO: 189023 - DNA, 25 bp, Saccharomyces pastorianus
gtctggcagctggtagtagcattag

SEQ ID NO: 189024 - DNA, 25 bp, Saccharomyces pastorianus
ggtagtctgttactagtcctgacag

SEQ ID NO: 189025 - DNA, 25 bp, Saccharomyces pastorianus
tcctgacagtagatgtctggcagct

SEQ ID NO: 189026 - DNA, 25 bp, Saccharomyces pastorianus
agtggtagtctgttactagtcctga

SEQ ID NO: 189027 - DNA, 25 bp, Saccharomyces pastorianus
tcatcacctgctgcgatactttctg

SEQ ID NO: 189028 - DNA, 25 bp, Saccharomyces pastorianus
tcacctgctgcgatactttctgcac

SEQ ID NO: 189029 - DNA, 25 bp, Saccharomyces pastorianus
agatgtctggcagctggtagtagca

SEQ ID NO: 189030 - DNA, 25 bp, Saccharomyces pastorianus
caagctaatcaaatccgatgtagtg

SEQ ID NO: 189031 - DNA, 25 bp, Saccharomyces pastorianus
aatcaagctaatcaaatccgatgta

SEQ ID NO: 189032 - DNA, 25 bp, Saccharomyces pastorianus
gctaatcaaatccgatgtagtgtaa

SEQ ID NO: 189033 - DNA, 25 bp, Saccharomyces pastorianus
tcaagctaatcaaatccgatgtagt

SEQ ID NO: 189034 - DNA, 25 bp, Saccharomyces pastorianus
ctaatcaaatccgatgtagtgtaac

SEQ ID NO: 189035 - DNA, 25 bp, Saccharomyces pastorianus
taatcaaatccgatgtagtgtaacg

SEQ ID NO: 189036 - DNA, 25 bp, Saccharomyces pastorianus
agctaatcaaatccgatgtagtgta

SEQ ID NO: 189037 - DNA, 25 bp, Saccharomyces pastorianus
caaatccgatgtagtgtaacggcta

SEQ ID NO: 189038 - DNA, 25 bp, Saccharomyces pastorianus
atcaagctaatcaaatccgatgtag

SEQ ID NO: 189039 - DNA, 25 bp, Saccharomyces pastorianus
aagctaatcaaatccgatgtagtgt

SEQ ID NO: 189040 - DNA, 25 bp, Saccharomyces pastorianus
aatcaaatccgatgtagtgtaacgg

SEQ ID NO: 189041 - DNA, 25 bp, Saccharomyces pastorianus
ctgactttgtttccggcgcacctat

SEQ ID NO: 189042 - DNA, 25 bp, Saccharomyces pastorianus
tactttcactgactttgtttccggc

SEQ ID NO: 189043 - DNA, 25 bp, Saccharomyces pastorianus
gtactttcactgactttgtttccgg

SEQ ID NO: 189044 - DNA, 25 bp, Saccharomyces pastorianus
tttcactgactttgtttccggcgca

SEQ ID NO: 189045 - DNA, 25 bp, Saccharomyces pastorianus
cggcgcacctattgtaaggagtctt

SEQ ID NO: 189046 - DNA, 25 bp, Saccharomyces pastorianus
ttcactgactttgtttccggcgcac

SEQ ID NO: 189047 - DNA, 25 bp, Saccharomyces pastorianus
actttcactgactttgtttccggcg

SEQ ID NO: 189048 - DNA, 25 bp, Saccharomyces pastorianus
gtttccggcgcacctattgtaagga

SEQ ID NO: 189049 - DNA, 25 bp, Saccharomyces pastorianus
cgtactttcactgactttgtttccg

SEQ ID NO: 189050 - DNA, 25 bp, Saccharomyces pastorianus
aaagttgtcatttccgtcatggtcg

SEQ ID NO: 189051 - DNA, 25 bp, Saccharomyces pastorianus
actgactttgtttccggcgcaccta

SEQ ID NO: 189052 - DNA, 25 bp, Saccharomyces pastorianus
ataacactatgtagaactatcgatt

SEQ ID NO: 189053 - DNA, 25 bp, Saccharomyces pastorianus
tatgtagaactatcgattccctttt

SEQ ID NO: 189054 - DNA, 25 bp, Saccharomyces pastorianus
agaactatcgattcccttttgtgga

SEQ ID NO: 189055 - DNA, 25 bp, Saccharomyces pastorianus
taacactatgtagaactatcgattc

SEQ ID NO: 189056 - DNA, 25 bp, Saccharomyces pastorianus
aacactatgtagaactatcgattcc

SEQ ID NO: 189057 - DNA, 25 bp, Saccharomyces pastorianus
atgtagaactatcgattcccttttg

SEQ ID NO: 189058 - DNA, 25 bp, Saccharomyces pastorianus
tagaactatcgattcccttttgtgg

SEQ ID NO: 189059 - DNA, 25 bp, Saccharomyces pastorianus
actatgtagaactatcgattccctt

SEQ ID NO: 189060 - DNA, 25 bp, Saccharomyces pastorianus
acactatgtagaactatcgattccc

SEQ ID NO: 189061 - DNA, 25 bp, Saccharomyces pastorianus
cactatgtagaactatcgattccct

SEQ ID NO: 189062 - DNA, 25 bp, Saccharomyces pastorianus
ctatgtagaactatcgattcccttt

SEQ ID NO: 189063 - DNA, 25 bp, Saccharomyces pastorianus
atgccagtaccaatgcgagtaccaa

SEQ ID NO: 189064 - DNA, 25 bp, Saccharomyces pastorianus
gtaccaatgcgagtaccaactccag

SEQ ID NO: 189065 - DNA, 25 bp, Saccharomyces pastorianus
agtaccaatgcgagtaccaactcca

SEQ ID NO: 189066 - DNA, 25 bp, Saccharomyces pastorianus
taccaatgcgagtaccaactccagc

SEQ ID NO: 189067 - DNA, 25 bp, Saccharomyces pastorianus
gctaatgccagtaccaatgcgagta

SEQ ID NO: 189068 - DNA, 25 bp, Saccharomyces pastorianus
ctaatgccagtaccaatgcgagtac

SEQ ID NO: 189069 - DNA, 25 bp, Saccharomyces pastorianus
gccagtaccaatgcgagtaccaact

SEQ ID NO: 189070 - DNA, 25 bp, Saccharomyces pastorianus
tgccagtaccaatgcgagtaccaac

SEQ ID NO: 189071 - DNA, 25 bp, Saccharomyces pastorianus
taatgccagtaccaatgcgagtacc

SEQ ID NO: 189072 - DNA, 25 bp, Saccharomyces pastorianus
tgctaatgccagtaccaatgcgagt

SEQ ID NO: 189073 - DNA, 25 bp, Saccharomyces pastorianus
aatgccagtaccaatgcgagtacca

SEQ ID NO: 189074 - DNA, 25 bp, Saccharomyces pastorianus
atattctcggtgatccatctattga

SEQ ID NO: 189075 - DNA, 25 bp, Saccharomyces pastorianus
tgggtgttacgctttggactctaaa

SEQ ID NO: 189076 - DNA, 25 bp, Saccharomyces pastorianus
aaggccttaggctacgtcgcaattc

SEQ ID NO: 189077 - DNA, 25 bp, Saccharomyces pastorianus
cccacagcttgcttctgcagagaag

SEQ ID NO: 189078 - DNA, 25 bp, Saccharomyces pastorianus
actaaggcacttgatttcgttgcaa

SEQ ID NO: 189079 - DNA, 25 bp, Saccharomyces pastorianus
gaaatcacttattccttcaactaag

SEQ ID NO: 189080 - DNA, 25 bp, Saccharomyces pastorianus
aaaattctctgcagaatccctccaa

SEQ ID NO: 189081 - DNA, 25 bp, Saccharomyces pastorianus
gaacctaatgaataccttgacttga

SEQ ID NO: 189082 - DNA, 25 bp, Saccharomyces pastorianus
gttgacaatgcctccaaaaatgatg

SEQ ID NO: 189083 - DNA, 25 bp, Saccharomyces pastorianus
gaatagccactacaccttctaaaga

SEQ ID NO: 189084 - DNA, 25 bp, Saccharomyces pastorianus
aaatgccgcattacttgatcttgtg

SEQ ID NO: 189085 - DNA, 25 bp, Saccharomyces pastorianus
atagttttgaaatgtgcggtttgaa

SEQ ID NO: 189086 - DNA, 25 bp, Saccharomyces pastorianus
gcgacgacactgacaagcctttgaa

SEQ ID NO: 189087 - DNA, 25 bp, Saccharomyces pastorianus
cagacgttccataacatcgcacggg

SEQ ID NO: 189088 - DNA, 25 bp, Saccharomyces pastorianus
acgacccgatgctgttgtaaatgtg

SEQ ID NO: 189089 - DNA, 25 bp, Saccharomyces pastorianus
ttatggaacaacgacccgatgctgt

SEQ ID NO: 189090 - DNA, 25 bp, Saccharomyces pastorianus
gcctttgaacttagatgctatgact

SEQ ID NO: 189091 - DNA, 25 bp, Saccharomyces pastorianus
aagtgtagcaattagttttgtcaaa

SEQ ID NO: 189092 - DNA, 25 bp, Saccharomyces pastorianus
atgactacaaaggacactggagttt

SEQ ID NO: 189093 - DNA, 25 bp, Saccharomyces pastorianus
gcggtttgaaaaatacactgactac

SEQ ID NO: 189094 - DNA, 25 bp, Saccharomyces pastorianus
acactgactacttcaattatggaac

SEQ ID NO: 189095 - DNA, 25 bp, Saccharomyces pastorianus
agtgttggaatacacgtcagacgtt

SEQ ID NO: 189096 - DNA, 25 bp, Saccharomyces pastorianus
gagagaccgccaaattggtgtggaa

SEQ ID NO: 189097 - DNA, 25 bp, Saccharomyces pastorianus
gttgaatgagagaccgccaaattgg

SEQ ID NO: 189098 - DNA, 25 bp, Saccharomyces pastorianus
gctaagtgatctattcttcggtaaa

SEQ ID NO: 189099 - DNA, 25 bp, Saccharomyces pastorianus
agtgatctattcttcggtaaaaccg

SEQ ID NO: 189100 - DNA, 25 bp, Saccharomyces pastorianus
tctattcttcggtaaaaccgacgag

SEQ ID NO: 189101 - DNA, 25 bp, Saccharomyces pastorianus
caaattggtgtggaagagacgaact

SEQ ID NO: 189102 - DNA, 25 bp, Saccharomyces pastorianus
tgtgaagttgaatgagagaccgcca

SEQ ID NO: 189103 - DNA, 25 bp, Saccharomyces pastorianus
gtacggatgttaatgattggatcaa

SEQ ID NO: 189104 - DNA, 25 bp, Saccharomyces pastorianus
gacgaacttgaaactctaatgggta

SEQ ID NO: 189105 - DNA, 25 bp, Saccharomyces pastorianus
aactctaatgggtagtacggatgtt

SEQ ID NO: 189106 - DNA, 25 bp, Saccharomyces pastorianus
tcaagctaagtgatctattcttcgg

SEQ ID NO: 189107 - DNA, 25 bp, Saccharomyces pastorianus
ttcctactactacttttcctagact

SEQ ID NO: 189108 - DNA, 25 bp, Saccharomyces pastorianus
gagtgcgtggagttactgacctcaa

SEQ ID NO: 189109 - DNA, 25 bp, Saccharomyces pastorianus
aagtaacccaagtagcgatgtgcgc

SEQ ID NO: 189110 - DNA, 25 bp, Saccharomyces pastorianus
aaacgttaacgcttcgatggcaggg

SEQ ID NO: 189111 - DNA, 25 bp, Saccharomyces pastorianus
gcttctttcatttttggtggcgcag

SEQ ID NO: 189112 - DNA, 25 bp, Saccharomyces pastorianus
atccttctgcgtcggtgatacattt

SEQ ID NO: 189113 - DNA, 25 bp, Saccharomyces pastorianus
aaaccctcttccactaggattggcg

SEQ ID NO: 189114 - DNA, 25 bp, Saccharomyces pastorianus
atacttgggttttacctggctggat

SEQ ID NO: 189115 - DNA, 25 bp, Saccharomyces pastorianus
gcgtccttctcgttcatgtgtttaa

SEQ ID NO: 189116 - DNA, 25 bp, Saccharomyces pastorianus
ggcgcagttgttttgttgtcaggac

SEQ ID NO: 189117 - DNA, 25 bp, Saccharomyces pastorianus
gtgcgtcggttcttttacatcaaac

SEQ ID NO: 189118 - DNA, 25 bp, Saccharomyces pastorianus
aatcacaacaacaacaatcacaaca

SEQ ID NO: 189119 - DNA, 25 bp, Saccharomyces pastorianus
tcacaatcacaacaacaacaatcac

SEQ ID NO: 189120 - DNA, 25 bp, Saccharomyces pastorianus
cacaatcacaacaacaacaatcaca

SEQ ID NO: 189121 - DNA, 25 bp, Saccharomyces pastorianus
acctcaatcacaatcacaacaacaa

SEQ ID NO: 189122 - DNA, 25 bp, Saccharomyces pastorianus
aacctcaatcacaatcacaacaaca

SEQ ID NO: 189123 - DNA, 25 bp, Saccharomyces pastorianus
cctcaatcacaatcacaacaacaac

SEQ ID NO: 189124 - DNA, 25 bp, Saccharomyces pastorianus
aatcacaatcacaacaacaacaatc

SEQ ID NO: 189125 - DNA, 25 bp, Saccharomyces pastorianus
tcaatcacaatcacaacaacaacaa

SEQ ID NO: 189126 - DNA, 25 bp, Saccharomyces pastorianus
ctcaatcacaatcacaacaacaaca

SEQ ID NO: 189127 - DNA, 25 bp, Saccharomyces pastorianus
caatcacaatcacaacaacaacaat

SEQ ID NO: 189128 - DNA, 25 bp, Saccharomyces pastorianus
atcacaatcacaacaacaacaatca

SEQ ID NO: 189129 - DNA, 25 bp, Saccharomyces pastorianus
taagttcttgcccacattgagtaat

SEQ ID NO: 189130 - DNA, 25 bp, Saccharomyces pastorianus
agatagttctgatcctgaaggtcca

SEQ ID NO: 189131 - DNA, 25 bp, Saccharomyces pastorianus
ggcgttgttattatgcaaagctctg

SEQ ID NO: 189132 - DNA, 25 bp, Saccharomyces pastorianus
gagtaatggtgctttcgatgacgaa

SEQ ID NO: 189133 - DNA, 25 bp, Saccharomyces pastorianus
gtgcttccgacgtccataagaaatt

SEQ ID NO: 189134 - DNA, 25 bp, Saccharomyces pastorianus
gttccaacctatacatctggccaat

SEQ ID NO: 189135 - DNA, 25 bp, Saccharomyces pastorianus
gaattatcccgtaagttcttgccca

SEQ ID NO: 189136 - DNA, 25 bp, Saccharomyces pastorianus
aggtccagctgaagcgttttttcaa

SEQ ID NO: 189137 - DNA, 25 bp, Saccharomyces pastorianus
ggaagtagccaagcacagctgtgta

SEQ ID NO: 189138 - DNA, 25 bp, Saccharomyces pastorianus
aagatataggtgcttccgacgtcca

SEQ ID NO: 189139 - DNA, 25 bp, Saccharomyces pastorianus
gatgctttaaatcctaatggcgttg

SEQ ID NO: 189140 - DNA, 25 bp, Saccharomyces pastorianus
agtggtaccaattgtgattcagatc

SEQ ID NO: 189141 - DNA, 25 bp, Saccharomyces pastorianus
cagaatggagtgtacgcaattgttt

SEQ ID NO: 189142 - DNA, 25 bp, Saccharomyces pastorianus
cggtcaaaactctacctaatttcag

SEQ ID NO: 189143 - DNA, 25 bp, Saccharomyces pastorianus
gatactcgaccctgcaaagatactt

SEQ ID NO: 189144 - DNA, 25 bp, Saccharomyces pastorianus
tcagtattgcaagtggtagtaccca

SEQ ID NO: 189145 - DNA, 25 bp, Saccharomyces pastorianus
atttggcatgaatacctttgtgaaa

SEQ ID NO: 189146 - DNA, 25 bp, Saccharomyces pastorianus
gacacccaacctgctataagaacta

SEQ ID NO: 189147 - DNA, 25 bp, Saccharomyces pastorianus
aaaggatggatactcgaccctgcaa

SEQ ID NO: 189148 - DNA, 25 bp, Saccharomyces pastorianus
gaagcacaagacacctcaaatcaga

SEQ ID NO: 189149 - DNA, 25 bp, Saccharomyces pastorianus
gattcagatcgtcaacgacacccaa

SEQ ID NO: 189150 - DNA, 25 bp, Saccharomyces pastorianus
gagagtttcgccattctaattaaaa

SEQ ID NO: 189151 - DNA, 25 bp, Saccharomyces pastorianus
ctgccgccaatttgaatttcttcca

SEQ ID NO: 189152 - DNA, 25 bp, Saccharomyces pastorianus
gctagtgagaatctgccccgatgaa

SEQ ID NO: 189153 - DNA, 25 bp, Saccharomyces pastorianus
actgtgtggtatgttgtctctaatc

SEQ ID NO: 189154 - DNA, 25 bp, Saccharomyces pastorianus
atcaatgtggataaccgcggtactg

SEQ ID NO: 189155 - DNA, 25 bp, Saccharomyces pastorianus
cagtgaaggtatttccggctgcttt

SEQ ID NO: 189156 - DNA, 25 bp, Saccharomyces pastorianus
catggcgatcattggcagctgtcaa

SEQ ID NO: 189157 - DNA, 25 bp, Saccharomyces pastorianus
acgtatttggactcgagttcctcag

SEQ ID NO: 189158 - DNA, 25 bp, Saccharomyces pastorianus
ttcactttgcatttttacgggccag

SEQ ID NO: 189159 - DNA, 25 bp, Saccharomyces pastorianus
ttccggctgctttcgttcaaagatt

SEQ ID NO: 189160 - DNA, 25 bp, Saccharomyces pastorianus
tacgggccagagttattcttcaaga

SEQ ID NO: 189161 - DNA, 25 bp, Saccharomyces pastorianus
ttattttctcacgatcatggcgatc

SEQ ID NO: 189162 - DNA, 25 bp, Saccharomyces pastorianus
tcaagtatggttcctctgcttctaa

SEQ ID NO: 189163 - DNA, 25 bp, Saccharomyces pastorianus
tgtcaagactgtaacctctgaggct

SEQ ID NO: 189164 - DNA, 25 bp, Saccharomyces pastorianus
gaaactgtctcttcaaagtcgtaca

SEQ ID NO: 189165 - DNA, 25 bp, Saccharomyces pastorianus
actggttccgaagcatctagttcaa

SEQ ID NO: 189166 - DNA, 25 bp, Saccharomyces pastorianus
tcactgtgaggacaacgcctgtagt

SEQ ID NO: 189167 - DNA, 25 bp, Saccharomyces pastorianus
tgaggctcctaaagtaacttccgcc

SEQ ID NO: 189168 - DNA, 25 bp, Saccharomyces pastorianus
tgtcacgtctgaagctccagtatct

SEQ ID NO: 189169 - DNA, 25 bp, Saccharomyces pastorianus
aacggatgtcatgttgttccagccc

SEQ ID NO: 189170 - DNA, 25 bp, Saccharomyces pastorianus
tctgaagctcctaaaccaactaccg

SEQ ID NO: 189171 - DNA, 25 bp, Saccharomyces pastorianus
ctgcttctaaaaccctcactggtgt

SEQ ID NO: 189172 - DNA, 25 bp, Saccharomyces pastorianus
aagtcgtacaccactttcactgtta

SEQ ID NO: 189173 - DNA, 25 bp, Saccharomyces pastorianus
taatctaccagtgaccaatcctagc

SEQ ID NO: 189174 - DNA, 25 bp, Saccharomyces pastorianus
aagtcggatgacgttatcgtgaata

SEQ ID NO: 189175 - DNA, 25 bp, Saccharomyces pastorianus
tctatctcgagacaaggaagtatct

SEQ ID NO: 189176 - DNA, 25 bp, Saccharomyces pastorianus
tgtggcgattctatctcgagacaag

SEQ ID NO: 189177 - DNA, 25 bp, Saccharomyces pastorianus
ccaatcctagcggtttaagagagtc

SEQ ID NO: 189178 - DNA, 25 bp, Saccharomyces pastorianus
accagtgaccaatcctagcggttta

SEQ ID NO: 189179 - DNA, 25 bp, Saccharomyces pastorianus
cctagcggtttaagagagtctatta

SEQ ID NO: 189180 - DNA, 25 bp, Saccharomyces pastorianus
ggcgattctatctcgagacaaggaa

SEQ ID NO: 189181 - DNA, 25 bp, Saccharomyces pastorianus
agttgtggcgattctatctcgagac

SEQ ID NO: 189182 - DNA, 25 bp, Saccharomyces pastorianus
cggatgacgttatcgtgaataattc

SEQ ID NO: 189183 - DNA, 25 bp, Saccharomyces pastorianus
gagtagtagtagttgtggcgattct

SEQ ID NO: 189184 - DNA, 25 bp, Saccharomyces pastorianus
gttcttctacgttcttatttggcca

SEQ ID NO: 189185 - DNA, 25 bp, Saccharomyces pastorianus
cagttggtctttgtcaggtaatgta

SEQ ID NO: 189186 - DNA, 25 bp, Saccharomyces pastorianus
ttggccagtgtttctcaagatcgca

SEQ ID NO: 189187 - DNA, 25 bp, Saccharomyces pastorianus
acttatgttctggaaagcaccttag

SEQ ID NO: 189188 - DNA, 25 bp, Saccharomyces pastorianus
aaagaatctcgcaagtttgttactg

SEQ ID NO: 189189 - DNA, 25 bp, Saccharomyces pastorianus
gtacaattcagatgcccaaacttat

SEQ ID NO: 189190 - DNA, 25 bp, Saccharomyces pastorianus
agctctttccggtggcgataataaa

SEQ ID NO: 189191 - DNA, 25 bp, Saccharomyces pastorianus
aggtaatgtactagctctttccggt

SEQ ID NO: 189192 - DNA, 25 bp, Saccharomyces pastorianus
cttagaaggtcacagcgattgggtt

SEQ ID NO: 189193 - DNA, 25 bp, Saccharomyces pastorianus
agcatggtcacctactgttcttcta

SEQ ID NO: 189194 - DNA, 25 bp, Saccharomyces pastorianus
tcgcacctgtattatttggactcaa

SEQ ID NO: 189195 - DNA, 25 bp, Saccharomyces pastorianus
acacaattgacagccgaatacgagg

SEQ ID NO: 189196 - DNA, 25 bp, Saccharomyces pastorianus
gtctgaagaagatgtcacacaattg

SEQ ID NO: 189197 - DNA, 25 bp, Saccharomyces pastorianus
acgaggctattgatgtcttccggtt

SEQ ID NO: 189198 - DNA, 25 bp, Saccharomyces pastorianus
attgacagccgaatacgaggctatt

SEQ ID NO: 189199 - DNA, 25 bp, Saccharomyces pastorianus
agccgaatacgaggctattgatgtc

SEQ ID NO: 189200 - DNA, 25 bp, Saccharomyces pastorianus
tcacacaattgacagccgaatacga

SEQ ID NO: 189201 - DNA, 25 bp, Saccharomyces pastorianus
aaaggtgtctgaagaagatgtcaca

SEQ ID NO: 189202 - DNA, 25 bp, Saccharomyces pastorianus
ggctattgatgtcttccggttcaac

SEQ ID NO: 189203 - DNA, 25 bp, Saccharomyces pastorianus
aatacgaggctattgatgtcttccg

SEQ ID NO: 189204 - DNA, 25 bp, Saccharomyces pastorianus
gatgtcacacaattgacagccgaat

SEQ ID NO: 189205 - DNA, 25 bp, Saccharomyces pastorianus
gaggctattgatgtcttccggttca

SEQ ID NO: 189206 - DNA, 25 bp, Saccharomyces pastorianus
gttaccaaacacaagagttccgcat

SEQ ID NO: 189207 - DNA, 25 bp, Saccharomyces pastorianus
gctcaggaggttttactttcggcga

SEQ ID NO: 189208 - DNA, 25 bp, Saccharomyces pastorianus
acacgtatgtaacggcccatgccta

SEQ ID NO: 189209 - DNA, 25 bp, Saccharomyces pastorianus
gcaaactgctaccacacgtatgtaa

SEQ ID NO: 189210 - DNA, 25 bp, Saccharomyces pastorianus
ctctgatttgttgggccctctatat

SEQ ID NO: 189211 - DNA, 25 bp, Saccharomyces pastorianus
aatttgttacggctctgatttgttg

SEQ ID NO: 189212 - DNA, 25 bp, Saccharomyces pastorianus
gatggcttcagatcaattttctaca

SEQ ID NO: 189213 - DNA, 25 bp, Saccharomyces pastorianus
actccaactctggtgacctacaaag

SEQ ID NO: 189214 - DNA, 25 bp, Saccharomyces pastorianus
aattttctacattcttaggaccaga

SEQ ID NO: 189215 - DNA, 25 bp, Saccharomyces pastorianus
gcgaccgttacacctgcagagatga

SEQ ID NO: 189216 - DNA, 25 bp, Saccharomyces pastorianus
gaactgttatttgactccaactctg

SEQ ID NO: 189217 - DNA, 25 bp, Saccharomyces pastorianus
ttttctgttgatgaggctcgggaat

SEQ ID NO: 189218 - DNA, 25 bp, Saccharomyces pastorianus
tgaggctcgggaattaactgatgaa

SEQ ID NO: 189219 - DNA, 25 bp, Saccharomyces pastorianus
ttctgttgatgaggctcgggaatta

SEQ ID NO: 189220 - DNA, 25 bp, Saccharomyces pastorianus
acttgcaatcctttcaatttttctg

SEQ ID NO: 189221 - DNA, 25 bp, Saccharomyces pastorianus
tgcaatcctttcaatttttctgttg

SEQ ID NO: 189222 - DNA, 25 bp, Saccharomyces pastorianus
gatgaggctcgggaattaactgatg

SEQ ID NO: 189223 - DNA, 25 bp, Saccharomyces pastorianus
cttgcaatcctttcaatttttctgt

SEQ ID NO: 189224 - DNA, 25 bp, Saccharomyces pastorianus
aatttttctgttgatgaggctcggg

SEQ ID NO: 189225 - DNA, 25 bp, Saccharomyces pastorianus
tctactaatacttgcaatcctttca

SEQ ID NO: 189226 - DNA, 25 bp, Saccharomyces pastorianus
atttttctgttgatgaggctcggga

SEQ ID NO: 189227 - DNA, 25 bp, Saccharomyces pastorianus
actaatacttgcaatcctttcaatt

SEQ ID NO: 189228 - DNA, 25 bp, Saccharomyces pastorianus
atctattacattatgggtggtatgt

SEQ ID NO: 189229 - DNA, 25 bp, Saccharomyces pastorianus
ctattacattatgggtggtatgttg

SEQ ID NO: 189230 - DNA, 25 bp, Saccharomyces pastorianus
cattatgggtggtatgttggaataa

SEQ ID NO: 189231 - DNA, 25 bp, Saccharomyces pastorianus
cattagatctattacattatgggtg

SEQ ID NO: 189232 - DNA, 25 bp, Saccharomyces pastorianus
tctattacattatgggtggtatgtt

SEQ ID NO: 189233 - DNA, 25 bp, Saccharomyces pastorianus
ttagatctattacattatgggtggt

SEQ ID NO: 189234 - DNA, 25 bp, Saccharomyces pastorianus
attatgggtggtatgttggaataaa

SEQ ID NO: 189235 - DNA, 25 bp, Saccharomyces pastorianus
tcattagatctattacattatgggt

SEQ ID NO: 189236 - DNA, 25 bp, Saccharomyces pastorianus
gatctattacattatgggtggtatg

SEQ ID NO: 189237 - DNA, 25 bp, Saccharomyces pastorianus
ttcattagatctattacattatggg

SEQ ID NO: 189238 - DNA, 25 bp, Saccharomyces pastorianus
attagatctattacattatgggtgg

SEQ ID NO: 189239 - DNA, 25 bp, Saccharomyces pastorianus
ttagaagttctcctccaggatttag

SEQ ID NO: 189240 - DNA, 25 bp, Saccharomyces pastorianus
gaatccataaaagggaatctgcaat

SEQ ID NO: 189241 - DNA, 25 bp, Saccharomyces pastorianus
atgttagaagttctcctccaggatt

SEQ ID NO: 189242 - DNA, 25 bp, Saccharomyces pastorianus
tccataaaagggaatctgcaattct

SEQ ID NO: 189243 - DNA, 25 bp, Saccharomyces pastorianus
atccataaaagggaatctgcaattc

SEQ ID NO: 189244 - DNA, 25 bp, Saccharomyces pastorianus
tgttagaagttctcctccaggattt

SEQ ID NO: 189245 - DNA, 25 bp, Saccharomyces pastorianus
tctcctccaggatttaggaatccat

SEQ ID NO: 189246 - DNA, 25 bp, Saccharomyces pastorianus
gttagaagttctcctccaggattta

SEQ ID NO: 189247 - DNA, 25 bp, Saccharomyces pastorianus
ccataaaagggaatctgcaattcta

SEQ ID NO: 189248 - DNA, 25 bp, Saccharomyces pastorianus
tcctccaggatttaggaatccataa

SEQ ID NO: 189249 - DNA, 25 bp, Saccharomyces pastorianus
ctcctccaggatttaggaatccata

SEQ ID NO: 189250 - DNA, 25 bp, Saccharomyces pastorianus
tggatacaatttggcaccctacatg

SEQ ID NO: 189251 - DNA, 25 bp, Saccharomyces pastorianus
ggcaccctacatgtttttgttacta

SEQ ID NO: 189252 - DNA, 25 bp, Saccharomyces pastorianus
aaatatggatacaatttggcaccct

SEQ ID NO: 189253 - DNA, 25 bp, Saccharomyces pastorianus
tttctggcacacctattgtaaggag

SEQ ID NO: 189254 - DNA, 25 bp, Saccharomyces pastorianus
atggatacaatttggcaccctacat

SEQ ID NO: 189255 - DNA, 25 bp, Saccharomyces pastorianus
atacaatttggcaccctacatgttt

SEQ ID NO: 189256 - DNA, 25 bp, Saccharomyces pastorianus
aactttgtttctggcacacctattg

SEQ ID NO: 189257 - DNA, 25 bp, Saccharomyces pastorianus
tggcacacctattgtaaggagtctt

SEQ ID NO: 189258 - DNA, 25 bp, Saccharomyces pastorianus
aatatggatacaatttggcacccta

SEQ ID NO: 189259 - DNA, 25 bp, Saccharomyces pastorianus
gtttctggcacacctattgtaagga

SEQ ID NO: 189260 - DNA, 25 bp, Saccharomyces pastorianus
acacctattgtaaggagtcttcaga

SEQ ID NO: 189261 - DNA, 25 bp, Saccharomyces pastorianus
cattatgggtggtatgttggaataa

SEQ ID NO: 189262 - DNA, 25 bp, Saccharomyces pastorianus
tctactaactagtatttacgttact

SEQ ID NO: 189263 - DNA, 25 bp, Saccharomyces pastorianus
ttatgggtggtatgttggaataaaa

SEQ ID NO: 189264 - DNA, 25 bp, Saccharomyces pastorianus
catctactaactagtatttacgtta

SEQ ID NO: 189265 - DNA, 25 bp, Saccharomyces pastorianus
attatgggtggtatgttggaataaa

SEQ ID NO: 189266 - DNA, 25 bp, Saccharomyces pastorianus
tgggtggtatgttggaataaaaatc

SEQ ID NO: 189267 - DNA, 25 bp, Saccharomyces pastorianus
gggtggtatgttggaataaaaatca

SEQ ID NO: 189268 - DNA, 25 bp, Saccharomyces pastorianus
atgggtggtatgttggaataaaaat

SEQ ID NO: 189269 - DNA, 25 bp, Saccharomyces pastorianus
tatgggtggtatgttggaataaaaa

SEQ ID NO: 189270 - DNA, 25 bp, Saccharomyces pastorianus
tcatctactaactagtatttacgtt

SEQ ID NO: 189271 - DNA, 25 bp, Saccharomyces pastorianus
gttggaataaaaatcaactatcatc

SEQ ID NO: 189272 - DNA, 25 bp, Saccharomyces pastorianus
ataaatatggtggtcagccttttgc

SEQ ID NO: 189273 - DNA, 25 bp, Saccharomyces pastorianus
gtctcggttacgctgcatcatacaa

SEQ ID NO: 189274 - DNA, 25 bp, Saccharomyces pastorianus
gtccgcctctgcaggcataatggaa

SEQ ID NO: 189275 - DNA, 25 bp, Saccharomyces pastorianus
ctctggccaggaattgaatcgtgtt

SEQ ID NO: 189276 - DNA, 25 bp, Saccharomyces pastorianus
aaattgccgtcttccatcctgtgga

SEQ ID NO: 189277 - DNA, 25 bp, Saccharomyces pastorianus
catcctgtggacaccatttccaaaa

SEQ ID NO: 189278 - DNA, 25 bp, Saccharomyces pastorianus
gatcatttcagcgaacctttgggca

SEQ ID NO: 189279 - DNA, 25 bp, Saccharomyces pastorianus
gctgcatcatacaaagttcttcaaa

SEQ ID NO: 189280 - DNA, 25 bp, Saccharomyces pastorianus
ttccaaaagactgatgtccaaccac

SEQ ID NO: 189281 - DNA, 25 bp, Saccharomyces pastorianus
gaatcgtgttatttttcgtgatcat

SEQ ID NO: 189282 - DNA, 25 bp, Saccharomyces pastorianus
acaccaaaataacctctggccagga

SEQ ID NO: 189283 - DNA, 25 bp, Saccharomyces pastorianus
gatctgagcgatctcaacgatacta

SEQ ID NO: 189284 - DNA, 25 bp, Saccharomyces pastorianus
agcgcaactggctttgctgttatca

SEQ ID NO: 189285 - DNA, 25 bp, Saccharomyces pastorianus
acttgttgtcatcagagaattcttc

SEQ ID NO: 189286 - DNA, 25 bp, Saccharomyces pastorianus
tttaacaaattcttcaacggtgact

SEQ ID NO: 189287 - DNA, 25 bp, Saccharomyces pastorianus
tctgattttgatgataccgacgtaa

SEQ ID NO: 189288 - DNA, 25 bp, Saccharomyces pastorianus
taacaatgacttactacgggagctt

SEQ ID NO: 189289 - DNA, 25 bp, Saccharomyces pastorianus
agatcccgattccttgacagtttat

SEQ ID NO: 189290 - DNA, 25 bp, Saccharomyces pastorianus
gtcactgtttgttcgttcgaagcaa

SEQ ID NO: 189291 - DNA, 25 bp, Saccharomyces pastorianus
gaacctcaatggctatacttttaca

SEQ ID NO: 189292 - DNA, 25 bp, Saccharomyces pastorianus
gctcagttgtatggatgcattgtca

SEQ ID NO: 189293 - DNA, 25 bp, Saccharomyces pastorianus
acgggagctttcatttgcattcaat

SEQ ID NO: 189294 - DNA, 25 bp, Saccharomyces pastorianus
agcaaaatcatcaacttcgtttaaa

SEQ ID NO: 189295 - DNA, 25 bp, Saccharomyces pastorianus
ttttcccttttagaagcaaaatcat

SEQ ID NO: 189296 - DNA, 25 bp, Saccharomyces pastorianus
ctttattactgtcgccaaaggtgga

SEQ ID NO: 189297 - DNA, 25 bp, Saccharomyces pastorianus
atcatcaacttcgtttaaaccatac

SEQ ID NO: 189298 - DNA, 25 bp, Saccharomyces pastorianus
tcatcatctttattactgtcgccaa

SEQ ID NO: 189299 - DNA, 25 bp, Saccharomyces pastorianus
gtcgccaaaggtggattgtccaagt

SEQ ID NO: 189300 - DNA, 25 bp, Saccharomyces pastorianus
ctgtcgccaaaggtggattgtccaa

SEQ ID NO: 189301 - DNA, 25 bp, Saccharomyces pastorianus
gccaaaggtggattgtccaagtaaa

SEQ ID NO: 189302 - DNA, 25 bp, Saccharomyces pastorianus
tactgtcgccaaaggtggattgtcc

SEQ ID NO: 189303 - DNA, 25 bp, Saccharomyces pastorianus
atctttattactgtcgccaaaggtg

SEQ ID NO: 189304 - DNA, 25 bp, Saccharomyces pastorianus
atcatctttattactgtcgccaaag

SEQ ID NO: 189305 - DNA, 25 bp, Saccharomyces pastorianus
attccacaccatggcccattctcac

SEQ ID NO: 189306 - DNA, 25 bp, Saccharomyces pastorianus
ttcatattccacaccatggcccatt

SEQ ID NO: 189307 - DNA, 25 bp, Saccharomyces pastorianus
gttaccctactttcatattccacac

SEQ ID NO: 189308 - DNA, 25 bp, Saccharomyces pastorianus
tcatattccacaccatggcccattc

SEQ ID NO: 189309 - DNA, 25 bp, Saccharomyces pastorianus
catattccacaccatggcccattct

SEQ ID NO: 189310 - DNA, 25 bp, Saccharomyces pastorianus
acaccatggcccattctcactaaat

SEQ ID NO: 189311 - DNA, 25 bp, Saccharomyces pastorianus
tattccacaccatggcccattctca

SEQ ID NO: 189312 - DNA, 25 bp, Saccharomyces pastorianus
cactctcaagttaccctactttcat

SEQ ID NO: 189313 - DNA, 25 bp, Saccharomyces pastorianus
agttaccctactttcatattccaca

SEQ ID NO: 189314 - DNA, 25 bp, Saccharomyces pastorianus
tccacaccatggcccattctcacta

SEQ ID NO: 189315 - DNA, 25 bp, Saccharomyces pastorianus
atattccacaccatggcccattctc

SEQ ID NO: 189316 - DNA, 25 bp, Saccharomyces pastorianus
gcagtccaggatggttcatcacaag

SEQ ID NO: 189317 - DNA, 25 bp, Saccharomyces pastorianus
aggtcacaattataggctctggtcc

SEQ ID NO: 189318 - DNA, 25 bp, Saccharomyces pastorianus
gatggttcatcacaaggtcacaatt

SEQ ID NO: 189319 - DNA, 25 bp, Saccharomyces pastorianus
acatatctaggtcggttgggcacac

SEQ ID NO: 189320 - DNA, 25 bp, Saccharomyces pastorianus
taggaccactgagaacatatctagg

SEQ ID NO: 189321 - DNA, 25 bp, Saccharomyces pastorianus
atgatagggcatataggaccactga

SEQ ID NO: 189322 - DNA, 25 bp, Saccharomyces pastorianus
cacacgggtgcagtccaggatggtt

SEQ ID NO: 189323 - DNA, 25 bp, Saccharomyces pastorianus
cacaattataggctctggtccagct

SEQ ID NO: 189324 - DNA, 25 bp, Saccharomyces pastorianus
ggtgcagtccaggatggttcatcac

SEQ ID NO: 189325 - DNA, 25 bp, Saccharomyces pastorianus
atatctaggtcggttgggcacacgg

SEQ ID NO: 189326 - DNA, 25 bp, Saccharomyces pastorianus
ggcatataggaccactgagaacata

SEQ ID NO: 189327 - DNA, 25 bp, Saccharomyces pastorianus
tcaagatgccagttcgaccgatttt

SEQ ID NO: 189328 - DNA, 25 bp, Saccharomyces pastorianus
atcaatcggaggactttacctgcgc

SEQ ID NO: 189329 - DNA, 25 bp, Saccharomyces pastorianus
atgccagttcgaccgatttttacgt

SEQ ID NO: 189330 - DNA, 25 bp, Saccharomyces pastorianus
aacgatgttgacatggtcggtgaaa

SEQ ID NO: 189331 - DNA, 25 bp, Saccharomyces pastorianus
ggcttctggccaagtttaacaatca

SEQ ID NO: 189332 - DNA, 25 bp, Saccharomyces pastorianus
ttgagtcattaattgccagttttgg

SEQ ID NO: 189333 - DNA, 25 bp, Saccharomyces pastorianus
agcatcaagcaaggcttctggccaa

SEQ ID NO: 189334 - DNA, 25 bp, Saccharomyces pastorianus
gaagattggccaagaagcatcaagc

SEQ ID NO: 189335 - DNA, 25 bp, Saccharomyces pastorianus
ctttacctgcgcactatgtcaagat

SEQ ID NO: 189336 - DNA, 25 bp, Saccharomyces pastorianus
ctacgccaaggagttaacttacaag

SEQ ID NO: 189337 - DNA, 25 bp, Saccharomyces pastorianus
gccagttttggcaaccaatacgtta

SEQ ID NO: 189338 - DNA, 25 bp, Saccharomyces pastorianus
aacggacaactaaagcgagcgctcg

SEQ ID NO: 189339 - DNA, 25 bp, Saccharomyces pastorianus
gacgatgcagtgttataccctctta

SEQ ID NO: 189340 - DNA, 25 bp, Saccharomyces pastorianus
gcgctcgtcctagtgttgaatgcaa

SEQ ID NO: 189341 - DNA, 25 bp, Saccharomyces pastorianus
ctcgacgactccaatcatcttaatg

SEQ ID NO: 189342 - DNA, 25 bp, Saccharomyces pastorianus
taggcttgcttgatattgtggccaa

SEQ ID NO: 189343 - DNA, 25 bp, Saccharomyces pastorianus
tggtggaatcttgagcattacttct

SEQ ID NO: 189344 - DNA, 25 bp, Saccharomyces pastorianus
ttaacgtagttaccgcggactcgct

SEQ ID NO: 189345 - DNA, 25 bp, Saccharomyces pastorianus
agctgtcgtggttctctaatactgg

SEQ ID NO: 189346 - DNA, 25 bp, Saccharomyces pastorianus
attgactttaccattgccgtttcag

SEQ ID NO: 189347 - DNA, 25 bp, Saccharomyces pastorianus
ttagctacaccaacatccattaacg

SEQ ID NO: 189348 - DNA, 25 bp, Saccharomyces pastorianus
attgtggatctcttatccggcattg

SEQ ID NO: 189349 - DNA, 25 bp, Saccharomyces pastorianus
gatatgttcttataaccctcctgga

SEQ ID NO: 189350 - DNA, 25 bp, Saccharomyces pastorianus
gtgcggctacaagtactgtggtacc

SEQ ID NO: 189351 - DNA, 25 bp, Saccharomyces pastorianus
tgataagcacggtgtcctcttcgtc

SEQ ID NO: 189352 - DNA, 25 bp, Saccharomyces pastorianus
agaacctggcgttgggctataccga

SEQ ID NO: 189353 - DNA, 25 bp, Saccharomyces pastorianus
gaagttaccaccataaatcctgcca

SEQ ID NO: 189354 - DNA, 25 bp, Saccharomyces pastorianus
tggtcagacacgctggccacgtatg

SEQ ID NO: 189355 - DNA, 25 bp, Saccharomyces pastorianus
tggaagtctaccacccaggtcgggt

SEQ ID NO: 189356 - DNA, 25 bp, Saccharomyces pastorianus
cggcggctagttcttctgaagttac

SEQ ID NO: 189357 - DNA, 25 bp, Saccharomyces pastorianus
tgtcgtccagtatggctgctccaaa

SEQ ID NO: 189358 - DNA, 25 bp, Saccharomyces pastorianus
gagtacgattgctcgggcacgctga

SEQ ID NO: 189359 - DNA, 25 bp, Saccharomyces pastorianus
taagtacaactactcgaatcccggg

SEQ ID NO: 189360 - DNA, 25 bp, Saccharomyces pastorianus
gatccgtgacggacgttgcatgtgt

SEQ ID NO: 189361 - DNA, 25 bp, Saccharomyces pastorianus
tattttgttaccgttgcccagcatt

SEQ ID NO: 189362 - DNA, 25 bp, Saccharomyces pastorianus
atgcttcttctgctagcggtacaaa

SEQ ID NO: 189363 - DNA, 25 bp, Saccharomyces pastorianus
atagagagctgttgcgatccgtgac

SEQ ID NO: 189364 - DNA, 25 bp, Saccharomyces pastorianus
actgccatagtgtccgctttgtatt

SEQ ID NO: 189365 - DNA, 25 bp, Saccharomyces pastorianus
ctccccaatctaccgactgaaaaag

SEQ ID NO: 189366 - DNA, 25 bp, Saccharomyces pastorianus
gtttccactgagtcgaaggaccttc

SEQ ID NO: 189367 - DNA, 25 bp, Saccharomyces pastorianus
aaaggcagtacgcatgcttcttctg

SEQ ID NO: 189368 - DNA, 25 bp, Saccharomyces pastorianus
aatttttcttcaatgactgccatag

SEQ ID NO: 189369 - DNA, 25 bp, Saccharomyces pastorianus
gcatgtgttcccttttttggtgtat

SEQ ID NO: 189370 - DNA, 25 bp, Saccharomyces pastorianus
gtcggaaacccagattttcttcaca

SEQ ID NO: 189371 - DNA, 25 bp, Saccharomyces pastorianus
aatttggcaccccacatgtttttgt

SEQ ID NO: 189372 - DNA, 25 bp, Saccharomyces pastorianus
ggcaccccacatgtttttgttacta

SEQ ID NO: 189373 - DNA, 25 bp, Saccharomyces pastorianus
ctgactttgtttctggcacacctat

SEQ ID NO: 189374 - DNA, 25 bp, Saccharomyces pastorianus
tggcaccccacatgtttttgttact

SEQ ID NO: 189375 - DNA, 25 bp, Saccharomyces pastorianus
atttggcaccccacatgtttttgtt

SEQ ID NO: 189376 - DNA, 25 bp, Saccharomyces pastorianus
ttcactgactttgtttctggcacac

SEQ ID NO: 189377 - DNA, 25 bp, Saccharomyces pastorianus
gtacaatttggcaccccacatgttt

SEQ ID NO: 189378 - DNA, 25 bp, Saccharomyces pastorianus
actttcactgactttgtttctggca

SEQ ID NO: 189379 - DNA, 25 bp, Saccharomyces pastorianus
ttggcaccccacatgtttttgttac

SEQ ID NO: 189380 - DNA, 25 bp, Saccharomyces pastorianus
gtttctggcacacctattgtaagga

SEQ ID NO: 189381 - DNA, 25 bp, Saccharomyces pastorianus
tttggcaccccacatgtttttgtta

SEQ ID NO: 189382 - DNA, 25 bp, Saccharomyces pastorianus
aatgtgatggtagtctaccctgctt

SEQ ID NO: 189383 - DNA, 25 bp, Saccharomyces pastorianus
tggtagtctaccctgcttttcgtgc

SEQ ID NO: 189384 - DNA, 25 bp, Saccharomyces pastorianus
aagatgatcatattctagagcagat

SEQ ID NO: 189385 - DNA, 25 bp, Saccharomyces pastorianus
ctcagcttttacaagcaagatgatc

SEQ ID NO: 189386 - DNA, 25 bp, Saccharomyces pastorianus
tgtgatggtagtctaccctgctttt

SEQ ID NO: 189387 - DNA, 25 bp, Saccharomyces pastorianus
taaaatgtgatggtagtctaccctg

SEQ ID NO: 189388 - DNA, 25 bp, Saccharomyces pastorianus
attctagagcagatcaagattctta

SEQ ID NO: 189389 - DNA, 25 bp, Saccharomyces pastorianus
ctgcaggaacaggaaagtaaaatgt

SEQ ID NO: 189390 - DNA, 25 bp, Saccharomyces pastorianus
acttgtacatatatgattaagggtg

SEQ ID NO: 189391 - DNA, 25 bp, Saccharomyces pastorianus
gcaagatgatcatattctagagcag

SEQ ID NO: 189392 - DNA, 25 bp, Saccharomyces pastorianus
gatggtagtctaccctgcttttcgt

SEQ ID NO: 189393 - DNA, 25 bp, Saccharomyces pastorianus
aatttcttcgaatccaagtctttca

SEQ ID NO: 189394 - DNA, 25 bp, Saccharomyces pastorianus
aaattagacaacaccactccttctc

SEQ ID NO: 189395 - DNA, 25 bp, Saccharomyces pastorianus
ttctctagccggtactgccaaaatt

SEQ ID NO: 189396 - DNA, 25 bp, Saccharomyces pastorianus
aaacattgctgtcgttgtcgagcca

SEQ ID NO: 189397 - DNA, 25 bp, Saccharomyces pastorianus
taatccaccaaagaacgtaacctca

SEQ ID NO: 189398 - DNA, 25 bp, Saccharomyces pastorianus
tttcaaaattttcttctcaatctag

SEQ ID NO: 189399 - DNA, 25 bp, Saccharomyces pastorianus
gatacaacaactttcatcaaaccta

SEQ ID NO: 189400 - DNA, 25 bp, Saccharomyces pastorianus
gaagacacagattactataacacat

SEQ ID NO: 189401 - DNA, 25 bp, Saccharomyces pastorianus
gagaacagcacatctactagcacca

SEQ ID NO: 189402 - DNA, 25 bp, Saccharomyces pastorianus
tcatctcttcataactaccttcaaa

SEQ ID NO: 189403 - DNA, 25 bp, Saccharomyces pastorianus
cgagccagctgccatcatcaaaaaa

SEQ ID NO: 189404 - DNA, 25 bp, Saccharomyces pastorianus
cattcctcagaaccagcatatatag

SEQ ID NO: 189405 - DNA, 25 bp, Saccharomyces pastorianus
tggtattcaaccagatatcatcatt

SEQ ID NO: 189406 - DNA, 25 bp, Saccharomyces pastorianus
aatggcctaccattgacatgccctt

SEQ ID NO: 189407 - DNA, 25 bp, Saccharomyces pastorianus
ggatttggctcttaacagaagtcgt

SEQ ID NO: 189408 - DNA, 25 bp, Saccharomyces pastorianus
gttacgatatggatgacgcgatgat

SEQ ID NO: 189409 - DNA, 25 bp, Saccharomyces pastorianus
acggtcaaaagggtgtctgttccag

SEQ ID NO: 189410 - DNA, 25 bp, Saccharomyces pastorianus
tcacgtatgactatcggtatgttcg

SEQ ID NO: 189411 - DNA, 25 bp, Saccharomyces pastorianus
gttgctgtcatttcatacactggtt

SEQ ID NO: 189412 - DNA, 25 bp, Saccharomyces pastorianus
gtctgttccagaaaatggcctacca

SEQ ID NO: 189413 - DNA, 25 bp, Saccharomyces pastorianus
tgacatgcccttcagtgaaactggt

SEQ ID NO: 189414 - DNA, 25 bp, Saccharomyces pastorianus
acgcttttccttcacgtatgactat

SEQ ID NO: 189415 - DNA, 25 bp, Saccharomyces pastorianus
agtggagatcatccgcatttaccct

SEQ ID NO: 189416 - DNA, 25 bp, Saccharomyces pastorianus
tttccccatcttggtatccactaaa

SEQ ID NO: 189417 - DNA, 25 bp, Saccharomyces pastorianus
aatcaacctcttgaatctgctgacc

SEQ ID NO: 189418 - DNA, 25 bp, Saccharomyces pastorianus
cttttgctttgtgccaggtgccgaa

SEQ ID NO: 189419 - DNA, 25 bp, Saccharomyces pastorianus
agttatgtgtcactcatgttccctt

SEQ ID NO: 189420 - DNA, 25 bp, Saccharomyces pastorianus
taggcactttgttcactgcaagccc

SEQ ID NO: 189421 - DNA, 25 bp, Saccharomyces pastorianus
gtagctgtgggaagctcgtcgcaca

SEQ ID NO: 189422 - DNA, 25 bp, Saccharomyces pastorianus
agtgttgattcgtacatttccccat

SEQ ID NO: 189423 - DNA, 25 bp, Saccharomyces pastorianus
aaatgcctcgtcgtttttcaaagtg

SEQ ID NO: 189424 - DNA, 25 bp, Saccharomyces pastorianus
tcgtcgcacatctagcggttcaaaa

SEQ ID NO: 189425 - DNA, 25 bp, Saccharomyces pastorianus
tcctacgtgggactttgcagctgtt

SEQ ID NO: 189426 - DNA, 25 bp, Saccharomyces pastorianus
ttgatctctgtgctctccggtcatt

SEQ ID NO: 189427 - DNA, 25 bp, Saccharomyces pastorianus
agaaatgtttgtgtctggcggcgat

SEQ ID NO: 189428 - DNA, 25 bp, Saccharomyces pastorianus
agacggcaagatttacatttgggat

SEQ ID NO: 189429 - DNA, 25 bp, Saccharomyces pastorianus
gtaacgtggtcgcatcaaatcctgt

SEQ ID NO: 189430 - DNA, 25 bp, Saccharomyces pastorianus
ggtcattccacactgatcaacaact

SEQ ID NO: 189431 - DNA, 25 bp, Saccharomyces pastorianus
agcgggtccgaagacggcaagattt

SEQ ID NO: 189432 - DNA, 25 bp, Saccharomyces pastorianus
gtgaaaaactgtaacgtggtcgcat

SEQ ID NO: 189433 - DNA, 25 bp, Saccharomyces pastorianus
aggtaatttgatctctgtgctctcc

SEQ ID NO: 189434 - DNA, 25 bp, Saccharomyces pastorianus
gatcaacaactcctcaaaacccgtt

SEQ ID NO: 189435 - DNA, 25 bp, Saccharomyces pastorianus
aatgtttgtgtctggcggcgatgac

SEQ ID NO: 189436 - DNA, 25 bp, Saccharomyces pastorianus
acgtggtcgcatcaaatcctgtcga

SEQ ID NO: 189437 - DNA, 25 bp, Saccharomyces pastorianus
ggccgacacagagcggcttgaagcg

SEQ ID NO: 189438 - DNA, 25 bp, Saccharomyces pastorianus
gaggccgacacagagcggcttgaag

SEQ ID NO: 189439 - DNA, 25 bp, Saccharomyces pastorianus
tggcgaaaagaggccgacacagagc

SEQ ID NO: 189440 - DNA, 25 bp, Saccharomyces pastorianus
agaggccgacacagagcggcttgaa

SEQ ID NO: 189441 - DNA, 25 bp, Saccharomyces pastorianus
aggccgacacagagcggcttgaagc

SEQ ID NO: 189442 - DNA, 25 bp, Saccharomyces pastorianus
tacctggcgaaaagaggccgacaca

SEQ ID NO: 189443 - DNA, 25 bp, Saccharomyces pastorianus
aaaagaggccgacacagagcggctt

SEQ ID NO: 189444 - DNA, 25 bp, Saccharomyces pastorianus
aaagaggccgacacagagcggcttg

SEQ ID NO: 189445 - DNA, 25 bp, Saccharomyces pastorianus
gaaaagaggccgacacagagcggct

SEQ ID NO: 189446 - DNA, 25 bp, Saccharomyces pastorianus
aagaggccgacacagagcggcttga

SEQ ID NO: 189447 - DNA, 25 bp, Saccharomyces pastorianus
gatgaattccagcagtgttgccgat

SEQ ID NO: 189448 - DNA, 25 bp, Saccharomyces pastorianus
aaacttggctcgtctggatgattca

SEQ ID NO: 189449 - DNA, 25 bp, Saccharomyces pastorianus
acatacgttgctcaaacttggctcg

SEQ ID NO: 189450 - DNA, 25 bp, Saccharomyces pastorianus
gaagaaccttcatttgtcccagtta

SEQ ID NO: 189451 - DNA, 25 bp, Saccharomyces pastorianus
acagttagtatcatgatggcccata

SEQ ID NO: 189452 - DNA, 25 bp, Saccharomyces pastorianus
acaagggtcctttatattggtctat

SEQ ID NO: 189453 - DNA, 25 bp, Saccharomyces pastorianus
gacgcacaatggcaccaagtagtag

SEQ ID NO: 189454 - DNA, 25 bp, Saccharomyces pastorianus
acacacgattgatgagggacgagaa

SEQ ID NO: 189455 - DNA, 25 bp, Saccharomyces pastorianus
gtagacttacttgcttttcaaacaa

SEQ ID NO: 189456 - DNA, 25 bp, Saccharomyces pastorianus
gatgacagtatatctcttcaaagtg

SEQ ID NO: 189457 - DNA, 25 bp, Saccharomyces pastorianus
ggatgattcaggtatctcctttttt

SEQ ID NO: 189458 - DNA, 25 bp, Saccharomyces pastorianus
ggattacactcacagaatagctctt

SEQ ID NO: 189459 - DNA, 25 bp, Saccharomyces pastorianus
aatagcaatagtagtgtttccacca

SEQ ID NO: 189460 - DNA, 25 bp, Saccharomyces pastorianus
gaaagcaatctttacttatgttgat

SEQ ID NO: 189461 - DNA, 25 bp, Saccharomyces pastorianus
aattgaattggctctgcaaattgtg

SEQ ID NO: 189462 - DNA, 25 bp, Saccharomyces pastorianus
gtgtttccaccagcaatagtaccaa

SEQ ID NO: 189463 - DNA, 25 bp, Saccharomyces pastorianus
gcagtgattcatctccatctaataa

SEQ ID NO: 189464 - DNA, 25 bp, Saccharomyces pastorianus
aataacgcaggattacactcacaga

SEQ ID NO: 189465 - DNA, 25 bp, Saccharomyces pastorianus
ggattgttggcagtgattcatctcc

SEQ ID NO: 189466 - DNA, 25 bp, Saccharomyces pastorianus
gtaccaatgacattctgcacttaaa

SEQ ID NO: 189467 - DNA, 25 bp, Saccharomyces pastorianus
aagtataccggtgagaaagcaatct

SEQ ID NO: 189468 - DNA, 25 bp, Saccharomyces pastorianus
tcatctaaacctggaccggttttgg

SEQ ID NO: 189469 - DNA, 25 bp, Saccharomyces pastorianus
accaactttgtttctggcacaccta

SEQ ID NO: 189470 - DNA, 25 bp, Saccharomyces pastorianus
tttcaccaactttgtttctggcaca

SEQ ID NO: 189471 - DNA, 25 bp, Saccharomyces pastorianus
ctttcaccaactttgtttctggcac

SEQ ID NO: 189472 - DNA, 25 bp, Saccharomyces pastorianus
agtgccaggccgaacgacagctctc

SEQ ID NO: 189473 - DNA, 25 bp, Saccharomyces pastorianus
ccaactttgtttctggcacacctat

SEQ ID NO: 189474 - DNA, 25 bp, Saccharomyces pastorianus
ctttgtttctggcacacctattgta

SEQ ID NO: 189475 - DNA, 25 bp, Saccharomyces pastorianus
tcaccaactttgtttctggcacacc

SEQ ID NO: 189476 - DNA, 25 bp, Saccharomyces pastorianus
caactttgtttctggcacacctatt

SEQ ID NO: 189477 - DNA, 25 bp, Saccharomyces pastorianus
aactttgtttctggcacacctattg

SEQ ID NO: 189478 - DNA, 25 bp, Saccharomyces pastorianus
ttcaccaactttgtttctggcacac

SEQ ID NO: 189479 - DNA, 25 bp, Saccharomyces pastorianus
caccaactttgtttctggcacacct

SEQ ID NO: 189480 - DNA, 25 bp, Saccharomyces pastorianus
tttcgagtcgtcttcaatagcactt

SEQ ID NO: 189481 - DNA, 25 bp, Saccharomyces pastorianus
acttcccctttatcgttgactatat

SEQ ID NO: 189482 - DNA, 25 bp, Saccharomyces pastorianus
gtttgttctctctggctttcaaaac

SEQ ID NO: 189483 - DNA, 25 bp, Saccharomyces pastorianus
tcgatattcacgacgtcttcgttgg

SEQ ID NO: 189484 - DNA, 25 bp, Saccharomyces pastorianus
gaataactgggcaaacccttgtttg

SEQ ID NO: 189485 - DNA, 25 bp, Saccharomyces pastorianus
tttagcgctttgattagtgcacttg

SEQ ID NO: 189486 - DNA, 25 bp, Saccharomyces pastorianus
tcttcgttggcttcatcttcttcat

SEQ ID NO: 189487 - DNA, 25 bp, Saccharomyces pastorianus
aatagcactttcttcttcatcaact

SEQ ID NO: 189488 - DNA, 25 bp, Saccharomyces pastorianus
ttcatcaacttcttcaaactctcct

SEQ ID NO: 189489 - DNA, 25 bp, Saccharomyces pastorianus
agtgcacttgtagcttccttatcga

SEQ ID NO: 189490 - DNA, 25 bp, Saccharomyces pastorianus
ttcttcatcatcattgctttcgctt

SEQ ID NO: 189491 - DNA, 25 bp, Saccharomyces pastorianus
atctattacattatgggtggtatgt

SEQ ID NO: 189492 - DNA, 25 bp, Saccharomyces pastorianus
ctattacattatgggtggtatgttg

SEQ ID NO: 189493 - DNA, 25 bp, Saccharomyces pastorianus
cattatgggtggtatgttggaataa

SEQ ID NO: 189494 - DNA, 25 bp, Saccharomyces pastorianus
tctattacattatgggtggtatgtt

SEQ ID NO: 189495 - DNA, 25 bp, Saccharomyces pastorianus
cattagatctattacattatgggtg

SEQ ID NO: 189496 - DNA, 25 bp, Saccharomyces pastorianus
ttagatctattacattatgggtggt

SEQ ID NO: 189497 - DNA, 25 bp, Saccharomyces pastorianus
attatgggtggtatgttggaataaa

SEQ ID NO: 189498 - DNA, 25 bp, Saccharomyces pastorianus
tcattagatctattacattatgggt

SEQ ID NO: 189499 - DNA, 25 bp, Saccharomyces pastorianus
gatctattacattatgggtggtatg

SEQ ID NO: 189500 - DNA, 25 bp, Saccharomyces pastorianus
ttcattagatctattacattatggg

SEQ ID NO: 189501 - DNA, 25 bp, Saccharomyces pastorianus
attagatctattacattatgggtgg

SEQ ID NO: 189502 - DNA, 25 bp, Saccharomyces pastorianus
tggtttggtatgttagtgctgatgt

SEQ ID NO: 189503 - DNA, 25 bp, Saccharomyces pastorianus
gaccattgtattggtttggtatgtt

SEQ ID NO: 189504 - DNA, 25 bp, Saccharomyces pastorianus
tgaccattgtattggtttggtatgt

SEQ ID NO: 189505 - DNA, 25 bp, Saccharomyces pastorianus
ttgaccattgtattggtttggtatg

SEQ ID NO: 189506 - DNA, 25 bp, Saccharomyces pastorianus
ccattgtattggtttggtatgttag

SEQ ID NO: 189507 - DNA, 25 bp, Saccharomyces pastorianus
ttggtttggtatgttagtgctgatg

SEQ ID NO: 189508 - DNA, 25 bp, Saccharomyces pastorianus
attggtttggtatgttagtgctgat

SEQ ID NO: 189509 - DNA, 25 bp, Saccharomyces pastorianus
tattggtttggtatgttagtgctga

SEQ ID NO: 189510 - DNA, 25 bp, Saccharomyces pastorianus
accattgtattggtttggtatgtta

SEQ ID NO: 189511 - DNA, 25 bp, Saccharomyces pastorianus
gtattggtttggtatgttagtgctg

SEQ ID NO: 189512 - DNA, 25 bp, Saccharomyces pastorianus
tgtattggtttggtatgttagtgct

SEQ ID NO: 189513 - DNA, 25 bp, Saccharomyces pastorianus
ggaaaaatcttggaatgatgaaaaa

SEQ ID NO: 189514 - DNA, 25 bp, Saccharomyces pastorianus
ctggaaaaatcttggaatgatgaaa

SEQ ID NO: 189515 - DNA, 25 bp, Saccharomyces pastorianus
gaattgcaagaaaaaagactggaaa

SEQ ID NO: 189516 - DNA, 25 bp, Saccharomyces pastorianus
agactggaaaaatcttggaatgatg

SEQ ID NO: 189517 - DNA, 25 bp, Saccharomyces pastorianus
aagactggaaaaatcttggaatgat

SEQ ID NO: 189518 - DNA, 25 bp, Saccharomyces pastorianus
tgatgaaaaagaaagcctgaaactt

SEQ ID NO: 189519 - DNA, 25 bp, Saccharomyces pastorianus
gactggaaaaatcttggaatgatga

SEQ ID NO: 189520 - DNA, 25 bp, Saccharomyces pastorianus
tggaaaaatcttggaatgatgaaaa

SEQ ID NO: 189521 - DNA, 25 bp, Saccharomyces pastorianus
agaattgcaagaaaaaagactggaa

SEQ ID NO: 189522 - DNA, 25 bp, Saccharomyces pastorianus
aagaattgcaagaaaaaagactgga

SEQ ID NO: 189523 - DNA, 25 bp, Saccharomyces pastorianus
actggaaaaatcttggaatgatgaa

SEQ ID NO: 189524 - DNA, 25 bp, Saccharomyces pastorianus
ttaacaacagaaatgcaaagcatgc

SEQ ID NO: 189525 - DNA, 25 bp, Saccharomyces pastorianus
tcgctttgggcaaatatctgcttaa

SEQ ID NO: 189526 - DNA, 25 bp, Saccharomyces pastorianus
cgctttgggcaaatatctgcttaac

SEQ ID NO: 189527 - DNA, 25 bp, Saccharomyces pastorianus
gggcaaatatctgcttaacaacaga

SEQ ID NO: 189528 - DNA, 25 bp, Saccharomyces pastorianus
gctttgggcaaatatctgcttaaca

SEQ ID NO: 189529 - DNA, 25 bp, Saccharomyces pastorianus
tttgggcaaatatctgcttaacaac

SEQ ID NO: 189530 - DNA, 25 bp, Saccharomyces pastorianus
ctttgggcaaatatctgcttaacaa

SEQ ID NO: 189531 - DNA, 25 bp, Saccharomyces pastorianus
atctgcttaacaacagaaatgcaaa

SEQ ID NO: 189532 - DNA, 25 bp, Saccharomyces pastorianus
ggcaaatatctgcttaacaacagaa

SEQ ID NO: 189533 - DNA, 25 bp, Saccharomyces pastorianus
ctcgctttgggcaaatatctgctta

SEQ ID NO: 189534 - DNA, 25 bp, Saccharomyces pastorianus
tgggcaaatatctgcttaacaacag

SEQ ID NO: 189535 - DNA, 25 bp, Saccharomyces pastorianus
gggatgccacccaacatctactacg

SEQ ID NO: 189536 - DNA, 25 bp, Saccharomyces pastorianus
aacaacagcaggaggtacaacaaca

SEQ ID NO: 189537 - DNA, 25 bp, Saccharomyces pastorianus
aacaacctcagcagctacagcaaca

SEQ ID NO: 189538 - DNA, 25 bp, Saccharomyces pastorianus
ccaacatctactacgtcgacaacaa

SEQ ID NO: 189539 - DNA, 25 bp, Saccharomyces pastorianus
acaacaacaacctcagcagctacag

SEQ ID NO: 189540 - DNA, 25 bp, Saccharomyces pastorianus
aacaacaacctcagcagctacagca

SEQ ID NO: 189541 - DNA, 25 bp, Saccharomyces pastorianus
caacatctactacgtcgacaacaac

SEQ ID NO: 189542 - DNA, 25 bp, Saccharomyces pastorianus
acatctactacgtcgacaacaacag

SEQ ID NO: 189543 - DNA, 25 bp, Saccharomyces pastorianus
tctactacgtcgacaacaacagcag

SEQ ID NO: 189544 - DNA, 25 bp, Saccharomyces pastorianus
ggatgccacccaacatctactacgt

SEQ ID NO: 189545 - DNA, 25 bp, Saccharomyces pastorianus
acagcaggaggtacaacaacaacct

SEQ ID NO: 189546 - DNA, 25 bp, Saccharomyces pastorianus
aatacgacgaagcacaagatgaaac

SEQ ID NO: 189547 - DNA, 25 bp, Saccharomyces pastorianus
gttgaagaaaacatcctcagatata

SEQ ID NO: 189548 - DNA, 25 bp, Saccharomyces pastorianus
agatataaatgtatactcgaagagc

SEQ ID NO: 189549 - DNA, 25 bp, Saccharomyces pastorianus
tttcatgatcagaaataccgttgaa

SEQ ID NO: 189550 - DNA, 25 bp, Saccharomyces pastorianus
agtttgagataagcgtggtagacca

SEQ ID NO: 189551 - DNA, 25 bp, Saccharomyces pastorianus
ataccgttgaagaaaacatcctcag

SEQ ID NO: 189552 - DNA, 25 bp, Saccharomyces pastorianus
aacttttgtgtggaatttcatgatc

SEQ ID NO: 189553 - DNA, 25 bp, Saccharomyces pastorianus
gcgtggtagaccaagaagtcagtaa

SEQ ID NO: 189554 - DNA, 25 bp, Saccharomyces pastorianus
aaaggcgataaatacgacgaagcac

SEQ ID NO: 189555 - DNA, 25 bp, Saccharomyces pastorianus
gaaacggataatgaggaaagcgatg

SEQ ID NO: 189556 - DNA, 25 bp, Saccharomyces pastorianus
aagcgatgatgcgaagtttgagata

SEQ ID NO: 189557 - DNA, 25 bp, Saccharomyces pastorianus
gggtcttttcattcagattttctgt

SEQ ID NO: 189558 - DNA, 25 bp, Saccharomyces pastorianus
aatacactgttctttcttgtgggtg

SEQ ID NO: 189559 - DNA, 25 bp, Saccharomyces pastorianus
gattatcgtgggtcttttcattcag

SEQ ID NO: 189560 - DNA, 25 bp, Saccharomyces pastorianus
tgactgggcgtgttctacaagctgc

SEQ ID NO: 189561 - DNA, 25 bp, Saccharomyces pastorianus
tggataacttgaatactgcgcgtat

SEQ ID NO: 189562 - DNA, 25 bp, Saccharomyces pastorianus
aatggcacaccttttgtttatggaa

SEQ ID NO: 189563 - DNA, 25 bp, Saccharomyces pastorianus
aggtatatggtatttcctgcaaaat

SEQ ID NO: 189564 - DNA, 25 bp, Saccharomyces pastorianus
aagcaataaagtctggttccgattt

SEQ ID NO: 189565 - DNA, 25 bp, Saccharomyces pastorianus
ggacggattccaacgggatcgtcca

SEQ ID NO: 189566 - DNA, 25 bp, Saccharomyces pastorianus
gatttaattacatccttttgggcgg

SEQ ID NO: 189567 - DNA, 25 bp, Saccharomyces pastorianus
tgggttgctctcttcattggataac

SEQ ID NO: 189568 - DNA, 25 bp, Saccharomyces pastorianus
tctagcgggatcgaaccgctgatcc

SEQ ID NO: 189569 - DNA, 25 bp, Saccharomyces pastorianus
cgaaccgctgatccccgcgttatta

SEQ ID NO: 189570 - DNA, 25 bp, Saccharomyces pastorianus
gtctctagcgggatcgaaccgctga

SEQ ID NO: 189571 - DNA, 25 bp, Saccharomyces pastorianus
atggtctctagcgggatcgaaccgc

SEQ ID NO: 189572 - DNA, 25 bp, Saccharomyces pastorianus
tctctagcgggatcgaaccgctgat

SEQ ID NO: 189573 - DNA, 25 bp, Saccharomyces pastorianus
ctctagcgggatcgaaccgctgatc

SEQ ID NO: 189574 - DNA, 25 bp, Saccharomyces pastorianus
ggtctctagcgggatcgaaccgctg

SEQ ID NO: 189575 - DNA, 25 bp, Saccharomyces pastorianus
ggatcgaaccgctgatccccgcgtt

SEQ ID NO: 189576 - DNA, 25 bp, Saccharomyces pastorianus
tagcgggatcgaaccgctgatcccc

SEQ ID NO: 189577 - DNA, 25 bp, Saccharomyces pastorianus
atcgaaccgctgatccccgcgttat

SEQ ID NO: 189578 - DNA, 25 bp, Saccharomyces pastorianus
gctgatccccgcgttattagcacgg

SEQ ID NO: 189579 - DNA, 25 bp, Saccharomyces pastorianus
aattgtcatttagcagtccccatgt

SEQ ID NO: 189580 - DNA, 25 bp, Saccharomyces pastorianus
caattttccgtactcgatccgaata

SEQ ID NO: 189581 - DNA, 25 bp, Saccharomyces pastorianus
ggccaatctacaagtgcgtcgtcaa

SEQ ID NO: 189582 - DNA, 25 bp, Saccharomyces pastorianus
attgccgactcgtcttagcgattat

SEQ ID NO: 189583 - DNA, 25 bp, Saccharomyces pastorianus
tcgagccttctttgagcaacttgga

SEQ ID NO: 189584 - DNA, 25 bp, Saccharomyces pastorianus
atgtgggctgctagcatggcactga

SEQ ID NO: 189585 - DNA, 25 bp, Saccharomyces pastorianus
taaaacttttagcttgccgacgcgc

SEQ ID NO: 189586 - DNA, 25 bp, Saccharomyces pastorianus
gtattgatcatgctcgtaccttggc

SEQ ID NO: 189587 - DNA, 25 bp, Saccharomyces pastorianus
tacagtatgcagctcgtgtctggca

SEQ ID NO: 189588 - DNA, 25 bp, Saccharomyces pastorianus
gagctcacggctttacatggtattg

SEQ ID NO: 189589 - DNA, 25 bp, Saccharomyces pastorianus
acttaacttaccctgtcaatgcaca

SEQ ID NO: 189590 - DNA, 25 bp, Saccharomyces pastorianus
tggtctgttccatgaagagcacttg

SEQ ID NO: 189591 - DNA, 25 bp, Saccharomyces pastorianus
tgcgtcggagacaccttttgtatga

SEQ ID NO: 189592 - DNA, 25 bp, Saccharomyces pastorianus
attgctactttttctggacttgacg

SEQ ID NO: 189593 - DNA, 25 bp, Saccharomyces pastorianus
gttatgcatcggttctttcacacaa

SEQ ID NO: 189594 - DNA, 25 bp, Saccharomyces pastorianus
actagggttagcttctttctcattt

SEQ ID NO: 189595 - DNA, 25 bp, Saccharomyces pastorianus
atatgccgatgatcctcaagcactg

SEQ ID NO: 189596 - DNA, 25 bp, Saccharomyces pastorianus
gacaagttggtttcgccaatccact

SEQ ID NO: 189597 - DNA, 25 bp, Saccharomyces pastorianus
aagacctaggacctggaacgcctgt

SEQ ID NO: 189598 - DNA, 25 bp, Saccharomyces pastorianus
gctgttgttttgctttcgggacttc

SEQ ID NO: 189599 - DNA, 25 bp, Saccharomyces pastorianus
tgaacgcatcctttatctttggtgg

SEQ ID NO: 189600 - DNA, 25 bp, Saccharomyces pastorianus
tcaatttcttggtcatggtctgttc

SEQ ID NO: 189601 - DNA, 25 bp, Saccharomyces pastorianus
atctactaactagtatttatgttac

SEQ ID NO: 189602 - DNA, 25 bp, Saccharomyces pastorianus
ctactaactagtatttatgttacta

SEQ ID NO: 189603 - DNA, 25 bp, Saccharomyces pastorianus
tctactaactagtatttatgttact

SEQ ID NO: 189604 - DNA, 25 bp, Saccharomyces pastorianus
tgttactagtatattatcatatacg

SEQ ID NO: 189605 - DNA, 25 bp, Saccharomyces pastorianus
catctactaactagtatttatgtta

SEQ ID NO: 189606 - DNA, 25 bp, Saccharomyces pastorianus
tatgttactagtatattatcatata

SEQ ID NO: 189607 - DNA, 25 bp, Saccharomyces pastorianus
gaataaaaatcaactatcatctact

SEQ ID NO: 189608 - DNA, 25 bp, Saccharomyces pastorianus
ggaataaaaatcaactatcatctac

SEQ ID NO: 189609 - DNA, 25 bp, Saccharomyces pastorianus
gttggaataaaaatcaactatcatc

SEQ ID NO: 189610 - DNA, 25 bp, Saccharomyces pastorianus
aataaaaatcaactatcatctacta

SEQ ID NO: 189611 - DNA, 25 bp, Saccharomyces pastorianus
tcatctactaactagtatttatgtt

SEQ ID NO: 189612 - DNA, 25 bp, Saccharomyces pastorianus
tctgcattacctccagtatactcat

SEQ ID NO: 189613 - DNA, 25 bp, Saccharomyces pastorianus
tgcattacctccagtatactcattc

SEQ ID NO: 189614 - DNA, 25 bp, Saccharomyces pastorianus
tgtctgcattacctccagtatactc

SEQ ID NO: 189615 - DNA, 25 bp, Saccharomyces pastorianus
tatatacccgtcaacccaattcttt

SEQ ID NO: 189616 - DNA, 25 bp, Saccharomyces pastorianus
ctgcattacctccagtatactcatt

SEQ ID NO: 189617 - DNA, 25 bp, Saccharomyces pastorianus
gtctgcattacctccagtatactca

SEQ ID NO: 189618 - DNA, 25 bp, Saccharomyces pastorianus
actatatacccgtcaacccaattct

SEQ ID NO: 189619 - DNA, 25 bp, Saccharomyces pastorianus
agtatactcattccctccactatat

SEQ ID NO: 189620 - DNA, 25 bp, Saccharomyces pastorianus
atgtctgcattacctccagtatact

SEQ ID NO: 189621 - DNA, 25 bp, Saccharomyces pastorianus
tatactcattccctccactatatac

SEQ ID NO: 189622 - DNA, 25 bp, Saccharomyces pastorianus
ctatatacccgtcaacccaattctt

SEQ ID NO: 189623 - DNA, 25 bp, Saccharomyces pastorianus
gctgactatctgtacaccgtgatgc

SEQ ID NO: 189624 - DNA, 25 bp, Saccharomyces pastorianus
atttgtttcagttgtggcctctcca

SEQ ID NO: 189625 - DNA, 25 bp, Saccharomyces pastorianus
cgattttatctactacatggccgct

SEQ ID NO: 189626 - DNA, 25 bp, Saccharomyces pastorianus
atgggtctattataccgcttcagag

SEQ ID NO: 189627 - DNA, 25 bp, Saccharomyces pastorianus
tgcaatctgctgtttcccacgaaaa

SEQ ID NO: 189628 - DNA, 25 bp, Saccharomyces pastorianus
gaagcctttcatcatgtttggttgc

SEQ ID NO: 189629 - DNA, 25 bp, Saccharomyces pastorianus
gatcggtccatttgtacttggtttt

SEQ ID NO: 189630 - DNA, 25 bp, Saccharomyces pastorianus
ggttgcatcttggttccattgactt

SEQ ID NO: 189631 - DNA, 25 bp, Saccharomyces pastorianus
tcttccatgggtatctctttcttaa

SEQ ID NO: 189632 - DNA, 25 bp, Saccharomyces pastorianus
ctcattcaggtatcattggtgcgtt

SEQ ID NO: 189633 - DNA, 25 bp, Saccharomyces pastorianus
agttaccgtctctgtgcaatctgct

SEQ ID NO: 189634 - DNA, 25 bp, Saccharomyces pastorianus
cactgggttgtgtacaaggcaatca

SEQ ID NO: 189635 - DNA, 25 bp, Saccharomyces pastorianus
ggttgtgtacaaggcaatcatgccc

SEQ ID NO: 189636 - DNA, 25 bp, Saccharomyces pastorianus
caagtatgcaacagtgaagtgtgac

SEQ ID NO: 189637 - DNA, 25 bp, Saccharomyces pastorianus
gtgtacaaggcaatcatgcccactt

SEQ ID NO: 189638 - DNA, 25 bp, Saccharomyces pastorianus
gggttgtgtacaaggcaatcatgcc

SEQ ID NO: 189639 - DNA, 25 bp, Saccharomyces pastorianus
acaaggcaatcatgcccacttgcca

SEQ ID NO: 189640 - DNA, 25 bp, Saccharomyces pastorianus
gtacaaggcaatcatgcccacttgc

SEQ ID NO: 189641 - DNA, 25 bp, Saccharomyces pastorianus
cagtgaagtgtgacaatgggaaact

SEQ ID NO: 189642 - DNA, 25 bp, Saccharomyces pastorianus
gtatgcaacagtgaagtgtgacaat

SEQ ID NO: 189643 - DNA, 25 bp, Saccharomyces pastorianus
atgcccacttgccaactccaagtat

SEQ ID NO: 189644 - DNA, 25 bp, Saccharomyces pastorianus
ttgtgtacaaggcaatcatgcccac

SEQ ID NO: 189645 - DNA, 25 bp, Saccharomyces pastorianus
gtcaaacggtgtatcaggttaattc

SEQ ID NO: 189646 - DNA, 25 bp, Saccharomyces pastorianus
aaccagttgtcaaacggtgtatcag

SEQ ID NO: 189647 - DNA, 25 bp, Saccharomyces pastorianus
accagttgtcaaacggtgtatcagg

SEQ ID NO: 189648 - DNA, 25 bp, Saccharomyces pastorianus
aacggtgtatcaggttaattcacgg

SEQ ID NO: 189649 - DNA, 25 bp, Saccharomyces pastorianus
tcaaacggtgtatcaggttaattca

SEQ ID NO: 189650 - DNA, 25 bp, Saccharomyces pastorianus
taaccagttgtcaaacggtgtatca

SEQ ID NO: 189651 - DNA, 25 bp, Saccharomyces pastorianus
ttgtcaaacggtgtatcaggttaat

SEQ ID NO: 189652 - DNA, 25 bp, Saccharomyces pastorianus
ccagttgtcaaacggtgtatcaggt

SEQ ID NO: 189653 - DNA, 25 bp, Saccharomyces pastorianus
gttgtcaaacggtgtatcaggttaa

SEQ ID NO: 189654 - DNA, 25 bp, Saccharomyces pastorianus
caaacggtgtatcaggttaattcac

SEQ ID NO: 189655 - DNA, 25 bp, Saccharomyces pastorianus
agttgtcaaacggtgtatcaggtta

SEQ ID NO: 189656 - DNA, 25 bp, Saccharomyces pastorianus
gaaggacgtggacttggacccaaat

SEQ ID NO: 189657 - DNA, 25 bp, Saccharomyces pastorianus
ttggacccaaatacctcagaacgaa

SEQ ID NO: 189658 - DNA, 25 bp, Saccharomyces pastorianus
aagacgatgtcccagtgctagattc

SEQ ID NO: 189659 - DNA, 25 bp, Saccharomyces pastorianus
ggatgatccagaggctcctgtaaag

SEQ ID NO: 189660 - DNA, 25 bp, Saccharomyces pastorianus
gacactacttcgaactttcaaggtt

SEQ ID NO: 189661 - DNA, 25 bp, Saccharomyces pastorianus
aagaacaaggccaccggtgcggatg

SEQ ID NO: 189662 - DNA, 25 bp, Saccharomyces pastorianus
cagtgctagattcctctgatgacga

SEQ ID NO: 189663 - DNA, 25 bp, Saccharomyces pastorianus
gaaatttgccggcttggactttgtt

SEQ ID NO: 189664 - DNA, 25 bp, Saccharomyces pastorianus
ggttggaacttcttggccgaggcca

SEQ ID NO: 189665 - DNA, 25 bp, Saccharomyces pastorianus
gatttggatgcggacgacactactt

SEQ ID NO: 189666 - DNA, 25 bp, Saccharomyces pastorianus
cttggactttgttcccacaatcagt

SEQ ID NO: 189667 - DNA, 25 bp, Saccharomyces pastorianus
tacgttactagtatattatcatata

SEQ ID NO: 189668 - DNA, 25 bp, Saccharomyces pastorianus
ttacgttactagtatattatcatat

SEQ ID NO: 189669 - DNA, 25 bp, Saccharomyces pastorianus
tagtatttacgttactagtatatta

SEQ ID NO: 189670 - DNA, 25 bp, Saccharomyces pastorianus
atttacgttactagtatattatcat

SEQ ID NO: 189671 - DNA, 25 bp, Saccharomyces pastorianus
tctactaactagtatttacgttact

SEQ ID NO: 189672 - DNA, 25 bp, Saccharomyces pastorianus
catctactaactagtatttacgtta

SEQ ID NO: 189673 - DNA, 25 bp, Saccharomyces pastorianus
tatttacgttactagtatattatca

SEQ ID NO: 189674 - DNA, 25 bp, Saccharomyces pastorianus
tttacgttactagtatattatcata

SEQ ID NO: 189675 - DNA, 25 bp, Saccharomyces pastorianus
acgttactagtatattatcatatac

SEQ ID NO: 189676 - DNA, 25 bp, Saccharomyces pastorianus
agtatttacgttactagtatattat

SEQ ID NO: 189677 - DNA, 25 bp, Saccharomyces pastorianus
gtatttacgttactagtatattatc

SEQ ID NO: 189678 - DNA, 25 bp, Saccharomyces pastorianus
gagcctttgtttagagttcatgacg

SEQ ID NO: 189679 - DNA, 25 bp, Saccharomyces pastorianus
gatgaatctgattgggactccgggt

SEQ ID NO: 189680 - DNA, 25 bp, Saccharomyces pastorianus
agatgagcctattaactccaccaga

SEQ ID NO: 189681 - DNA, 25 bp, Saccharomyces pastorianus
ttatcaatattgaccagccctcagg

SEQ ID NO: 189682 - DNA, 25 bp, Saccharomyces pastorianus
taataaatccactagggcctacagg

SEQ ID NO: 189683 - DNA, 25 bp, Saccharomyces pastorianus
gcgtggagctaactgacgactcgca

SEQ ID NO: 189684 - DNA, 25 bp, Saccharomyces pastorianus
gggttatccagcctatctatttctg

SEQ ID NO: 189685 - DNA, 25 bp, Saccharomyces pastorianus
atagaggtgttttccgtggtattga

SEQ ID NO: 189686 - DNA, 25 bp, Saccharomyces pastorianus
aatcgtacacattttcactctgcta

SEQ ID NO: 189687 - DNA, 25 bp, Saccharomyces pastorianus
agaaaccatcatcgctcaatcaatc

SEQ ID NO: 189688 - DNA, 25 bp, Saccharomyces pastorianus
acattagccattcttctcacagtga

SEQ ID NO: 189689 - DNA, 25 bp, Saccharomyces pastorianus
aatcgtgtcgccattgacaaccgta

SEQ ID NO: 189690 - DNA, 25 bp, Saccharomyces pastorianus
tgggcgttacctaaagctcacacat

SEQ ID NO: 189691 - DNA, 25 bp, Saccharomyces pastorianus
aaatcaacttaaactctggctgccc

SEQ ID NO: 189692 - DNA, 25 bp, Saccharomyces pastorianus
gaactaattctgagtgggcgttacc

SEQ ID NO: 189693 - DNA, 25 bp, Saccharomyces pastorianus
aagttgagtcaacgccacagctgaa

SEQ ID NO: 189694 - DNA, 25 bp, Saccharomyces pastorianus
tgccccatcgatttgctatacagac

SEQ ID NO: 189695 - DNA, 25 bp, Saccharomyces pastorianus
gttcaagtggcctgttctaaagcct

SEQ ID NO: 189696 - DNA, 25 bp, Saccharomyces pastorianus
aatggccttggcagttcccttaatt

SEQ ID NO: 189697 - DNA, 25 bp, Saccharomyces pastorianus
gacaaccgtaggcaatttaccatac

SEQ ID NO: 189698 - DNA, 25 bp, Saccharomyces pastorianus
acacatcagagttccccgggttcgg

SEQ ID NO: 189699 - DNA, 25 bp, Saccharomyces pastorianus
agaagcactcgcaaactccgtcagt

SEQ ID NO: 189700 - DNA, 25 bp, Saccharomyces pastorianus
gcttctgcaaccaccactctagctc

SEQ ID NO: 189701 - DNA, 25 bp, Saccharomyces pastorianus
tgctactgcttctgcaaccaccact

SEQ ID NO: 189702 - DNA, 25 bp, Saccharomyces pastorianus
actgcttctgcaaccaccactctag

SEQ ID NO: 189703 - DNA, 25 bp, Saccharomyces pastorianus
tgcttctgcaaccaccactctagct

SEQ ID NO: 189704 - DNA, 25 bp, Saccharomyces pastorianus
atcgctgctactgcttctgcaacca

SEQ ID NO: 189705 - DNA, 25 bp, Saccharomyces pastorianus
cgctgccatcgctgctactgcttct

SEQ ID NO: 189706 - DNA, 25 bp, Saccharomyces pastorianus
gctgctactgcttctgcaaccacca

SEQ ID NO: 189707 - DNA, 25 bp, Saccharomyces pastorianus
tgccatcgctgctactgcttctgca

SEQ ID NO: 189708 - DNA, 25 bp, Saccharomyces pastorianus
gccatcgctgctactgcttctgcaa

SEQ ID NO: 189709 - DNA, 25 bp, Saccharomyces pastorianus
ttctgcaaccaccactctagctcaa

SEQ ID NO: 189710 - DNA, 25 bp, Saccharomyces pastorianus
tactgcttctgcaaccaccactcta

SEQ ID NO: 189711 - DNA, 25 bp, Saccharomyces pastorianus
gagattaacaagagccagaggaaca

SEQ ID NO: 189712 - DNA, 25 bp, Saccharomyces pastorianus
ggagcaagtccgtcgccaaatctgg

SEQ ID NO: 189713 - DNA, 25 bp, Saccharomyces pastorianus
gagctgaagattgagaaccagactt

SEQ ID NO: 189714 - DNA, 25 bp, Saccharomyces pastorianus
ataaaacatctcaatcttttccttc

SEQ ID NO: 189715 - DNA, 25 bp, Saccharomyces pastorianus
gattttagtgatatgagcacccacg

SEQ ID NO: 189716 - DNA, 25 bp, Saccharomyces pastorianus
gaaaaagaaagttcatgggctcgaa

SEQ ID NO: 189717 - DNA, 25 bp, Saccharomyces pastorianus
acgaagatgtcaacggagcaagtcc

SEQ ID NO: 189718 - DNA, 25 bp, Saccharomyces pastorianus
gagaaccagactttgatagagatta

SEQ ID NO: 189719 - DNA, 25 bp, Saccharomyces pastorianus
tcatgggctcgaaagaaggaacctt

SEQ ID NO: 189720 - DNA, 25 bp, Saccharomyces pastorianus
gagcacccacgaagatgtcaacgga

SEQ ID NO: 189721 - DNA, 25 bp, Saccharomyces pastorianus
ggaaccttgaacttgaacagcgttt

SEQ ID NO: 189722 - DNA, 25 bp, Saccharomyces pastorianus
tgtacaaaagttcctgacgtttgtt

SEQ ID NO: 189723 - DNA, 25 bp, Saccharomyces pastorianus
gtacaaaagttcctgacgtttgttg

SEQ ID NO: 189724 - DNA, 25 bp, Saccharomyces pastorianus
ttttccgtgtcctggaacgttgtca

SEQ ID NO: 189725 - DNA, 25 bp, Saccharomyces pastorianus
aaaatcaacttgatggtctacacgt

SEQ ID NO: 189726 - DNA, 25 bp, Saccharomyces pastorianus
tacaaaagttcctgacgtttgttga

SEQ ID NO: 189727 - DNA, 25 bp, Saccharomyces pastorianus
atgtacaaaagttcctgacgtttgt

SEQ ID NO: 189728 - DNA, 25 bp, Saccharomyces pastorianus
tgagttttccgtgtcctggaacgtt

SEQ ID NO: 189729 - DNA, 25 bp, Saccharomyces pastorianus
gagttttccgtgtcctggaacgttg

SEQ ID NO: 189730 - DNA, 25 bp, Saccharomyces pastorianus
aatgtacaaaagttcctgacgtttg

SEQ ID NO: 189731 - DNA, 25 bp, Saccharomyces pastorianus
caaaagttcctgacgtttgttgaag

SEQ ID NO: 189732 - DNA, 25 bp, Saccharomyces pastorianus
gttgtcacgaaatagcgagtgccag

SEQ ID NO: 189733 - DNA, 25 bp, Saccharomyces pastorianus
attaaagctctcgatgggggtcgaa

SEQ ID NO: 189734 - DNA, 25 bp, Saccharomyces pastorianus
ctctcgatgggggtcgaacccataa

SEQ ID NO: 189735 - DNA, 25 bp, Saccharomyces pastorianus
gctctcgatgggggtcgaacccata

SEQ ID NO: 189736 - DNA, 25 bp, Saccharomyces pastorianus
tctcgatgggggtcgaacccataat

SEQ ID NO: 189737 - DNA, 25 bp, Saccharomyces pastorianus
gtattaaagctctcgatgggggtcg

SEQ ID NO: 189738 - DNA, 25 bp, Saccharomyces pastorianus
tgtattaaagctctcgatgggggtc

SEQ ID NO: 189739 - DNA, 25 bp, Saccharomyces pastorianus
taaagctctcgatgggggtcgaacc

SEQ ID NO: 189740 - DNA, 25 bp, Saccharomyces pastorianus
tattaaagctctcgatgggggtcga

SEQ ID NO: 189741 - DNA, 25 bp, Saccharomyces pastorianus
agctctcgatgggggtcgaacccat

SEQ ID NO: 189742 - DNA, 25 bp, Saccharomyces pastorianus
aagctctcgatgggggtcgaaccca

SEQ ID NO: 189743 - DNA, 25 bp, Saccharomyces pastorianus
ttaaagctctcgatgggggtcgaac

SEQ ID NO: 189744 - DNA, 25 bp, Saccharomyces pastorianus
tatacacagtcgaccgttttggccg

SEQ ID NO: 189745 - DNA, 25 bp, Saccharomyces pastorianus
agaccatccatttatccaacatgag

SEQ ID NO: 189746 - DNA, 25 bp, Saccharomyces pastorianus
tgccatgctccaacgtactatgatg

SEQ ID NO: 189747 - DNA, 25 bp, Saccharomyces pastorianus
gtttactggtaaacctgccatgctc

SEQ ID NO: 189748 - DNA, 25 bp, Saccharomyces pastorianus
aatggtccttcatctaagggtgctg

SEQ ID NO: 189749 - DNA, 25 bp, Saccharomyces pastorianus
ggttaacaaatgtccaccagaccat

SEQ ID NO: 189750 - DNA, 25 bp, Saccharomyces pastorianus
ttgtctttggtgttgttaatttctt

SEQ ID NO: 189751 - DNA, 25 bp, Saccharomyces pastorianus
aagccagagcttctcttgccaaggt

SEQ ID NO: 189752 - DNA, 25 bp, Saccharomyces pastorianus
aatgaaatctgctggtactgcatct

SEQ ID NO: 189753 - DNA, 25 bp, Saccharomyces pastorianus
ttttccacctgttgttccctataca

SEQ ID NO: 189754 - DNA, 25 bp, Saccharomyces pastorianus
gtcggtgtcactaaattatggccag

SEQ ID NO: 189755 - DNA, 25 bp, Saccharomyces pastorianus
atgaaagtttccgataggcgtaagt

SEQ ID NO: 189756 - DNA, 25 bp, Saccharomyces pastorianus
actttatttgaatcgatccccacgg

SEQ ID NO: 189757 - DNA, 25 bp, Saccharomyces pastorianus
tgagtcggctctaaataacaaaaac

SEQ ID NO: 189758 - DNA, 25 bp, Saccharomyces pastorianus
cgataggcgtaagtttgaaaaagca

SEQ ID NO: 189759 - DNA, 25 bp, Saccharomyces pastorianus
acgagtttgagtcggctctaaataa

SEQ ID NO: 189760 - DNA, 25 bp, Saccharomyces pastorianus
ctttatttgaatcgatccccacgga

SEQ ID NO: 189761 - DNA, 25 bp, Saccharomyces pastorianus
gagtcggctctaaataacaaaaacg

SEQ ID NO: 189762 - DNA, 25 bp, Saccharomyces pastorianus
gacgagtttgagtcggctctaaata

SEQ ID NO: 189763 - DNA, 25 bp, Saccharomyces pastorianus
tttgaaaaagcaaactttgacgagt

SEQ ID NO: 189764 - DNA, 25 bp, Saccharomyces pastorianus
tttatttgaatcgatccccacggaa

SEQ ID NO: 189765 - DNA, 25 bp, Saccharomyces pastorianus
gtttgagtcggctctaaataacaaa

SEQ ID NO: 189766 - DNA, 25 bp, Saccharomyces pastorianus
gaaaatcaaggctccttacaggaag

SEQ ID NO: 189767 - DNA, 25 bp, Saccharomyces pastorianus
gaattcactatcactataccggagg

SEQ ID NO: 189768 - DNA, 25 bp, Saccharomyces pastorianus
tataccggaggatgcagaactcatt

SEQ ID NO: 189769 - DNA, 25 bp, Saccharomyces pastorianus
aggaagcgaggatgcattcagtatc

SEQ ID NO: 189770 - DNA, 25 bp, Saccharomyces pastorianus
gctccttacaggaagtacgtggcgg

SEQ ID NO: 189771 - DNA, 25 bp, Saccharomyces pastorianus
gctttattatgcaccagcgttaaca

SEQ ID NO: 189772 - DNA, 25 bp, Saccharomyces pastorianus
gcagaactcattgagactccacagg

SEQ ID NO: 189773 - DNA, 25 bp, Saccharomyces pastorianus
atggttttgccatgggagatacagc

SEQ ID NO: 189774 - DNA, 25 bp, Saccharomyces pastorianus
catgtgtctaccaaagctttattat

SEQ ID NO: 189775 - DNA, 25 bp, Saccharomyces pastorianus
gcgggagagggtttctcctctacaa

SEQ ID NO: 189776 - DNA, 25 bp, Saccharomyces pastorianus
tcatcatcgacatcgtcctccaaag

SEQ ID NO: 189777 - DNA, 25 bp, Saccharomyces pastorianus
gtaaacttggactcttcggataatg

SEQ ID NO: 189778 - DNA, 25 bp, Saccharomyces pastorianus
gttagtgtaaacttggactcttcgg

SEQ ID NO: 189779 - DNA, 25 bp, Saccharomyces pastorianus
gtatagaggaaatccactcatcgga

SEQ ID NO: 189780 - DNA, 25 bp, Saccharomyces pastorianus
gtgtaaacttggactcttcggataa

SEQ ID NO: 189781 - DNA, 25 bp, Saccharomyces pastorianus
tattataacagtgacatcggatgac

SEQ ID NO: 189782 - DNA, 25 bp, Saccharomyces pastorianus
aacttggactcttcggataatgata

SEQ ID NO: 189783 - DNA, 25 bp, Saccharomyces pastorianus
gacatcggatgacagtatagaggaa

SEQ ID NO: 189784 - DNA, 25 bp, Saccharomyces pastorianus
agcgtcgttagtgtaaacttggact

SEQ ID NO: 189785 - DNA, 25 bp, Saccharomyces pastorianus
gtcgttagtgtaaacttggactctt

SEQ ID NO: 189786 - DNA, 25 bp, Saccharomyces pastorianus
tggactcttcggataatgatattat

SEQ ID NO: 189787 - DNA, 25 bp, Saccharomyces pastorianus
agaggaaatccactcatcggaacaa

SEQ ID NO: 189788 - DNA, 25 bp, Saccharomyces pastorianus
tcagtggtgctgctttgtccaacgc

SEQ ID NO: 189789 - DNA, 25 bp, Saccharomyces pastorianus
gcagcaatatctcagccagggtgtt

SEQ ID NO: 189790 - DNA, 25 bp, Saccharomyces pastorianus
agttctgattcgaacggctctaacc

SEQ ID NO: 189791 - DNA, 25 bp, Saccharomyces pastorianus
cagcccaatcgaatgctttcagaat

SEQ ID NO: 189792 - DNA, 25 bp, Saccharomyces pastorianus
atgaacatacgatcggccagtcggc

SEQ ID NO: 189793 - DNA, 25 bp, Saccharomyces pastorianus
gttcctgaacaatggccgtatccac

SEQ ID NO: 189794 - DNA, 25 bp, Saccharomyces pastorianus
atggccgtatccacaatactaccag

SEQ ID NO: 189795 - DNA, 25 bp, Saccharomyces pastorianus
ttcaacctctggtgcctgtatcata

SEQ ID NO: 189796 - DNA, 25 bp, Saccharomyces pastorianus
gtcctgccatcggtggcaatagcaa

SEQ ID NO: 189797 - DNA, 25 bp, Saccharomyces pastorianus
gcagtagcaacgtgccatactatta

SEQ ID NO: 189798 - DNA, 25 bp, Saccharomyces pastorianus
gtcgtccacatcagtagctatttcc

SEQ ID NO: 189799 - DNA, 25 bp, Saccharomyces pastorianus
gacaattggcaaaaggctacaagac

SEQ ID NO: 189800 - DNA, 25 bp, Saccharomyces pastorianus
aacaaattgtcaatgtctccttggg

SEQ ID NO: 189801 - DNA, 25 bp, Saccharomyces pastorianus
caagtgtgaccatcctcatggtggt

SEQ ID NO: 189802 - DNA, 25 bp, Saccharomyces pastorianus
ggcaaaaggctacaagactagaaga

SEQ ID NO: 189803 - DNA, 25 bp, Saccharomyces pastorianus
gtctaacaaattgtcaatgtctcct

SEQ ID NO: 189804 - DNA, 25 bp, Saccharomyces pastorianus
gtctccttggggacaattggcaaaa

SEQ ID NO: 189805 - DNA, 25 bp, Saccharomyces pastorianus
attggcaaaaggctacaagactaga

SEQ ID NO: 189806 - DNA, 25 bp, Saccharomyces pastorianus
acaagtgtgaccatcctcatggtgg

SEQ ID NO: 189807 - DNA, 25 bp, Saccharomyces pastorianus
aacaagtgtgaccatcctcatggtg

SEQ ID NO: 189808 - DNA, 25 bp, Saccharomyces pastorianus
ggtaaatctaagtctaacaaattgt

SEQ ID NO: 189809 - DNA, 25 bp, Saccharomyces pastorianus
tcgtggtaaatctaagtctaacaaa

SEQ ID NO: 189810 - DNA, 25 bp, Saccharomyces pastorianus
cgatggtgccgataatgatgattgt

SEQ ID NO: 189811 - DNA, 25 bp, Saccharomyces pastorianus
tagaggagctggttgtgttggttgt

SEQ ID NO: 189812 - DNA, 25 bp, Saccharomyces pastorianus
gcagacggaacagacggcggcgcta

SEQ ID NO: 189813 - DNA, 25 bp, Saccharomyces pastorianus
gactgtatcgatgatggtgccgatg

SEQ ID NO: 189814 - DNA, 25 bp, Saccharomyces pastorianus
ctggtaatgatgactgtatcgatga

SEQ ID NO: 189815 - DNA, 25 bp, Saccharomyces pastorianus
gacggcggcgctagaggagctggtt

SEQ ID NO: 189816 - DNA, 25 bp, Saccharomyces pastorianus
tatcgatgatggtgccgatggtgcc

SEQ ID NO: 189817 - DNA, 25 bp, Saccharomyces pastorianus
tgccagaggtgcagacggaacagac

SEQ ID NO: 189818 - DNA, 25 bp, Saccharomyces pastorianus
gatgactgtatcgatgatggtgccg

SEQ ID NO: 189819 - DNA, 25 bp, Saccharomyces pastorianus
gtgccgataatgatgattgtgttga

SEQ ID NO: 189820 - DNA, 25 bp, Saccharomyces pastorianus
atgattgtgttgatggtggtgccag

SEQ ID NO: 189821 - DNA, 25 bp, Saccharomyces pastorianus
cttttaattctatcattgcccgtat

SEQ ID NO: 189822 - DNA, 25 bp, Saccharomyces pastorianus
gagaggctgagcaattgagccaaat

SEQ ID NO: 189823 - DNA, 25 bp, Saccharomyces pastorianus
tccgccgtttcaagatcagtcttta

SEQ ID NO: 189824 - DNA, 25 bp, Saccharomyces pastorianus
agttcgaaatgttcctattggccat

SEQ ID NO: 189825 - DNA, 25 bp, Saccharomyces pastorianus
attgcccgtattgaactgtttggac

SEQ ID NO: 189826 - DNA, 25 bp, Saccharomyces pastorianus
gtgcctcccggaaaagaatctacat

SEQ ID NO: 189827 - DNA, 25 bp, Saccharomyces pastorianus
cagataaaggttcatccattctggg

SEQ ID NO: 189828 - DNA, 25 bp, Saccharomyces pastorianus
gggccctttatcgttggtctactca

SEQ ID NO: 189829 - DNA, 25 bp, Saccharomyces pastorianus
agtctttagtttgattgtgcctccc

SEQ ID NO: 189830 - DNA, 25 bp, Saccharomyces pastorianus
gttggtctactcactgacagaacgc

SEQ ID NO: 189831 - DNA, 25 bp, Saccharomyces pastorianus
catttttcagtatgttcagcattac

SEQ ID NO: 189832 - DNA, 25 bp, Saccharomyces pastorianus
tttgttttatttttcagtgttgatg

SEQ ID NO: 189833 - DNA, 25 bp, Saccharomyces pastorianus
ttcagtgttgatgtgagcttaacta

SEQ ID NO: 189834 - DNA, 25 bp, Saccharomyces pastorianus
tttatttttcagtgttgatgtgagc

SEQ ID NO: 189835 - DNA, 25 bp, Saccharomyces pastorianus
tatttttcagtgttgatgtgagctt

SEQ ID NO: 189836 - DNA, 25 bp, Saccharomyces pastorianus
tttcagtgttgatgtgagcttaact

SEQ ID NO: 189837 - DNA, 25 bp, Saccharomyces pastorianus
ttttcagtgttgatgtgagcttaac

SEQ ID NO: 189838 - DNA, 25 bp, Saccharomyces pastorianus
tatttgttttatttttcagtgttga

SEQ ID NO: 189839 - DNA, 25 bp, Saccharomyces pastorianus
cagtgttgatgtgagcttaactaaa

SEQ ID NO: 189840 - DNA, 25 bp, Saccharomyces pastorianus
tttttcagtgttgatgtgagcttaa

SEQ ID NO: 189841 - DNA, 25 bp, Saccharomyces pastorianus
atttttcagtgttgatgtgagctta

SEQ ID NO: 189842 - DNA, 25 bp, Saccharomyces pastorianus
tcagtgttgatgtgagcttaactaa

SEQ ID NO: 189843 - DNA, 25 bp, Saccharomyces pastorianus
tgatttctgggacttccgcgaagat

SEQ ID NO: 189844 - DNA, 25 bp, Saccharomyces pastorianus
ttgtttaataacacggccgcagcga

SEQ ID NO: 189845 - DNA, 25 bp, Saccharomyces pastorianus
gatccagcttatgggcaaggcgttg

SEQ ID NO: 189846 - DNA, 25 bp, Saccharomyces pastorianus
atgacaatgactacttcagccagcc

SEQ ID NO: 189847 - DNA, 25 bp, Saccharomyces pastorianus
aactgttatgcttgcgatccagctt

SEQ ID NO: 189848 - DNA, 25 bp, Saccharomyces pastorianus
ataccgtcatatccgcaactgttat

SEQ ID NO: 189849 - DNA, 25 bp, Saccharomyces pastorianus
tgtagcagatgctcaagcggcacgt

SEQ ID NO: 189850 - DNA, 25 bp, Saccharomyces pastorianus
cccgtgccctgttcaatttgatgaa

SEQ ID NO: 189851 - DNA, 25 bp, Saccharomyces pastorianus
taccggtgatgctgatttctgggac

SEQ ID NO: 189852 - DNA, 25 bp, Saccharomyces pastorianus
ggcgttgctaatgccttaggtatga

SEQ ID NO: 189853 - DNA, 25 bp, Saccharomyces pastorianus
tgcgctagatttcatcaaataccgt

SEQ ID NO: 189854 - DNA, 25 bp, Saccharomyces pastorianus
tccgccttgaattctgacaatatga

SEQ ID NO: 189855 - DNA, 25 bp, Saccharomyces pastorianus
ctctccgccttgaattctgacaata

SEQ ID NO: 189856 - DNA, 25 bp, Saccharomyces pastorianus
atcttatcgaactgttgggatgacc

SEQ ID NO: 189857 - DNA, 25 bp, Saccharomyces pastorianus
actgttgggatgaccgatatccttt

SEQ ID NO: 189858 - DNA, 25 bp, Saccharomyces pastorianus
gaacagcgcgttcagcaatcttatc

SEQ ID NO: 189859 - DNA, 25 bp, Saccharomyces pastorianus
cagcgcgttcagcaatcttatcgaa

SEQ ID NO: 189860 - DNA, 25 bp, Saccharomyces pastorianus
gatctattccatattccattatacg

SEQ ID NO: 189861 - DNA, 25 bp, Saccharomyces pastorianus
aaatggcggtagaacagcgcgttca

SEQ ID NO: 189862 - DNA, 25 bp, Saccharomyces pastorianus
tgggatgaccgatatccttttatac

SEQ ID NO: 189863 - DNA, 25 bp, Saccharomyces pastorianus
aattctgacaatatgatctattcca

SEQ ID NO: 189864 - DNA, 25 bp, Saccharomyces pastorianus
tcagcaatcttatcgaactgttggg

SEQ ID NO: 189865 - DNA, 25 bp, Saccharomyces pastorianus
aacaactgcttttatatgcctacag

SEQ ID NO: 189866 - DNA, 25 bp, Saccharomyces pastorianus
tgatattgccaacctcattttgcgt

SEQ ID NO: 189867 - DNA, 25 bp, Saccharomyces pastorianus
ggaaaactttttaatcgcgagtatg

SEQ ID NO: 189868 - DNA, 25 bp, Saccharomyces pastorianus
aactgcttttatatgcctacagtgg

SEQ ID NO: 189869 - DNA, 25 bp, Saccharomyces pastorianus
tgcctacagtggttgatattgccaa

SEQ ID NO: 189870 - DNA, 25 bp, Saccharomyces pastorianus
ttgaacaactgcttttatatgccta

SEQ ID NO: 189871 - DNA, 25 bp, Saccharomyces pastorianus
ctttgcatgcaaggctcagtttgat

SEQ ID NO: 189872 - DNA, 25 bp, Saccharomyces pastorianus
cgcggcttttactttgcatgcaagg

SEQ ID NO: 189873 - DNA, 25 bp, Saccharomyces pastorianus
ctttttaatcgcgagtatgtccgcg

SEQ ID NO: 189874 - DNA, 25 bp, Saccharomyces pastorianus
ggctcagtttgataacctttgggga

SEQ ID NO: 189875 - DNA, 25 bp, Saccharomyces pastorianus
gaacaactgcttttatatgcctaca

SEQ ID NO: 189876 - DNA, 25 bp, Saccharomyces pastorianus
tctatgcccacgtaaacccactgag

SEQ ID NO: 189877 - DNA, 25 bp, Saccharomyces pastorianus
gtaaacccactgagataaagtactt

SEQ ID NO: 189878 - DNA, 25 bp, Saccharomyces pastorianus
ctgagataaagtacttttcacagat

SEQ ID NO: 189879 - DNA, 25 bp, Saccharomyces pastorianus
gatctatgcccacgtaaacccactg

SEQ ID NO: 189880 - DNA, 25 bp, Saccharomyces pastorianus
cactgagataaagtacttttcacag

SEQ ID NO: 189881 - DNA, 25 bp, Saccharomyces pastorianus
atgcccacgtaaacccactgagata

SEQ ID NO: 189882 - DNA, 25 bp, Saccharomyces pastorianus
tgcccacgtaaacccactgagataa

SEQ ID NO: 189883 - DNA, 25 bp, Saccharomyces pastorianus
actgagataaagtacttttcacaga

SEQ ID NO: 189884 - DNA, 25 bp, Saccharomyces pastorianus
tatgcccacgtaaacccactgagat

SEQ ID NO: 189885 - DNA, 25 bp, Saccharomyces pastorianus
cacgtaaacccactgagataaagta

SEQ ID NO: 189886 - DNA, 25 bp, Saccharomyces pastorianus
cgtaaacccactgagataaagtact

SEQ ID NO: 189887 - DNA, 25 bp, Saccharomyces pastorianus
aagctcacgcaactttgatacgcac

SEQ ID NO: 189888 - DNA, 25 bp, Saccharomyces pastorianus
cacagcccaccaattttacgactaa

SEQ ID NO: 189889 - DNA, 25 bp, Saccharomyces pastorianus
atcaatcatgtctgaggagcctacg

SEQ ID NO: 189890 - DNA, 25 bp, Saccharomyces pastorianus
aaagcatagcttcatccaatacata

SEQ ID NO: 189891 - DNA, 25 bp, Saccharomyces pastorianus
gaagcacccgcaggcaatatagata

SEQ ID NO: 189892 - DNA, 25 bp, Saccharomyces pastorianus
gatgccatgacagaatcacagccaa

SEQ ID NO: 189893 - DNA, 25 bp, Saccharomyces pastorianus
gtatgaaccttgattttgacatcga

SEQ ID NO: 189894 - DNA, 25 bp, Saccharomyces pastorianus
ggtccgataacttcaaaatcttggg

SEQ ID NO: 189895 - DNA, 25 bp, Saccharomyces pastorianus
acgatttccctcttgatgatgctgg

SEQ ID NO: 189896 - DNA, 25 bp, Saccharomyces pastorianus
gagcctacggattttggatttgatc

SEQ ID NO: 189897 - DNA, 25 bp, Saccharomyces pastorianus
ataatttattgactccacagcccac

SEQ ID NO: 189898 - DNA, 25 bp, Saccharomyces pastorianus
gcaccagctgctagcgatgcaacta

SEQ ID NO: 189899 - DNA, 25 bp, Saccharomyces pastorianus
acaaccgctttcaaggctgttaccg

SEQ ID NO: 189900 - DNA, 25 bp, Saccharomyces pastorianus
tcactgtgatgacaagggctgttac

SEQ ID NO: 189901 - DNA, 25 bp, Saccharomyces pastorianus
aactacaaccgctttcaaggctgtt

SEQ ID NO: 189902 - DNA, 25 bp, Saccharomyces pastorianus
gatgcaactacaaccgctttcaagg

SEQ ID NO: 189903 - DNA, 25 bp, Saccharomyces pastorianus
atattccagcaccagctgctagcga

SEQ ID NO: 189904 - DNA, 25 bp, Saccharomyces pastorianus
gctgctagcgatgcaactacaaccg

SEQ ID NO: 189905 - DNA, 25 bp, Saccharomyces pastorianus
ggattccatattccagcaccagctg

SEQ ID NO: 189906 - DNA, 25 bp, Saccharomyces pastorianus
tgacaagggctgttacactaagacc

SEQ ID NO: 189907 - DNA, 25 bp, Saccharomyces pastorianus
aatggattccatattccagcaccag

SEQ ID NO: 189908 - DNA, 25 bp, Saccharomyces pastorianus
gctttcaaggctgttaccgttactc

SEQ ID NO: 189909 - DNA, 25 bp, Saccharomyces pastorianus
cttctcttgaacgttggtggctgag

SEQ ID NO: 189910 - DNA, 25 bp, Saccharomyces pastorianus
ccttctcttgaacgttggtggctga

SEQ ID NO: 189911 - DNA, 25 bp, Saccharomyces pastorianus
ctatttttgcatgcaccgtggtcct

SEQ ID NO: 189912 - DNA, 25 bp, Saccharomyces pastorianus
ttctcttgaacgttggtggctgagt

SEQ ID NO: 189913 - DNA, 25 bp, Saccharomyces pastorianus
caactatttttgcatgcaccgtggt

SEQ ID NO: 189914 - DNA, 25 bp, Saccharomyces pastorianus
actatttttgcatgcaccgtggtcc

SEQ ID NO: 189915 - DNA, 25 bp, Saccharomyces pastorianus
aactatttttgcatgcaccgtggtc

SEQ ID NO: 189916 - DNA, 25 bp, Saccharomyces pastorianus
ctcttgaacgttggtggctgagtcc

SEQ ID NO: 189917 - DNA, 25 bp, Saccharomyces pastorianus
atcaactatttttgcatgcaccgtg

SEQ ID NO: 189918 - DNA, 25 bp, Saccharomyces pastorianus
tcaactatttttgcatgcaccgtgg

SEQ ID NO: 189919 - DNA, 25 bp, Saccharomyces pastorianus
gaaaaactacctggcccttctcttg

SEQ ID NO: 189920 - DNA, 25 bp, Saccharomyces pastorianus
tacgcataacgcccatcattatcca

SEQ ID NO: 189921 - DNA, 25 bp, Saccharomyces pastorianus
actctcacattccactccatcaccc

SEQ ID NO: 189922 - DNA, 25 bp, Saccharomyces pastorianus
catcagtaccaaatgcactcgcatc

SEQ ID NO: 189923 - DNA, 25 bp, Saccharomyces pastorianus
tccatcacccatctctcaccatcag

SEQ ID NO: 189924 - DNA, 25 bp, Saccharomyces pastorianus
acgcataacgcccatcattatccac

SEQ ID NO: 189925 - DNA, 25 bp, Saccharomyces pastorianus
tactctcacattccactccatcacc

SEQ ID NO: 189926 - DNA, 25 bp, Saccharomyces pastorianus
catcacccatctctcaccatcagta

SEQ ID NO: 189927 - DNA, 25 bp, Saccharomyces pastorianus
ttacgcataacgcccatcattatcc

SEQ ID NO: 189928 - DNA, 25 bp, Saccharomyces pastorianus
ccatcacccatctctcaccatcagt

SEQ ID NO: 189929 - DNA, 25 bp, Saccharomyces pastorianus
atctctcaccatcagtaccaaatgc

SEQ ID NO: 189930 - DNA, 25 bp, Saccharomyces pastorianus
cgcataacgcccatcattatccaca

SEQ ID NO: 189931 - DNA, 25 bp, Saccharomyces pastorianus
gtggcactagtgttggagttggtac

SEQ ID NO: 189932 - DNA, 25 bp, Saccharomyces pastorianus
tagtagcactagtcctgacgttgat

SEQ ID NO: 189933 - DNA, 25 bp, Saccharomyces pastorianus
ttgatgctggcagtggtagtcgcat

SEQ ID NO: 189934 - DNA, 25 bp, Saccharomyces pastorianus
agtgctggagttggtacttccagtg

SEQ ID NO: 189935 - DNA, 25 bp, Saccharomyces pastorianus
gatgctggcagtggtagtcgcatta

SEQ ID NO: 189936 - DNA, 25 bp, Saccharomyces pastorianus
gatgctggcagtggtagtcgcacta

SEQ ID NO: 189937 - DNA, 25 bp, Saccharomyces pastorianus
ttccagtggtagtggcattagtgct

SEQ ID NO: 189938 - DNA, 25 bp, Saccharomyces pastorianus
ggcactagtgttggagttggtactt

SEQ ID NO: 189939 - DNA, 25 bp, Saccharomyces pastorianus
atgctggcagtggtagtcgcattag

SEQ ID NO: 189940 - DNA, 25 bp, Saccharomyces pastorianus
cttccagtggtagtggcattagtgc

SEQ ID NO: 189941 - DNA, 25 bp, Saccharomyces pastorianus
tgatgctggcagtggtagtcgcatt

SEQ ID NO: 189942 - DNA, 25 bp, Saccharomyces pastorianus
tcacaagccagttatgacggtgctg

SEQ ID NO: 189943 - DNA, 25 bp, Saccharomyces pastorianus
gaatacgattactcctccgaggatg

SEQ ID NO: 189944 - DNA, 25 bp, Saccharomyces pastorianus
aaaggtttcaaacttgccggctctg

SEQ ID NO: 189945 - DNA, 25 bp, Saccharomyces pastorianus
gccggctctgcccaagctcaattat

SEQ ID NO: 189946 - DNA, 25 bp, Saccharomyces pastorianus
gataccaaaggtgatggaagtcata

SEQ ID NO: 189947 - DNA, 25 bp, Saccharomyces pastorianus
taccgatgagaatgatcaacctatt

SEQ ID NO: 189948 - DNA, 25 bp, Saccharomyces pastorianus
actcctccgaggatgataccaaagg

SEQ ID NO: 189949 - DNA, 25 bp, Saccharomyces pastorianus
aagtcgtatagatgggtgagtgcat

SEQ ID NO: 189950 - DNA, 25 bp, Saccharomyces pastorianus
gtgacgaatacgattactcctccga

SEQ ID NO: 189951 - DNA, 25 bp, Saccharomyces pastorianus
tgagcgctgaacaggttggtagaaa

SEQ ID NO: 189952 - DNA, 25 bp, Saccharomyces pastorianus
gtgagtgcatcacaagccagttatg

SEQ ID NO: 189953 - DNA, 25 bp, Saccharomyces pastorianus
aaacacacatgcaacttgttggaat

SEQ ID NO: 189954 - DNA, 25 bp, Saccharomyces pastorianus
atgacacacatctaaaagttaataa

SEQ ID NO: 189955 - DNA, 25 bp, Saccharomyces pastorianus
gtattatgacacacatctaaaagtt

SEQ ID NO: 189956 - DNA, 25 bp, Saccharomyces pastorianus
taaaacacacatgcaacttgttgga

SEQ ID NO: 189957 - DNA, 25 bp, Saccharomyces pastorianus
ataaaacacacatgcaacttgttgg

SEQ ID NO: 189958 - DNA, 25 bp, Saccharomyces pastorianus
tgcagtattatgacacacatctaaa

SEQ ID NO: 189959 - DNA, 25 bp, Saccharomyces pastorianus
aaaacacacatgcaacttgttggaa

SEQ ID NO: 189960 - DNA, 25 bp, Saccharomyces pastorianus
gcagtattatgacacacatctaaaa

SEQ ID NO: 189961 - DNA, 25 bp, Saccharomyces pastorianus
aacacacatgcaacttgttggaata

SEQ ID NO: 189962 - DNA, 25 bp, Saccharomyces pastorianus
atgcagtattatgacacacatctaa

SEQ ID NO: 189963 - DNA, 25 bp, Saccharomyces pastorianus
acacacatgcaacttgttggaataa

SEQ ID NO: 189964 - DNA, 25 bp, Saccharomyces pastorianus
ccggtggtttattgctggctttatc

SEQ ID NO: 189965 - DNA, 25 bp, Saccharomyces pastorianus
gctggtatcggtgcagttgtttact

SEQ ID NO: 189966 - DNA, 25 bp, Saccharomyces pastorianus
ggtacactttgctcctgggtaatat

SEQ ID NO: 189967 - DNA, 25 bp, Saccharomyces pastorianus
ggtggtttcacagcagtcactttag

SEQ ID NO: 189968 - DNA, 25 bp, Saccharomyces pastorianus
tttgcatctactgtggttgatccat

SEQ ID NO: 189969 - DNA, 25 bp, Saccharomyces pastorianus
taagactatagtgctggcccgtatt

SEQ ID NO: 189970 - DNA, 25 bp, Saccharomyces pastorianus
gagtatcagtcagtcctcaagcata

SEQ ID NO: 189971 - DNA, 25 bp, Saccharomyces pastorianus
gtcactttagcttgggtcatcatcg

SEQ ID NO: 189972 - DNA, 25 bp, Saccharomyces pastorianus
gtcatcatcgatctgcctgagacaa

SEQ ID NO: 189973 - DNA, 25 bp, Saccharomyces pastorianus
tactgtcttgggttagcgggtacac

SEQ ID NO: 189974 - DNA, 25 bp, Saccharomyces pastorianus
aactcaacatgattcgctagctgat

SEQ ID NO: 189975 - DNA, 25 bp, Saccharomyces pastorianus
actgacaggcgttatttgacaatga

SEQ ID NO: 189976 - DNA, 25 bp, Saccharomyces pastorianus
ccttttggctttactgacaggcgtt

SEQ ID NO: 189977 - DNA, 25 bp, Saccharomyces pastorianus
aactgtctctttttttgatgttgga

SEQ ID NO: 189978 - DNA, 25 bp, Saccharomyces pastorianus
ttctccagcgggaacaccttttggc

SEQ ID NO: 189979 - DNA, 25 bp, Saccharomyces pastorianus
gcgggaacaccttttggctttactg

SEQ ID NO: 189980 - DNA, 25 bp, Saccharomyces pastorianus
tgatgttggacgttttagagaatac

SEQ ID NO: 189981 - DNA, 25 bp, Saccharomyces pastorianus
tgaggtgggctacgtatctactgtc

SEQ ID NO: 189982 - DNA, 25 bp, Saccharomyces pastorianus
aacaccttttggctttactgacagg

SEQ ID NO: 189983 - DNA, 25 bp, Saccharomyces pastorianus
ggctttactgacaggcgttatttga

SEQ ID NO: 189984 - DNA, 25 bp, Saccharomyces pastorianus
tttgacaatgaatgaggtgggctac

SEQ ID NO: 189985 - DNA, 25 bp, Saccharomyces pastorianus
gagcaatacagcataactgtctctt

SEQ ID NO: 189986 - DNA, 25 bp, Saccharomyces pastorianus
gtttttcataactacatacgccgca

SEQ ID NO: 189987 - DNA, 25 bp, Saccharomyces pastorianus
atctttggtgctctttaatctggaa

SEQ ID NO: 189988 - DNA, 25 bp, Saccharomyces pastorianus
gatgctatcatgtatgctacgtatt

SEQ ID NO: 189989 - DNA, 25 bp, Saccharomyces pastorianus
tttaccttaggtatggccaatttag

SEQ ID NO: 189990 - DNA, 25 bp, Saccharomyces pastorianus
gaatctgggacgctcttatttaaga

SEQ ID NO: 189991 - DNA, 25 bp, Saccharomyces pastorianus
gatggagtccctgaatcagacgtta

SEQ ID NO: 189992 - DNA, 25 bp, Saccharomyces pastorianus
ggattactctaatgcctttttcaaa

SEQ ID NO: 189993 - DNA, 25 bp, Saccharomyces pastorianus
atgaatacatgcctgaacccgacgt

SEQ ID NO: 189994 - DNA, 25 bp, Saccharomyces pastorianus
ggccaatttaggttctccaaatacg

SEQ ID NO: 189995 - DNA, 25 bp, Saccharomyces pastorianus
tcccgctttacaacgcttctaatga

SEQ ID NO: 189996 - DNA, 25 bp, Saccharomyces pastorianus
atttttgggcaggtggttcatggaa

SEQ ID NO: 189997 - DNA, 25 bp, Saccharomyces pastorianus
tcaactaatgaacctgtcgggccca

SEQ ID NO: 189998 - DNA, 25 bp, Saccharomyces pastorianus
tcctctgctgcgacagttattgcaa

SEQ ID NO: 189999 - DNA, 25 bp, Saccharomyces pastorianus
aaagaggctgtattccacgcgaaac

SEQ ID NO: 190000 - DNA, 25 bp, Saccharomyces pastorianus
atagttccacgattggtgtctctga

SEQ ID NO: 190001 - DNA, 25 bp, Saccharomyces pastorianus
aaggcattagcttccaatttttcgt

SEQ ID NO: 190002 - DNA, 25 bp, Saccharomyces pastorianus
aaaggctctggatgaggcctccaaa

SEQ ID NO: 190003 - DNA, 25 bp, Saccharomyces pastorianus
ggactttttaaccaggtcagccgca

SEQ ID NO: 190004 - DNA, 25 bp, Saccharomyces pastorianus
aacgcaacccgaagagattcccatg

SEQ ID NO: 190005 - DNA, 25 bp, Saccharomyces pastorianus
tatcttaaatactccagcctaccat

SEQ ID NO: 190006 - DNA, 25 bp, Saccharomyces pastorianus
agacttgactgctcgtttggcgaat

SEQ ID NO: 190007 - DNA, 25 bp, Saccharomyces pastorianus
tgcaaacagtgtgaatccccaccat

SEQ ID NO: 190008 - DNA, 25 bp, Saccharomyces pastorianus
gggcaattacctgtttaactgcagg

SEQ ID NO: 190009 - DNA, 25 bp, Saccharomyces pastorianus
ttaactgcaggtatgcaaagcatgc

SEQ ID NO: 190010 - DNA, 25 bp, Saccharomyces pastorianus
aactgcaggtatgcaaagcatgcga

SEQ ID NO: 190011 - DNA, 25 bp, Saccharomyces pastorianus
gtttaactgcaggtatgcaaagcat

SEQ ID NO: 190012 - DNA, 25 bp, Saccharomyces pastorianus
gctttgggcaattacctgtttaact

SEQ ID NO: 190013 - DNA, 25 bp, Saccharomyces pastorianus
tttgggcaattacctgtttaactgc

SEQ ID NO: 190014 - DNA, 25 bp, Saccharomyces pastorianus
acctgtttaactgcaggtatgcaaa

SEQ ID NO: 190015 - DNA, 25 bp, Saccharomyces pastorianus
ctttgggcaattacctgtttaactg

SEQ ID NO: 190016 - DNA, 25 bp, Saccharomyces pastorianus
ttgggcaattacctgtttaactgca

SEQ ID NO: 190017 - DNA, 25 bp, Saccharomyces pastorianus
tgggcaattacctgtttaactgcag

SEQ ID NO: 190018 - DNA, 25 bp, Saccharomyces pastorianus
ggcaattacctgtttaactgcaggt

SEQ ID NO: 190019 - DNA, 25 bp, Saccharomyces pastorianus
aactgttttgcataacggccgtgat

SEQ ID NO: 190020 - DNA, 25 bp, Saccharomyces pastorianus
gcgatcccagtgagatagagcctat

SEQ ID NO: 190021 - DNA, 25 bp, Saccharomyces pastorianus
gattaggtaccccagaatctgtcaa

SEQ ID NO: 190022 - DNA, 25 bp, Saccharomyces pastorianus
aatggcgtggcttgcgatcccagtg

SEQ ID NO: 190023 - DNA, 25 bp, Saccharomyces pastorianus
gtagcacacataaccacgaaatctc

SEQ ID NO: 190024 - DNA, 25 bp, Saccharomyces pastorianus
aacgcatcacatgccattcgtttgg

SEQ ID NO: 190025 - DNA, 25 bp, Saccharomyces pastorianus
attcgtttgggcaatggcgtggctt

SEQ ID NO: 190026 - DNA, 25 bp, Saccharomyces pastorianus
gaatctgtcaaacccgcaaacgcat

SEQ ID NO: 190027 - DNA, 25 bp, Saccharomyces pastorianus
tgacagttcaactatcaccttcaaa

SEQ ID NO: 190028 - DNA, 25 bp, Saccharomyces pastorianus
ggaagtcagtactccactatggtga

SEQ ID NO: 190029 - DNA, 25 bp, Saccharomyces pastorianus
gaaatctcccgcctatccaatgatg

SEQ ID NO: 190030 - DNA, 25 bp, Saccharomyces pastorianus
aaatggaaagaactactctctcaac

SEQ ID NO: 190031 - DNA, 25 bp, Saccharomyces pastorianus
aatcatgttccacaggatctcgtag

SEQ ID NO: 190032 - DNA, 25 bp, Saccharomyces pastorianus
gagattgctgcgatagcacctccga

SEQ ID NO: 190033 - DNA, 25 bp, Saccharomyces pastorianus
agcacctccgaagaatgatgttgaa

SEQ ID NO: 190034 - DNA, 25 bp, Saccharomyces pastorianus
caggatctcgtagaagctagtttaa

SEQ ID NO: 190035 - DNA, 25 bp, Saccharomyces pastorianus
gtttaaatcctgaagcaatccgaga

SEQ ID NO: 190036 - DNA, 25 bp, Saccharomyces pastorianus
gacagattctttgctattttcatgg

SEQ ID NO: 190037 - DNA, 25 bp, Saccharomyces pastorianus
gacgtttatattccaagacctttca

SEQ ID NO: 190038 - DNA, 25 bp, Saccharomyces pastorianus
agttcatgatgtcgtcctgcccaag

SEQ ID NO: 190039 - DNA, 25 bp, Saccharomyces pastorianus
gcaatccgagagctcactcaaaaat

SEQ ID NO: 190040 - DNA, 25 bp, Saccharomyces pastorianus
ctgcccaagtttcctgataaaagtt

SEQ ID NO: 190041 - DNA, 25 bp, Saccharomyces pastorianus
ggagattagacctaccgtcgtcaag

SEQ ID NO: 190042 - DNA, 25 bp, Saccharomyces pastorianus
taaattggcttctgcaaggtggaaa

SEQ ID NO: 190043 - DNA, 25 bp, Saccharomyces pastorianus
gcgcgagttagaccctgccaaaaag

SEQ ID NO: 190044 - DNA, 25 bp, Saccharomyces pastorianus
gatgcttacgaaaagactttgcccc

SEQ ID NO: 190045 - DNA, 25 bp, Saccharomyces pastorianus
ttctcctccgattacattacagcag

SEQ ID NO: 190046 - DNA, 25 bp, Saccharomyces pastorianus
caaagagaccctctggtccctttat

SEQ ID NO: 190047 - DNA, 25 bp, Saccharomyces pastorianus
aacaacacatgttattggctgaccc

SEQ ID NO: 190048 - DNA, 25 bp, Saccharomyces pastorianus
ctttattcagttcacccaggagatt

SEQ ID NO: 190049 - DNA, 25 bp, Saccharomyces pastorianus
aatgccatcgactcagttaccggaa

SEQ ID NO: 190050 - DNA, 25 bp, Saccharomyces pastorianus
aaccggtcactcacataaggccatg

SEQ ID NO: 190051 - DNA, 25 bp, Saccharomyces pastorianus
gacagtatcgagcacataaccgcaa

SEQ ID NO: 190052 - DNA, 25 bp, Saccharomyces pastorianus
atcgatgaagatcttgtggaccaga

SEQ ID NO: 190053 - DNA, 25 bp, Saccharomyces pastorianus
ggtgcattccagtcgctgagtgctg

SEQ ID NO: 190054 - DNA, 25 bp, Saccharomyces pastorianus
gatgtcactatcgatgaagatcttg

SEQ ID NO: 190055 - DNA, 25 bp, Saccharomyces pastorianus
gatctacacgtgtctttgcaaggca

SEQ ID NO: 190056 - DNA, 25 bp, Saccharomyces pastorianus
ggcaagtcttgacagatttagacat

SEQ ID NO: 190057 - DNA, 25 bp, Saccharomyces pastorianus
gtgtctttgcaaggcaagtcttgac

SEQ ID NO: 190058 - DNA, 25 bp, Saccharomyces pastorianus
aacgtcatgggtgcattccagtcgc

SEQ ID NO: 190059 - DNA, 25 bp, Saccharomyces pastorianus
tcttgtggaccagaataagcccggt

SEQ ID NO: 190060 - DNA, 25 bp, Saccharomyces pastorianus
ggaccagaataagcccggtgacaga

SEQ ID NO: 190061 - DNA, 25 bp, Saccharomyces pastorianus
agagtcaacgtcatgggtgcattcc

SEQ ID NO: 190062 - DNA, 25 bp, Saccharomyces pastorianus
catgcaagatctacacgtgtctttg

SEQ ID NO: 190063 - DNA, 25 bp, Saccharomyces pastorianus
gcaacgttgacgagccataaaaata

SEQ ID NO: 190064 - DNA, 25 bp, Saccharomyces pastorianus
aaaaccaccaactatatcagagaag

SEQ ID NO: 190065 - DNA, 25 bp, Saccharomyces pastorianus
ggcttgaggaacaccactgtagagt

SEQ ID NO: 190066 - DNA, 25 bp, Saccharomyces pastorianus
aaagcacttcgatgttgcaaaagat

SEQ ID NO: 190067 - DNA, 25 bp, Saccharomyces pastorianus
taatacagagaccatgctaaagcag

SEQ ID NO: 190068 - DNA, 25 bp, Saccharomyces pastorianus
gaacaccactgtagagttgagtagt

SEQ ID NO: 190069 - DNA, 25 bp, Saccharomyces pastorianus
gataaagcacaccatttactgcaat

SEQ ID NO: 190070 - DNA, 25 bp, Saccharomyces pastorianus
atgattgttcaggtcagttgagcga

SEQ ID NO: 190071 - DNA, 25 bp, Saccharomyces pastorianus
gatacccttaacgtgggcttgagga

SEQ ID NO: 190072 - DNA, 25 bp, Saccharomyces pastorianus
gttgcaaaagatacccttaacgtgg

SEQ ID NO: 190073 - DNA, 25 bp, Saccharomyces pastorianus
gaaaggattgcaacgttgacgagcc

SEQ ID NO: 190074 - DNA, 25 bp, Saccharomyces pastorianus
tccttctcgagcacataggaatcct

SEQ ID NO: 190075 - DNA, 25 bp, Saccharomyces pastorianus
caagtccttctcgagcacataggaa

SEQ ID NO: 190076 - DNA, 25 bp, Saccharomyces pastorianus
ttactacaagtccttctcgagcaca

SEQ ID NO: 190077 - DNA, 25 bp, Saccharomyces pastorianus
acaagtccttctcgagcacatagga

SEQ ID NO: 190078 - DNA, 25 bp, Saccharomyces pastorianus
actacaagtccttctcgagcacata

SEQ ID NO: 190079 - DNA, 25 bp, Saccharomyces pastorianus
tacaagtccttctcgagcacatagg

SEQ ID NO: 190080 - DNA, 25 bp, Saccharomyces pastorianus
attacgattatttctgctttcgttt

SEQ ID NO: 190081 - DNA, 25 bp, Saccharomyces pastorianus
aagtccttctcgagcacataggaat

SEQ ID NO: 190082 - DNA, 25 bp, Saccharomyces pastorianus
agtccttctcgagcacataggaatc

SEQ ID NO: 190083 - DNA, 25 bp, Saccharomyces pastorianus
tactacaagtccttctcgagcacat

SEQ ID NO: 190084 - DNA, 25 bp, Saccharomyces pastorianus
acgattatttctgctttcgttttat

SEQ ID NO: 190085 - DNA, 25 bp, Saccharomyces pastorianus
aagcttcccgatgacttcgagaatt

SEQ ID NO: 190086 - DNA, 25 bp, Saccharomyces pastorianus
atagatgctaatatgagttctggaa

SEQ ID NO: 190087 - DNA, 25 bp, Saccharomyces pastorianus
aatggtaaagcttcccgatgacttc

SEQ ID NO: 190088 - DNA, 25 bp, Saccharomyces pastorianus
aatgaaatggtaaagcttcccgatg

SEQ ID NO: 190089 - DNA, 25 bp, Saccharomyces pastorianus
atggtaaagcttcccgatgacttcg

SEQ ID NO: 190090 - DNA, 25 bp, Saccharomyces pastorianus
gaaatggtaaagcttcccgatgact

SEQ ID NO: 190091 - DNA, 25 bp, Saccharomyces pastorianus
gctaatatgagttctggaataggaa

SEQ ID NO: 190092 - DNA, 25 bp, Saccharomyces pastorianus
aaagcttcccgatgacttcgagaat

SEQ ID NO: 190093 - DNA, 25 bp, Saccharomyces pastorianus
atgaatctcagaacaatagatgcta

SEQ ID NO: 190094 - DNA, 25 bp, Saccharomyces pastorianus
gcttcccgatgacttcgagaattat

SEQ ID NO: 190095 - DNA, 25 bp, Saccharomyces pastorianus
gtaaagcttcccgatgacttcgaga

SEQ ID NO: 190096 - DNA, 25 bp, Saccharomyces pastorianus
caatactttttcgtcgcaggcctcg

SEQ ID NO: 190097 - DNA, 25 bp, Saccharomyces pastorianus
gtgtgcaaacctgggattgtgcgtt

SEQ ID NO: 190098 - DNA, 25 bp, Saccharomyces pastorianus
gccattcaatactttttcgtcgcag

SEQ ID NO: 190099 - DNA, 25 bp, Saccharomyces pastorianus
attcaatactttttcgtcgcaggcc

SEQ ID NO: 190100 - DNA, 25 bp, Saccharomyces pastorianus
aaacctgggattgtgcgtttgccat

SEQ ID NO: 190101 - DNA, 25 bp, Saccharomyces pastorianus
ctgggattgtgcgtttgccattcaa

SEQ ID NO: 190102 - DNA, 25 bp, Saccharomyces pastorianus
tttttcgtcgcaggcctcgcagaaa

SEQ ID NO: 190103 - DNA, 25 bp, Saccharomyces pastorianus
ggcctcgcagaaagacctgaattct

SEQ ID NO: 190104 - DNA, 25 bp, Saccharomyces pastorianus
ttcgtcgcaggcctcgcagaaagac

SEQ ID NO: 190105 - DNA, 25 bp, Saccharomyces pastorianus
tatgggaacaaatggtgtgcaaacc

SEQ ID NO: 190106 - DNA, 25 bp, Saccharomyces pastorianus
ttgtgcgtttgccattcaatacttt

SEQ ID NO: 190107 - DNA, 25 bp, Saccharomyces pastorianus
aacatcattggccactagcacagtc

SEQ ID NO: 190108 - DNA, 25 bp, Saccharomyces pastorianus
cacaagtacagtcgtggtttcctgt

SEQ ID NO: 190109 - DNA, 25 bp, Saccharomyces pastorianus
caacttctcatactgctgcttccag

SEQ ID NO: 190110 - DNA, 25 bp, Saccharomyces pastorianus
aagaaactgcagcaaccaccatttc

SEQ ID NO: 190111 - DNA, 25 bp, Saccharomyces pastorianus
gcttccagcaccttcactggtattg

SEQ ID NO: 190112 - DNA, 25 bp, Saccharomyces pastorianus
tgttcagaaacaaccgacgctagcg

SEQ ID NO: 190113 - DNA, 25 bp, Saccharomyces pastorianus
caaccaccatttctccaaaatcata

SEQ ID NO: 190114 - DNA, 25 bp, Saccharomyces pastorianus
gtgacgaaaacggatgccatgttcc

SEQ ID NO: 190115 - DNA, 25 bp, Saccharomyces pastorianus
tgtcacttccgaggcttccaaacaa

SEQ ID NO: 190116 - DNA, 25 bp, Saccharomyces pastorianus
tagcacagtcaccaagtctgctgct

SEQ ID NO: 190117 - DNA, 25 bp, Saccharomyces pastorianus
gacgctagcggtaacatttacacca

SEQ ID NO: 190118 - DNA, 25 bp, Saccharomyces pastorianus
attggatgtgtctcagtgtcctgtt

SEQ ID NO: 190119 - DNA, 25 bp, Saccharomyces pastorianus
aactgcgctgggtgacaagccatta

SEQ ID NO: 190120 - DNA, 25 bp, Saccharomyces pastorianus
ggaaatacggcgcttatactgaatt

SEQ ID NO: 190121 - DNA, 25 bp, Saccharomyces pastorianus
gacatgggtccacagttgttgcaac

SEQ ID NO: 190122 - DNA, 25 bp, Saccharomyces pastorianus
gtgtcctgttatccgggcaatttga

SEQ ID NO: 190123 - DNA, 25 bp, Saccharomyces pastorianus
ttgcaacacttcttagatcctctgt

SEQ ID NO: 190124 - DNA, 25 bp, Saccharomyces pastorianus
agcggcactctacggacaatccaaa

SEQ ID NO: 190125 - DNA, 25 bp, Saccharomyces pastorianus
gtcagttctgcatcccatttaatag

SEQ ID NO: 190126 - DNA, 25 bp, Saccharomyces pastorianus
atggttgtgacttccttgatctcaa

SEQ ID NO: 190127 - DNA, 25 bp, Saccharomyces pastorianus
gaattatacggtgcgttatcccctg

SEQ ID NO: 190128 - DNA, 25 bp, Saccharomyces pastorianus
tatcccctgcgctgacgacaaaaga

SEQ ID NO: 190129 - DNA, 25 bp, Saccharomyces pastorianus
gcgaacttacaactcggcatcatga

SEQ ID NO: 190130 - DNA, 25 bp, Saccharomyces pastorianus
atcagcaatcagcaagtcttacctt

SEQ ID NO: 190131 - DNA, 25 bp, Saccharomyces pastorianus
ggcataatttcatcaggctcttcta

SEQ ID NO: 190132 - DNA, 25 bp, Saccharomyces pastorianus
aatgttttccagagctacttcctat

SEQ ID NO: 190133 - DNA, 25 bp, Saccharomyces pastorianus
gagattactctggtgttgacaacga

SEQ ID NO: 190134 - DNA, 25 bp, Saccharomyces pastorianus
tgtgacacattacatccttcatgat

SEQ ID NO: 190135 - DNA, 25 bp, Saccharomyces pastorianus
ggctcttctagccaagactttggta

SEQ ID NO: 190136 - DNA, 25 bp, Saccharomyces pastorianus
ttatcatgtcataacggctgccatt

SEQ ID NO: 190137 - DNA, 25 bp, Saccharomyces pastorianus
tgatccgtacttccctcaatttagg

SEQ ID NO: 190138 - DNA, 25 bp, Saccharomyces pastorianus
attcatgggccaaaggactatttcc

SEQ ID NO: 190139 - DNA, 25 bp, Saccharomyces pastorianus
cggctgccattatctctttagtcga

SEQ ID NO: 190140 - DNA, 25 bp, Saccharomyces pastorianus
atgggatatcctgcgtctaaatcaa

SEQ ID NO: 190141 - DNA, 25 bp, Saccharomyces pastorianus
cacggtgccttaaccaactgggcca

SEQ ID NO: 190142 - DNA, 25 bp, Saccharomyces pastorianus
ttatgggatatcctgcgtctaaatc

SEQ ID NO: 190143 - DNA, 25 bp, Saccharomyces pastorianus
tatgggatatcctgcgtctaaatca

SEQ ID NO: 190144 - DNA, 25 bp, Saccharomyces pastorianus
ttaaccaactgggccaagagaccag

SEQ ID NO: 190145 - DNA, 25 bp, Saccharomyces pastorianus
agagaccaggaatttatgggatatc

SEQ ID NO: 190146 - DNA, 25 bp, Saccharomyces pastorianus
gagaccaggaatttatgggatatcc

SEQ ID NO: 190147 - DNA, 25 bp, Saccharomyces pastorianus
cggtgccttaaccaactgggccaag

SEQ ID NO: 190148 - DNA, 25 bp, Saccharomyces pastorianus
gcacggtgccttaaccaactgggcc

SEQ ID NO: 190149 - DNA, 25 bp, Saccharomyces pastorianus
tttatgggatatcctgcgtctaaat

SEQ ID NO: 190150 - DNA, 25 bp, Saccharomyces pastorianus
taaccaactgggccaagagaccagg

SEQ ID NO: 190151 - DNA, 25 bp, Saccharomyces pastorianus
ttcgtcgtcgtctttttctacttct

SEQ ID NO: 190152 - DNA, 25 bp, Saccharomyces pastorianus
gatcgatgaagttttgtcttccaat

SEQ ID NO: 190153 - DNA, 25 bp, Saccharomyces pastorianus
gtcgtctttttctacttcttcatat

SEQ ID NO: 190154 - DNA, 25 bp, Saccharomyces pastorianus
gtcttccaatagtttttcttcctcg

SEQ ID NO: 190155 - DNA, 25 bp, Saccharomyces pastorianus
atacttttttggtcgttgctttgca

SEQ ID NO: 190156 - DNA, 25 bp, Saccharomyces pastorianus
atcgctgacctccagtatacttttt

SEQ ID NO: 190157 - DNA, 25 bp, Saccharomyces pastorianus
aatgtactcgagtagcgtgatcgat

SEQ ID NO: 190158 - DNA, 25 bp, Saccharomyces pastorianus
tccaatagtttttcttcctcgcttt

SEQ ID NO: 190159 - DNA, 25 bp, Saccharomyces pastorianus
gacgtcaaccggacaatgtactcga

SEQ ID NO: 190160 - DNA, 25 bp, Saccharomyces pastorianus
ttgctttgcaaagacgtcaaccgga

SEQ ID NO: 190161 - DNA, 25 bp, Saccharomyces pastorianus
ttttctacttcttcatatccactta

SEQ ID NO: 190162 - DNA, 25 bp, Saccharomyces pastorianus
atctattacattatgggtggtatgt

SEQ ID NO: 190163 - DNA, 25 bp, Saccharomyces pastorianus
ctattacattatgggtggtatgttg

SEQ ID NO: 190164 - DNA, 25 bp, Saccharomyces pastorianus
cattatgggtggtatgttggaataa

SEQ ID NO: 190165 - DNA, 25 bp, Saccharomyces pastorianus
cattagatctattacattatgggtg

SEQ ID NO: 190166 - DNA, 25 bp, Saccharomyces pastorianus
tctattacattatgggtggtatgtt

SEQ ID NO: 190167 - DNA, 25 bp, Saccharomyces pastorianus
ttagatctattacattatgggtggt

SEQ ID NO: 190168 - DNA, 25 bp, Saccharomyces pastorianus
attatgggtggtatgttggaataaa

SEQ ID NO: 190169 - DNA, 25 bp, Saccharomyces pastorianus
tcattagatctattacattatgggt

SEQ ID NO: 190170 - DNA, 25 bp, Saccharomyces pastorianus
gatctattacattatgggtggtatg

SEQ ID NO: 190171 - DNA, 25 bp, Saccharomyces pastorianus
ttcattagatctattacattatggg

SEQ ID NO: 190172 - DNA, 25 bp, Saccharomyces pastorianus
attagatctattacattatgggtgg

SEQ ID NO: 190173 - DNA, 25 bp, Saccharomyces pastorianus
atgtcttacagtttcttggatttcg

SEQ ID NO: 190174 - DNA, 25 bp, Saccharomyces pastorianus
cttccgagaatatgaatgtcttaca

SEQ ID NO: 190175 - DNA, 25 bp, Saccharomyces pastorianus
ttccgagaatatgaatgtcttacag

SEQ ID NO: 190176 - DNA, 25 bp, Saccharomyces pastorianus
acttccgagaatatgaatgtcttac

SEQ ID NO: 190177 - DNA, 25 bp, Saccharomyces pastorianus
cttacagtttcttggatttcggtct

SEQ ID NO: 190178 - DNA, 25 bp, Saccharomyces pastorianus
cttggatttcggtctgacgaaatta

SEQ ID NO: 190179 - DNA, 25 bp, Saccharomyces pastorianus
gaatgtcttacagtttcttggattt

SEQ ID NO: 190180 - DNA, 25 bp, Saccharomyces pastorianus
cagtttcttggatttcggtctgacg

SEQ ID NO: 190181 - DNA, 25 bp, Saccharomyces pastorianus
tccgagaatatgaatgtcttacagt

SEQ ID NO: 190182 - DNA, 25 bp, Saccharomyces pastorianus
acatcttttcctcggggatcctcta

SEQ ID NO: 190183 - DNA, 25 bp, Saccharomyces pastorianus
aacatcttttcctcggggatcctct

SEQ ID NO: 190184 - DNA, 25 bp, Saccharomyces pastorianus
gaggttggtgaattttgagataatt

SEQ ID NO: 190185 - DNA, 25 bp, Saccharomyces pastorianus
tgagaggttggtgaattttgagata

SEQ ID NO: 190186 - DNA, 25 bp, Saccharomyces pastorianus
catgagaggttggtgaattttgaga

SEQ ID NO: 190187 - DNA, 25 bp, Saccharomyces pastorianus
agaggttggtgaattttgagataat

SEQ ID NO: 190188 - DNA, 25 bp, Saccharomyces pastorianus
gattccaatgttgataaaggctgtt

SEQ ID NO: 190189 - DNA, 25 bp, Saccharomyces pastorianus
ggttggtgaattttgagataattgt

SEQ ID NO: 190190 - DNA, 25 bp, Saccharomyces pastorianus
gagaggttggtgaattttgagataa

SEQ ID NO: 190191 - DNA, 25 bp, Saccharomyces pastorianus
aggttggtgaattttgagataattg

SEQ ID NO: 190192 - DNA, 25 bp, Saccharomyces pastorianus
gttggtgaattttgagataattgtt

SEQ ID NO: 190193 - DNA, 25 bp, Saccharomyces pastorianus
atgagaggttggtgaattttgagat

SEQ ID NO: 190194 - DNA, 25 bp, Saccharomyces pastorianus
tggtgaattttgagataattgttgg

SEQ ID NO: 190195 - DNA, 25 bp, Saccharomyces pastorianus
aaccaggcttcgactggcgtcgtcc

SEQ ID NO: 190196 - DNA, 25 bp, Saccharomyces pastorianus
acaaccaggcttcgactggcgtcgt

SEQ ID NO: 190197 - DNA, 25 bp, Saccharomyces pastorianus
gactgagaagactatagaatacaat

SEQ ID NO: 190198 - DNA, 25 bp, Saccharomyces pastorianus
gactggcgtcgtcccgcgattctac

SEQ ID NO: 190199 - DNA, 25 bp, Saccharomyces pastorianus
ctttctcaccctttgactgagaaga

SEQ ID NO: 190200 - DNA, 25 bp, Saccharomyces pastorianus
cttcgactggcgtcgtcccgcgatt

SEQ ID NO: 190201 - DNA, 25 bp, Saccharomyces pastorianus
accctttgactgagaagactataga

SEQ ID NO: 190202 - DNA, 25 bp, Saccharomyces pastorianus
aaaacaaccaggcttcgactggcgt

SEQ ID NO: 190203 - DNA, 25 bp, Saccharomyces pastorianus
tcaccctttgactgagaagactata

SEQ ID NO: 190204 - DNA, 25 bp, Saccharomyces pastorianus
aaacaaccaggcttcgactggcgtc

SEQ ID NO: 190205 - DNA, 25 bp, Saccharomyces pastorianus
gaatacaaaaacaaccaggcttcga

SEQ ID NO: 190206 - DNA, 25 bp, Saccharomyces pastorianus
ataggaatcattatatcttacatgt

SEQ ID NO: 190207 - DNA, 25 bp, Saccharomyces pastorianus
tattctgttctgttgtagtaactaa

SEQ ID NO: 190208 - DNA, 25 bp, Saccharomyces pastorianus
catgttattctgttctgttgtagta

SEQ ID NO: 190209 - DNA, 25 bp, Saccharomyces pastorianus
atgtacttatttacaacctttgaga

SEQ ID NO: 190210 - DNA, 25 bp, Saccharomyces pastorianus
gcaaacgttcagtgagaacaacaac

SEQ ID NO: 190211 - DNA, 25 bp, Saccharomyces pastorianus
gagggcccaaaaatattagatcgag

SEQ ID NO: 190212 - DNA, 25 bp, Saccharomyces pastorianus
gttctgttgtagtaactaatttcag

SEQ ID NO: 190213 - DNA, 25 bp, Saccharomyces pastorianus
attgccgaaacgcaaacgttcagtg

SEQ ID NO: 190214 - DNA, 25 bp, Saccharomyces pastorianus
gaacaacaactgtatgacagcttta

SEQ ID NO: 190215 - DNA, 25 bp, Saccharomyces pastorianus
actgtatgacagctttagaaatatc

SEQ ID NO: 190216 - DNA, 25 bp, Saccharomyces pastorianus
atatcttacatgttattctgttctg

SEQ ID NO: 190217 - DNA, 25 bp, Saccharomyces pastorianus
gacacattgttattcctctacatgc

SEQ ID NO: 190218 - DNA, 25 bp, Saccharomyces pastorianus
ctctacatgctctctggaaaaactt

SEQ ID NO: 190219 - DNA, 25 bp, Saccharomyces pastorianus
ctttctttgatccttttctgtcata

SEQ ID NO: 190220 - DNA, 25 bp, Saccharomyces pastorianus
ttgccaacacattttcttcatcatc

SEQ ID NO: 190221 - DNA, 25 bp, Saccharomyces pastorianus
atttcctggacaaattctgtaccaa

SEQ ID NO: 190222 - DNA, 25 bp, Saccharomyces pastorianus
gtaaagcacgttttcgcacatatca

SEQ ID NO: 190223 - DNA, 25 bp, Saccharomyces pastorianus
atggtgtttttgtcccattgacaca

SEQ ID NO: 190224 - DNA, 25 bp, Saccharomyces pastorianus
ttttgcagtatcttcctttctttga

SEQ ID NO: 190225 - DNA, 25 bp, Saccharomyces pastorianus
atcttcttcagttaattcgctccgt

SEQ ID NO: 190226 - DNA, 25 bp, Saccharomyces pastorianus
atcattaagcccaatttgtcctgga

SEQ ID NO: 190227 - DNA, 25 bp, Saccharomyces pastorianus
tttgctactctatttcttgccccaa

SEQ ID NO: 190228 - DNA, 25 bp, Saccharomyces pastorianus
aggcgacagcttccatgtcgatcgt

SEQ ID NO: 190229 - DNA, 25 bp, Saccharomyces pastorianus
gatcgttgcgttaccgtctagcttc

SEQ ID NO: 190230 - DNA, 25 bp, Saccharomyces pastorianus
ttggctgaaaaacaggcgacagctt

SEQ ID NO: 190231 - DNA, 25 bp, Saccharomyces pastorianus
ggcgacagcttccatgtcgatcgtt

SEQ ID NO: 190232 - DNA, 25 bp, Saccharomyces pastorianus
aacaggcgacagcttccatgtcgat

SEQ ID NO: 190233 - DNA, 25 bp, Saccharomyces pastorianus
cgttgcgttaccgtctagcttccag

SEQ ID NO: 190234 - DNA, 25 bp, Saccharomyces pastorianus
gtcgatcgttgcgttaccgtctagc

SEQ ID NO: 190235 - DNA, 25 bp, Saccharomyces pastorianus
tgaaaaacaggcgacagcttccatg

SEQ ID NO: 190236 - DNA, 25 bp, Saccharomyces pastorianus
atcgttgcgttaccgtctagcttcc

SEQ ID NO: 190237 - DNA, 25 bp, Saccharomyces pastorianus
tcgatcgttgcgttaccgtctagct

SEQ ID NO: 190238 - DNA, 25 bp, Saccharomyces pastorianus
cgatcgttgcgttaccgtctagctt

SEQ ID NO: 190239 - DNA, 25 bp, Saccharomyces pastorianus
aatactgcgaggaaatgccggattt

SEQ ID NO: 190240 - DNA, 25 bp, Saccharomyces pastorianus
taactacatgtgatcccgaatacta

SEQ ID NO: 190241 - DNA, 25 bp, Saccharomyces pastorianus
tcacccaatggattttcttaaaact

SEQ ID NO: 190242 - DNA, 25 bp, Saccharomyces pastorianus
cgcattagaccacccaattgtacaa

SEQ ID NO: 190243 - DNA, 25 bp, Saccharomyces pastorianus
agtatgttgctctcgcattagacca

SEQ ID NO: 190244 - DNA, 25 bp, Saccharomyces pastorianus
gggatcccgttgatatgacagtttt

SEQ ID NO: 190245 - DNA, 25 bp, Saccharomyces pastorianus
gaccggaaactctttttgctgtaca

SEQ ID NO: 190246 - DNA, 25 bp, Saccharomyces pastorianus
ttgaaccaactgaaggactggcctt

SEQ ID NO: 190247 - DNA, 25 bp, Saccharomyces pastorianus
ttgctgtacagtatgttgctctcgc

SEQ ID NO: 190248 - DNA, 25 bp, Saccharomyces pastorianus
gtgttcaaagttgcggaccccaaat

SEQ ID NO: 190249 - DNA, 25 bp, Saccharomyces pastorianus
taacgaaattcgctcctaaattgaa

SEQ ID NO: 190250 - DNA, 25 bp, Saccharomyces pastorianus
gacctcagtaccactggtctaatat

SEQ ID NO: 190251 - DNA, 25 bp, Saccharomyces pastorianus
ttctcctttataggtgacaagtggt

SEQ ID NO: 190252 - DNA, 25 bp, Saccharomyces pastorianus
gtttctgctcaattgttgtttccaa

SEQ ID NO: 190253 - DNA, 25 bp, Saccharomyces pastorianus
aaggcccaaaactacgaatgcgata

SEQ ID NO: 190254 - DNA, 25 bp, Saccharomyces pastorianus
gggctgtcatctatggttctttaat

SEQ ID NO: 190255 - DNA, 25 bp, Saccharomyces pastorianus
tctttaattttctcctttataggtg

SEQ ID NO: 190256 - DNA, 25 bp, Saccharomyces pastorianus
tattgcatttatatgaagcgagctt

SEQ ID NO: 190257 - DNA, 25 bp, Saccharomyces pastorianus
aatgcgataatgacaggtgcgctat

SEQ ID NO: 190258 - DNA, 25 bp, Saccharomyces pastorianus
aattgttgtttccaacatccaaagt

SEQ ID NO: 190259 - DNA, 25 bp, Saccharomyces pastorianus
gacaggtgcgctatttggaattggt

SEQ ID NO: 190260 - DNA, 25 bp, Saccharomyces pastorianus
cagctagggctgtcatctatggttc

SEQ ID NO: 190261 - DNA, 25 bp, Saccharomyces pastorianus
taccttatggtggtcaccaactatt

SEQ ID NO: 190262 - DNA, 25 bp, Saccharomyces pastorianus
gcaatttaagaagctaactcatgct

SEQ ID NO: 190263 - DNA, 25 bp, Saccharomyces pastorianus
ctcaaagaactggtttaagccaaat

SEQ ID NO: 190264 - DNA, 25 bp, Saccharomyces pastorianus
aactattaacagagcaaatgtctat

SEQ ID NO: 190265 - DNA, 25 bp, Saccharomyces pastorianus
atttaagaagctaactcatgctcaa

SEQ ID NO: 190266 - DNA, 25 bp, Saccharomyces pastorianus
taagaagctaactcatgctcaaaga

SEQ ID NO: 190267 - DNA, 25 bp, Saccharomyces pastorianus
tatggtggtcaccaactattaacag

SEQ ID NO: 190268 - DNA, 25 bp, Saccharomyces pastorianus
gaagctaactcatgctcaaagaact

SEQ ID NO: 190269 - DNA, 25 bp, Saccharomyces pastorianus
atgctcaaagaactggtttaagcca

SEQ ID NO: 190270 - DNA, 25 bp, Saccharomyces pastorianus
ctaactcatgctcaaagaactggtt

SEQ ID NO: 190271 - DNA, 25 bp, Saccharomyces pastorianus
gctaactcatgctcaaagaactggt

SEQ ID NO: 190272 - DNA, 25 bp, Saccharomyces pastorianus
cgtcccggagaactctataggtgtt

SEQ ID NO: 190273 - DNA, 25 bp, Saccharomyces pastorianus
gaagttctgcaaaggtgcggtaaca

SEQ ID NO: 190274 - DNA, 25 bp, Saccharomyces pastorianus
gatgaagctactatccttggatcta

SEQ ID NO: 190275 - DNA, 25 bp, Saccharomyces pastorianus
tcaatgctacgccatctgaggatga

SEQ ID NO: 190276 - DNA, 25 bp, Saccharomyces pastorianus
gaacgttgccattacaagacccaga

SEQ ID NO: 190277 - DNA, 25 bp, Saccharomyces pastorianus
aactgtagatgggttccagggccgt

SEQ ID NO: 190278 - DNA, 25 bp, Saccharomyces pastorianus
tttaaggtcattcaacgtcccggag

SEQ ID NO: 190279 - DNA, 25 bp, Saccharomyces pastorianus
gacttttgatagacctaccgaccgt

SEQ ID NO: 190280 - DNA, 25 bp, Saccharomyces pastorianus
gttatttctccataccatgcacaag

SEQ ID NO: 190281 - DNA, 25 bp, Saccharomyces pastorianus
ggcaactagttgttgttggccatat

SEQ ID NO: 190282 - DNA, 25 bp, Saccharomyces pastorianus
aacgctcgcgcacagacttttgata

SEQ ID NO: 190283 - DNA, 25 bp, Saccharomyces pastorianus
tgttgctgttgctgctgttgctgct

SEQ ID NO: 190284 - DNA, 25 bp, Saccharomyces pastorianus
ttgttgctgctgcttcgctcgtcct

SEQ ID NO: 190285 - DNA, 25 bp, Saccharomyces pastorianus
ttgctgctgctgctgttgttgttgt

SEQ ID NO: 190286 - DNA, 25 bp, Saccharomyces pastorianus
tgctgctgctgctgttgttgttgtt

SEQ ID NO: 190287 - DNA, 25 bp, Saccharomyces pastorianus
tgctgctgttgttgttgttgttgct

SEQ ID NO: 190288 - DNA, 25 bp, Saccharomyces pastorianus
gctgctgctgctgttgttgttgttg

SEQ ID NO: 190289 - DNA, 25 bp, Saccharomyces pastorianus
gttgttgctgctgcttcgctcgtcc

SEQ ID NO: 190290 - DNA, 25 bp, Saccharomyces pastorianus
ctgctgctgttgttgttgttgttgc

SEQ ID NO: 190291 - DNA, 25 bp, Saccharomyces pastorianus
ctgctgctgctgttgttgttgttgt

SEQ ID NO: 190292 - DNA, 25 bp, Saccharomyces pastorianus
gttgctgttgctgctgttgctgctg

SEQ ID NO: 190293 - DNA, 25 bp, Saccharomyces pastorianus
ttgctgttgctgctgttgctgctgc

SEQ ID NO: 190294 - DNA, 25 bp, Saccharomyces pastorianus
agagcagttcatcgtccaaaggaga

SEQ ID NO: 190295 - DNA, 25 bp, Saccharomyces pastorianus
ggtactccacaggactctagaggat

SEQ ID NO: 190296 - DNA, 25 bp, Saccharomyces pastorianus
ggcgttactttttctgctaagccag

SEQ ID NO: 190297 - DNA, 25 bp, Saccharomyces pastorianus
acggatccctaaatgaaattgtcac

SEQ ID NO: 190298 - DNA, 25 bp, Saccharomyces pastorianus
gaaagatggtactccacaggactct

SEQ ID NO: 190299 - DNA, 25 bp, Saccharomyces pastorianus
gttcatggtgcaagagcagttcatc

SEQ ID NO: 190300 - DNA, 25 bp, Saccharomyces pastorianus
tgctaagccagatccaactccgaat

SEQ ID NO: 190301 - DNA, 25 bp, Saccharomyces pastorianus
actccgaatctattacaaccttggg

SEQ ID NO: 190302 - DNA, 25 bp, Saccharomyces pastorianus
tattgctggcgttactttttctgct

SEQ ID NO: 190303 - DNA, 25 bp, Saccharomyces pastorianus
ttttgccagtatgttcatggtgcaa

SEQ ID NO: 190304 - DNA, 25 bp, Saccharomyces pastorianus
gtcacaccaacggttattgctggcg

SEQ ID NO: 190305 - DNA, 25 bp, Saccharomyces pastorianus
taagaagtttcttggagcatcaaag

SEQ ID NO: 190306 - DNA, 25 bp, Saccharomyces pastorianus
ggcagcttgttcaaagcccctacca

SEQ ID NO: 190307 - DNA, 25 bp, Saccharomyces pastorianus
aaggcaattggcagcttgttcaaag

SEQ ID NO: 190308 - DNA, 25 bp, Saccharomyces pastorianus
gaaaatcaaaccagacaaggcaatt

SEQ ID NO: 190309 - DNA, 25 bp, Saccharomyces pastorianus
attggcagcttgttcaaagccccta

SEQ ID NO: 190310 - DNA, 25 bp, Saccharomyces pastorianus
tcaaagcccctaccatcgaatatgt

SEQ ID NO: 190311 - DNA, 25 bp, Saccharomyces pastorianus
aaccagacaaggcaattggcagctt

SEQ ID NO: 190312 - DNA, 25 bp, Saccharomyces pastorianus
gcccctaccatcgaatatgtagtag

SEQ ID NO: 190313 - DNA, 25 bp, Saccharomyces pastorianus
tgttcaaagcccctaccatcgaata

SEQ ID NO: 190314 - DNA, 25 bp, Saccharomyces pastorianus
ggagcatcaaagaaaatcaaaccag

SEQ ID NO: 190315 - DNA, 25 bp, Saccharomyces pastorianus
aagcccctaccatcgaatatgtagt

SEQ ID NO: 190316 - DNA, 25 bp, Saccharomyces pastorianus
ctccctgttgttttcatggaacgaa

SEQ ID NO: 190317 - DNA, 25 bp, Saccharomyces pastorianus
ttagagatgcccatgtcgtcggagc

SEQ ID NO: 190318 - DNA, 25 bp, Saccharomyces pastorianus
tgctacaatagtgccttcgacagat

SEQ ID NO: 190319 - DNA, 25 bp, Saccharomyces pastorianus
acgtcccgcaagatctcgtggaggc

SEQ ID NO: 190320 - DNA, 25 bp, Saccharomyces pastorianus
tacttggatgaactgtcggacacct

SEQ ID NO: 190321 - DNA, 25 bp, Saccharomyces pastorianus
tcggagcctctcaacgcgatttgaa

SEQ ID NO: 190322 - DNA, 25 bp, Saccharomyces pastorianus
cgatgtcatcctaccaaaattctct

SEQ ID NO: 190323 - DNA, 25 bp, Saccharomyces pastorianus
aacactggtaggtttgcttccaagg

SEQ ID NO: 190324 - DNA, 25 bp, Saccharomyces pastorianus
gatgtatatattccaagacccttca

SEQ ID NO: 190325 - DNA, 25 bp, Saccharomyces pastorianus
aaccctgcgctcgaatttagagtct

SEQ ID NO: 190326 - DNA, 25 bp, Saccharomyces pastorianus
aatggtgtgacatcaaccctgcgct

SEQ ID NO: 190327 - DNA, 25 bp, Saccharomyces pastorianus
tgatttggtccgtgttccacgtaac

SEQ ID NO: 190328 - DNA, 25 bp, Saccharomyces pastorianus
gctcgtcggtgtcggctatcaaata

SEQ ID NO: 190329 - DNA, 25 bp, Saccharomyces pastorianus
ataagggccgtgtcggtgaatcctg

SEQ ID NO: 190330 - DNA, 25 bp, Saccharomyces pastorianus
gtgttctcgaccacattgtttattg

SEQ ID NO: 190331 - DNA, 25 bp, Saccharomyces pastorianus
gtaaccgccgtgctttggtatattc

SEQ ID NO: 190332 - DNA, 25 bp, Saccharomyces pastorianus
ggaactcagagacgttgcttcgcac

SEQ ID NO: 190333 - DNA, 25 bp, Saccharomyces pastorianus
tctccacgttggttgatgcataagg

SEQ ID NO: 190334 - DNA, 25 bp, Saccharomyces pastorianus
tgcttcgcacgacagagagttacat

SEQ ID NO: 190335 - DNA, 25 bp, Saccharomyces pastorianus
ggtaccgttcctgctattttatgga

SEQ ID NO: 190336 - DNA, 25 bp, Saccharomyces pastorianus
atttatcgttggtttggtgctcgtc

SEQ ID NO: 190337 - DNA, 25 bp, Saccharomyces pastorianus
gcagcactattaattggtaccgttc

SEQ ID NO: 190338 - DNA, 25 bp, Saccharomyces pastorianus
tcaaggtcgggtggtttttgcacac

SEQ ID NO: 190339 - DNA, 25 bp, Saccharomyces pastorianus
tgacttggtcgggttccacacgtac

SEQ ID NO: 190340 - DNA, 25 bp, Saccharomyces pastorianus
aatctacagaatcttgcccgtcaga

SEQ ID NO: 190341 - DNA, 25 bp, Saccharomyces pastorianus
aaggtcgtcctcgtacaggtcgcag

SEQ ID NO: 190342 - DNA, 25 bp, Saccharomyces pastorianus
gattacgcaagacatttcctctcct

SEQ ID NO: 190343 - DNA, 25 bp, Saccharomyces pastorianus
aaagctgcacgccatggaggtgttt

SEQ ID NO: 190344 - DNA, 25 bp, Saccharomyces pastorianus
aagtccatcccctttgaagagctga

SEQ ID NO: 190345 - DNA, 25 bp, Saccharomyces pastorianus
agaatcaacggccaattcggtaccg

SEQ ID NO: 190346 - DNA, 25 bp, Saccharomyces pastorianus
gtgtttctgagtgagcacccggagt

SEQ ID NO: 190347 - DNA, 25 bp, Saccharomyces pastorianus
agattacatcaagggtgttccgcaa

SEQ ID NO: 190348 - DNA, 25 bp, Saccharomyces pastorianus
gtacctgaggtctgtggtcaacgaa

SEQ ID NO: 190349 - DNA, 25 bp, Saccharomyces pastorianus
tattaacttctcatctagcacacta

SEQ ID NO: 190350 - DNA, 25 bp, Saccharomyces pastorianus
aagacattggcatctatctcgttag

SEQ ID NO: 190351 - DNA, 25 bp, Saccharomyces pastorianus
cggtaccagttctgcgtcaacaaat

SEQ ID NO: 190352 - DNA, 25 bp, Saccharomyces pastorianus
gtcagtgatccctaccgtgttagaa

SEQ ID NO: 190353 - DNA, 25 bp, Saccharomyces pastorianus
tgtatctgcatcagctccagcttca

SEQ ID NO: 190354 - DNA, 25 bp, Saccharomyces pastorianus
aaacgcgtcgtctactgtatctgca

SEQ ID NO: 190355 - DNA, 25 bp, Saccharomyces pastorianus
gtcattcccggtatatcgtcagtga

SEQ ID NO: 190356 - DNA, 25 bp, Saccharomyces pastorianus
atagccatgctagaggttttccaaa

SEQ ID NO: 190357 - DNA, 25 bp, Saccharomyces pastorianus
gcgtcaacaaatactccaacagcta

SEQ ID NO: 190358 - DNA, 25 bp, Saccharomyces pastorianus
gctggtgagtttaatgtcattcccg

SEQ ID NO: 190359 - DNA, 25 bp, Saccharomyces pastorianus
atgcccgtgggtccaaacgcgtcgt

SEQ ID NO: 190360 - DNA, 25 bp, Saccharomyces pastorianus
aaccggtgatctcggctggagccaa

SEQ ID NO: 190361 - DNA, 25 bp, Saccharomyces pastorianus
aacactactaatgggttccgaagat

SEQ ID NO: 190362 - DNA, 25 bp, Saccharomyces pastorianus
aagaaccggtgatctcggctggagc

SEQ ID NO: 190363 - DNA, 25 bp, Saccharomyces pastorianus
gtaacactactaatgggttccgaag

SEQ ID NO: 190364 - DNA, 25 bp, Saccharomyces pastorianus
ggtgatctcggctggagccaatgat

SEQ ID NO: 190365 - DNA, 25 bp, Saccharomyces pastorianus
cagcgctcgtagttaaattggaaga

SEQ ID NO: 190366 - DNA, 25 bp, Saccharomyces pastorianus
ctcggctggagccaatgatttagta

SEQ ID NO: 190367 - DNA, 25 bp, Saccharomyces pastorianus
gatctcggctggagccaatgattta

SEQ ID NO: 190368 - DNA, 25 bp, Saccharomyces pastorianus
gattgtagaagaaccggtgatctcg

SEQ ID NO: 190369 - DNA, 25 bp, Saccharomyces pastorianus
gatgtagcagcgctcgtagttaaat

SEQ ID NO: 190370 - DNA, 25 bp, Saccharomyces pastorianus
agcagcgctcgtagttaaattggaa

SEQ ID NO: 190371 - DNA, 25 bp, Saccharomyces pastorianus
tcttgaccgtagatggaagctttaa

SEQ ID NO: 190372 - DNA, 25 bp, Saccharomyces pastorianus
ggaggtactctatcttgaccgtaga

SEQ ID NO: 190373 - DNA, 25 bp, Saccharomyces pastorianus
ctatcttgaccgtagatggaagctt

SEQ ID NO: 190374 - DNA, 25 bp, Saccharomyces pastorianus
atgtcttggaggtactctatcttga

SEQ ID NO: 190375 - DNA, 25 bp, Saccharomyces pastorianus
gaggtactctatcttgaccgtagat

SEQ ID NO: 190376 - DNA, 25 bp, Saccharomyces pastorianus
gaccgtagatggaagctttaaaatt

SEQ ID NO: 190377 - DNA, 25 bp, Saccharomyces pastorianus
ggtactctatcttgaccgtagatgg

SEQ ID NO: 190378 - DNA, 25 bp, Saccharomyces pastorianus
tggaggtactctatcttgaccgtag

SEQ ID NO: 190379 - DNA, 25 bp, Saccharomyces pastorianus
cttggaggtactctatcttgaccgt

SEQ ID NO: 190380 - DNA, 25 bp, Saccharomyces pastorianus
gtcttggaggtactctatcttgacc

SEQ ID NO: 190381 - DNA, 25 bp, Saccharomyces pastorianus
tactctatcttgaccgtagatggaa

SEQ ID NO: 190382 - DNA, 25 bp, Saccharomyces pastorianus
ttgcaagctcaaacactactactac

SEQ ID NO: 190383 - DNA, 25 bp, Saccharomyces pastorianus
cttgaccaagccacgcaaaagagat

SEQ ID NO: 190384 - DNA, 25 bp, Saccharomyces pastorianus
ttgcccaacttggttccgaactatt

SEQ ID NO: 190385 - DNA, 25 bp, Saccharomyces pastorianus
ggtataagtacaatccgtccaacga

SEQ ID NO: 190386 - DNA, 25 bp, Saccharomyces pastorianus
ggttccgaactattcatccgatatg

SEQ ID NO: 190387 - DNA, 25 bp, Saccharomyces pastorianus
taggcctatccaccgcacgagagat

SEQ ID NO: 190388 - DNA, 25 bp, Saccharomyces pastorianus
tctgatcagaaccaggacgccttga

SEQ ID NO: 190389 - DNA, 25 bp, Saccharomyces pastorianus
atccgtccaacgacacgtatgatgt

SEQ ID NO: 190390 - DNA, 25 bp, Saccharomyces pastorianus
aaactgcacatcataggcctatcca

SEQ ID NO: 190391 - DNA, 25 bp, Saccharomyces pastorianus
aaatgatcatgcatcctctctacat

SEQ ID NO: 190392 - DNA, 25 bp, Saccharomyces pastorianus
ccagggaagtggtttgcccaacttg

SEQ ID NO: 190393 - DNA, 25 bp, Saccharomyces pastorianus
acttcatgaccaccggtaacgctct

SEQ ID NO: 190394 - DNA, 25 bp, Saccharomyces pastorianus
cgctctaggatctgtgaacatgacc

SEQ ID NO: 190395 - DNA, 25 bp, Saccharomyces pastorianus
ccaccggtaacgctctaggatctgt

SEQ ID NO: 190396 - DNA, 25 bp, Saccharomyces pastorianus
ggtaacgctctaggatctgtgaaca

SEQ ID NO: 190397 - DNA, 25 bp, Saccharomyces pastorianus
accggtaacgctctaggatctgtga

SEQ ID NO: 190398 - DNA, 25 bp, Saccharomyces pastorianus
ccggtaacgctctaggatctgtgaa

SEQ ID NO: 190399 - DNA, 25 bp, Saccharomyces pastorianus
atgaccaccggtaacgctctaggat

SEQ ID NO: 190400 - DNA, 25 bp, Saccharomyces pastorianus
gaccaccggtaacgctctaggatct

SEQ ID NO: 190401 - DNA, 25 bp, Saccharomyces pastorianus
aacgctctaggatctgtgaacatga

SEQ ID NO: 190402 - DNA, 25 bp, Saccharomyces pastorianus
tcatgaccaccggtaacgctctagg

SEQ ID NO: 190403 - DNA, 25 bp, Saccharomyces pastorianus
gtaacgctctaggatctgtgaacat

SEQ ID NO: 190404 - DNA, 25 bp, Saccharomyces pastorianus
aggattctcttgacgagttctcgca

SEQ ID NO: 190405 - DNA, 25 bp, Saccharomyces pastorianus
tgtgtcactggtttcagtttccgac

SEQ ID NO: 190406 - DNA, 25 bp, Saccharomyces pastorianus
ggcggttcgtcgtacagcaaactga

SEQ ID NO: 190407 - DNA, 25 bp, Saccharomyces pastorianus
acaagagggacatccgtcagcgcta

SEQ ID NO: 190408 - DNA, 25 bp, Saccharomyces pastorianus
agcgctagctgaggccatccgggat

SEQ ID NO: 190409 - DNA, 25 bp, Saccharomyces pastorianus
gctgcctctggccaatgacgaagtg

SEQ ID NO: 190410 - DNA, 25 bp, Saccharomyces pastorianus
aaaatttcggcgctgatcccgttga

SEQ ID NO: 190411 - DNA, 25 bp, Saccharomyces pastorianus
gaagctggactttcatgcgcaccat

SEQ ID NO: 190412 - DNA, 25 bp, Saccharomyces pastorianus
tagggtacattctggcggttcgtcg

SEQ ID NO: 190413 - DNA, 25 bp, Saccharomyces pastorianus
ttttacaacccttaagacgctgcct

SEQ ID NO: 190414 - DNA, 25 bp, Saccharomyces pastorianus
cacatgggaccatcagtcttccaaa

SEQ ID NO: 190415 - DNA, 25 bp, Saccharomyces pastorianus
cttttccattacagatagcgccgat

SEQ ID NO: 190416 - DNA, 25 bp, Saccharomyces pastorianus
ctcgttcggtttaggtcgtatcata

SEQ ID NO: 190417 - DNA, 25 bp, Saccharomyces pastorianus
gggaacaccatttggtatcaccata

SEQ ID NO: 190418 - DNA, 25 bp, Saccharomyces pastorianus
cgtatcatatactgcatcttcgacc

SEQ ID NO: 190419 - DNA, 25 bp, Saccharomyces pastorianus
gatctcgcaggctttacgtaaaaga

SEQ ID NO: 190420 - DNA, 25 bp, Saccharomyces pastorianus
ggtatcaccatagatttcgaaacta

SEQ ID NO: 190421 - DNA, 25 bp, Saccharomyces pastorianus
gcatcttcgaccattgtttccaagt

SEQ ID NO: 190422 - DNA, 25 bp, Saccharomyces pastorianus
taatgtcattgagccctcgttcggt

SEQ ID NO: 190423 - DNA, 25 bp, Saccharomyces pastorianus
gatagcgccgatcaaagtatttgtt

SEQ ID NO: 190424 - DNA, 25 bp, Saccharomyces pastorianus
gacaactttgcaacatatacgagag

SEQ ID NO: 190425 - DNA, 25 bp, Saccharomyces pastorianus
actgatgtgatttcgaccattgaca

SEQ ID NO: 190426 - DNA, 25 bp, Saccharomyces pastorianus
atgagcggtgttacagacgatatga

SEQ ID NO: 190427 - DNA, 25 bp, Saccharomyces pastorianus
gggaacaactcttagacgtatctct

SEQ ID NO: 190428 - DNA, 25 bp, Saccharomyces pastorianus
tctcctggacgttcatagagtcgcc

SEQ ID NO: 190429 - DNA, 25 bp, Saccharomyces pastorianus
gttacagacgatatgaaacaagcaa

SEQ ID NO: 190430 - DNA, 25 bp, Saccharomyces pastorianus
tggacgttcatagagtcgccgaaaa

SEQ ID NO: 190431 - DNA, 25 bp, Saccharomyces pastorianus
tagacgtatctctcctggacgttca

SEQ ID NO: 190432 - DNA, 25 bp, Saccharomyces pastorianus
tacggtcattggacctggaatcgag

SEQ ID NO: 190433 - DNA, 25 bp, Saccharomyces pastorianus
gagtcgccgaaaaatatctactaaa

SEQ ID NO: 190434 - DNA, 25 bp, Saccharomyces pastorianus
gtatctctcctggacgttcatagag

SEQ ID NO: 190435 - DNA, 25 bp, Saccharomyces pastorianus
gaaacaagcaagaagggaacaactc

SEQ ID NO: 190436 - DNA, 25 bp, Saccharomyces pastorianus
gtgagtacggtcattggacctggaa

SEQ ID NO: 190437 - DNA, 25 bp, Saccharomyces pastorianus
ctgttacccaatatcctttggcggt

SEQ ID NO: 190438 - DNA, 25 bp, Saccharomyces pastorianus
ggttatcttatcatatacttactct

SEQ ID NO: 190439 - DNA, 25 bp, Saccharomyces pastorianus
gagaggactcctaggttatcttatc

SEQ ID NO: 190440 - DNA, 25 bp, Saccharomyces pastorianus
aggagtggtcagatgagtttgataa

SEQ ID NO: 190441 - DNA, 25 bp, Saccharomyces pastorianus
ggactcctaggttatcttatcatat

SEQ ID NO: 190442 - DNA, 25 bp, Saccharomyces pastorianus
ttgaacatgacgtacggtattttct

SEQ ID NO: 190443 - DNA, 25 bp, Saccharomyces pastorianus
ccaattgaacatgacgtacggtatt

SEQ ID NO: 190444 - DNA, 25 bp, Saccharomyces pastorianus
ggtggactggtctcgttgtaccaat

SEQ ID NO: 190445 - DNA, 25 bp, Saccharomyces pastorianus
gggatgcaattgaaccaccaaagag

SEQ ID NO: 190446 - DNA, 25 bp, Saccharomyces pastorianus
actggtctcgttgtaccaattgaac

SEQ ID NO: 190447 - DNA, 25 bp, Saccharomyces pastorianus
atacttactctgttacccaatatcc

SEQ ID NO: 190448 - DNA, 25 bp, Saccharomyces pastorianus
attgggattgatccttcttctgcta

SEQ ID NO: 190449 - DNA, 25 bp, Saccharomyces pastorianus
gcaacttttgtcgttgaaccctatt

SEQ ID NO: 190450 - DNA, 25 bp, Saccharomyces pastorianus
gaaatttcacaaaggcacacgcaaa

SEQ ID NO: 190451 - DNA, 25 bp, Saccharomyces pastorianus
atttcagcagaagccatccattggt

SEQ ID NO: 190452 - DNA, 25 bp, Saccharomyces pastorianus
aagatttatccagcattcgaccaga

SEQ ID NO: 190453 - DNA, 25 bp, Saccharomyces pastorianus
agatttattaatgcgcctggtgaag

SEQ ID NO: 190454 - DNA, 25 bp, Saccharomyces pastorianus
gctcactataataacgtacgtccct

SEQ ID NO: 190455 - DNA, 25 bp, Saccharomyces pastorianus
atgtggcacaggaaaagcaactttt

SEQ ID NO: 190456 - DNA, 25 bp, Saccharomyces pastorianus
ctcttaccctttatctttagtcaat

SEQ ID NO: 190457 - DNA, 25 bp, Saccharomyces pastorianus
aaaaattttgaatctgctcactata

SEQ ID NO: 190458 - DNA, 25 bp, Saccharomyces pastorianus
cttctgctatgctttcgattgctga

SEQ ID NO: 190459 - DNA, 25 bp, Saccharomyces pastorianus
atcaaggcaccatctgtgaagagac

SEQ ID NO: 190460 - DNA, 25 bp, Saccharomyces pastorianus
caacagagctgcgactaccattttc

SEQ ID NO: 190461 - DNA, 25 bp, Saccharomyces pastorianus
gtacactgcattttctagacttaca

SEQ ID NO: 190462 - DNA, 25 bp, Saccharomyces pastorianus
tttagaggttcacatgcttgacttt

SEQ ID NO: 190463 - DNA, 25 bp, Saccharomyces pastorianus
gtgatgaaagctactgaacctcaga

SEQ ID NO: 190464 - DNA, 25 bp, Saccharomyces pastorianus
ggcaatgcttgatcctttagaggtt

SEQ ID NO: 190465 - DNA, 25 bp, Saccharomyces pastorianus
agaccgtatttcatcgtacactgca

SEQ ID NO: 190466 - DNA, 25 bp, Saccharomyces pastorianus
ggatcactatcgaatctcaaatgag

SEQ ID NO: 190467 - DNA, 25 bp, Saccharomyces pastorianus
accatttatggccttcattcactga

SEQ ID NO: 190468 - DNA, 25 bp, Saccharomyces pastorianus
ttatcgtcacaagaaaggcaatgct

SEQ ID NO: 190469 - DNA, 25 bp, Saccharomyces pastorianus
tagcaatcaggccaacagagctgcg

SEQ ID NO: 190470 - DNA, 25 bp, Saccharomyces pastorianus
agagtcattgtccattttttgtaga

SEQ ID NO: 190471 - DNA, 25 bp, Saccharomyces pastorianus
atttcatggacgtcaaacagcgtga

SEQ ID NO: 190472 - DNA, 25 bp, Saccharomyces pastorianus
gacaagcttttcatatctattcaat

SEQ ID NO: 190473 - DNA, 25 bp, Saccharomyces pastorianus
tgatggaggaaaaaccccgcaaccg

SEQ ID NO: 190474 - DNA, 25 bp, Saccharomyces pastorianus
caaccgcctaacctatgtatctatg

SEQ ID NO: 190475 - DNA, 25 bp, Saccharomyces pastorianus
caactactactgttgcttgcaagag

SEQ ID NO: 190476 - DNA, 25 bp, Saccharomyces pastorianus
acattcagcagcgaaatctctcgta

SEQ ID NO: 190477 - DNA, 25 bp, Saccharomyces pastorianus
gttgatctctttaaaccagacgacg

SEQ ID NO: 190478 - DNA, 25 bp, Saccharomyces pastorianus
gaagaaccttcttattattcaacat

SEQ ID NO: 190479 - DNA, 25 bp, Saccharomyces pastorianus
tctgaggaaccatcgacaagctttt

SEQ ID NO: 190480 - DNA, 25 bp, Saccharomyces pastorianus
ataaccgcagcaataatttcatgga

SEQ ID NO: 190481 - DNA, 25 bp, Saccharomyces pastorianus
agttgctttaacctcagggccagta

SEQ ID NO: 190482 - DNA, 25 bp, Saccharomyces pastorianus
acctcagggccagtagcaactgaag

SEQ ID NO: 190483 - DNA, 25 bp, Saccharomyces pastorianus
ttgctttaacctcagggccagtagc

SEQ ID NO: 190484 - DNA, 25 bp, Saccharomyces pastorianus
gttgctttaacctcagggccagtag

SEQ ID NO: 190485 - DNA, 25 bp, Saccharomyces pastorianus
agagttgctttaacctcagggccag

SEQ ID NO: 190486 - DNA, 25 bp, Saccharomyces pastorianus
gagttgctttaacctcagggccagt

SEQ ID NO: 190487 - DNA, 25 bp, Saccharomyces pastorianus
gccagtagcaactgaagcgaagagc

SEQ ID NO: 190488 - DNA, 25 bp, Saccharomyces pastorianus
tcagggccagtagcaactgaagcga

SEQ ID NO: 190489 - DNA, 25 bp, Saccharomyces pastorianus
gggccagtagcaactgaagcgaaga

SEQ ID NO: 190490 - DNA, 25 bp, Saccharomyces pastorianus
taacctcagggccagtagcaactga

SEQ ID NO: 190491 - DNA, 25 bp, Saccharomyces pastorianus
gctttaacctcagggccagtagcaa

SEQ ID NO: 190492 - DNA, 25 bp, Saccharomyces pastorianus
gaaggctaggctttggctggcaata

SEQ ID NO: 190493 - DNA, 25 bp, Saccharomyces pastorianus
tatttccgtcgagcactaactttgg

SEQ ID NO: 190494 - DNA, 25 bp, Saccharomyces pastorianus
gatatatgccctcgagacttcaaag

SEQ ID NO: 190495 - DNA, 25 bp, Saccharomyces pastorianus
ggacatgcatttatattctctttac

SEQ ID NO: 190496 - DNA, 25 bp, Saccharomyces pastorianus
aggcttatgctctcctggacatgca

SEQ ID NO: 190497 - DNA, 25 bp, Saccharomyces pastorianus
aaacgcatggactttgatgggtcac

SEQ ID NO: 190498 - DNA, 25 bp, Saccharomyces pastorianus
catggtttggtttgggccaggctta

SEQ ID NO: 190499 - DNA, 25 bp, Saccharomyces pastorianus
tattaccggttagcgcaactatatg

SEQ ID NO: 190500 - DNA, 25 bp, Saccharomyces pastorianus
tactacttccagaaagcttgcactt

SEQ ID NO: 190501 - DNA, 25 bp, Saccharomyces pastorianus
gcttgcactttgaaaccttgggatc

SEQ ID NO: 190502 - DNA, 25 bp, Saccharomyces pastorianus
aatagaatgctatcgtcgggctgta

SEQ ID NO: 190503 - DNA, 25 bp, Saccharomyces pastorianus
tgctactgcttctgcaaccaccact

SEQ ID NO: 190504 - DNA, 25 bp, Saccharomyces pastorianus
actgcttctgcaaccaccactctag

SEQ ID NO: 190505 - DNA, 25 bp, Saccharomyces pastorianus
tgcttctgcaaccaccactctagct

SEQ ID NO: 190506 - DNA, 25 bp, Saccharomyces pastorianus
atcgctgctactgcttctgcaacca

SEQ ID NO: 190507 - DNA, 25 bp, Saccharomyces pastorianus
aatcgctgctggtgtcgctgccatc

SEQ ID NO: 190508 - DNA, 25 bp, Saccharomyces pastorianus
cgctgccatcgctgctactgcttct

SEQ ID NO: 190509 - DNA, 25 bp, Saccharomyces pastorianus
gctgctactgcttctgcaaccacca

SEQ ID NO: 190510 - DNA, 25 bp, Saccharomyces pastorianus
tgccatcgctgctactgcttctgca

SEQ ID NO: 190511 - DNA, 25 bp, Saccharomyces pastorianus
gccatcgctgctactgcttctgcaa

SEQ ID NO: 190512 - DNA, 25 bp, Saccharomyces pastorianus
ttctgcaaccaccactctagctcaa

SEQ ID NO: 190513 - DNA, 25 bp, Saccharomyces pastorianus
tactgcttctgcaaccaccactcta

SEQ ID NO: 190514 - DNA, 25 bp, Saccharomyces pastorianus
aagctagctgatgttggtttctcaa

SEQ ID NO: 190515 - DNA, 25 bp, Saccharomyces pastorianus
tagcaaggtcttcgcctgaggataa

SEQ ID NO: 190516 - DNA, 25 bp, Saccharomyces pastorianus
taagggtcttagcaaggtcttcgcc

SEQ ID NO: 190517 - DNA, 25 bp, Saccharomyces pastorianus
ggtcactggcgatggtacgaacgat

SEQ ID NO: 190518 - DNA, 25 bp, Saccharomyces pastorianus
tttccggtacggaggttgccagaga

SEQ ID NO: 190519 - DNA, 25 bp, Saccharomyces pastorianus
gaatcctgccaaatttaagggtctt

SEQ ID NO: 190520 - DNA, 25 bp, Saccharomyces pastorianus
gatgatttctcagctattgtcaacg

SEQ ID NO: 190521 - DNA, 25 bp, Saccharomyces pastorianus
gaacgatgctccagctttaaagcta

SEQ ID NO: 190522 - DNA, 25 bp, Saccharomyces pastorianus
ctattgtcaacgctattaagtggga

SEQ ID NO: 190523 - DNA, 25 bp, Saccharomyces pastorianus
gagaggcttctgacattattttgat

SEQ ID NO: 190524 - DNA, 25 bp, Saccharomyces pastorianus
tggtttctcaatgggtatttccggt

SEQ ID NO: 190525 - DNA, 25 bp, Saccharomyces pastorianus
aacagttccacaagttcttcctcaa

SEQ ID NO: 190526 - DNA, 25 bp, Saccharomyces pastorianus
tccactggcgtatcttcactaacaa

SEQ ID NO: 190527 - DNA, 25 bp, Saccharomyces pastorianus
agagacgttagccaccatctgggac

SEQ ID NO: 190528 - DNA, 25 bp, Saccharomyces pastorianus
aattgccggatgttatccccaatga

SEQ ID NO: 190529 - DNA, 25 bp, Saccharomyces pastorianus
taagctctgctgtgttggttccatt

SEQ ID NO: 190530 - DNA, 25 bp, Saccharomyces pastorianus
atatcacgtctatctactggtgcat

SEQ ID NO: 190531 - DNA, 25 bp, Saccharomyces pastorianus
aacaggactactcctttgagtgcta

SEQ ID NO: 190532 - DNA, 25 bp, Saccharomyces pastorianus
aggatatgccacaccaagtttctgc

SEQ ID NO: 190533 - DNA, 25 bp, Saccharomyces pastorianus
agaatgctggtgtcgaattgccgga

SEQ ID NO: 190534 - DNA, 25 bp, Saccharomyces pastorianus
gaatttgctattgccatgttcctaa

SEQ ID NO: 190535 - DNA, 25 bp, Saccharomyces pastorianus
aacatgctggttcgctaagctctgc

SEQ ID NO: 190536 - DNA, 25 bp, Saccharomyces pastorianus
attccacaccatggcccattctcac

SEQ ID NO: 190537 - DNA, 25 bp, Saccharomyces pastorianus
ttcatattccacaccatggcccatt

SEQ ID NO: 190538 - DNA, 25 bp, Saccharomyces pastorianus
gttaccctactttcatattccacac

SEQ ID NO: 190539 - DNA, 25 bp, Saccharomyces pastorianus
tcatattccacaccatggcccattc

SEQ ID NO: 190540 - DNA, 25 bp, Saccharomyces pastorianus
catattccacaccatggcccattct

SEQ ID NO: 190541 - DNA, 25 bp, Saccharomyces pastorianus
acaccatggcccattctcactaaat

SEQ ID NO: 190542 - DNA, 25 bp, Saccharomyces pastorianus
tattccacaccatggcccattctca

SEQ ID NO: 190543 - DNA, 25 bp, Saccharomyces pastorianus
cactctcaagttaccctactttcat

SEQ ID NO: 190544 - DNA, 25 bp, Saccharomyces pastorianus
agttaccctactttcatattccaca

SEQ ID NO: 190545 - DNA, 25 bp, Saccharomyces pastorianus
tccacaccatggcccattctcacta

SEQ ID NO: 190546 - DNA, 25 bp, Saccharomyces pastorianus
atattccacaccatggcccattctc

SEQ ID NO: 190547 - DNA, 25 bp, Saccharomyces pastorianus
gtgctatcgtttgaatctccaccct

SEQ ID NO: 190548 - DNA, 25 bp, Saccharomyces pastorianus
gattatcgtgttcaaaactgttgtt

SEQ ID NO: 190549 - DNA, 25 bp, Saccharomyces pastorianus
gcatttccagaatcagagtcggtat

SEQ ID NO: 190550 - DNA, 25 bp, Saccharomyces pastorianus
gtctttttcaagattatcgtgttca

SEQ ID NO: 190551 - DNA, 25 bp, Saccharomyces pastorianus
ttactatcgtcttcatcttgctgtt

SEQ ID NO: 190552 - DNA, 25 bp, Saccharomyces pastorianus
gtgcaatgcttttcgatgtcttttt

SEQ ID NO: 190553 - DNA, 25 bp, Saccharomyces pastorianus
aacccattgacctcgttactatcgt

SEQ ID NO: 190554 - DNA, 25 bp, Saccharomyces pastorianus
aaactgttgtttttcgtgctatcgt

SEQ ID NO: 190555 - DNA, 25 bp, Saccharomyces pastorianus
gtatcggatgatatggtgcaatgct

SEQ ID NO: 190556 - DNA, 25 bp, Saccharomyces pastorianus
accattatcctcatttccactggtt

SEQ ID NO: 190557 - DNA, 25 bp, Saccharomyces pastorianus
gtcatttttggctttagcatttcca

SEQ ID NO: 190558 - DNA, 25 bp, Saccharomyces pastorianus
aacggcgtaacaaggatggctaact

SEQ ID NO: 190559 - DNA, 25 bp, Saccharomyces pastorianus
atttgcaggcagtagttcccacaat

SEQ ID NO: 190560 - DNA, 25 bp, Saccharomyces pastorianus
gttcccacaatggagtactcacggc

SEQ ID NO: 190561 - DNA, 25 bp, Saccharomyces pastorianus
gacgtgcttccggaatttgcaggca

SEQ ID NO: 190562 - DNA, 25 bp, Saccharomyces pastorianus
ttaagccaggaaagcgtctcaacga

SEQ ID NO: 190563 - DNA, 25 bp, Saccharomyces pastorianus
gaaattgcaatcctctaatgaagct

SEQ ID NO: 190564 - DNA, 25 bp, Saccharomyces pastorianus
atcaagtctctcaagcaaattacag

SEQ ID NO: 190565 - DNA, 25 bp, Saccharomyces pastorianus
gaactttactttggaactaagcgag

SEQ ID NO: 190566 - DNA, 25 bp, Saccharomyces pastorianus
caaagcggttttcgatttcgagtat

SEQ ID NO: 190567 - DNA, 25 bp, Saccharomyces pastorianus
gaaagcgtctcaacgaacggcgtaa

SEQ ID NO: 190568 - DNA, 25 bp, Saccharomyces pastorianus
tactcacggcgaattcatcaaagga

SEQ ID NO: 190569 - DNA, 25 bp, Saccharomyces pastorianus
actgctgcaatactttctgcggctg

SEQ ID NO: 190570 - DNA, 25 bp, Saccharomyces pastorianus
cgtgtcgctgtcctcatcactgctg

SEQ ID NO: 190571 - DNA, 25 bp, Saccharomyces pastorianus
gtcgctgtcctcatcactgctgcaa

SEQ ID NO: 190572 - DNA, 25 bp, Saccharomyces pastorianus
acgtgtcgctgtcctcatcactgct

SEQ ID NO: 190573 - DNA, 25 bp, Saccharomyces pastorianus
atgcacgtgtcgctgtcctcatcac

SEQ ID NO: 190574 - DNA, 25 bp, Saccharomyces pastorianus
tgcacgtgtcgctgtcctcatcact

SEQ ID NO: 190575 - DNA, 25 bp, Saccharomyces pastorianus
atgaatgcacgtgtcgctgtcctca

SEQ ID NO: 190576 - DNA, 25 bp, Saccharomyces pastorianus
ctgctgcaatactttctgcggctgt

SEQ ID NO: 190577 - DNA, 25 bp, Saccharomyces pastorianus
tgctgcaatactttctgcggctgtc

SEQ ID NO: 190578 - DNA, 25 bp, Saccharomyces pastorianus
tgaatgcacgtgtcgctgtcctcat

SEQ ID NO: 190579 - DNA, 25 bp, Saccharomyces pastorianus
gaatgcacgtgtcgctgtcctcatc

SEQ ID NO: 190580 - DNA, 25 bp, Saccharomyces pastorianus
ctccttccgttcattatgtttcatt

SEQ ID NO: 190581 - DNA, 25 bp, Saccharomyces pastorianus
atggaaatcctcaaaaaggaatcgg

SEQ ID NO: 190582 - DNA, 25 bp, Saccharomyces pastorianus
tggaaatcctcaaaaaggaatcggt

SEQ ID NO: 190583 - DNA, 25 bp, Saccharomyces pastorianus
gttcttctcgaggatatggaaatcc

SEQ ID NO: 190584 - DNA, 25 bp, Saccharomyces pastorianus
ttactacaagttcttctcgaggata

SEQ ID NO: 190585 - DNA, 25 bp, Saccharomyces pastorianus
ttccgttcattatgtttcattatcc

SEQ ID NO: 190586 - DNA, 25 bp, Saccharomyces pastorianus
tttctccttccgttcattatgtttc

SEQ ID NO: 190587 - DNA, 25 bp, Saccharomyces pastorianus
tcgaggatatggaaatcctcaaaaa

SEQ ID NO: 190588 - DNA, 25 bp, Saccharomyces pastorianus
ggatatggaaatcctcaaaaaggaa

SEQ ID NO: 190589 - DNA, 25 bp, Saccharomyces pastorianus
aggatatggaaatcctcaaaaagga

SEQ ID NO: 190590 - DNA, 25 bp, Saccharomyces pastorianus
tctccttccgttcattatgtttcat

SEQ ID NO: 190591 - DNA, 25 bp, Saccharomyces pastorianus
acctcagattacgtgttttattttg

SEQ ID NO: 190592 - DNA, 25 bp, Saccharomyces pastorianus
ttgacggactcacctcagattacgt

SEQ ID NO: 190593 - DNA, 25 bp, Saccharomyces pastorianus
gtgttttattttgtcactgtgctaa

SEQ ID NO: 190594 - DNA, 25 bp, Saccharomyces pastorianus
cacctcagattacgtgttttatttt

SEQ ID NO: 190595 - DNA, 25 bp, Saccharomyces pastorianus
ctcagattacgtgttttattttgtc

SEQ ID NO: 190596 - DNA, 25 bp, Saccharomyces pastorianus
gattacgtgttttattttgtcactg

SEQ ID NO: 190597 - DNA, 25 bp, Saccharomyces pastorianus
cctcagattacgtgttttattttgt

SEQ ID NO: 190598 - DNA, 25 bp, Saccharomyces pastorianus
cagttatgacgcttttaatcatgat

SEQ ID NO: 190599 - DNA, 25 bp, Saccharomyces pastorianus
cttgacggactcacctcagattacg

SEQ ID NO: 190600 - DNA, 25 bp, Saccharomyces pastorianus
attttgtcactgtgctaaggcaaat

SEQ ID NO: 190601 - DNA, 25 bp, Saccharomyces pastorianus
aagtcgctgttgcaattgacgagct

SEQ ID NO: 190602 - DNA, 25 bp, Saccharomyces pastorianus
ctcaatttatatacacttatgccaa

SEQ ID NO: 190603 - DNA, 25 bp, Saccharomyces pastorianus
ttatgccaatataaccaaaaaatta

SEQ ID NO: 190604 - DNA, 25 bp, Saccharomyces pastorianus
taccacttttacaccatatactaac

SEQ ID NO: 190605 - DNA, 25 bp, Saccharomyces pastorianus
acttttacaccatatactaaccact

SEQ ID NO: 190606 - DNA, 25 bp, Saccharomyces pastorianus
cttatgccaatataaccaaaaaatt

SEQ ID NO: 190607 - DNA, 25 bp, Saccharomyces pastorianus
atacgttataccacttttacaccat

SEQ ID NO: 190608 - DNA, 25 bp, Saccharomyces pastorianus
ataccacttttacaccatatactaa

SEQ ID NO: 190609 - DNA, 25 bp, Saccharomyces pastorianus
attaccactaaaatcacctaaacat

SEQ ID NO: 190610 - DNA, 25 bp, Saccharomyces pastorianus
tgccaatataaccaaaaaattacca

SEQ ID NO: 190611 - DNA, 25 bp, Saccharomyces pastorianus
tatgccaatataaccaaaaaattac

SEQ ID NO: 190612 - DNA, 25 bp, Saccharomyces pastorianus
acgttataccacttttacaccatat

SEQ ID NO: 190613 - DNA, 25 bp, Saccharomyces pastorianus
gaacatattcgcagaaactccatca

SEQ ID NO: 190614 - DNA, 25 bp, Saccharomyces pastorianus
ggcgtagacacatcatttctcaaat

SEQ ID NO: 190615 - DNA, 25 bp, Saccharomyces pastorianus
attgtgggcgagtatgctacccttc

SEQ ID NO: 190616 - DNA, 25 bp, Saccharomyces pastorianus
aacaatacacgattcaccctatcat

SEQ ID NO: 190617 - DNA, 25 bp, Saccharomyces pastorianus
attgtttactttgatcgactttgaa

SEQ ID NO: 190618 - DNA, 25 bp, Saccharomyces pastorianus
tcttccgctgttttatcaggattcg

SEQ ID NO: 190619 - DNA, 25 bp, Saccharomyces pastorianus
gggctatagcaccatcttcgtctat

SEQ ID NO: 190620 - DNA, 25 bp, Saccharomyces pastorianus
atatgacctcgctaactgtgcacgt

SEQ ID NO: 190621 - DNA, 25 bp, Saccharomyces pastorianus
tcccactttgcctgatactatagat

SEQ ID NO: 190622 - DNA, 25 bp, Saccharomyces pastorianus
tgctacccttctggagaccacaaat

SEQ ID NO: 190623 - DNA, 25 bp, Saccharomyces pastorianus
gaataggccttaaagatccggtgat

SEQ ID NO: 190624 - DNA, 25 bp, Saccharomyces pastorianus
gtacacttgattttctatttaggaa

SEQ ID NO: 190625 - DNA, 25 bp, Saccharomyces pastorianus
atttaggaatctctgtttgcataag

SEQ ID NO: 190626 - DNA, 25 bp, Saccharomyces pastorianus
tctgtttgcataagagctgctctta

SEQ ID NO: 190627 - DNA, 25 bp, Saccharomyces pastorianus
agagctgctcttatgtttggggaca

SEQ ID NO: 190628 - DNA, 25 bp, Saccharomyces pastorianus
gatttatgatacatgtacacttgat

SEQ ID NO: 190629 - DNA, 25 bp, Saccharomyces pastorianus
taggaatctctgtttgcataagagc

SEQ ID NO: 190630 - DNA, 25 bp, Saccharomyces pastorianus
catgtacacttgattttctatttag

SEQ ID NO: 190631 - DNA, 25 bp, Saccharomyces pastorianus
tctctgtttgcataagagctgctct

SEQ ID NO: 190632 - DNA, 25 bp, Saccharomyces pastorianus
gaatctctgtttgcataagagctgc

SEQ ID NO: 190633 - DNA, 25 bp, Saccharomyces pastorianus
tctatttaggaatctctgtttgcat

SEQ ID NO: 190634 - DNA, 25 bp, Saccharomyces pastorianus
tttctatttaggaatctctgtttgc

SEQ ID NO: 190635 - DNA, 25 bp, Saccharomyces pastorianus
gcccatcggtctattttggcaagca

SEQ ID NO: 190636 - DNA, 25 bp, Saccharomyces pastorianus
gtgggtgctttcttctatctatata

SEQ ID NO: 190637 - DNA, 25 bp, Saccharomyces pastorianus
gaagcatatgctgtcatctaccgtg

SEQ ID NO: 190638 - DNA, 25 bp, Saccharomyces pastorianus
gtatctgggttaccattcatcggca

SEQ ID NO: 190639 - DNA, 25 bp, Saccharomyces pastorianus
gtatttctctacatgttatccaccc

SEQ ID NO: 190640 - DNA, 25 bp, Saccharomyces pastorianus
tggttctgtagcattgcccatcggt

SEQ ID NO: 190641 - DNA, 25 bp, Saccharomyces pastorianus
attcatcggcattggtgtcggttta

SEQ ID NO: 190642 - DNA, 25 bp, Saccharomyces pastorianus
tatgtcatgagtagtgtcttcccac

SEQ ID NO: 190643 - DNA, 25 bp, Saccharomyces pastorianus
tacgtcgctttcatttttgccattt

SEQ ID NO: 190644 - DNA, 25 bp, Saccharomyces pastorianus
tggacggccagaccagatgttcact

SEQ ID NO: 190645 - DNA, 25 bp, Saccharomyces pastorianus
ttgcttcctgtttggccgctaacaa

SEQ ID NO: 190646 - DNA, 25 bp, Saccharomyces pastorianus
tcttctcgactagattattccttta

SEQ ID NO: 190647 - DNA, 25 bp, Saccharomyces pastorianus
cataagttcttgctgggatggagat

SEQ ID NO: 190648 - DNA, 25 bp, Saccharomyces pastorianus
aaccccaatctagttctctacataa

SEQ ID NO: 190649 - DNA, 25 bp, Saccharomyces pastorianus
ggacgtcttcattgagggtgttgat

SEQ ID NO: 190650 - DNA, 25 bp, Saccharomyces pastorianus
gagagtctacaaatcaaattcgaat

SEQ ID NO: 190651 - DNA, 25 bp, Saccharomyces pastorianus
gaatctaattttgtcatcgcatcat

SEQ ID NO: 190652 - DNA, 25 bp, Saccharomyces pastorianus
agaatttcaacacttcaaccccaat

SEQ ID NO: 190653 - DNA, 25 bp, Saccharomyces pastorianus
ttattcctttatagtctttgacata

SEQ ID NO: 190654 - DNA, 25 bp, Saccharomyces pastorianus
tctcagtttgatagtaacgccaaaa

SEQ ID NO: 190655 - DNA, 25 bp, Saccharomyces pastorianus
aataaacttatatcttctcgactag

SEQ ID NO: 190656 - DNA, 25 bp, Saccharomyces pastorianus
gacatattttatttggccgtatact

SEQ ID NO: 190657 - DNA, 25 bp, Saccharomyces pastorianus
aacgccacttcaaacgccaatacgg

SEQ ID NO: 190658 - DNA, 25 bp, Saccharomyces pastorianus
agccgccatgtttgcagctttacaa

SEQ ID NO: 190659 - DNA, 25 bp, Saccharomyces pastorianus
ggtattctacgaaagagccgccatg

SEQ ID NO: 190660 - DNA, 25 bp, Saccharomyces pastorianus
gccaataacaacaacgccacttcaa

SEQ ID NO: 190661 - DNA, 25 bp, Saccharomyces pastorianus
agcaacgttctcaagctttgcaaca

SEQ ID NO: 190662 - DNA, 25 bp, Saccharomyces pastorianus
gctgctgccgccaataacaacaacg

SEQ ID NO: 190663 - DNA, 25 bp, Saccharomyces pastorianus
acttcaaacgccaatacggtattct

SEQ ID NO: 190664 - DNA, 25 bp, Saccharomyces pastorianus
aaaagcaacagcaacgttctcaagc

SEQ ID NO: 190665 - DNA, 25 bp, Saccharomyces pastorianus
gccatgtttgcagctttacaacaaa

SEQ ID NO: 190666 - DNA, 25 bp, Saccharomyces pastorianus
aacaacaatgctgctgccgccaata

SEQ ID NO: 190667 - DNA, 25 bp, Saccharomyces pastorianus
gaaagagccgccatgtttgcagctt

SEQ ID NO: 190668 - DNA, 25 bp, Saccharomyces pastorianus
cgaacacctatgaagaacacatctt

SEQ ID NO: 190669 - DNA, 25 bp, Saccharomyces pastorianus
gacgatctggtactacgaacaccta

SEQ ID NO: 190670 - DNA, 25 bp, Saccharomyces pastorianus
agaacacatcttacaacccgtactt

SEQ ID NO: 190671 - DNA, 25 bp, Saccharomyces pastorianus
gcgctctaagcatgaaaatggtgaa

SEQ ID NO: 190672 - DNA, 25 bp, Saccharomyces pastorianus
tacaacccgtacttgttagtacaag

SEQ ID NO: 190673 - DNA, 25 bp, Saccharomyces pastorianus
tgaatgacggtatctctgttagacg

SEQ ID NO: 190674 - DNA, 25 bp, Saccharomyces pastorianus
gtgcaattaccttagcgtctgaatg

SEQ ID NO: 190675 - DNA, 25 bp, Saccharomyces pastorianus
tctctgttagacgatctggtactac

SEQ ID NO: 190676 - DNA, 25 bp, Saccharomyces pastorianus
gtacaagtgcaattaccttagcgtc

SEQ ID NO: 190677 - DNA, 25 bp, Saccharomyces pastorianus
tggtgaattgaatgacggtatctct

SEQ ID NO: 190678 - DNA, 25 bp, Saccharomyces pastorianus
agcgtctgaatgtgttaaatccatc

SEQ ID NO: 190679 - DNA, 25 bp, Saccharomyces pastorianus
gtagccccattgaccgacagatata

SEQ ID NO: 190680 - DNA, 25 bp, Saccharomyces pastorianus
tcaaaagatcgtagccccattgacc

SEQ ID NO: 190681 - DNA, 25 bp, Saccharomyces pastorianus
atgaaattagagcttccgtcaatga

SEQ ID NO: 190682 - DNA, 25 bp, Saccharomyces pastorianus
ccccattgaccgacagatatatcct

SEQ ID NO: 190683 - DNA, 25 bp, Saccharomyces pastorianus
agatcgtagccccattgaccgacag

SEQ ID NO: 190684 - DNA, 25 bp, Saccharomyces pastorianus
atatcctaagagatgttagcaagac

SEQ ID NO: 190685 - DNA, 25 bp, Saccharomyces pastorianus
gaccgacagatatatcctaagagat

SEQ ID NO: 190686 - DNA, 25 bp, Saccharomyces pastorianus
tctatcaaaagatcgtagccccatt

SEQ ID NO: 190687 - DNA, 25 bp, Saccharomyces pastorianus
tagccccattgaccgacagatatat

SEQ ID NO: 190688 - DNA, 25 bp, Saccharomyces pastorianus
attgaccgacagatatatcctaaga

SEQ ID NO: 190689 - DNA, 25 bp, Saccharomyces pastorianus
aggatgaaattagagcttccgtcaa

SEQ ID NO: 190690 - DNA, 25 bp, Saccharomyces pastorianus
aaaacaccggacattaacgattgca

SEQ ID NO: 190691 - DNA, 25 bp, Saccharomyces pastorianus
caccggacattaacgattgcagcac

SEQ ID NO: 190692 - DNA, 25 bp, Saccharomyces pastorianus
atggtcacccattacattactcggc

SEQ ID NO: 190693 - DNA, 25 bp, Saccharomyces pastorianus
tcacccattacattactcggccagg

SEQ ID NO: 190694 - DNA, 25 bp, Saccharomyces pastorianus
ggacattaacgattgcagcacctga

SEQ ID NO: 190695 - DNA, 25 bp, Saccharomyces pastorianus
ttacattactcggccaggctcttac

SEQ ID NO: 190696 - DNA, 25 bp, Saccharomyces pastorianus
cattacattactcggccaggctctt

SEQ ID NO: 190697 - DNA, 25 bp, Saccharomyces pastorianus
ggtcacccattacattactcggcca

SEQ ID NO: 190698 - DNA, 25 bp, Saccharomyces pastorianus
aacaccggacattaacgattgcagc

SEQ ID NO: 190699 - DNA, 25 bp, Saccharomyces pastorianus
acccattacattactcggccaggct

SEQ ID NO: 190700 - DNA, 25 bp, Saccharomyces pastorianus
accggacattaacgattgcagcacc

SEQ ID NO: 190701 - DNA, 25 bp, Saccharomyces pastorianus
tacgttactagtatattatcatata

SEQ ID NO: 190702 - DNA, 25 bp, Saccharomyces pastorianus
ttacgttactagtatattatcatat

SEQ ID NO: 190703 - DNA, 25 bp, Saccharomyces pastorianus
tagtatttacgttactagtatatta

SEQ ID NO: 190704 - DNA, 25 bp, Saccharomyces pastorianus
atttacgttactagtatattatcat

SEQ ID NO: 190705 - DNA, 25 bp, Saccharomyces pastorianus
cgttactagtatattatcatatacg

SEQ ID NO: 190706 - DNA, 25 bp, Saccharomyces pastorianus
tatttacgttactagtatattatca

SEQ ID NO: 190707 - DNA, 25 bp, Saccharomyces pastorianus
tttacgttactagtatattatcata

SEQ ID NO: 190708 - DNA, 25 bp, Saccharomyces pastorianus
acgttactagtatattatcatatac

SEQ ID NO: 190709 - DNA, 25 bp, Saccharomyces pastorianus
agtatttacgttactagtatattat

SEQ ID NO: 190710 - DNA, 25 bp, Saccharomyces pastorianus
ctatcatctactaactagtatttac

SEQ ID NO: 190711 - DNA, 25 bp, Saccharomyces pastorianus
gtatttacgttactagtatattatc

SEQ ID NO: 190712 - DNA, 25 bp, Saccharomyces pastorianus
gaggattttagcattttacaaccca

SEQ ID NO: 190713 - DNA, 25 bp, Saccharomyces pastorianus
gtttcacagcctggtacctgtacaa

SEQ ID NO: 190714 - DNA, 25 bp, Saccharomyces pastorianus
gattatctcgctgtaagtgcaccac

SEQ ID NO: 190715 - DNA, 25 bp, Saccharomyces pastorianus
ttatcaaccttgacgggtaccctat

SEQ ID NO: 190716 - DNA, 25 bp, Saccharomyces pastorianus
aattgcaacatttatcccaggatct

SEQ ID NO: 190717 - DNA, 25 bp, Saccharomyces pastorianus
gtcaagcccaagttatggtgccaac

SEQ ID NO: 190718 - DNA, 25 bp, Saccharomyces pastorianus
tataccatttcagcatttcggcgca

SEQ ID NO: 190719 - DNA, 25 bp, Saccharomyces pastorianus
ttcctgatttggtggtgtcaagccc

SEQ ID NO: 190720 - DNA, 25 bp, Saccharomyces pastorianus
gtgatgttgactacctactcgtttc

SEQ ID NO: 190721 - DNA, 25 bp, Saccharomyces pastorianus
gcatttcggcgcaacaattcagata

SEQ ID NO: 190722 - DNA, 25 bp, Saccharomyces pastorianus
gagaccaccgaagaagcacatcagt

SEQ ID NO: 190723 - DNA, 25 bp, Saccharomyces pastorianus
aaggccgctgcgtatatttctgcta

SEQ ID NO: 190724 - DNA, 25 bp, Saccharomyces pastorianus
tacaacaaatttcgagcctccgaga

SEQ ID NO: 190725 - DNA, 25 bp, Saccharomyces pastorianus
gaagatggacctcgttttttagcct

SEQ ID NO: 190726 - DNA, 25 bp, Saccharomyces pastorianus
tttaattgtcactaatgccgctggt

SEQ ID NO: 190727 - DNA, 25 bp, Saccharomyces pastorianus
tgttcggatctatgaatggttcacc

SEQ ID NO: 190728 - DNA, 25 bp, Saccharomyces pastorianus
aggccactgcatgaaggtacttata

SEQ ID NO: 190729 - DNA, 25 bp, Saccharomyces pastorianus
atttaaatatccctggccttgctgg

SEQ ID NO: 190730 - DNA, 25 bp, Saccharomyces pastorianus
gagtgcttaaccacatgggtcatgt

SEQ ID NO: 190731 - DNA, 25 bp, Saccharomyces pastorianus
gagcctccgagaactttgattatat

SEQ ID NO: 190732 - DNA, 25 bp, Saccharomyces pastorianus
ggtggaatatctaccaagctgtcta

SEQ ID NO: 190733 - DNA, 25 bp, Saccharomyces pastorianus
gtaacagtcccataccaagacatcc

SEQ ID NO: 190734 - DNA, 25 bp, Saccharomyces pastorianus
aaggcagttgccgatgtcattcgaa

SEQ ID NO: 190735 - DNA, 25 bp, Saccharomyces pastorianus
gatggccacgctattttaagggaaa

SEQ ID NO: 190736 - DNA, 25 bp, Saccharomyces pastorianus
gagattttagctcagtgtgcacctt

SEQ ID NO: 190737 - DNA, 25 bp, Saccharomyces pastorianus
aacagttattattctagctggtgag

SEQ ID NO: 190738 - DNA, 25 bp, Saccharomyces pastorianus
ttgactaacgatggccacgctattt

SEQ ID NO: 190739 - DNA, 25 bp, Saccharomyces pastorianus
gtcattcgaacttgcttaggtccaa

SEQ ID NO: 190740 - DNA, 25 bp, Saccharomyces pastorianus
tttagctcagtgtgcaccttatttg

SEQ ID NO: 190741 - DNA, 25 bp, Saccharomyces pastorianus
aaatctccaatatcactgctgcaaa

SEQ ID NO: 190742 - DNA, 25 bp, Saccharomyces pastorianus
tattggatcctatgggcggtcttgt

SEQ ID NO: 190743 - DNA, 25 bp, Saccharomyces pastorianus
tggtgacgggactacaacagttatt

SEQ ID NO: 190744 - DNA, 25 bp, Saccharomyces pastorianus
atcactgctgcaaaggcagttgccg

SEQ ID NO: 190745 - DNA, 25 bp, Saccharomyces pastorianus
caccttaatacgcttttttcaatgt

SEQ ID NO: 190746 - DNA, 25 bp, Saccharomyces pastorianus
ggtttgcaagatatcctggactttt

SEQ ID NO: 190747 - DNA, 25 bp, Saccharomyces pastorianus
aacaaaaccgcatcacctttggcag

SEQ ID NO: 190748 - DNA, 25 bp, Saccharomyces pastorianus
atttacgtgaaactccatcctcttg

SEQ ID NO: 190749 - DNA, 25 bp, Saccharomyces pastorianus
gcaacatggtagaggctgcccaaaa

SEQ ID NO: 190750 - DNA, 25 bp, Saccharomyces pastorianus
aatcatacctttcatttttcatcgg

SEQ ID NO: 190751 - DNA, 25 bp, Saccharomyces pastorianus
tggttcgcacttgcaacatggtaga

SEQ ID NO: 190752 - DNA, 25 bp, Saccharomyces pastorianus
aactccatcctcttgtcaaactttg

SEQ ID NO: 190753 - DNA, 25 bp, Saccharomyces pastorianus
tacgcttttttcaatgtcgtttaca

SEQ ID NO: 190754 - DNA, 25 bp, Saccharomyces pastorianus
tagaggctgcccaaaaacaaaaccg

SEQ ID NO: 190755 - DNA, 25 bp, Saccharomyces pastorianus
gccacagtatggttcgcacttgcaa

SEQ ID NO: 190756 - DNA, 25 bp, Saccharomyces pastorianus
cagcgattgaagttaatttgaccat

SEQ ID NO: 190757 - DNA, 25 bp, Saccharomyces pastorianus
gctgatgtaatcttaacaagaaata

SEQ ID NO: 190758 - DNA, 25 bp, Saccharomyces pastorianus
gatgtaatcttaacaagaaatagtg

SEQ ID NO: 190759 - DNA, 25 bp, Saccharomyces pastorianus
tagtgctgatgtaatcttaacaaga

SEQ ID NO: 190760 - DNA, 25 bp, Saccharomyces pastorianus
tgctgatgtaatcttaacaagaaat

SEQ ID NO: 190761 - DNA, 25 bp, Saccharomyces pastorianus
ctgatgtaatcttaacaagaaatag

SEQ ID NO: 190762 - DNA, 25 bp, Saccharomyces pastorianus
ttagtgctgatgtaatcttaacaag

SEQ ID NO: 190763 - DNA, 25 bp, Saccharomyces pastorianus
ccagcagcgattgaagttaatttga

SEQ ID NO: 190764 - DNA, 25 bp, Saccharomyces pastorianus
agtgctgatgtaatcttaacaagaa

SEQ ID NO: 190765 - DNA, 25 bp, Saccharomyces pastorianus
gtgctgatgtaatcttaacaagaaa

SEQ ID NO: 190766 - DNA, 25 bp, Saccharomyces pastorianus
gttagtgctgatgtaatcttaacaa

SEQ ID NO: 190767 - DNA, 25 bp, Saccharomyces pastorianus
tacatttctatcttggtgggcgtca

SEQ ID NO: 190768 - DNA, 25 bp, Saccharomyces pastorianus
gtagcgttctcatcttataccaact

SEQ ID NO: 190769 - DNA, 25 bp, Saccharomyces pastorianus
tacaatttaggaattgccccggtcg

SEQ ID NO: 190770 - DNA, 25 bp, Saccharomyces pastorianus
ggtcagtatcatatgtagcgttctc

SEQ ID NO: 190771 - DNA, 25 bp, Saccharomyces pastorianus
taatctgggctgtggttgacctacc

SEQ ID NO: 190772 - DNA, 25 bp, Saccharomyces pastorianus
gctcaagtacgcacggttccaaaat

SEQ ID NO: 190773 - DNA, 25 bp, Saccharomyces pastorianus
gggtgtcttatgcttttgtacttta

SEQ ID NO: 190774 - DNA, 25 bp, Saccharomyces pastorianus
ctgaaatgtccttcacttttagtat

SEQ ID NO: 190775 - DNA, 25 bp, Saccharomyces pastorianus
taaagacgtctctcataacgacccc

SEQ ID NO: 190776 - DNA, 25 bp, Saccharomyces pastorianus
tactgtctcggtatttgtgctacat

SEQ ID NO: 190777 - DNA, 25 bp, Saccharomyces pastorianus
ggactagccttccaaaccattgttt

SEQ ID NO: 190778 - DNA, 25 bp, Saccharomyces pastorianus
tagtatttacgttactagtatatta

SEQ ID NO: 190779 - DNA, 25 bp, Saccharomyces pastorianus
actgttggaataaaaatcaactatc

SEQ ID NO: 190780 - DNA, 25 bp, Saccharomyces pastorianus
ctgttggaataaaaatcaactatca

SEQ ID NO: 190781 - DNA, 25 bp, Saccharomyces pastorianus
tgactgttggaataaaaatcaacta

SEQ ID NO: 190782 - DNA, 25 bp, Saccharomyces pastorianus
atgactgttggaataaaaatcaact

SEQ ID NO: 190783 - DNA, 25 bp, Saccharomyces pastorianus
tggaataaaaatcaactatcatcta

SEQ ID NO: 190784 - DNA, 25 bp, Saccharomyces pastorianus
tatttacgttactagtatattatca

SEQ ID NO: 190785 - DNA, 25 bp, Saccharomyces pastorianus
gactgttggaataaaaatcaactat

SEQ ID NO: 190786 - DNA, 25 bp, Saccharomyces pastorianus
agtatttacgttactagtatattat

SEQ ID NO: 190787 - DNA, 25 bp, Saccharomyces pastorianus
ctatcatctactaactagtatttac

SEQ ID NO: 190788 - DNA, 25 bp, Saccharomyces pastorianus
gtatttacgttactagtatattatc

SEQ ID NO: 190789 - DNA, 25 bp, Saccharomyces pastorianus
tgatcattaccgctggtaagagtac

SEQ ID NO: 190790 - DNA, 25 bp, Saccharomyces pastorianus
cattaccgctggtaagagtaccgtt

SEQ ID NO: 190791 - DNA, 25 bp, Saccharomyces pastorianus
taccgctggtaagagtaccgttaga

SEQ ID NO: 190792 - DNA, 25 bp, Saccharomyces pastorianus
ccgctggtaagagtaccgttagatt

SEQ ID NO: 190793 - DNA, 25 bp, Saccharomyces pastorianus
atcattaccgctggtaagagtaccg

SEQ ID NO: 190794 - DNA, 25 bp, Saccharomyces pastorianus
cgctggtaagagtaccgttagattt

SEQ ID NO: 190795 - DNA, 25 bp, Saccharomyces pastorianus
ttaccgctggtaagagtaccgttag

SEQ ID NO: 190796 - DNA, 25 bp, Saccharomyces pastorianus
tcattaccgctggtaagagtaccgt

SEQ ID NO: 190797 - DNA, 25 bp, Saccharomyces pastorianus
gagtaccgttagatttgttcccgca

SEQ ID NO: 190798 - DNA, 25 bp, Saccharomyces pastorianus
gatcattaccgctggtaagagtacc

SEQ ID NO: 190799 - DNA, 25 bp, Saccharomyces pastorianus
accgctggtaagagtaccgttagat

SEQ ID NO: 190800 - DNA, 25 bp, Saccharomyces pastorianus
actgccagcatcaactccagcacta

SEQ ID NO: 190801 - DNA, 25 bp, Saccharomyces pastorianus
aggactagtgggactaccactgcca

SEQ ID NO: 190802 - DNA, 25 bp, Saccharomyces pastorianus
gtgggactaccactgccagcatcaa

SEQ ID NO: 190803 - DNA, 25 bp, Saccharomyces pastorianus
catcaacgtcaggactaatgctact

SEQ ID NO: 190804 - DNA, 25 bp, Saccharomyces pastorianus
ctgccagcatcaacgtcaggactaa

SEQ ID NO: 190805 - DNA, 25 bp, Saccharomyces pastorianus
ctgccagcatcaactccagcactaa

SEQ ID NO: 190806 - DNA, 25 bp, Saccharomyces pastorianus
gccagcatcaacgtcaggactaatg

SEQ ID NO: 190807 - DNA, 25 bp, Saccharomyces pastorianus
tgccagcatcaacgtcaggactaat

SEQ ID NO: 190808 - DNA, 25 bp, Saccharomyces pastorianus
ggactagtgggactaccactgccag

SEQ ID NO: 190809 - DNA, 25 bp, Saccharomyces pastorianus
gactagtgggactaccactgccagc

SEQ ID NO: 190810 - DNA, 25 bp, Saccharomyces pastorianus
ccagcatcaacgtcaggactagtgg

SEQ ID NO: 190811 - DNA, 921 bp, Saccharomyces pastorianus
atgtccgacgaaattgtttggcaagtgattaatcaaagtttctgctctcatagaattaaggcacctaatggtcaaaatttttgcagaaatgagtataacgtcactgggttgtgtacaaggcaatcatgcccacttgccaactccaagtatgcaacagtgaagtgtgacaatgggaaactgtacttgtatatgaagacgcctgaaagagcgcacactcctgccaagttatgggaaagaatcaaactatccaaaaattacacgaaggctttacaacagatcgacgaacacctactacattggagcaagtttttccgtcataagtgtaaacagagatttacaaaattgacgcaggtcatgataacagagagacgtttagcattaagggaggaggagagacactacgttggtgtagcaccaaaggtcaaaagaagagaacaaaacagggagagaaaggcattggtagctgccaagattgaaaaagccatcgaaaaagaattgatggacagattaaagagtggtgcttacggtgataaaccattaaatgttgacgaaaaggtctggaagaagataatgggtcaaatggaagaggagaattctcaggacgaggaagaagactgggatgaagaagaggaaagtgatgatggggaagttgaatacgttgcagatgatggcgaaggtgaatacgttgacgtggatgacttagaaaagtggttagctgactctgacagagaagcttccagcgccagtcaaagcgaaagcgacagtgaaagcgagagcgacagcgatagtgatgaagaaaataagaattcagccaagagacgtaagaagggaactagtgccaaaactaaacgtcctaaagtcgaaatcgaatacgaggaggaacacgaagttcaaaatgctgagcaagaagtggcacaataa

SEQ ID NO: 190812 - DNA, 93 bp, Saccharomyces pastorianus
atgtcaatctcgtttccaaaaatgcaacacctcatcgttatgacgacaattggagacaaaaaggttaacaataacataatactctttttatag

SEQ ID NO: 190813 - DNA, 975 bp, Saccharomyces pastorianus
atgattctttttttaaacggtagagacttgcaaagtgttggagtgaccagcaccggccttgaaaccttggatggaaacgtaagtgtcacccttcttcaagataccgaattccttagccttttcaataccgaagttgatacgggcttcaacatcatcagtccagtcagagacaggttccttttcgaaaacgaatgggaagacacctctgtacaagtgagagaatctagcagctcttgggcatctggtaaccaagatgattggacagtttggtctgtacttggaaaccaatcttggggtggtaccggaagtggacaagacaatgatagccttggccttttgttcgaaaacagcagcgacagcggaggcagcgacggtttcggtggtggaggttggctttggagtacagtttctcatgtcatcgtagtttggcaagtaagcgatagcttgttcagcaatgacagcggtttcagccatagtggtaacggcgttgattgggtagttacccttggcggtttcaccagacaacataacacagtcagcaccatccaagatagcgttaccgacatcggaaacttcagctctggttggtcttgggttgtaagtcatggattccaacatttgggtagcacagataactggcttaccagccaagttagacttagcaatcaatttcttttggacagccaagacttctggggctgggatttcaatacccaagtcacctctggcaaccataacaccgtcagtgaccttcaagatttcgtcgaagttgttaacaccttgttggttttcaatcttgacaatgatcttgacgtccttaccttgttcacccaagacttctctgatggtcaaaacatcgttggcggttctgatgaaagaagcgaagaccatgtggacaccgttcttgacaccgaatctcaaatcttccttgtccttttcagacaaagctggcaaatcgacatcggtacctggtaa

SEQ ID NO: 190814 - DNA, 804 bp, Saccharomyces pastorianus
atggatatggaaatcgaagattcaagccccatagatgacctgaagttacaaaaactggataccaatgtttattttggaccctgtgagatattgacacaacctattcttttgcaatatgaaaatattaagttcatcattggtgtcaatctaagtactgaaaagatagcgtcgttttatacccagtatttcaggaactctaattcggtagtcgtgaatctttgctcaccaactacagcagcagtagcaacaaagaaggccgcaattgatttgtatatacgaaacaatacaatactactacagaaattcgttggacagtacttgcagatgggcaaaaagataaaaacatctttaacacaggcacaaaccgatacaatccaatcactgccccagttttgtaattcgaatgtcctcagtggtgagcccttggtacagtaccaggcattcaacgatctgttggcactctttaagtcatttagtcattttggaaatatcttggttatatcatcacattcctatgattgcgcacttctcaaatttcttatttccagggtgatgacctactatccactagtgaccatccaggattctttgcaatatatgaaagcaaccctgaacatatccatcagtacatccgatgagttcgatattctgaatgataaagaactgtgggagtttggccaaacccaggaaattctaaaacgtaggcagacgagctcagtcaagaggagatgtgtcaatttaccagaaaactctacgatcgataacagaatgcttatgggtaccacaaagcgaggtcgcttttga

SEQ ID NO: 190815 - DNA, 291 bp, Saccharomyces pastorianus
atgtgccctcgcacagttttgctcatcataaacattaatcattggttttatgataagaatatcgtaagaattattttaactttcagattagattccggccatatttctgacatttgttttattaataaaaatttggcgaatgctttgataactgctgatatttcattgttgaaaaggcatgatataagatgcacaaagtatattataacttattatcagagatataggaacaaagaaaaagggaaattcatatctctatgtaaaaataccattatttcctcttctgtttaa

SEQ ID NO: 190816 - DNA, 381 bp, Saccharomyces pastorianus
atgacaggttactttttaccaccacaaacaagttcttacacgttcaggtttgctaaggtcgatgactctgcaattctatcagtcggtggcgacgttgcattcggatgctgtgcacaagagcaacctccaattacatccacaaactttacgattaatggtatcaagccatggcaaggaagattgcccgataacattgcagggactgtgtatatgtatgctggattctactgtccaatgaagattgtctactcaaacgctgtttcttggcatacactgccagttagcgtggaattgcctgatgttactactgttagcgatgattttgcagggcacgtttactcttttgacgatgacctaacagcccaattgtactatccctga

SEQ ID NO: 190817 - DNA, 327 bp, Saccharomyces pastorianus
atgcgatatactgcaacttttcggcctttgcaacgatttgtaatgaatccttttgcatcgctagaaggacaagataatatttcttctgttttttttttacatatgcaacaatttgaaagtcaggtcaaagacagattccggttccccatattcagattggagagaaaaacttttggcaactcatgttaccaagtcgagacgcttaaagttaagtgtcggccaagacacgcaaaatcttgtaatcttttaacgctgctcttcaaatcacggacgcaatcagtacttgtacctaattttggttttctaatattgaatagcgaaccatag

SEQ ID NO: 190818 - DNA, 387 bp, Saccharomyces pastorianus
atgaacagtgctaccagtgagacaacaaccaatactggagctgctgagacaactaccagtactggagctgctgagacgaaaacagtagtcacctcttcaatttcaagattcaatcatgctgaaacacagacggcttccgcgaccgatgtgattggtcacagcagtagtgttgtttctgtatccgaaactggcaacaccaagagtctaataacttccgggttaagtactatgtcgcaacagcctcgtagcacaccagcaagtagcataataggatctagtactgcctctttagaaatctcaacctacgttggtattgccaatggtctgttgaccaataatggcataagtgtttttatttccaccgtattgctggcaatcgtatggtaa

SEQ ID NO: 190819 - DNA, 255 bp, Saccharomyces pastorianus
atgcacggcacttgcctcagcggtctataccctgtgccatttacccataacgcccatcattatccacattttgatatctatatctcattcggcggtcccaaatattgtataactgcccttaatacatacgttataccacttttgcaccatatacttaccactccatttatatacacttatgtcaatattacagaaaaatccccacaaaaatcacctaaacataaaaatattctacttttcaacaataatacataa

SEQ ID NO: 190820 - DNA, 315 bp, Saccharomyces pastorianus
atgatcgtaaataacacacacgtgcttaccctaccactttataccaccaccacatgccatactcaccctcacttgtatactgattttacgtacgcacacggatgctacagtatataccatctcaaacttaccctactctcagattccacttcactccatggcccatctctcactgaatcagtaccaaatgcactcacatcattatgcacggcacttgcctcagcggtctataccctgtgccatttacccataacgcccatcattatccacattttgatatctatatctcattcggcggtcccaaatattgtataa

SEQ ID NO: 190821 - DNA, 3591 bp, Saccharomyces pastorianus
atggagacttttactgggtatctaaaaagtacttgcttccatcaaatatctccgtacccaccatcaataatgtccatacaagtgaaagtacacgcaaatatccttatcctttcattcatcgaatgcttgcgcatgccaatgcacagacaaattcgatactcacttaaaaataacaccatcacgtattttaacgaatcagatgtcgactggtctagtgctattgactatcaatgtcctgattgtttaatcggcaaaagcaccaaacacagacatatcaaaggttcacgactaaaataccaaaattcatacgaaccctttcaatacctacatactgacatatttggtccagttcacaacctaccaaaaagtgcaccatcctatttcatctcatttactgatgagacaacaaaattgcgttgggtttatccattacacgaccgtcgcgaggactctatcctcgatgtttttactacgatactagcttttattaaaaaccagtttcaggccagtgtcttggttatacaaatggaccgtggttctgagtatactaacagaactctccataaattccttgaaaaaaatggtataactccatgctatacaaccacagcggattcccgagcacatggagtcgctgaacggctaaaccgtaccttattagatgactgccgtactcaactgcaatgtagtggtttaccgaaccatttatggttctctgcaatcgaattttctactattgtgagaaattcactagcttcacctaaaagcaaaaaatctgcaagacaacatgctggcttggcaggacttgatatcagtactttgttacctttcggtcaacctgttatcgtcaatgatcacaaccctaactccaaaatacatcctcgtggcatcccaggctacgctctacatccgtctcgaaactcttatggatatatcatctatcttccatccttaaagaagacagtagatacaactaactatgttattcttcagggcaaggaatccagattagatcaattcaattacgacgcactcactttcgatgaagacttaaaccgtttaactgcttcatatcattcgttcattgcgtcaaatgagatccaagaatccaatgatcttaacatagaatctgaccatgacttccaatccgacattgaactacatcctgagcaaccgagaaatgtcctttcaaaagctgtgagtccaaccgattccacacctccgtcaactcatactgaagattcgaaacgtgtttctaaaaccaatattcgcgcacccagagaagttgaccccaacatatctgaatctaatattcttccatcaaagaagagatctagcaccccccaaatttccaatatcgagagtaccggttcgggtggtatgcataaattaaatgttcctttacttgctcccatgtcccaatctaacacacatgagtcgtcgcacgccagtaaatctaaagatttcagacactcagactcgtacagtgaaaatgagactaatcatacaaacgtaccaatatccagtacgggtggtaccaacaacaaaactgttccgcagataagtgaccaagagactgagaaaaggattatacaccgttcaccttcaatcgatgcttctccaccggaaaataattcatcgcacaatattgttcctatcaaaacgccaactactgtttctgaacagaataccgaggaatctatcatcgctgatctcccactccctgatctacctccagaatctcctaccgaattccctgacccatttaaagaactcccaccgataaattctcatcaaactaattccagtttgggtggtattggtgactctaatgcctatactactatcaacagtaagaaaagatcattagaagataatgaaactgaaattaaggtatcacgagacacatggaatactaagaatatgcgtagtttagaacctccgagatcgaagaaacgaattcacctgattgcagctgtaaaagcagtaaaatcaatcaaaccaatacggacaaccttacgatacgatgaggcaatcacctataataaagatattaaagaaaaagaaaaatatatcgaggcataccacaaagaagtcaaccaactattgaaaatgaatacttgggacactgacaaatattatgacagaaaagaaatagaccctaaaagagtaataaactcaatgtttatcttcaacaagaaacgtgacggaactcataaagctagatttgttgcaagaggtgacattcagcatcctgatacgtacgatacaggtatgcaatccaacactgtacatcattatgcgttgatgacatccctgtcacttgcattagacaataactactatattacacaattagacatatcttcggcatatttgtatgcagacatcaaagaagaattatacataagacctccaccacatttaggaatgaatgataagttgatacgtttgaagaaatcactttatggattgaaacaaagtggagcgaactggtacgaaactatcaaatcatacctgataaaacagtgtggtatggaagaagttcgtggatggtcatgcgtatttaagaatagtcaagtaacaatttgcttattcgttgatgatatgatattgttcagcaaagacttaaatgcaaataagaaaatcataacaacactcaagaaacaatacgatacaaagataataaatctgggtgaaagtgataacgaaattcagtacgacatacttggcttagaaatcaaatatcaaagaggtaaatacatgaaattaggtatggaaaaatccttgacagaaaaattacccaaactaaacgtacctttgaacccaaaaggaaagaaacttagagctccaggtcaaccaggtctttatatagaccaggatgaactagaaatagatgaagatgaatacaaagagaaggtacatgaaatgcaaaagttgattggtctagcttcatatgttggatataaatttagatttgacttactatactacatcaacacacttgctcaacatatactattcccctctaggcaagttttagacatgacatatgagttgatacaattcatgtgggacactagagataaacaactgatatggcacaaaaacaaacctaccgagccagataataaactagtcgcaataagtgatgcttcgtatggcaaccaaccgtattataaatcacaaattggcaacatatatttacttaatggaaaggtaattggaggaaagtccaccaaggcttcattaacatgtacttcaactacggaagcagaaatacacgcgataagtgaatctgtcccattattaaataatctaagttacctgatacaagaacttaacaagaaaccaattattaaaggcttacttactgatagtagatcaacgatcagtataattaagtctacaaatgaagagaaatttagaaacagattttttggcacaaaggcaatgagacttagagatgaagtatcaggtaataatttatacgtatactacatcgagaccaagaagaacattgctgatgtgatgacaaaacctcttccgataaaaacatttaaactattaactaacaaatggattcattag

SEQ ID NO: 190822 - DNA, 1323 bp, Saccharomyces pastorianus
atggaatcccaacaattatctcaacattcacccatttctcatggtagcgcctgtgcttcggttacttctaaggaagtccacacaaatcaagatccgttagacgtttcagcttccaaaacagaagaatgtgagaaggcttccactaaggctaactctcaacagacaacaacacctgcttcatcagctgttccagagaacccccatcatgcctctcctcaaactgctcagtcacattcaccacagaatgggccgtacccacagcagtgcatgatgacccaaaaccaagccaatccatctggttggtcattttacggacacccatctatgattccgtatacaccttatcaaatgtcgcctatgtactttccacctgggccacaatcacagtttccgcagtatccatcatcagttggaacgcctctgagcactccatcacctgagtcaggtaatacatttactgattcatcctcagcggactctgatatgacatccactaaaaaatatgtcagaccaccaccaatgttaacctcacctaatgactttccaaattgggttaaaacatacatcaaatttttacaaaactcgaatctcggtggtattattccgacagtaaacggaaaacccgtacgtcagatcactgatgatgaactcaccttcttgtataacacttttcaaatatttgctccctctcaattcctacctacctgggtcaaagacatcctatccgttgattatacggatatcatgaaaattctttccaaaagtattgaaaaaatgcaatctgatacccaagaggcaaacgacattgtgaccctggcaaatttgcaatataatggcagtacacctgcagatgcatttgaaacaaaagtcacaaacattatcgacagactgaacaataatggcattcatatcaataacaaggtcgcatgccaattaattatgagaggtctatctggcgaatataaatttttacgctacacacgtcatcgacatctaaatatgacagtcgctgaactgttcttagatatccatgctatttatgaagaacaacagggatcgagaaacagtaaacctaattacaggagaaatccgagtgatgagaagaatgattctcgcagctatacgaatacaaccaaacccaaagttatagctcggaatcctcaaaaaacaaataattcgaaatcgaaaacagccagggctcacaatgtatccacatctaataactctcccagcacggacaacgattccatcagtaaatcaactactgaaccgattcaattgaacaataagcacgaccttcatcttaggccagaaacttactga

SEQ ID NO: 190823 - DNA, 168 bp, Saccharomyces pastorianus
atggtcaaattaacttcaatcgctgccggtgtcgccgccattgctgctggtgcctccgccgcagcaaccactacattatctcaatctgacgaaagagttaatttggttgaattaggtgtttatgtttccgatatcagagctcatttggctgaatactactctttctaa

SEQ ID NO: 190824 - DNA, 771 bp, Saccharomyces pastorianus
atggaacaacctgatctatcgtctgtggccatcagtaagccgctgctgaagttgaaacttctcgacgcccttcgccagggaagtttccccaacctacaagatctcctaaagaaacaattccagccgctagacgacccaaacgtccaacaagtgctccatctcatgctccactatgccgtgcaagtcgcccccatggctgtcataaaggaaatcgtccatcattgggtctcaactacaaacaccacttttctaaacatccatcttgatctaaacgaacgggactccaacggcaacaccccattgcacatcgccgcctaccagtcccgcggtgatatcgtagccttcctcctggaccaaccaaccatcaacgactgcgtgctcaacaactcccacttgcaggccatcgaaatgtgcaagaacctaaacatcgcgcagatgatgcaggtgaaacgctccacatacgttgcagagaccgcccaggaattcagaacagcttttaacaacagggacttcggccacctagaatctatcctctccagccctcgaaacgcagaactgctcgacatcaacggtatggacccggagactggcgataccgttctgcacgaattcgtcaagaaaagagacgtcatcatgtgccgttggttgcttgaacacggtgctgaccccttcaagagagaccgcaaggcaaactgcccatcgagctcgttaggaaagtcaatgaaaacgacaccgccaccagcaccaagatcgccatcgacatcgaactga

SEQ ID NO: 190825 - DNA, 321 bp, Saccharomyces pastorianus
atgtaccaaacctcgcctctttctttgttctattttcaggttcttgtaccaaaatttttggagtgttttctgtgtttcccatatcataaaataagtttagtggctcttcttagtttcttttattgccaacttcagacaaacatgatcatattattgagccaaataaagcgtttcctgtataggcagataatgattgcattgaaaataaaagccaaaaaattttggttcatatttaagtattttaatgtcagttgtgacgctagacttttcaatgaactcttttatatctttcaaacgtatgtctccgtggattcaaaatag

SEQ ID NO: 190826 - DNA, 297 bp, Saccharomyces pastorianus
atgtatgagtacttattattaacgaggaaaaatgccctattttctttagcaattaatgaaccatcgccaacttttgctttaacaattattgccattttcagcagtactaacgtaagatctagtgtggttcgcttaggatgttttcgagtagaaatctgctgcacatgccacacgcagtacttgaaacttgaaataatggtgataattagttatttaaagtatgttaatcttccttgttcttttatatttatttcgaattcttttgcactagtatttaaaatatcagcagaggtgtaa

SEQ ID NO: 190827 - DNA, 336 bp, Saccharomyces pastorianus
atgtcaaaaaccgatgtcaaaaaatctcgtgaggcctccggaattttgacgctgcaagtcaatctacgggaaagaagaaattttttaaacttaatgcaaaataagcttttttcttggaaaataagattttcggcaataaaaggtaaatgcagccaaaaatcaaaatacttcagaagaagtcgtagcgaggactgctacgtggaagcggatttgaagatcctttccagaacaagaaggagccgaaagctgccaggaactgttcctgattttttaggaaaacaattaataggtatctcgtctagcgtagtatctcgagtttccagaagttgcagataa

SEQ ID NO: 190828 - DNA, 204 bp, Saccharomyces pastorianus
atgccttatcactatttatttttggcactcttcacctacctggccacgtccaatgttgtttcaggaagtacacaagcatgcctgccagtgggcccgaggaaaaatgggatgaatgtcaacttttataaatactcattactggattcaacaacgtattcctacccgcaatatatgacttctggatatgcctcgaattggaattag

SEQ ID NO: 190829 - DNA, 597 bp, Saccharomyces pastorianus
atgacaggttactttttaccaccacaaacaagttcttacacgttcaggtttgctaaggtcgatgactctgcaattctatcagtcggtggtaacgttgcgttcgaatgttgtgcacaagaacaacctccaattacatcgacggattttacaatcaatggtattaagccatggcaaggaagtttgcctgataacatcggagggactgtctacatgtatgcaggctactattatccgctgaaggttgtttactccaatgccgtttcctggggcacgcttccaattagcgtggaattgcctgatggtactactgttagtgatgactttgaagggtacgtttactcttttgacgatgatttaagtcagtcaaattgtactatccctgatccttcaaaacatactactagcatcgtcacaactactaccgaactgtggactggtacttttacttctacatctactgaaatgaccaccgtcaccggtactaatggtcaaccaactgacgaaaccgttattgttgccaaagctccaaccactgccacctcatccagtttgtcatcatcttcttcagaacaaatcaccagctctatcacgtcttag

SEQ ID NO: 190830 - DNA, 1212 bp, Saccharomyces pastorianus
atggccgccattagagactacaagaccgcactagatcttaccaagagcctaccaagaccggatggtttgtcagtgcaggaactgatggactccaagatcagaggtgggttggcttataacgattttttaatcttaccaggtttagtcgattttgcgtcctctgaagttagcctacagaccaagctaaccaggaatattactttaaacattccattagtatcctctccaatggacactgtgacggaatctgaaatggccacttttatggctctgttggatggtatcggtttcattcaccataactgtactccagaggaccaagctgacatggtcagaagagtcaagaactatgaaaatgggtttattaacaaccctatagtgatttctccaactacgaccgttggtgaagctaagagcatgaaggaaaagtatggatttgcaggcttccctgtcacggcagatggaaagagaaatgcaaagttggtgggtgccatcacctctcgtgatatacaattcgttgaggacaactctttactcgttcaggatgtcatgaccaaaaaccctgttaccggcgcacaaggtatcacattatcagaaggtaacgaaattctaaagaaaatcaaaaagggtaggctactggttgttgatgaaaagggtaacttagtttctatgctttcccgaactgatttaatgaaaaatcagaagtacccattagcgtccaaatctgccaacaccaagcaactgttatggggtgcttctattgggactatggacgctgataaagaaagactaagattattggtaaaagctggcttggatgtcgtcatattggattcctctcaaggtaactctattttccaattgaacatgatcaaatggattaaagaaactttcccagatttggaaatcattgctggtaacgttgtcaccaaggaacaagctgccaatttgattgctgccggtgcggacggtttgagaattggtatgggaactggctctatttgtattacccaaaaagttatggcttgtggtaggccacaaggtacagccgtctacaacgtgtgtgaatttgctaaccaattcggtgttccatgtatggctgatggtggtgttcaaaaacattggtcatattattaccaaagctttggctcttggttcttctactgttatgatgggtggtatgttggccggtactaccgaatcaccaggtga

SEQ ID NO: 190831 - DNA, 416 bp, Saccharomyces pastorianus
atgcttttcttctcctttttcaagactttagttgaccaagaagtggtcgtagaggtatgttcataatgatttacatcggaattccctttgatacaagaaaactaacgggtatcgtacatcaatttttgaaaaaagtcaagtactaacgtttgtttacccctgtttattgtgtttccactcagttaaaaaacgacattgaaataaaaggtacactacaatcagttgaccaatttttgaatctgaaactagacaacatatcatgcacagatgaaaaaaaatatccacacttgggttccgtaaggaatatttttataagaggttcaacagtcaggtacgtttacttgaataagaacatggtagatacgaatttgctacaagacgctaccagaagggaggtaatgactgaaagaaaataa

SEQ ID NO: 190832 - DNA, 954 bp, Saccharomyces pastorianus
atgtatgtttaacagtgatactaaattttgaacctttcacaagatttatctttaaatatgttatgaatgtcatcctttggagagaaatagataaggaaaaaaattgaggatacagcatccggtggtcgcatagttggtagcaacatccatagaagaacctcagataaatttcaagcttgtacgaattgccgcgtttattacaaactatagaattatcgcagcaatggtacgtgtctgttcctgcaagcgttaattcgattgatagataaagtaattcattaacctttgcgaatatgctctttactgttaggtttcaggattttaaaaatgaagcaactttactaacatcaatatgcaaataaatctgcaaaaactttttttcacagggctaacttgcgtactcaaaagagacttgccgcttctgttgtcggtgttggtaagagaaaggtttggttagacccaaacgaaacttctgaaattgcccaagccaactctagaaatgccattagaaaattggtcaagaacggaaccatcgtcaagaaggccgttactgtccactctaaatctagaactagagcccatgctcaatccaagagagaaggtcgtcacagtggttacggtaagagaaagggtactagagaagctcgtttaccatcccaagtcgtctggatcagaagattacgtgtcttgagaagattattggccaagtaccgtgacgctggtaagattgacaagcatttgtaccacgttttgtacaaggaatccaagggtaacgccttcaagcacaagagagctttggttgaacacattattcaagctaaggctgatgctcaacgtgaaaaggctttgaacgaagaagctgaagctagaagattgaagaacagagctgctcgtgacagaagagctcaaagagttgctgaaaagagagacgctttgctaaaggaagacgcttaa

SEQ ID NO: 190833 - DNA, 757 bp, Saccharomyces pastorianus
atgaatccgtttagaatcttaggtatgttactatttggagtttcatgaggcttttcccgccgtagatcgaacccaatcttactaacagagaaagggctttttcccgaccatcaagacaggtgatttatcacatctaaccagtatactgatcctgattcataatatcaagaccacaaggtacattgaaggtatttctttcaagacccaaacgttgtacgctttggttttcataacacgatacttggatctcttgacttttcactgggtatccctatacaatgctctaatgaaaatatttttcattgtatctaccgcttacattgtagtgctattacaagggtctaaaagaaccaacaccattgcgtataatgaaatgcttatgcatgatacctttaagatccagcatttactaattgggagtgctctaatgagtgtttttttccatcacaagttcacttttcttgaattagcatggagtttttctgtatggttggagagtgtggctattctacctcaattgtacatgctatctaagggtgggaagactagaagtctaactgttcattatatttttgccatgggattatacagagcattgtatattcctaactggatttggaggtacagcacggaagataaaaaattggacaagattgccttcttcgcgggacttttgcaaactctgttgtactctgatttcttttacatttactacactaaagtcatcagaggaaagggtttcaaactgccaaaataa

SEQ ID NO: 190834 - DNA, 237 bp, Saccharomyces pastorianus
atgttcgggtctattatctggtcatataactacacacattactattttgatccgaatgcaaagacggcttccgccaataatgattggattgagcaatgtggcgactttttgaagaacggtactgtaaaatgtgtcgtcgacaaagtttatgactggaaagaccataaagaagcattttcttatatggccactcaacgtgcccaaggaaagttaatcatgaacgtcgaaaaattctag

SEQ ID NO: 190835 - DNA, 5314 bp, Saccharomyces pastorianus
atggaatcccaacaattacatcaaaatccacattctctacatggtagcgcctatgcttcggttacttctaaggaagtctcatcaaatcaagatccgttagccgtttcagcttccaatttaccggaatttgatagagattccactaaggttaattctcaacaagagacaacacctgggacatcagctgttccagagaaccatcatcatgtctctcctcaacctgcttcagtaccacctccacagaatggacagtaccaacagcacggcatgatgactccaaacaaagctatggcttctaactgggcacattaccaacaaccatctatgatgacgtgttcacattatcaaacgtcacctgcgtattatcaaccggacccacactatccgctgccacagtatatcccaccgctgagtacttcctcacctgatccaatcgattcacaggatcaacactctgaagtacctcaagctaagacaaaggtgagaaataatgtcttaccaccacacactttaacatcagaagaaaacttttatacatgggttaaattttacatcagatttttgaagaactctaatctcggtgacatcattccaaatgatcagggtgaaatcaaaagacaaatgacttatgaagaacatgcgtatatatacaataccttccaagcatttgccccatttcatttattgccaacatgggtaaaacaaattttagaaattaattatgctgacatccttacagtcctttgtaaaagtgtgtccaaaatgcaaactaacaatcaagaattaaaggattggatagctcttgccaaccttgagtacgacggaagtacatctgctgatacatttgaaattacggtcagcacgatcattcaaaggctaaaagaaaacaatatcaatgttagcgacagattggcctgtcaactaatacttaaaggtctatccggtgacttcaaatacctacgtaatcaatatcgtaccaaaacgaacatgaaactttcccaattattcgctgaaattcaattaatatatgacgaaaataaaatcatgaatctaaataaaccgtcccaatacaaacaacacagcgaatacaaaaatgtttctcgcacatctccaaacacgactaacacaaaggttacaactcgtaattatcatagaacaaatagttcaaaaccaagagcagcaaaagctcacaatattgctacatctagtaaattctcaagggtgaacaatgatcacattaatgaatcaaccgtttcatcacaatacttaagcgatgacaacgaacttagtcttaggccagcaacagaaagaatctaagccaacacacacaatagactcgaatgacgaactacctgatcaccttcttattgattcaggagcttcgcaaacgcttgtcagatcagcccattatttacaccatgcaacacccaattctgaaataaacatagtcgatgctcaaaaacaagacattcctataaatgccattggtaatcttcacttcaactttcagaacggcaccaaaacatcaataaaagcactgcacacaccaaacatagcctatgatctattaagtttgagtgagctggctaatcaaaatattactgcctgctttaccagaaacactttagaaagatcggatggtacagtactagctcccatagtcaaacatggagacttttactggttatctaaaaaatacctaattccttcgcacatttcaaagctaacaataaacaacgtcaacaaaagcaaaagcgtaaataaatatccatatccgttaatacatcgaatgcttggacatgctaacttccgaagtattcagaagtctcttaagaagaatgcagttacatatttgaaagaatcggatattgaatggtctaacgctagcacatatcaatgtcctgactgtctaatcggcaaaagcacgaaacataggcatgtcaaaggatcacgactaaagtaccaagaatcatatgagccttttcagtacttgcataccgatatatttggtcctgtacatcacttaccgaaaagtgcaccttcttactttatatcgtttacagatgagaaaaccagattccaatgggtctacccattacacgaccgtcgtgaagaatctatactcaatgtttttacatcgatattagcatttattaagaaccaattcaatgctcgcgttctagttatccagatggatcgtggctccgagtacactaacaaaactcttcataagttctttacgaacagaggtattactgcatgctatacaaccacggcagattctagagcacacggtgtcgctgaacgattaaatcgtactttattaaacgattgtcgcacactgcttcattgcagtggtctaccaaatcatctatggttctcagcagtcgaattttctactataatcagaaattcattagtctcaccaaaaaacgataaatctgcaagacaacatgcaggtttagctggactggacattactactatactacctttcggtcaaccggttatagttaacaaccataatcccgactcgaaaatacatcctcgtggcattccaggttacgccttacatccgtcacgaaactcttatggctatattatctatcttccatcattaaaaaagacagtagatactaccaattacgttatattacaagacaaccaatccaaattggaccaattcaattatgatacactcacctttgatgatgatctcaatcgtttaacagcccataaccaatcttttattgaacaaaatgaaacagagcagtcatatgatcaaaatacagaatctgatcatgactatcaatcggagattgaaataaactctgatcctctagtgaacgacttctcgtcccaatcaatgaaccctttacaattagaccacgaaccagtccaaaaagtacgtgcactaaaagaagttgatgccgacatatctgaatacaatattcttccatctcctgtacgatctcgtacaccccatatcattaataaagagagtaccgaaatgggtggtaccattgaatcagatactacttcacctagacactcgtctaccttcactgcacgaaaccaaaagcgacctggtagtcccaatgatatgattgatttgacctcacaggatagagttaattatgaacttgaaaacatcaaaactacccgtttgggtggtacggaggaaccatatattcaacgaaatagtgatacaaatatcaaatacaggactacaaatagtacgccctcaatagatgaccgttcgcccgacagtgactctactactcccatcatctccatagaaacaaaggctgcatgcgataatacaccctccattgatacggatccgccagaatatcgatcttctgaccatgcgactcctaatataatgcctgacaaatcctcaaaaaatgttacggctgattctattcttgacgacctcccacttcctgacttaactaataaatctcctacggacacttctgatgtttcaaaagatattccacacatacactctcgtcagactaattccagtttgggtggtatggatgattctaatgttctgactactaccaaaagtaagaaaagatcattagaagataatgaaactgaaattgaggtatcccgagacacatggaataataagaatatgagaagtctggaaccaccaagatcgaagaaacgtataaatctaattgcagcaataaaaggagtaaaatcaatcaaaccagttcgaacgaccttaagatatgatgaagcaattacatataatgaagacaacaaagaaaaagacagatatattgaagcttatcataaagaaattaaccaactattgagaatgaacacttgggatacaaacaaatattatgatagaaatgacatagatcctaagaaagtaataaactcaatgtttatatttaacaaaaaacgtgatggtacacacaaagccagatttgttgcaagaggcgacattcaacaccccgatacatatgattctgatatgcaatccaataccgtacatcactatgcactgatgacgtcattgtcaatcgcattagacaatgactattatatcacacagctggacatatcctctgcttacttatatgctgatatcaaagaagaattatacataagacctccaccacatttaggtttgaatgataagttactacgtttgagaaaatcactctatggtttgaaacaaagtggtgcaaactggtatgaaaccattaaatcatatttaataaattgttgcgacatgcaagaagttcgcggatggtcatgcgtatttaagaatagtcaagtaacaatttgcttattcgttgatgatatgatattgttcagcaaagacttaaatgcaaatgagaaaatcataacaacactcaagaaacaatacgatacaaagataataaatctgggtgaaagtgataacgaaattcagtacgacatacttggattagagatcaaatatcaaagaagcaagtacatgaaattaggtatggaaaaatccttgacagaaaaattacccaaactaaacgtacctttgaacccaaaaggaaagaaacttagcgctccaggtcaaccaggtcattatatagaccaggatgaactagaaatagatgaagatgaatacaaagagaaagtacatgaaatgcaaaagttgattggtctagcttcttatgttggatataaatttagatttgacttactatactacatcaacacacttgctcaacatatactattcccctctaggcaagttttagacatgacatatgagttaatacaattcatgtgggacactagagataaacaattaatatggcacaaaaacaaacctaccaagccagataataaactagtcgcaataagcgatgcttcatatggtaaccaaccatattacaagtcacaaattggtaacattttcctactcaacggaaaagtgattggaggaaagtcgacaaaggcttcgttaacatgcacttcaactacagaagcagaaatacacgcagtcagtgaagctataccgctattgaataacctcagtcaccttgtgcaagaacttaacaagaaaccaattattaaaggcttacttactgatagtagatcaacgatcagtataattaagtctacaaatgaagagaaatttagaaacagattttttggcacgaaggcaatgagacttagagatgaagtatcaggtaataatttatacgtatactacatcgagaccaagaagaacattgctgatgtgatgacaaaacctcttccgataaaaacatttaaactattaacaaacaaatggattcattag

SEQ ID NO: 190836 - DNA, 129 bp, Saccharomyces pastorianus
atgttgactggtattgccccagaccaagtgaccagaatgatcaccggtgttccatggtactccagcagattaaagccagccatctccagtgctctatccaaggacggtatctacactatcgcaaactag

SEQ ID NO: 190837 - DNA, 336 bp, Saccharomyces pastorianus
atgtccctacggccttgtctaacaccatccagcatgcaatacagtgacatatatatataccctaacactaccctaaccctaccctatttcaacccttccaacctgtctctcaacttaccctcacattaccctacctctccacttgttaccctgtcccattcaaccataccactcccaaccaccatccatccctctacttactaccaccaatcaaccgtccaccataaccgttaccctccaattagccatattcaacttcactaccacttaccctgccattactctaccatccaccatctgctactcaccatactgttgttctaccctccatattga

SEQ ID NO: 190838 - DNA, 318 bp, Saccharomyces pastorianus
atgcaagttctcatcggaacgaaattagtgactgaaggaattgacattaagcaattgatgatggtgatcatgcttgataatagacttaatattattgagctcattcaaggcgtagggagactaagagatgggggcctctgttatctattatctagaaaaaacagttgggcggcaaggaatcgtaagggtgaattaccaccgattaaggaaggctgtataaccgaacaggtacgcgagttctatggacttgaatcaaagaaaggaaaaaaagggccagcatgttggatgctgtggctccaggacagacctgtctgctga

SEQ ID NO: 190839 - DNA, 1242 bp, Saccharomyces pastorianus
atgaaattaaaaagtgtattcagatcagttctaaagtaccggaaaacaaatttgagtttgcttctattaatcacctattcgattattacgttactctatatctttgatcatgaacgttataaactcaatctaccaaaagaggatgagcaccctgaattcaatgacttattagaaacagcatggggggacttacagattatcacggcctcttttcatccgtacacgtccaaagaaaatgataaagtacatgattacttgctcaaaagggttcttgaaattacagggaattcttcgtttgcaagtgtttcagatgacaaagaaagcgagagatccatattatttcagcaacaagatcctttcaatgagtcatctaggttttcgagagtgacatattttgaatcttctaatatattagttaagcttgagggtaaaaatcctgaggaagaagggttacttctttcagctcatttcgactctgtacccacaggatatggagctaccgatgacggcatgggtgtagtgtctttactagcgaacctcaagtaccatataaagcacagaccgaacaggactttaattttcaactttaataataatgaagagtttggcctactaggtgcatcaacttattttgatcactcatggtctaatttaaccaagtatgtgataaatttagagggaactggtgctggtggtaaagctgtactgttccgaacttcagatacttcaacagcaagaatataccaacagtctgttaaggaaaatccatttggtaactctatctaccagcaaggtttttatagcagatatgtcaggagtgagacagactacaagatttacgaagaaaatggcatgagaggctgggatgtcgcattctacaaaccgagaaacctttatcataccataaaggattcaatacaatatacctccaaggcatctttatggcatatgctacatacttccttacaattaagtgcatatgtggcttctaattcattggatacagctgaccaaacgccggcttgttattttgattttatcggtttgaagtttttcgttataagcgctaaaacgcttttctattggaactgcatatttctattagtttcacccgttgtggccattggcttgtatttaatttctcgtgatagaatgacttggaaatcttattcatggctatcgtggaccacgctttcctctttcattagccgctggtattattgtccaaaagcttttctctaa

SEQ ID NO: 190840 - DNA, 1404 bp, Saccharomyces pastorianus
atgtttaagtctgttgtttattcggttctagccgctgctttagttaatgcaggtacaattcccctcggagagttagccgatgttgccaaaattggcactcaggaagacatattcccattcctgggtggtgccgggccatacttctctttccctggcgactatggtatttctcgtgacttgcctgaaggttgtgaaatgaaacaattgcaaatgcttgccagacatggtgaaagatacccaacttacagtaaaggtgctaccatcatgaaaacatggtataagttgagcaattacacacgtcaattcaacggctcattgtcattcttgaacgatgattacgagtttttcatccgtgatgacgatgatttggaaatggaaaccacttttgccaactcagacaatgttttgaatccatacactggtgagatggatgctaagagacatgctcgtgagtttttagcgcaatatggctacatgttcgaaaatcaaaccagtttcccaattttcgccgctagttctgaaagggttcatgacactgctcaatatttcattgatggtttaggtgaccaattcaacatctccttgcagactgtcagtgaagccatgtccgccggcgcaaacactttgagtgctggtaatgcgtgcccaggatgggatgaagatgctaacgatgacattttggacaaatacgataccacatacttggatgacattgccaagagattaaacaaagaaaacaagggtttgaatttgacctcaaaggacgccaacactttgtttgcatggtgtgcatacgaattgaacgctagaggctacagtgatgtttgtgatatcttcaccgaagatgaattggtacgttactcatacggccaggacctggtatcgttttaccaggatggaccaggttatgatatgatcagatccgtcggtgccaacttgtttaacgctactttgaagttgttaaagcaaagtgaaactcaagacttaaaagtctggttgagttttacccacgataccgatatcctaaactatttgaccaccgctggtataattgacgacaaaaacaacttaactgccgaatacgttccattcatgggcaacaccttccataagtcctggtacgttcctcaaggtgctcgtgtctacaccgaaaaattccaatgttctaacgacacctacgtcagatacgtcattaacgatgctgtcgttccaattgaaacctgttccaccggcccagggttctcttgtgaaatcaatgatttctacgactatgctgaaaagagagtagctggtactgacttcctaaaggtctgtaacgtcagcagtgtcagtaacgtcaccgaattgaccttctactgggactggaatactactcactacaacgataccctattaaaacaataa

SEQ ID NO: 190841 - DNA, 75 bp, Saccharomyces pastorianus
atgctggttttgtatcgaaaaagattttcaggttttaggttttattttttgtctatttttaaatatataatataa

SEQ ID NO: 190842 - DNA, 805 bp, Saccharomyces pastorianus
atgacattgttaaataccctcagcaacttcggtgggacatggccgcggttaatcattatgtccatgatcaactacttcaccgtgtatcagtgcactattcctggcacaaataaagtatacgtaactcacggcggcagcatgcaagcgtgcaccgagcttttgaatggcaccgtgaccatcctgcgtgacggctattacatcaccaatctcatatgtattgtagtcggacttttcctatattttggatatttgaaaaggaaaatcctccatttacaaagtctgccaatcagttcctggagatgtacgtaacgacccctcaaacaagaattgtacgacattacgttcaagaaaattttaacgagtatcgtaatatttacaagatctttttatgtactacaggaagcagaaacaaaatgagtatcaataccagtgtaaatctgttaatgagaatcatcacattatcccagttttttccatgcaagggaaaaatatactatacgacatttctatactttaattatcaattaaggtcatctttctgtacgaaaactaaccacgattgtcactaacgacgtgtcccttacccgacgcagctgctgatagcgtaccgcacaggcacagccagctcttctgtgattggcagagaggggtccttcctgcggaagacgccgcaaaggcacatatgactaaccttttttttttcgcaattaattttctaatagtttttcattttttttttacaattttggcagttacgtctcgagctatttattataagagtcagaattggcgcagggagtgttaa

SEQ ID NO: 190843 - DNA, 5314 bp, Saccharomyces pastorianus
atggaatcccaacaattacatcaaaatccacgttctcttcatggtagcgcctatgcttcggttacttctaaggaagtcccatcaaatcaagatccgttagccgtttcagcttccaatttaccggaatttgatagagattccactaaggttaattctcaacaagagacaacacctgggacatcagctgttccagagaaccatcatcatgtctctcctcaacctgcttcagtaccacctccacagaatggacagtaccaacagcacggcatgatgaccccaaacaaagctatggcctctaactgggcacattaccaacaaccgtctatgatgacgtgttcacattatcaaacgtcacctgcgtattatcaaccggacccacactatccgttgccacagtatatcccaccactgagtacttcctcacctgatccaatcgattcacagaatcaacactctgaagtacctcaagctgagacaaaggtgagaaataacgtcttaccaccacacactttaacatcagaagaaaacttttctacatgggttaaattttacatcagatttttgaagaactctaatctcggtgacatcattccaaatgaccagggtgaaatcaaaagacaaatgacttatgaagaacatgcgtatatatacaataccttccaagcatttgccccatttcatttattgccaacatgggtaaaacaaattttagaaattaattatgctgacatccttacagtcctttgtaaaagtgtgtccaaaatgcaaactaacaatcaagaattaaaggattggatagctcttgccaaccttgagtacgacggaagtacatctgctgatacatttgaaattacagtcagtacgatcattcagaggctaaaagaaaacaatatcaatgttagcgacagattggcctgtcaactaatacttaaaggtctatccggtgacttcaaatacctacgtaatcaatatcgtaccaaaacgaacatgaaactttcccaattattcgctgaaattcagttaatatatgacgaaaataaaatcatgaatctaaataaaccgtcccaatacaaacaacacagcgaatacaaaaatgtttctcgcacatctccaaacacgactaacacaaaggttacaactcgtaattatcagagaacaaatagttcaaaaccaagagcagcaaaagctcacaatattgctacatctagtaaattctcaagggtgaacaatgatcacattaatgaatcaaccgtttcatcacaatacttaagcgatgacaacgaacttagtcttaggccagcaacagaaagaatctaagccaacacacacaatagactcgaatgacgaactacctgatcaccttcttattgattcaggagcttcgcaaacgcttgtcagatcagcccattatttacaccatgcaacacccaattctgaaataaacatagtcgatgctcaaaaacaagacattcctataaatgccattggtaatcttcacttcaactttcagaacggcaccaaaacatcaataaaagcactacacacaccaaacatagcctatgatctattaagtttgagtgagctggctaatcaaaatattactgcctgctttaccagaaacactttagaaagatcggatggtacagtcctagctcccatagtcaaacatggagacttttactggttatctaaaaaatacctaattccttcgcacatttcaaagctaacaataaacaacgtcaacaaaagcaaaagcgtaaataaatatccatatccgttaatacatcgaatgcttggacatgctaacttccgaagtattcagaagtctcttaagaagaatgcagttacatatttgaaggaatcggatattgaatggtctaacgctagcacatatcaatgtcctgactgtctaatcggcaaaagcacgaaacatagacatgtcaaaggatcacgactaaagtaccaagaatcatatgagccttttcagtacttgcataccgatatatttggtcctgtacatcacttaccgaaaagtgcaccttcttactttatatcgtttacagatgagaaaaccagattccaatgggtgtacccattacacgaccgtcgtgaagaatctatcctcaatgtttttacatcgatattagcatttattaagaaccaattcaatgctcgcgttctagttatccagatggatcgtggctccgagtacactaacaaaactcttcataagttctttacgaacagaggtattactgcatgctatacaaccacggcagattctagagcacacggtgtcgctgaacgattaaatcgtactttattaaacgattgtcgcacactgcttcattgcagtggtctaccaaatcatctatggttctcagcagtcgaattttctactataatcagaaattcattagtctcaccaaaaaacgataaatccgcaagacaacatgcaggtttagctggactggacattactactatactacctttcggtcaaccggttatagttaacaaccataatcccgactcgaaaatacatcctcgtggcattccaggttacgccttacatccgtcacgaaactcttatggctatattatctatcttccatcattaaaaaagacagtagatactaccaattacgttatattacaagacaagcaatccaaattggaccaattcaattatgatacactcacctttgatgatgatctcaatcgtttaacagcccataaccaatcttttattgaacaaaatgaaacggagcagtcatatgatcaaaatacagaatctgatcatgactatcaatcggagattgaaataaactctgatcctctagtgaacgacttctcgtcccaatcaataaaccctttacaattagacaaggaaccagtccaaaaagtacgtgcaccaaaagaagttgatgccgacatatctgaatacaatattcttccatctcctgtacgatctcgtacaccccatatcattaataaagagagtaccgaaatgggtggtaccgttgaatcagatactacttcacctagacactcgtctaccttcactgcacgaaaccaaaagcgacctggtagtcccaatgatatgattgatttgacctcacaggatagagttaattatggacttgaaaacatcaaaactacacgtttgggtggtacggaggaaccatatattcaacgaaatagtgatacaaatatcaaatacaggactacaaatagtacgccctcaatagatgaccgttcgtccaacagtgaatccactactcccatcatctccatagaaacaaaggctgtatgtgataatacaccctccattgatacggatccgccagaatatcgatcttctgaccatgcgactcctaatataatgcctgacaaatcctcaaaaaatgttacggctgattctattcttgacgacctcccacttcctgacttaacccatcaatctcctacggacacttctgatgtttcaaaagatattccacacatacactctcgtcagactaattccagtttgggtggtatggatgattctaatgttctgactactaccaaaagtaagaaaagatcattagaagataatgaaactgaaattgaggtatcccgagacacatggaataataagaatatgagaagtctggaaccaccaagatcgaagaaacgcataaatttaattgcagcaataaaaggagtgaaatcgatcaaaccagttcgaacgaccttaagatatgatgaagcaattacttataataaagacaacaaagaaaaagacagatatgttgaagcttatcataaagaaattagccaactattgaaaatgaacacttgggatacaaacaaatattatgatagaaatgacatagatcctaaaaaagtaataaactcaatgtttatatttaacaagaaacgtgatggtacacacaaagctagatttgttgcaagaggcgacattcaacaccccgatacatatgattctgatatgcaatccaataccgtacatcactatgcactgatgacgtcactgtcaatcgcattagacaacgactattatatcacacagctggacatatcctctgcttacttatatgctgatatcaaagaagaattatacataagacctccaccacatttaggtttgaatgataaattactacgtttgagaaaatcactctatggtttgaaacaaagtggtgcaaactggtatgaaaccattaaatcatatttaataaattgttgcgacatgcaagaagttcgcggatggtcatgcgtatttaagaatagtcaagtaacaatttgcttattcgttgatgatatgatattattcagcaaagacttaaatgcaaataagaaaatcataacaacactcaagaaacaatacgatacaaagataataaatctgggtgaaagtgataacgaaattcagtacgacatacttggattagagatcaaatatcaaagaagcaagtacatgaaattaggtatggaaaaatccttgacagaaaaattacccaaactaaacgtacctttgaacccaaaaggaaagaaacttagagctccaggtcaaccaggtcattatatagaccaggatgaactagaaatagatgaagatgaatacaaagagaaagtacatgaaatgcaaaagttgattggtctagcttcatatgttggatataaatttagatttgacttactatactacatcaacacacttgctcaacatatactattcccctctaggcaagttttagacatgacatatgagttaatacaattcatgtgggacactagagataaacaattaatatggcacaaaaacaaacctaccaagccagataataaactagtcgcaataagcgatgcttcatatggtaaccaaccatattacaagtcacaaattggtaacattttcctactcaacggaaaagtgattggaggaaagtcgacaaaggcttcgttaacatgcacttcaactacagaagcagaaatacacgcagtcagtgaagctattccgctattgaataacctcagtcaccttgtgcaagaacttaacaagaaaccaattattaaaggcttacttactgatagtagatcaacgatcagtataattaagtctacaaatgaagagaaatttagaaacagattttttggcacaaaggcaatgagacttagagatgaagtatcaggtaataatttatacgtatactacatcgagaccaagaagaacattgctgatgtgatgacaaaacctcttccgataaaaacatttaaactattaactaacaaatggattcattag

SEQ ID NO: 190844 - DNA, 1323 bp, Saccharomyces pastorianus
atggatagatatcaaagaaagataggatgtttcatacaaatcccaaatttggggcgcggacaactgaaatacgtgggtccagtggacacgaaagctggaatgtttgctggtgtagacttacttgccaacattggtaagaacgatggatcattcatggggaagaagtattttcaaacggagtatcctcaaagtggactatttattcagttgcaaaaagtcgcatcattgatcgagaaggcatcgatatcgcaaacctcgagaagaacgacaatggaaccgctatcaatacccaaaaacagatctattgtgaggctcactaaccagttctctcccatggatgatcctaaatcccccacacccatgagaagtttccggatcaccagtcggcacagcggtaatcaacagtcgatggaccaggaggcatcggatcaccatcaacagcaagaatttggttacgataacagagaagacagaatggaggtcgactctatcctgtcatcagacagaaaggctaatcacaacaccaccagcgattggaaaccggacaatggccacatgaatgacctcaatagcagcgaagttacaattgaattacgagaagcccaattgaccatcgaaaagctacaaaggaaacaactacactacaaaaggctactcgatgaccaaagaatggtcctcgaagaagtgcaaccgacttttgataggtatgaagccacaatacaagaaagagagaaagagatagaccatctcaagcaacaattggagctcgaacgcagacagcaagccaaacaaaagcagttttttgacgctgagaatgaacagctacttgctgtcgtaagccaactacacgaagagatcaaagaaaacgaagagagaaatctttctcataatcaacccactggtgccaacgaagatgtcgaactcctgaaaaaacagctggaacaattacgcaacatagaagaccaatttgagttacacaagacaaagtgggctaaagaacgcgaacaattgaaaatgcataacgattcgctcagtaaagaataccaaaatttgagcaaggaactatttttgacaaaaccacaagattcctcatcggaagaggtggcatccttaacgaaaaaacttgaagaggctaatgaaaaaatcaaacagttggaacaggctcaagcacaaacagccgtggaatcgttgccaattttcgacccccctgcaccagtcgataccacggcaggaagacaacagtggtgtgagcattgcgatacgatgggtcataatacagcagaatgcccccatcacaatcctgacaaccagcagttcttctag

SEQ ID NO: 190845 - DNA, 369 bp, Saccharomyces pastorianus
atgctgaagtacgtggtgacggatattgggaagatgtgtttgtacatttggccttatagagtgtggtcgtggcggaggttgtttatctttcgagtactgaatgttgtcagtatagctatcctatttgaaactccccatcgtcttgctcttgttcccaatgtttgtttatacactcatatggctatacccttatctacttgcctcttttgtttatgtctatgtatttgtataaaatatgatattactcagactcaagcaaacaatcaaagaaatctttcactgctcttttctgtgttccatttagtttttagtacgattgcattgtctatatactgtatttaccaaatcttaattttagtcaaacattaa

SEQ ID NO: 190846 - DNA, 528 bp, Saccharomyces pastorianus
atgtttacttcgaagcctgctttcaaaattaagaacaaagcatccaaatcatacagaaacacagcggtttcaaaaaagctgaaagaaaaacgtctagctgagcatgtgaggccaagctgcttcaatattattcgaccactcaagaaagatatccagattcctgttccttcctctcgatttttaaataaaatccaaattcacaggatagcgtctggaagtcaaaatactcagtttcgacagttcaataagacatctataaaatcttcaaagaaatatttaaactcatttatggcttttagagcatattactcacagtttggctccggtgtaaaacaaaatgtcttgtcttctctgctcgctgaagaatggcacgcggacaaaatgcagcacggaatatgggactacttcgcgcaacagtataattttataaaccctggttttggttttgtagagtggttgacgaataattatgctgaagtacgtggtgacggatattgggaagatgtgtttgtacatttggccttatag

SEQ ID NO: 190847 - DNA, 783 bp, Saccharomyces pastorianus
atgtttgtactgatagataatgtcctcgcctaccttcttgaacaagacgacctatttgtaaccgcacgcttcgctatccagggccaaattgtctcaagaagagttaacaaaatacatatctccaacatcacagacgtccttctacaacaattcataagtcacacactgccctataatgacaatatcgtcccaaaaaaaatcctcgacagcatgagaacggccgtacggcagttgctggaagcaactgcctgtgtctctagagaatgccccctcgtcaaaagaagtcaggacataaaaagagcaagaaaacgtctactcagtgactggtataggctcggcgctgatgcaaacatggatgccgtattactagttgttaactccgcctggaggtttctggccgtctggcgacccttcgtaaactcaatccaacatgcaactcaggaattgtatcaaaatatcgcccattaccttcttcatggcaacgtaaatatacagagggtcacagcactactacagctcgtaatgggacaggacgatttactttttagtatggatgatgttctacaagaggtcttcagaatacagctctatttgaataagatgctgccgcacaactctcacaaatggcaaaagccatccccctttgactccgcaaacttactacttaacttcagagactggacaactgacaatgctctcctccaagagttgctactatcctatcccacaattaataaaaacaaacacaaaaatcactccgtccctcgtctaatacaagtttga

SEQ ID NO: 190848 - DNA, 1377 bp, Saccharomyces pastorianus
atgaatatgctcattgtcggtagagttgttgctagtgttgggggaagcggacttcaaacgctttgctttgttattggttgtacgatggttggtgaaaggtcacgtccattggtgatttccatcctaagttgtgcatttgctgtagctgctatcgttggtcctataatcggaggtgcctttacaacccatgttacctggaggtggtgcttctatatcaatcttcctatcggtggtcttgccattattatgtttttactcacatataaggccgagaataagggtatacttcaacaaattaaagatgctataggaacaatctcgagctttacttttagtaagttcagacaccaagttaattttaaaagacttatgaatggcataatcttcaagtttgacttctttggttttgccctctgctctgcagggctggtccttttcctactggggctaacctttggtggtaataaatatagttggaactctggccaagtcatcgcatatttggttttgggtgtcttactttttattttttcattggtgtacgatttcttcttattcgataaattcaacccggaacctgataatatatcctacaggcctctccttctaagaagattggtagcaaaaccagccataataataataaacatggtaacatttctattatgtaccggttacaatgggcaaatgatatactctgtccagtttttccaacttatatttgcgtcgagtgcatggaaagccggtcttcacttgataccaatcgttattaccaacgttattgcggccattgcaagtggtgtgattaccaaaaagctcggtttagttaaaccactcttaatatttggaggcgttcttggggtaattggagcagggcttatgacacttatgacaaatacgtccacgaagtcaactcaaattggtgttttgctattaccggggttttcccttggatttgctctacaagcatcgctcatgagtgcacagcttcaaattaccaaagatcgtccagaagctgctatggactttattgaagtaacagctttcaatacattcatgaagtcattaggtacaactcttggtggtgtgctttcaaccactgttttttccgcctcctttcacaacaaagtatcacgagctcatctagagccttacgaaggaaaaacggttgatgacatgattttgtatcgtcttcaaaactacgacggttctcattcgactattggaaacattttaagcgactccattaagaacgtattttggatggatctagggttttatgccttaggatttttgttttgtagtttttcatccaataagaaattaatcataccaaaaaaggacgagacaccagaagataatttagaagacaagtag

SEQ ID NO: 190849 - DNA, 1848 bp, Saccharomyces pastorianus
atgagttctagtgttgttggtgcctcaagtaataaaaaaagtggaattaggcagtcctgtgagattattgagcgagaacgtcactcaaacgatgacacgtactctatgacatcgaccttttttaagctcaaagaaaacgaaattatgtctgcacagtttgattccttgaaatataaaattctactgataagtaccgcgtttgtatgtgggtttggaattagtttagactacacacttagatcgacctatacgggctatgcgacgaactcatattcagaacactccttactttcaactgtccaagttatcaatgctgttgtaagtgtcggatcccaagttgtctactccagactctctgaccacttcggaagactaaggctttttttagttgcaactattttttatataatgggaaccatcattcaatcacaggcgacccgtctcacaatgtatgcagcaggatcggttttctataactgtggatacgtcggaacaaatctgctcctgacattaatactttctgatttctcctccttgaagtggagaatgttttaccagtacgcctcatattggccatatatcataataccatggatttcaggtaatattatcacagcagcaaatcctcagaaaaactggtcctggaatattgcaatgtgggcttttatttacccactctctgccttgccaattatatttcttattctttatatgaagtacaaatcttcaaagactgctgagtggagatctctcaaagaacaggctagaaaggaaagaacgggcggattatttgagaatttggtgtttctattctggaaactcgatattgttggcatattattaataactgtgtcgctagggtgtatccttgtccctttgacgttggctaatgagacatcacagaagtggcacaattcaaaaataattgccactttagtttcaggtggctgtttatttttcatttttttatattgggaggccaaatttgccaaatctcctcttctaccgttcaaattactaagtgatcgtggaatttgggcaccccttggtgttacttttttcaattttttcacctttttcatttcgtgtgactatctgtatcctgttttgctggtatcgatgaaagaatcgtccacttcggctgctcggatagtaaaccttcctgactttgttgctgctactgcatctccattctacagtttgttggtggcaaagacaaggaaactgaaactttctgtaatcggaggttgtgctgcatggatggtgtgcatgggccttttttacaaatacagaggaggatctgggtctcatgaaggtgttatcgctgcatctgttatcatgggtttgagtggtctcctatgcagcaattcagtgatcgtcatactgcaagccatgactacgcatagtaggatggctgtaataaccggcatccagtataccttttcaaagctaggcgctgctatcggtgcctccgtttctggtgccatatggacacaaaccatgcctaaccaactctacaagaaccttggaaacgatacattggcagaaatagcatatgcatcaccttatacattcattagtgattatccttggggctcacccgaaagagatgctgtggttgaatcttacagatatgttcaacgaataataatgacggttggcttggcatgtacggtaccgttctttgcgtttacaatgttcatgagagacccggaactaatagacaaggcgacacacgaagaattcactgaagatggtttggttgtcttgccagatgaggaaaatattttctctcaaatcaaggcactttttagacataatcgaagtaacaagaaattaggatgttga

SEQ ID NO: 190850 - DNA, 927 bp, Saccharomyces pastorianus
atggacgttgacactgcgtttctaaactcaaccatggatgagccgatctacgtaaaacaaccacccgggtttgttaacgagaggaatcccgactatgtatgggaactatacggcggtatgtatggactcaaacaagccccattactatggaacgaacatatcaacaatactcttaaaaagattggtttctgtcgacatgaaggcgaacatggcttatattttcgttccacatctgatggtcccatctacattgccgtatacgtagacgacttacttgttgctgctccctctcctaaaatatatgacagggttaagcaagaattaacgaaattatactcaatgaaggatctcggtaaagttgacaaattcctcggtcttaacattcatcaatcgtcaaacggagacatcactctctcccttcaagactatattgctaaagctgcatctgaaagcgaaataaacacatttaaacttacacagactccgctctgcaactcaaagcctcttttcgaaacaacttccccgcatctaaaagacatcactccttatcagagcatagttggtcagcttctcttttgtgcaaatactggtcgtccggacatatcgtatccagtctcattactctccaggttccttcgagaacctcgcgcaatccatttggagtctgctcggcgggttctacggtacctatataccaccagaagtatgtgtctcaagtatcgttctggatctcagttggcattaactgtatattgtgatgcatctcatggagctattcacgatctaccacactctactggggggtacgtgactctacttgctggtgctcccgttacgtggtcatcgaagaagctcaagggtgtgattcctgtaccatctactgaggcagaatacattactgcaagtgaaactgtcatggagatataa

SEQ ID NO: 190851 - DNA, 441 bp, Saccharomyces pastorianus
atgtatataatttacggagctgatcatcgcataagcaactgttctctgcttaaacgaagaataccagaagcacgaatctttaaattatatcctaatgacaaaacgagtagatcttcatctgctagtgtcgcgattcctgactatgaaacgcaaggccaaacagcaggacagataacaccgaagtcctggctctgtatgttatcttcgactgttccagctaccaaatcctcagaatggatttttgacacaggatgtacttcccacatgtgccacgaccgttccattttttcatcatttactagatcctctaggaaagactttgtcagaggagttggcggttccatacccatcatgggctccggaactgtaaacattggcactgttcaattacatgacgtatcttacgttcctgatttaccagttaacctgatatccgtttga

SEQ ID NO: 190852 - DNA, 744 bp, Saccharomyces pastorianus
atgacctataagctagatcgtaattcattacgtcaacaggttatgagccctcagagcaatgcttctgagaacataatcaatctatctagccccaacaattataaacagtggctgtacggtatcgagaccgctgctgaatatgctaacgaatatatgaacgaattcgttcataccggagatatccaatcaatgaaaagggattacaatctcagcgcgaatgatgaaagctttgtcaaaaccgtatttaacagtttcctggtaaagctctacaagaaaactatcgtgggtgaagctgcatgtgaaatgaactggatatgtgatgattcgcttggaagggtctctgcttatgatattttctcgcacttcgaagaaaactataatgaagtcactattggatccaggcttactcttatagaggacctaccaaatatatcctccaagcctgtagatgaaattgcttcctttttgaaaactctattcacgatgcttgaagacaatagcgaagaacaggacaaaaaaaaaagacgcgacaccaatatcgcgttgttattaatgaccttcttacccgagttaaaagaatcattccacgagaaattcggtgactctaaggctcttcagctatcacaagtcattagattctgtaaattaaatgcgtcatcgaattcatcatcttcggtctcagatgcattggttgcacaagacagaagaaactatcaaaagaaaggaaataagggatgtatataa

SEQ ID NO: 190853 - DNA, 1185 bp, Saccharomyces pastorianus
atggctgaaagtaccacgttagaaactattgagatacacccaattacttttccacctgaagttcttgcgagaatatctccagaattgtctttacaaagacacttatccctaggaatcaggccatgtctaagaaaatatgaagaatttagagatgttgctatagaaaataatactttatcgcgttatgcggatgctggtaatatagacactaaaaacaacattttaggctcaaatgttttgaaaagtgggaaaaccatagtcataacttctattacgggtggaataatagaagaaactagcgccgcgattaaagatttggatgatttcggtgaggaagaattgttcgaagtgaccaaagaggaggacataattgcaaattatgcttctgtctatccggtggtggaagttgaaagaggtagagtgggcgcttgcaccgatgaagaaatgactatatcacaaaaactacacgattccatattgcactctaggatattgcctaaaaaagccttgaaggtaaaagctggtgttcgtagtgcgaatgaagacggtacgttttccgtcttgtatcccgatgaattagaagatgatacgctgaatgaaacaaacctgaaaatgaaaagaaaatggtcatacgttttgtatgcgaaaattgtagtcttgagtcgcactggtccagtcttcgatttgtgttggaattctttgatgtacgctttacagagcgtaaagttacctagagcatttatagatgagcgtgcgtccgatttaagaatgactataagaacaagaggaagaagtgccaccataagagaaacgtatgaaattatttgcgaccaaactaagtcagtaccgttaatgataaacgcaaagaatattgcatttgcttcaaattatgggatagtggagttagaccccgaatgccaattacaaaactctgataactctgaagaagaggaagtggacattgatatggataaattgaacactgtgctaatagcagacctagatactgaagcggaagaaacaagtatacacagtacgatctccatcctcgctgctccttcaggtaactataagcaattaacattagtgggaggaggcgctaaaataacgccagaaatgataaaaagatcattgttgttatctagggttagagcggacgatttgtcaacaagatttaacatataa

SEQ ID NO: 190854 - DNA, 1002 bp, Saccharomyces pastorianus
atgggtattacagtaataggttctctaaactatgatttggacacatttacggatagattacctaacgctggagaaactttcagggctaaccacttcgaaacacatgctggtggtaagggattgaaccaagctgcggccattggtaaattaaaaaaccccagcagcagatatagtgttcgaatgattggtaatgttggaaatgatacatttggtaaacaattgaaggacactttatccgattgcggagtcgatatcactcacgtcggtacttacgaaggcattaatacgggtaccgctaccatactaattgaagagaaagctggtggccaaaataggatattgattgtagaaggtgctaacagcaagactatttatgacccgaaacagttgtgtgaaatttttccagagggcaaggaggaagaagagtatgttgtttttcaacacgaaattcctgatcctctttccattattaaatggatacatgcgaacaggccgaattttcagatcgtatataacccctcacctttcaaggccatgcctaagaaagattgggagttggtagaccttttggtcgttaatgaaattgagggtcttcaaatcgtggaaagtgtatttgataatgaacttgttgaagaaataagggagaagataaaggacgactttttaggagaatatcgtaaaatttgtgagcttttgtatgaaaaactcatgaatcgaaagaaaagaggaattgtggttatgactttgggttcgagaggggtgcttttctgttcgcacgaaagccctgaagtacaattccttccggctattcaaaatgtttcggttgttgatactacaggagctggagatactttcctgggcggtttggttactcaattgtatcaaggagagaccttgtctacggctataaagttctctacattagctagttcattgaccattcaaagaaaaggtgctgctgaaagcatgccactgtataaagatgttcagaaagatgcataa

SEQ ID NO: 190855 - DNA, 126 bp, Saccharomyces pastorianus
atgaattgttgtagaaggacgtctgtgatgttggagatatgtattttgttaactcttcttgagacgatttggccctggatagcgaagcgtgcggttacaaataggtcgtcttgttcaagaaggtag

SEQ ID NO: 190856 - DNA, 549 bp, Saccharomyces pastorianus
atgatattacttcatgccatatatactctttgggtaattatactacttccgctactcaatgcagagaaatttgtcccaaaagtaacggaggctcctatagaaacatcatttaatctagtgagttttgatgattccaacacttctatcagattagatggttggggggttgtatggataagtttcgacgctggagaaaattgggaaacggtcaaagaaattgaagagcgcattttcagatttactgttgatcctttccatggacaggaaagaggtttcgcttttatatgtgaatcacccaaattctacattaccgacgaccgtggggagtcatggagggctttaactataccctcatcagaagaatatttagatggcgactgttttataactactcatcctagaaacaaagaacttcttattgcgaattgctatagctatatgatagacgcagacgttttatatgacccaagtgaaatttacttgagcaatgatgggaatccttttttaaaattaaaccttccttggaaaagaaaaaagacgacgatataa

SEQ ID NO: 190857 - DNA, 375 bp, Saccharomyces pastorianus
atggtcaaattaacttcaatcgctgctggtgttgccgccatcgctgccggtattgccgctgccccagccactaccactctatctccatctgacgaaagggtcaacttggtcgaattgggtgtttacgtctccgatatcagagctcatttggctcaatactacttgtttcaagcagctcatccaactgagacctacccagttgagattgctgaagctgttttcaactatggtgacttcaccactatgttgactggtattccagctgaacaagtcaccagagtcatcactggtgtcccatggtactccactagattgagaccagccatctccagtgctctatctaaggacggtatctacactgctattccaaaatag

SEQ ID NO: 190858 - DNA, 1086 bp, Saccharomyces pastorianus
atgctttacccagaaaaatttcagggcatcggtatttccaacgcaaaggattggaagcatcctaaattagtgagttttgacccaaaaccctttggcgatcatgacgttgatgttgaaattgaagcctgtggtatctgcggatctgattttcatatagccgttggtaattggggtccagtcccagaaaatcaaatccttggacatgaaataattggccgcgtggtgaaggttggatccaagtgccacactggggtaaaaatcggtgaccgtgttggtgttggtgcccaagccttggcgtgttttgagtgtgaacgttgcaaaagtgacaacgagcaatactgtaccaatgaccacgttttgactatgtggactccttacaaggacggctacatttcacaaggaggctttgcctcccacgtgaggcttcatgaacactttgctattcaaataccagaaaatattccaagtccgctagccgctccattattgtgtggtggtattacagttttctctccactactaagaaatggctgtggtccaggtaagagggtaggtattgttggcatcggtggtattgggcatatggggattctgttggctaaagctatgggagccgaggtttatgcgttttcgcgaggccactccaagcgggaggattctatgaaactcggtgctgatcactatattgctatgttggaggataaaggctggacagaacaatactctaacgctttggaccttcttgtcgtttgctcatcatctttgtcgaaagttaattttgacagtatcgttaagattatgaagattggaggctccatcgtttcaattgctgctcctgaagttaatgaaaagcttgttttaaaaccgttgggcctaatgggagtatcaatctcaagcagtgctatcggatctaggaaggaaatcgaacaactattgaaattagtttccgaaaagaatgtcaaaatatgggtggaaaaacttccgatcagcgaagaaggcgtcagccatgcctttacaaggatggaaagcggagacgtcaaatacagatttactttggtcgattatgataagaaattccataaatag

SEQ ID NO: 190859 - DNA, 2499 bp, Saccharomyces pastorianus
atggattcgattacagtaaaaaaacctcggttaagattggtttgcctgcaatgcaaaaagatcaaacggaaatgtgataaactgcggcctgcttgctcgcgatgccaacaaaattcattacagtgtgaatatgaagagagaacagatttatctgccaatgttgcagcaaacgactctgatggattcaattcctctcataagctcaatttcgaacagcaacctgtacttgaaaggactgggcttagatattccttacaagtgcctgaaggtgtcgttaatgctacgctgtcgatatggaacgccgaagatatgctagttatagtaggattagttacatttctggattatccttttgctgcgcatagtctggcgcaacatgaccagtatatcagggcactttgtgcttcgttgtacggcatggcgcttgttgactttagcaattatgctaatggtattccttgtgaagacacatcaagaagtatactaggaccattgtcattcatagaaaaggccatttttagacggatagaacatagtaagcaatttcgagttcagtctgccgccttagggttattatacaatgcattttcaatggaagaagaaaacttctcgactcttctaccgtcactcatcgctgaagtggaagacgtgttgatgcaaaaaaaagactgtgaaatacttttgaggtgtttctatcaaaatatttatcccttctatccttttatggacatttcactctttgagagcgatctcactagtttgcttttacaagacgacaataatcgttggaaaattagtactgaagttaaaaatgtgcgcaaaaaaatagaaactttgtcattacttacaatagtaatggccatggccttgatgcattcaaaattggatgcaaatcttctttcaatggtaaaagaaaatgcctccgaaagtgccaggaaactttctcttttatgtcataaactattatgcctcctggatgtatttcgctatccaaatgagaacacttttacttgccttttatatttctacgtttcagagcatttagatcccgagagtcccgattgtgtactgagccccactaacttgcttactctgcaccatcttttaaatttgtccatgaccttaggtcttcaatatgagccttcgaagtacaaacgtttcaaagatccagaagtgataaggcagagacggatattatggttaggagttcagtcattactttttcaaatttctcttgctgaaggtgatgctggtaaatcaaatagtgaatatatggaggcatatttaacagacttcgaagaatatattgaagcttcctcagagtatgaaaaaagttctgcgagtgaatcgaacgtgcaaatgaatgatattgtttggaataagtacaaatttcacgtcattttgagtaaactaatgtctgattgcacttcagttatacaacatccgcagcttttccacattttaggaaatattaaaagatctgaagattttatggctgagaactttcctacaagttcgatttaccaaccccttcatgaaaaggaaccaaatgcgatcaaagttggcaaaagtacggttctcgatgtcatggatattcaaaaaactgaaatatttcttacaaatattgtgggaagtatgtgttttttaaacatttttgatgtcctatcgttacattttgaaaaaaaatgtgttatgcactgggaagaatatgaaaagaactatcatttccttactttgaaaagtttcaatgcatacttaaagctagcagggttgatatctgattatctcgagaataagtttcaagggaacattttagagagtcgcggttatatcatagataaacaaatatgttttatgcttgtaaggatctggatgttccaatgtcgtattttgttaaggttttcatacaagcaagaaagtcagaaaaaattggcctcttccagtatatccactaacgataatgaaaaagaagatgaaatgattgtcattttagaaagacttattaaacacattcgtaaccaaatggcacatttagtggatctagcaaagggaaaacttcaagatagttactttggtgcttaccaaactgttcccatgtttagatacgttgtgtatttgatcgatgttggcggcttagtatctgtgacaaatgggttttgggataagatttccagtgatggtgaaataccgccaaaagtacaacaagccgtgagattgaaatggggattggactgcaataattcgagaagaatcaaacaaaagttaataagcagccagagtttgcagagtttcaatcaagttctgttgtgccagatggaggatgcagttctctccagttccttcgcaataaaagccaataccgctatgtcccaaaacacggctgaagaatttttcaatatcagcgaagaagaggctttaaatcaactattggaaaacaacaattttgatgccttctgggatttattaggtgaaaatctgagcgatatgccttctttgtga

SEQ ID NO: 190860 - DNA, 1092 bp, Saccharomyces pastorianus
atgattgggtccgcgtccgactcatctagcaagttaggacgcctccgatttctttctgaaactgccgctattaaagtatccccgttaatcctaggagaagtctcatacgatggagcacgttcggattttctcaaatcaatgaacaagaatcgagcttttgaattgcttgatactttttacgaggcaggtggaaatttcattgatgccgcaaacaactgccaaaacgagcaatcagaagaatggattggtgaatggatacagtccagaaggttacgtgatcaaattgtcattgcaaccaagtttataaaaagcgataaaaagtataaagcaggtgaaagtaacactgccaactactgtggtaatcacaagcgtagtttacatgtgagtgtgagggattctctccgcaaattgcaaactgattggattgatatactttacgttcactggtgggattatatgagttcaatcgaagaatttatggatagtttgcatattctggtccagcagggcaaggtcctctatttgggtgtatctgatacacctgcttgggttgtttctgcggcaaactactacgctacatcttatggtaaaactccctttagtatctaccaaggtaaatggaacgtgttgaacagagattttgagcgtgatattattccaatggctaggcatttcggtatggccctcgccccatgggatgtcatgggaggtggaagatttcagagtaaaaaagcaatggaggaacggaggaagaatggagagggtattcgttctttcgttggcgcctccgaacaaacagatgcagaaatcaagattagtgaagcattggccaagattgctgaggaacatggcactgagtctgttactgctattgctattgcctatgttcgctctaaggcgaaaaatttttttccgtcggttgaaggaggaaaaattgaggatctcaaagagaacattaaggctctcagtatcgatctaacgccagacaatataaaatacttagaaagtatagttccttttgacatcggatttcctaataattttatcgtgttaaattccttgactcaaaaatatggtacgaataatgtttag

SEQ ID NO: 190861 - DNA, 192 bp, Saccharomyces pastorianus
atgccatactcaccttcacttatattgatggggcatacgcacacggatgctacagtatataccactctcaagttaccctactctcacactccaatccatggcccattctcactaaatcagtaccaaatgcacccacatcattatgcacggcacttgcctcagcggtctataccctgtgccatttacccataa

SEQ ID NO: 190862 - DNA, 1701 bp, Saccharomyces pastorianus
atggttacagaaaatcctcaacgtcttactgttttaagacttgccaccaataagggtccattagcacaaatatggcttgcttcaaatatgtcgaatataccaagaggatcggttatccaaacacatattgctgaatcagcaaaggaaattgcaaaagcttctggctgtgatgacgaatcaggggacaatgaatacataactttacgaacatctggcgaattacttcaaggcattgttcgtgtatattccaaacaggccacttttctccttacagatataaaggacacattaacgaagataagtatgttatttaaaacaagccagaagatgacttctacagtaaacagactgaacactgtaacaagggttcatcaattgatgttagaagatgccgttacagaaagagaagttttggtcaccccagggttagagttcttagatgatactactataccagtgggcttaatggcgcaggagaattcgatggaaagaaaagtccaaggtgctgctccctgggatacttcacttgaggtcggtagacgattcagtccagatgaagatttcgaacataataatttgtctagtatgaaccttgattttgacatcgaggaaggtccgataacttcaaaatcttgggaagaaggaacaagacaaagctcacgcaactttgatacgcacgaaaattacatacaagatgacgatttccctcttgatgatgctggaactattggttgggatctagggattaccgaaaaaaatgaccagaacaacgatgatgacgataactctgttgagcaaggaagaaggctaggtgaatcaatcatgtctgaggagcctacggattttggatttgatctggatatagaaaaagaagcacccgcaggcaatatagatacgataaccgatgccatgacagaatcacagccaaaacaaactggcacaagaaggaactcaaaattactgaataccaaaagtattcaaatcgatgaagaaacagaaaattcagaaagcatagcttcatccaatacatacaaagaggagagatcgaataatttattgactccacagcccaccaattttacgactaaaagattatggagtgaaataactgaaagtatgtcctatttaccagatccaatccttaagaacttcttatcctacgaatctctaaaaaaaagaaaaatacataatgggcgagaagggtcaattgaagaacctgagttaaacgtgtcgcttaatcttaccgacgatgtaattagtaatgcgggaacaaacgataactccttcaatgaactgaccgataacatgtcagacttcgtaccaattgatgctggcttaaatgaggctccttttcctgaagagaatatcatcgacgcaaagactagaaatgagcaaactaccatccaaactgaaaaagttcgtcctactcccggtgaggtggcttctaaagctattgttcaaatggcgaagattttaaggaaggaattaagcgaagaaaaagaagtaatattcacggatgtactaaaaagtcaagcaaatacagaaccagaaaatattactaaaagagaagccagtagaggatttttcgatattttatcacttgctacagaaggatgtattggtttgagtcaaacagaagcattcggaaatattaaaatagacgccaaacctgcactatttgaaaggtttatcaatgcttaa

SEQ ID NO: 190863 - DNA, 987 bp, Saccharomyces pastorianus
atgagccaacagaatatactacattatgatatggatgttacttccgtatcatgggtcaaggataacacataccagattactattcatgtcaaagccgtaaaagatatccctttgaaatatttatggtctttaaagattattggtgtcaacggtccctcaagcaccgtacaactttacggcaaaaatgagaagacatacctaatcagtgatccaacagattttacatccacttttcaggtttatgcttacccttcttctgacggttgcacagtttggatgccaaatttccaaatccagttcgaatatctacaaggtgatgctgctcagtactggcaaacttggcaatgggggacaaccaccttcgatttatcgacaggttgtaacaattatgacaatcaaggccactcacaaacggatttccctggattttattggacctaccagtgcaagggaaacaatgatggcacttgtacaaaagcctcgtcttcatccattactacttcatccattactacttcatccactactacttcatccactactacttcatccactactacttcatcctctactacttcatcctctactacttcatcctctactacttcatcctctactacttcatcctctactacttcatcctctactacttcatcctctactacttcatcctctactacttcatcctctactacttcatcctctactacttcatcctctactacttcatcctctacgaaaacttccactactacgtcatctactgtgaaaagctcttccactacatccattgattttactacttccgttgactcacatacttcatcaagcgtagccgatatttatcgttcaagaacatctactgatgtcaccacattagcagcttcaactagtcctttcagcagtttcacttcaagtgactctagtagttcaagcgatgtaaccagttcaaccattcaaactacttctgttgatccaaccacttaa

SEQ ID NO: 190864 - DNA, 584 bp, Saccharomyces pastorianus
atgagtagtttgtgtctacagcgtcttcaggaagaaaggtaagtagtagttttcctccttttatgcttacattctgtaggcatacacaatttcatccagcggtatactaacaaatcgatgaacttaacttgttttacttgaataacagaaaaaaatggagaaaggatcatccatttggattttatgccaaaccagttaagaaagctgatgggtccatggatttacagaaatgggaagctggtatcccaggcaaagaaggtacaaactgggcgggtggtgtgtacccaattacagtcgaatatccaaatgaatatccttcaaaacctccaaaggttaaatttccagccggattttatcatccaaacgtgtatccaagtggcacaatatgtttaagtattttaaatgaagatcaagattggagacccgccatcacgttaaaacaaattgttcttggggttcaggatcttttagactctccaaatccaaattcccctgctcaagagcctgcatggagatcattttcaagaaataaggcggaatatgacaagaaagttttgcttcaagctaaacagtactctaaatag

SEQ ID NO: 190865 - DNA, 2955 bp, Saccharomyces pastorianus
atgggtcctgccatacataatcaactatatgaatgtggattaaagactacgtctcaagatggcttcttgatggacaattatgaaactcaattatttcaatcgttgaacaggtttatcaatttcataaacaatgctaatcagtcagctagtaataaagaacaaaatacaaaattttgcaaatcctcctcaaattttttacgcttgaaactactaacggttctaagacaatggtgtgattcttcacgaagcaactgtacactggaggttagagatgttttgacccaatggtgggtcacacttttaaactttctaaattctgacacctcgcttcaaatagatactgcccttgaattgagcttgagcatagaactaacttccgtgtgtctcgagtgcctcagcaaaattatgaccatactaataatattgcctttccattcatccagagacatggaaatatactcacatcatcttttgctgaccattcattgcataacaaacaagttgattttgatttctaaaaactccaaaaaacttaaacgtacaaatagtgatgacaagtgctctataaacgacaagaagctgcaataccttaacaaatattcttccttgctgcgagcattcatcgggaagttaaatgcttacgcatttttttatctaccagaagactttcatttcgatacaattttgttattgacagtttctcctcaaatctcttcaagtattcaaacatctttgttttcatggaagaagagacaatataaattcaccgacgatcagggacaaatgatccgcactgaagcttttgaaaataaagatactaaattttttaagatcattgtttcttatattaaaaatgattttgtacttatgtcattttattggcactattggtatatcatacttcaatttatgaaattctctgattcagatgtaggaattaaaaaatcgacattgtcatgcatacctggctcagaaattttattgacgcatgtaaccactagattcttgaattcagatttgaataaattcacgcggattattaaacaaacgccgaatccaaggatagcaaatgagaatgtgacagagtcacatccaaatttcaagagtttgaatagtagcaatgctttaattacatctgaaaggattaatgattacgtattttctaattttaagacaatcaaattatgggaatgtcttagaagcctttcaggatgcattcttaaagaaaatcatccggaatacctggaaaatatgctttccttacatgagtctctattgatagactatgtctccactatttcagcgtacgattatattgcagcgaacgtcatttacaataaggttctccagtttattattttccagtttgaaagtttaccttctctgaaattcattcaatggaggtcgtggtacaatgggcttttgagtatgttaaggaccaaaaatgttaactgccagactgtttctttattatgccttttcaatatttggaagcacgtaaccattgaggaccgcgatgaaatagtaaaagtgctgttaagtgatttttgggagtcattgatttttgaaaacgaatttcctttgattagaattttatttatgaaggtattagtttttaaaatcattccaagtgttcaaaattcttcttcattacgattcttgccacatgatagaattaaacaactatatgaagagctactggtaaacaaggaggagttatttgagatgcaaaaacacgattcaaatgatatagtggcgcatagaaagaatgctctcgtttttaatggtaactcacgtttgatgatgattccaaaaaaaccaaatacagaggaccacttagtttataagattaatcatgataaaaatttaactacagaaagatttccctctgtcagctcagtggcaaatacaagacctaacgttatcttgaaaaatggtaaatacgcttatgatattttggacgaaatgacaagtaaagctgcctttcttcttgcagaaaagaagacccgactaaatcccaaaaaaaatcacaaaattatggatggctacgaaggaggtcaggaaaacgaagataatgatgaagactcagaagatagtggctcgcataaaaataagagaaaggaaggtaatagttctttatcggcaacactgaacacttggctttcaaaattttcaagtacttctgaagattcacagaagaagaaggaacaggcaaatgaattaggcaacgattttgaatatgatgaagatgtggctgattttgcagaaattttgccgaagcagtcatctagtaatattgaaaaaatttttaagcatggtaacaattcaggatcaatggtatcatataattcaagtatcaagctcaataggagggagaatatattgataggtccaccagagttgagattttctaatgaaatcaaggaacacaatagtattgctacaatattcaaactggtatttattcaaaccaatagaagagtcgtcgaaaaaatagatttggcgaacatgaaatgggggacaatccacggaggcagtaagtacatgaagcctttacccgtcccgaaagatttggttgcgagtgttgctaagaacgaaagtgagacgagaaacttagctaccttatgcggtaatggtctagattttgagataccggtgcctgattttaatatttttggcaaatgtatggaagatgagcaagatgtagccaaaattggtaatcagaatgtggaagatttgaaagttactggggggcgggaggtgacaatttggaagcagatccaagatatgaagttgagaacaaggatacaaaaaatctgtgttttaattgagacgttcaatgctacagtaagagaatattttgagttttccaatcgattagagcatgacggtatatttatagattttgaagtgaggaaacctagtagtaataattctattaatatcaaagtctga

SEQ ID NO: 190866 - DNA, 510 bp, Saccharomyces pastorianus
atggcagtaaatatcagcaaacagccaactagaagcttttccttagatgaagtaactgttcgtaatgaactcaaattatcacagggttttgttatgagaaaagacctcaaagggccgcgtttaatagtcacatcggggatgggatccaccttcagcaaatgctctttattcatctttaaagcagttatgatcttacacacctgcttaattgttaaatcaataagaatattttcgaaaaagaagaaaagaaacgggtctatgcataatatgtactacgcttctgttccttttctattgttctcgaatgcctattcgatagacttttcgcggcacgtaaacgagttcttggaaaaaaaacggtgcgaaatgataataccactgaaactacttgcagatcatacttatttgagcgaaatagaatacgtgtctctaaacgcagatggacaatatagtcagcttcaagacattttttttattcatgatgttttttttgtctattttcgtttttaa

SEQ ID NO: 190867 - DNA, 2454 bp, Saccharomyces pastorianus
atgtcggaagagaaaacgtacaaacgtgtagagcaggatgatcccgtgcccgaactggatatcaagcagggccccgtaagaccctttattgttaccgatccgagtgccgaattggcctcgttacgaaccatggtcactcttaaagagaagctgttagtggcctgtcttgctgtctttacagcggtcattagattgcatggcttggcatggcctgacagcgtggtgtttgatgaagtacatttcggtgggtttgcctcgcaatacattagggggacttacttcatggatgtgcatcctcctcttgcaaagatgttgtatgctggtgtggcatcgcttggtgggttccagggtgattttgacttcgaaaatattggtgacagctttccatctacgacgccatacgtgttgatgagatttttctctgcttctttgggggctcttactgttattttgatgtacatgactttacgttattctggtgttcgtatgtgggttgctttgatgagcgctatctgctttgccgttgaaaactcgtacgtcactatttctcgttacattctgttggacgccccattgatgtttttcattgcagctgcagtctactctttcaagaaatacgaaatgtaccctgccaactcgctcaatgcttacaagtccttgcttgctactggtattgctcttggtatggcatcttcatccaaatgggttggtcttttcacggttacatgggtgggtcttttatgtatctggagactatggttcatgattggggatttgactaagtcttccaagtccatcttcaaagtagcatttgccaaattggccttcttgttgggtgtgccttttgccctttatctggtcttcttttatatccacttccaatcattaactttggacggggatggcgcaagcttcttttcgcctgaatttagatctacactaaagaacaataagatcccccaaaatgtcgttgctgatgtcggcattggctccattatcagcttgcgtcatctctctaccatgggcggttatttgcattctcattcacacaattatccagctggttcggaacaacaacaaagcactttatatcctcacatggatgccaataacgattggttgttggaactttacaacgcacccggcgaatctttaacaacattccaaaacctaaccgatggtaccaaggtcagactattccacactgttacaagatgtagattacactctcatgaccataagccacccgtttcagaaagcagcgactggcagaaggaggtttcttgttatggttacagcggattcgacggtgatgctaatgatgactgggttgttgagattgataaaaagaattctgctcctggagttgcccaagaacgggtcatagctttggacacaaagtttagattgagacatgctatgacaggctgttatttgttttcccacgaagtcaagttgccagcttgggggttcgaacaacaagaagttacctgtgcctcctccggtagacatgatttaacattgtggtacgttgagaacaacagtaacccattgttaccagaagataccaagcgtatttcctataaacctgcaagcttcatttctaaatttattgaatcccataaaaagatgtggcatatcaataaaaatttggtcgaacctcatgtttatgaatcacaaccaacttcatggccattcttgctacgtggtataagttactggggtgaaaataacagaaacgtctatctattaggtaatgcgatcgtatggtgggctgtcaccgctttcatcggtattttcggattgattgttatcactgagctgttctcgtggcagttaggtaaaccaattttgaaggactccaaggttgttaacttccacgttcaggttattcactacttattgggttttgccgtccattatgctccatctttcttaatgcaacgtcaaatgtttttgcatcactacttacctgcttattatttcggtattcttgcccttggccacgccttggacataatagtttcttatgttttccgcagcaagagacaaatgggctacgcggtagtgatcactttccttgctgcttctgtgtatttcttcaagagcttcagtccaattatttacggtacaccatggactcaagaattgtgtcaaaaatcgcagtggttgtctggttgggactacaattgtaacacatacttttcttcattagaagagtacaaaaaccaaaccttgactaaacgtgaatctcaacctgccgccactagtacagttgaagaaatcactatagaaggggacggtccgtcgtatgaagatctcatgaacgaggatggcaagaaaatctttaaagacacagaaggtaatgaactagatccagaagttgtcaaaaaaatgttggaagaggagggagctaacattttaaaagtagaaaaaagggctgttttggaataa

SEQ ID NO: 190868 - DNA, 327 bp, Saccharomyces pastorianus
atgtattgcgaggcaaacccaccgaaatgtacttcatcaaacaccacgctgtcaggccatgccaagccatgcaatctaatgaccgctgtaaagacagcaagacaggccactaacagcttctctttaagagtgaccatggttcgtaacgaggccaattcggcactcggatcggtaacaataaagggtcttacggggccctgcttgatatccagttcgggcacgggatcatcctgctctacacgtttgtacgttttctcttccgacatgaccgtgcttgtagctgttagctgtttcttgataggctcttctgatactacctcgctttaa

SEQ ID NO: 190869 - DNA, 768 bp, Saccharomyces pastorianus
atggtatgtagagatgaatatacatgaaacggacgtgatataatgtgctatggaagaaaaaagtctcctttaatgtctgcaggataaataatcaagtggtctgaagaaaatttacagctacagtattactgcaaaccttgcaggcaaatatcagagagatctcaccagctacaacttggtaacagaaatttataagtttatggcacttgttaaaattgtttggaagttttcgaaattataatattggtcttcagaaacctggaaccacatgtgaactattttttttggataatgcattgcacagagcgtattagtgtatacgagaatctaaaaatttgaaactggctcataaaaacaggaacttttactaacagttatgattttttgttcccattttcttatcaataggccggcgttaaagcttacgaactaagaaccaaatccaaggaacaattagcttctcaattggttgacttgaaaaaggagttggctgaattgaaggtccaaaagttgtccagaccatctttgccaaagatcaagaccgtcagaaagagtatcgcctgtgtcttgaccgtcatcaacgaacaacaaagagaagctgttagacaattatacaagggtaagaagtaccaaccaaaggacttgagagccaagaagaccagagctttgagaagagctttgaccaaattcgaagcttcccaagttaccgaaaagcaaagaaagaagcaaatcgctttcccacaaagaaagtacgctatcaaggcttaa

SEQ ID NO: 190870 - DNA, 1587 bp, Saccharomyces pastorianus
atgtctgctaaagttccatctaacgccacgtttaagaacaaggaaaaacctcaagaggttcgcaaagccaacatcatcgctgcacgttctgttgcagatgccatccgtacttcattgggtcccaagggtatggacaagatgattaagacatctcgtggagaaatcatcatctctaatgatggccacaccattctaaaacagatggccattctgcatccggtggccagaatgctagtagaggtttctgccgcgcaggactcggaagccggtgatggtaccacttctgtggtgatcttgaccggagctctattgggtgctgctgagaggctgttaaacaagggcatccatccaaccatcattgcggactcctttcaaagtgctgcgaagagatctgtcgatattcttttagaaatgtgccataaggtttcgttgagcgatagagaacagctggttcgtgctgcatccacttctttgagttccaagattgtgtctcaatactcttcgtttttggcgcccttggcagtggactccgtattgaagatatctgatgaaaactctaagaatgttgacctgaacgatatcagactggtcaaaaaagttggtggtaccattgatgacacagaaatgatagatggtgtggtcttgacacaaacggcaatcaaatctgctggtggtccgacaagaaaggaaaaagcaaagattgggttaattcaattccaaatatctcctccaaagcccgacacagaaaataatatcatcgttaatgactatagacaaatggataagatccttaaagaagaaagagcgtatttgctaaatatctgtaaaaaaattaaaaaggccaagtgtaacgtgctgttgattcagaaatccatcttgagagatgcggtaaatgatttggctcttcatttcttgtcaaaattgaacataatggtggtaaaggatatcgagagagaagaaatcgagtttctgtcgaagggcttgggttgtaagccaattgctgatatagaattgttcaccgaagatagattgggttccgctgatttagttgaggagatcgatagcgatggttccaagatagttagagtaactggtataagaaacaataatgcaagaccaaccgtctctgttgttattcgtggtgcaaacaacatgatcattgatgaaacagagcgttccctccatgatgcactatgtgttattcgttgtctagtgaaagagagaggtttaatcgctggtggtggtgctccagaaattgaaatatcccgtaggttgagtaaggaagcaaggtctatggaaggtgtacaggcttttatttggcaagaatttgcctctgctttggaagttattccaacgactttggctgaaaacgcaggtttgaatagtatcaaagttgtcacagaattgcgctctaagcatgaaaatggtgaattgaatgacggtatctctgttagacgatctggtactacgaacacctatgaagaacacatcttacaacccgtacttgttagtacaagtgcaattaccttagcgtctgaatgtgttaaatccatcttacgtattgatgatattgcattcagccgttaa

SEQ ID NO: 190871 - DNA, 366 bp, Saccharomyces pastorianus
atggctaagacttcttcctcatcttcgtcttctaacagagaatggtcatcatctttattactgtcgccaaaggtggattgtccaagtaaaaccttttcccttttagaagcaaaatcatcaacttcgtttaaaccatacggattaatctcatccccaacttcagaggtcttagttctgtttgagcctttgcgtaccatattattctatacacccactctaatatgttttctcttcctccaaaactttttgtataaaagcatcagtgagatgagctatgatgagatgagcttcattattgaattttttttcattgcagaagcgcagtttgaaaatttttcatccgccctgcaaagtccaattttttga

SEQ ID NO: 190872 - DNA, 854 bp, Saccharomyces pastorianus
atggtatgtttgagatgaacaaaataataaagactgacaactgcagaacagagaggatcatagcaacctagtgcaagaaagagcctcgaagcgttaaacttttggaacgtaattcatccgttggctatgtctattcaatacagttagaatacgaaagctgtaatcaagtatatcggattattcgcaagcaaagaatcaaggaaaagaaagtgaaaatagcatacatctttaaattcagaggttttgctgaattttaatagggaagtttacgttatgattgttggccgtagatcgcctagcgtttgaccaaatttaattctcctaatttttttattgtaaaaaagccttccaacgaaataaattagttattggttttttttctctgttacgagggatatatgatgcctgtgcttgttagttcattataagtgctaataaaatactaacgttaataaaaatttggaatattatttcattttttatcctattaataggccggtgttaaagcttacgaactaagaaccaaatccaaggaacaattggcttctcaattggttgacttgaaaaaggagttggctgaattgaaggtccaaaagttgtccagaccatctttgccaaagatcaagaccgtcagaaagagtatcgcctgtgtcttgaccgtcatcaacgaacaacaaagagaagctgttagacaattatacaagggtaagaagtaccaaccaaaggacttgagagccaagaagaccagagctttgagaagagctttgaccaaattcgaagcttcccaagttaccgaaaagcaaagaaagaagcaaatcgctttcccacaaagaaagtacgctattaaggcttaa

SEQ ID NO: 190873 - DNA, 621 bp, Saccharomyces pastorianus
atgcacaaaaaaaaaattgaaaacggtcgcatttttgatctaaatggaccaacgatgaaggaactgctttactatacattcattgaaactgaagtgactggtgcatttttggtgtttagggaaaagactcaaaaccttgtttttgcctcgttaggtaatgataagctttttttattgggaaaggtggaaggcttcttgaagaaacatgagaaacaggatacaatgtacgatttacaggaactaaaagaggcagaaacatataagaaatcaatcgaaaattatacaatatgtttagaaaacaaaatgccattaccatcgggcgctattccctttgagttcctgtttggaacagattttcaacgtaaagtttggaatgagcttttaaacgtggaacacggccacgtcgtaacatatggtgatattgcaaagagaatagggaagccaactgccgcaagatctgtcggaagagcttgcggctcaaataacctggcattgttagtaccttgccatagaatcgttggtagcaatagaaaattaaccggatataaatggagctgtaaactgaaagaacagttattaaataatgaaaaggaaaatagcttaagccttagtagattgtag

SEQ ID NO: 190874 - DNA, 861 bp, Saccharomyces pastorianus
atgaaagccaagccactaagccaagatccaggctccaagcgttacgcataccgtataaataaggaagaaaatcgtaaggagttgaagcatgtaaagatcaatgaaagttctttggtgcaagaaggccaaaagatcgacttgccaaagaagagatattatcgtcaaagggcgcattccaacccattttcagatcaccagttagagtacccagtatctccccaggatatggattggtccaaattgtacccttactacaaaaacgcggaaaatggacaaatgacaaagaaggtgacgattgctgatattggctgtggattcggtgggttgatgatagatttatcaccagccttccctgaagatcttatcttagggatggaaattcgtgtgcaggttacaaattacgtggaggatagaattattgccttaaggaacaatacagcttcaaaacatggatttcaaaacattaatgtcttgagaggtaacgctatgaaattcttgcccaacttttttgaaaagggccagctttctaaaatgtttttttgtttccccgatcctcatttcaaacaaagaaagcataaggcaagaattatcactaacaccttgctgagtgagtacgcatatgttttgaaagagggcggtgtcgtgtacacaattacagacgtcaaagacctgcatgagtggatggtaaaacatttagaagagcatcctttatttgaacggttgagcaaagaatgggaagaaaacgatgaatgtgtgaaaataatgagaaatgccacagaagaaggtaaaaaagtggaaagaaagaagggtgacaagttcgtcgcttgtttcacaagattaccaacgccagccatattgtaa

SEQ ID NO: 190875 - DNA, 1074 bp, Saccharomyces pastorianus
atgtctcaaaatagtaaccctgcagtagttctagagaaagtcggcgatattgccatcgagcaaagaccaatccctaccattaaggacccccattatgtcaagttagctattaaagccactggtatctgcggctctgatattcattattatagaagcggtggtattggtaagtacatattgaaggcgccaatggttttaggtcatgaatcaagcggacaggttgtggaagttggtgatgccgtcacaagggtcaaagttggtgaccgtgttgctattgaacctggtgttcctagccgttactctgatgagaccaaagaagggagctataacctttgcccacatatggcatttgctgcaactcctccaattgatggtactcttgtgaagtactatttatctccagaagatttccttgtgaaattgccagaaggcgtcagttatgaagagggcgcttgtgtcgaacccttatcagtcggtgtacactctaataaattggctggggtccgctttggtaccaaagttgttgtatttggtgcaggtcctgtggggcttttaactggcgcagtcgcccgcgcttttggtgccaccgacgtcattttcgtcgatgtattcgacaacaagctacagagagcaaaagatttcggagccacaaacactttcaattcttcccagttttccaccgataaagcccaagacttggccgatggggtccaaaagcttttgggcggaaatcacgcagatgtggtgtttgagtgttcaggtgctgatgtttgcattgatgccgctgtcaaaacaactaaggttggaggtaccatggtgcaagtcggtatgggtaaaaactacactaattttccaattgctgaagttagtggaaaggaaatgaaattgattggatgtttccgttattcattcggtgattatcgtgacgctgtgaacttggttgccacaggaaaagtcaatgtcaagccattgataacccacaaatttaaatttgaagatgcagccaaggcttacgactacaacattgcccatggtggagaggtagtcaagactattatctttggtcctgaatga

SEQ ID NO: 190876 - DNA, 75 bp, Saccharomyces pastorianus
atgcattcaaataatagtcgccaaatactgatacctcatcaaaatgaaaatatgtttctaacggaactgtattag

SEQ ID NO: 190877 - DNA, 1152 bp, Saccharomyces pastorianus
atgaaagagaatgaagtcaaagatgagaaaagcgtagatgtgttatccttcaaacagctcgaatcccaaaagattgttctacctcaagatcttttcagaagcagctttacctggttttgttatgaaatttacaagtccttagcgtttcgcatctggatgctattatggctaccacttagcgtctggtggaaactttccaacaattgtatttacccacttatagtttcacttctggtcctgtttctgggaccaatatttgtccttgttatttgtggactttctcgtaagcgttccttatcgaaacaactcattcagttttgcaaagagattactgaaaacacaccaagttctgatcctcatgattgggaagtcgttgtagcaaatctaaattcgtacttatatgaaaataaggcttggaatactaagaatttctttttcaatgctacggattgtgagaaaatgttcagaacaactgttcttgaaccattttctttgaaaaaagataaagctgccaaggttaagtcatttaaggattctgtcccttatatcgaagaggctttgcaagtgtatgctacaggatttgacaaacagtggaagttgtttattactgaaaaatcatggagccctgttggcctggaagacgttcagcttcccaaggatattcatcggtccaagcttacttggtttttaaagcggattttcactatttactctctaccattatggcttgcttttttgaactgtatctgcgtgtcacagcatttttgccttgcatttcgtatcttgtgtcctggattgtttttcctcatgatggtgtggcttttccaaaatatgaggacgactgctttactcgtgaaaatggaacacaagatgcaattcttgttgactattataaatgagcaagaaagtggtgcgaatggatgggacgaaattgcaaggaaaatgaataggtacttgtttgagaaaaaagcctggaagaatgaagagtttttcttcgacgggattgactgtgaatggttttttagccacttcttctaccgccttctatctgcaaagaaatctatgtggcttttaccattgaatgtggaactatggccatatattaaagaagcgcaattgtcccgcaatgaagagtctttaatgaagaaatga

SEQ ID NO: 190878 - DNA, 1944 bp, Saccharomyces pastorianus
atgagagcatatggaaagaggggcccagttctcagaactccttttagatctaataaaggcttgccatcttcttccgatgttgaatttagtgatgacgatgtaaactccgtgattcctgatgtaagttctaccatttcgagcagtattgcagaccacccgatagagggattattggacgagcctagaaaggctcaggacagctcgtcgtcatttgatggtgcaaatgagaagccctcttcacaactggactcaaaaaggaatgaccaaaacgtcaaaattatcactagcagtgatacctcaatggcatttatgaaagatgaaaagttaagtgcctttaatttccttgatggttcaaaggcatctaagagaaaaagaagaagaacttaccaaaagcatgatgcgaacataacgtcttcaattgaaccagacgtacaagatgaagacagcattacaatgcacaatgaatttgaatcaataaggaaaatatacaatgacatcaatgaattcatattgaagctaccgagagctgacgatgatatactgaataaaatgcttgaaaatgagatgaagatggacgactctatagagaataatagcatacgcacatccaaagacaaaaaatatggcaaatttagaacaatattaataaacaaaaataaagaaaatgaaataatgggagaagaggtagatcagaaagctaacaccttgtccctaaataacgctgacaacagtaatgctgaaaaagaaggattaacttcaacaaatcactacaacgaattaaaaaatatgggagatacaataaaataccaggatgatattgagtttcttctgtccaattctaaaagtaatgacaatactacggtaccaatcaatgaatactttaaaaaacttttaaatttatccctaatgattattaatgacgaagaattttttcaatatgcgaaaagatatttcaaaaaggaaataattaagcttagttttgcgcaatttagatcggattttcctgaattaatcttattacagggttatttactacataaagttagtgaatcacaatccgatttcccgccaagctttgacaatttctctatcgaattaagtaaagatgatggtaaaatacggacaaaaaagaataagcatattaaaaaactctcacacctaaatttcgaagactttcttcggaagactcaattcaaaacgggactttattattcattatcactctgggaaatgcatggtaatttatcgttagatataatcaagagaatctccatccttgcttcaaataaggacttattcagtcggcacgttaagacttttattcctcttttagaaaaattaataaccgcttccgaattttgccacatgtatattgaacaacctgaaatgttcgattcactgataagcaacttgaataatcagtttaaggatatgcttgatgatgactcgttgattaaaatcctaatcttgttaacaaacatggaagtacataactatacgctatggaaagaggcagatatgatatttcaaagttcaatgaacacaattttggaaagcatacatccattgacagacgcgaaagttgataacatactcttgcatttagggctctgcctcaatatttgcagtagagaaaatagtcgtttaaaacttgacggcaaattatggtatgatatgaaaactatatttgttaaaatgatccgtgacggttctgacactgaaaataggttagtacagggcctgttttacttaaatttttcatttttaattaaacaacggaaagaaaatagtaatttagacccaggggagctcaatttgttactagtagagctggaagcatttaaatcggaaacatctcaatttaatgaaggtatttcaaataaaatcgaaatagcgttaaattacctaaaatcaatatacacgagtgaaagaattacaatataa

SEQ ID NO: 190879 - DNA, 390 bp, Saccharomyces pastorianus
atgtcttgttcgtttcatatatcaagtcctttaggctcttcttcttccttggagggcttttcttcattgaaggtggtggttgtagcctgtcaagctctttcgagggacctccttggtattgatcttgttctcttactccttttttggcgtccagataagcacccccattgggcttccgccacctgtgttctcagacagatttttggcacgaagttgttgtttttccaattccaaattaaacagtcttctttctacaacgttgatgttgactatgggagaagtcgtaatagaccttttgttctttcttgctggagcaacttcggtgcacaagctcttttcggcattattatgtaccccgagtggtatataggagcagcttctcctatttga

SEQ ID NO: 190880 - DNA, 5314 bp, Saccharomyces pastorianus
atggaatcccaacaattatctcaaaattcacccaatcttcatggtagcgcctatgcttcggttacttctaaggaagtcccatcaaatcaagatccgttagccgtttcagcttccaatttaccggaatttgatagagattccactaaggttaattctcaacaagagacaacacctgggacatcagctgttccagagaaccatcatcatgtctctcctcaacctgcttcagtaccacctccacagaatggacagtaccaacagcacggcatgatgaccccaaacaaagctatggcctctaactgggcacattaccaacaaccatctatgatgacgtgttcacattatcaaacgtcacctgcgtattatcaaccggacccacactatccgttgccacagtatatcccaccactgagtacttcctcacctgatccaatcgatttaaaaaatcaacactctgaaatacctcaagctaagacaaaggtgggaaataacgtcttaccaccacacactttaacatcagaagaaaacttttctacatgggttaaattttacatcagatttttgaagaactctaatctcggtgacatcattccaaatgaccagggtgaaatcaaaagacaaatgacttatgaagaacatgcgtatatatacaataccttccaagcatttgccccatttcatttattgccaacatgggtaaaacaaattttagaaattaattatgctgacatccttacagtcctttgtaaaagtgtgtccaaaatgcaaactaacaatcaagaattaaaggattggatagctcttgccaaccttgagtacgacggaagtacatctgctgatacatttgaaattacagtcagtacgatcattcagaggctaaaagaaaacaatatcaatgttagcgacagattggcctgtcaactaatacttaaaggtctatccggtgacttcaaatacctacgtaatcaatatcgtaccaaaacgaacatgaaactttcccaattattcgctgaaattcaattaatatatgacgaaaataaaatcatgaatctaaataaaccgtcccaatacaaacaacacagcgaatacaaaaatgtttctcgcacatctccaaacacgactaacacaaaggttacaactcgtaattatcagagaacaaatagttcaaaaccaagagcagcaaaagctcacaatattgctacatctagtaaattctcaagggtgaacaatgatcacattaatgaatcaaccgtttcatcacaatacttaagcgatgacaacgaacttagtcttaggccagcaacagaaagaatctaagccaacacacacaatagactcgaatgacgaactacctgatcaccttcttattgattcaggagcttcgcaaacgcttgtcagatcagcccattatttacaccatgcaacacccaattctgaaataaacatagtcgatgctcaaaaacaagacattcctataaatgccattggtaatcttcacttcaactttcagaacggcaccaaaacatcaataaaagcactacacacaccaaacatagcctatgatctattaagtttgagtgagctggctaatcaaaatattactgcctgctttaccagaaacactttagaaagatcggatggtacagtactagctcccatagtcaaacatggagacttttactggttatctaaaaaatacctaattccttcgcacatttcaaagctaacaataaacaacgtcaacaaaagcaaaagcgtaaataaatatccatatccgttaatacatcgaatgcttggacatgctaacttccgaagtattcagaagtctcttaagaagaatgcagttacatatttgaaggaatcggatattgaatggtctaacgctagcacatatcaatgtcctgactgtctaatcggcaaaagcacgaaacatagacatgtcaaaggatcacgactaaagtaccaagaatcatatgagccttttcagtacttgcataccgatatatttggtcctgtacatcacttaccgaaaagtgcaccttcttactttatatcgtttacagatgagaaaaccagattccaatgggtgtacccattacacgaccgtcgtgaagaatctatcctcaatgtttttacatcgatattagcatttattaagaaccaattcaatgctcgcgttctagttatccagatggatcgtggctccgagtacactaacaaaactcttcataagttctttacgaacagaggtattactgcatgctatacaaccacggcagattctagagcacacggtgtcgctgaacgattaaatcgtactttattaaacgattgtcgcacactgcttcattgcagtggtctaccaaatcatctatggttctcagcagtcgaattttctactataatcagaaattcattagtctcaccaaaaaacgataaatctgcaagacaacatgcaggtttagctggactggacattactactatactacctttcggtcaaccggttatagttaacaaccataatcccgactcgaaaatacatcctcgtggcattccaggttacgccttacatccgtcacgaaactcttatggctatattatctatcttccatcattaaaaaagacagtagatactaccaattacgttatattacaagacaagcaatccaaattggaccaattcaattatgatacactcacctttgatgatgatctcaatcgtttaacagcccataaccaatcttttattgaaaaaaatgaaacagagcagtcatatgatcaaaatacagaatctgatcatgactatcaatcggagattgaaataaactctgatcctctagtgaacgacttctcgtcccaatcaataaaccctttacaattagacaaggaaccagtccaaaaagtacgtgcaccaaaagaagttgatgccgacatatctgaatacaatattcttccatctactatacgatctcgtacaccccatatcattaataaagagagtaccgaaatgggtggtaccattgaatcagatactacttcacctagacactcgtctaccttcactgcacgaaaccaaaagcgacctggtagtcccaatgatatgattgatttgacctcacaggatagagttaattatggacttgaaaacatcaaaactacacgtttgggtggtacggaggaaccatatattcaacgaaatagtgatacaaatatcaaatacaggactacaaatagtacgccctcaatagatgaccgttcgtccaacagtgaatccactactcccatcatctccatagaaacaaaggctgcatgcgataatacaccctccattgatacggatccgccagaatatcgatcttctgaccatgcgactcctaatataatgcctgacaaatcctcaaaaaatgttacggctgattctattcttgacgacctcccacttcctgacttaactaataaatctcctacggacacttctgatgtttcaaaagatattccacacatacactctcgtcagactaattccagtttgggtggtatggatgattctaatgttctgactactaccaaaagtaagaaaagatcattagaagataatgaaactgaaattgaggtatcccgagacacatggaataataagaatatgagaagtctggaaccaccaagatcgaagaaacgtataaatctaattgctgcaataaaaggagtaaaatcaatcaaaccagttcgaacgaccttaagatatgatgaagcaattacatataatgaagacaacaaagaaaaagacagatatattgaagcttatcataaagaaattaaccaactattgagaatgaacacttgggatacaaacaaatattatgatagaaatgacatagatcctaagaaagtaataaactcaatgtttatatttaacaaaaaacgtgatggtacacacaaagctagatttgttgcaagaggcgacattcaacaccccgatacatatgattctgatatgcaatccaataccgtacatcactatgcactgatgacgtcattgtcaatcgcattagacaatgactattatatcacacagctggacatatcctctgcttacttatatgctgatatcaaagaagaattatacataagacctccaccacatttaggtttgaatgataagttactacgtttgagaaaatcactctatggtttgaaacaaagtggtgcaaactggtatgaaaccattaaatcatatttaataaattgttgcgacatgcaagaagttcgcggatggtcatgcgtatttaagaatagtcaagtaacaatttgcttattcgttgatgatatgatattattcagcaaagacttaaatgcaaataagaaaatcataacaacactcaagaaacaatacgatacaaagataataaatctgggtgaaggtgataacgaaattcagtacgacatacttggattagagatcaaatatcaaagaagcaagtacatgaaattaggtatggaaaaatccttgacagaaaaattacccaaactaaacgtacctttgaacccaaaaggaaagaaacttagagctccaggtcaaccaggtcattatatagaccaggatgaactagaaatagatgaagatgaatataaagagaaagtacatgaaatgcaaaagttgattggtctagcttcatatgttggatataaatttagatttgacttactatactacatcaacacacttgctcaacatatactattcccctctaggcaagttttagacatgacatatgagttaatacaattcatgtgggacactagagataaacaattaatatggcacaaaaacaaacctaccaagccagataataaactagtcgcaataagcgatgcttcatatggtaaccaaccatattacaagtcacaaattggtaacattttcctactcaacggaaaagtgattggaggaaagtcgacaaaggcttcgttaacatgcacttcaactacagaagcagaaatacacgcagtcagtgaagctataccgctattgaataacctcagtcaccttgtgcaagaacttaacaagaaaccaattattaaaggcttacttactgatagtagatcaacgatcagtataattaagtctacaaatgaagagaaatttagaaacagattttttggcacaaaggcaatgagacttagagatgaagtatcaggtaataatttatacgtatactacatcgagaccaagaagaacattgctgatgtgatgacaaaacctcttccgataaaaacatttaaactattaactaacaaatggattcattag

SEQ ID NO: 190881 - DNA, 3276 bp, Saccharomyces pastorianus
atgagcgagggaactgtcaaagaaaacaataatgaagaattcaatgcttatcacacattgactacagaagaagccgctgaatttataggcacaagtctgactgaaggtcttactcaagatgagtccctccgcagactgaaagcagtgggagagaacacattgggtgatgataccaaaattgactataaagcaatggtcctccatcaggtatgtaatgcaatgattatggtcttggtaatatccatggcgatctctttcgctgtgcgcgactggattactggtggcgttatttcttttgttatcgcggtcaatgtgctcattggcctagttcaagaatataaggctaccaagacaatgaactctttgaaaaacttgagctctcccaatgctcatgttattaggaacgggaaaagtgagactataaactcaaaagatgtggttccaggtgatatttgtctggtgaaggtcggtgatactattcctgctgatttgcgtttaattgaaactaagaattttgatactgatgaatcactactgaccggtgaatctttgcctgtctccaaagacgccaacttagtgtttggaaaagaagaagaaacctccgtgggtgatcgtttgaatttagcattttcttcatccgccgttgtcaagggaagagccaagggtattgtcatcaagacagctttgaatagtgaaattggtaaaattgcaaaatctctacaaggtgattcaggtctcatttcccgcgatcctagtaagtcgtggttacagaatacatggatatctacaaagaaagttactggtgcatttttaggtacaaatgtcggtacgcccctgcacaggaaactgtctaagttggcggtattgcttttctggattgccgtactttttgctatcatcgtcatggcctctcaaaagtttgacgtagataaaagggtagctatctatgccatttgtgtggccctatccatgattccctcttcattagtcgttgtcttgaccatcaccatgtctgttggggctgctgttatggtttctagaaacgttattgtaagaaaattagattctctggaagctttaggtgccgttaacgatatctgttctgacaagaccggtactcttacacagggtaaaatgttagcgaggcaaatttggatccctcgctttggtaccataactatctcgaattctgatgacccctttaatcccaatgagggcaacgtgagtttgattccaaggttttcaccttacgaatattctcataatgaggatggtgacgttggtattctccagaatttcaaggatcgcctatacgaaaaagatttaccagaagatattgacatggatctatttcaaaaatggctcgaaaccgccactttggctaacattgctactgttttcaaagatgacgcaactgactgttggaaagctcatggtgacccaacagaaattgcgattcaagtgtttgctactaagatggacttgcctcacaatgcccttaccggtgagaaatcgactaatcaaagtaatgagaatgaccaatcctctctttcacaacacaatgagaagcctggcagtgcacaattcgaacatattgctgaattcccattcgactcaactgtgaagcgaatgtcatctgtctactacaacaatcacaacgaaacatataatatttatggcaagggtgctttcgaaagcatcatcagttgttgcagttcttggtatggtaaggatggtgtaaaaatcacaccattgaccgattgtgatgtcgaaacgataaggaaaaatgtttacagtctatcaaatgagggtttaagagtcttgggttttgcctccaaatctttcactaaagatcaagtgaatgacgatcaattgaaaaacattacttcaaacagggccaccgcagaaagtgatttagttttcctagggttgattggtatttacgatccacccagaaatgagactgccggtgcagtcaagaagtttcaccaagctggtattaacgttcatatgttaactggggactttgtgggtacagcaaaggctatcgctcaggaggttggcatcttacccaccaatttgtaccattactcccaagagattgttgacagtatggtcatgaccggatctcagtttgacggactaagtgaggaggaagtggacgatttgcccgtcttacctttagttattgcacgttgctctccgcagactaaggtgagaatgatcgaagctttacaccgtaggaagaagttctgcgcaatgacaggtgacggtgttaacgattctccatctctaaaaatggccaatgttggtattgcaatgggtattaatggttcagatgtttccaaagaagcgtctgatattgttctaagcgatgacaattttgcttctattttgaatgctgtcgaagaaggtcgtaggatgacggataacattcagaagtttgtcctacaattattggcagaaaatgttgctcaggctttgtatttgatcattggtttagtattcagagatgagaacggaaaatcagtatttcccttatcaccagtggaagtattgtggattattgtcgtcacctcttgttttcctgctatggggctaggtctagaaaaggctgctccagatttgatggatagacctcctcatgattcagaggttggtattttcacgtgggaggttattatagatacatttgcatatgggattataatgacagggtcctgtatggcttcatttactggatcactgtatggaataaatagtggtagattggggcacgattgtgatggcacctataacagcagttgtcgtgatgtttatagatcacgttctgcggctttcgcaaccatgacgtggtgcgctttgattctggcttgggaagtggttgacatgagaagatcctttttcagaatgcatccagacactgacagcccagtcaaggaatttttcagaagtatttggggaaaccagtttttgttctggtcaatcatttttggatttgtgtcagccttccccgtcgtctatattccggttattaatgataaagtgtttttgcataaaccaattggtgctgaatggggtctcgccattgcattcacaattgcattctggataggtgctgaactttacaagtgtggaaagaggcgctatttcaaaactcagagagcgcacaacccggagaatgatttggagagtaacaataagcgcgatccattcgaagcgtatagtacttctactacaatccatacagaagttaatattggtattaaacaatga

SEQ ID NO: 190882 - DNA, 333 bp, Saccharomyces pastorianus
atgctttcgttttgtccttcgtgtaacaatatgctactgataacgagtggcgatagtggtgtatatacattagcatgccgttcatgtccatatgagtttcctatagagggtatagaaatctatgataggaagaaacttccaagaaaggaagttgatgatgttcttggtggtggttgggacaatgtggatcaaaccaaaacccaatgtcccaattatgatacttgtggtggtgagagtgcttactttttccaactacaaattaggtcagctgatgagccgatgactaccttttataagtgtgtaaactgtggtcatagatggaaggaaaattaa

SEQ ID NO: 190883 - DNA, 5269 bp, Saccharomyces pastorianus
atggaatcccaacaattatctaattacccacatatatctcatggtagcgcctgtgcttcggttacttctaaggaagtccacacaaatcaagatccgttagacgtttcagcttccaaaattcaagaatatgataaggcttccactaaggctaactctcaacagacaacaacacctgcttcatcagctgttccagagaacccccatcatgcctctcctcaacctgcttcagtaccacctccacagaatgggccgtacccacagcagtgcatgatgacccaaaaccaagccaatccatctggttggtcattttacggacacccatctatgattccgtatacaccttatcaaatgtcgcctatgtactttccacctgggccacaatcacagtttccgcagtatccatcatcagttggaacgcctctgagcactccatcacctgagtcaggtaatacatttactgattcatcctcagcggactctgatatgacatccactaaaaaatatgtcagaccaccaccaatgttaacctcacctaatgactttccaaattgggttaaaacatacatcaaatttttacaaaactcgaatctcggtggtattattccgacagtaaacggaaaacccgtacgtcagatcactgatgatgaactcaccttcttgtataacacttttcaaatatttgctccctctcaattcctacctacctgggtcaaagacatcctatccgttgattatacggatatcatgaaaattctttccaaaagtattgaaaaaatgcaatctgatacccaagaggcaaacgacattgtgaccctggcaaatttgcaatataatggcagtacacctgcagatgcatttgaaacaaaagtcacaaacattatcgacagactgaacaataatggcattcatatcaataacaaggtcgcatgccaattaattatgagaggtctatctggcgaatataaatttttacgctacacacgtcatcgacatctaaatatgacagtcgctgaactgttcttagatatccatgctatttatgaagaacaacagggatcgagaaacagcaaacctaattacaggagaaatccgagtgatgagaagaatgattctcgcagctatacgaatacaaccaaacccaaagttatagctcggaatcctcaaaaaacaaataattcgaaatcgaaaacagccagggctcacaatgtatccacatctaataactctcccagcacggacaacgattccatcagtaaatcaactactgaaccgattcaattgaacaataagcacgaccttcatcttaggccaggaacttactgaatctacggtaaatcacactaatcattctgatgatgaactccctggacacctccttctcgattcaggagcatcacgaacccttataagatctgctcaccacatacactcagcatcatctaatcctggcataaacgtagttgatgctcaaaaaagaaatataccaattaacgctattggtgacctacaatttcacttccaggacaacaccaaaacatcaataaaggtattgcacactcctaacatagcctatgacttactcagtttgaatgaattggctgcagtagatatcacagcatgctttaccaaaaacgtcttagaacgatctgacggcactgtacttgcacctatcgtaaaatatggagacttttactgggtatctaaaaagtacttgcttccatcaaatatctccgtacccaccatcaataatgtccatacaagtgaaagtacacgcaaatatccttatcctttcattcatcgaatgcttgcgcatgccaatgcacagacaattcgatactcacttaaaaataacaccatcacgtattttaacgaatcagatgtcgactggtctagtgctattgactatcaatgtcctgattgtttaatcggcaaaagcaccaaacacagacatatcaaaggttcacgactaaaataccaaaattcatacgaaccctttcaatacctacatactgacatatttggtccagttcacaacctaccaaatagtgcaccatcctatttcatctcatttactgatgagacaacaaaattccgttgggtttatccattacacgaccgtcgcgaggactctatcctcgatgtttttactacgatactagcttttattaaaaaccagtttcaggccagtgtcttggttatacaaatggaccgtggttctgagtatactaacagaactctccataaattccttgaaaaaaatggtataactccatgctatacaaccacagcggattcccgagcacatggagtcgctgaacggctaaaccgtaccttattagatgactgccgtactcaactgcaatgtagtggtttaccgaaccatttatggttctctgcaatcgaattttctactattgtgagaaattcactagcttcacctaaaagcaaaaaatctgcaagacaacatgctggcttggcaggacttgatatcagtactttgttacctttcggtcaacctgttatcgtcaatgatcacaaccctaactccaaaatacatcctcgtggcatcccaggctacgctctacatccgtctcgaaactcttatggatatatcatctatcttccatccttaaagaagacagtagatacaactaactatgttattcttcagggcaaggaatccagattagatcaattcaattacgacgcactcactttcgatgaagacttaaaccgtttaactgcttcatatcattcgttcattgcgtcaaatgagatccaagaatccaatgatcttaacatagaatctgaccatgacttccaatccgacattgaactacatcctgagcaaccgagaaatgtcctttcaaaagctgtgagtccaaccgattccacacctccgtcaactcatactgaagattcgaaacgtgtttctaaaaccaatattcgcgcacccagagaagttgaccccaacatatctgaatctaatattcttccatcaaagaagagatctagcaccccccaaatttccaatatcgagagtaccggttcgggtggtatgcataaattaaatgttcctttacttgctcccatgtcccaatctaacacacatgagtcgtcgcacgccagtaaatctaaagatttcagacactcagactcgtacagtgaaaatgagactaatcatacaaacgtaccaatatccagtacgggtggtaccaacaacaaaactgttccgcagataagtgaccaagagactgagaaaaggattatacaccgttcaccttcaatcgatgcttctccaccggaaaataattcatcgcacaatattgttcctatcaaaacgccaactactgtttctgaacagaataccgaggaatctatcatcgctgatctcccactccctgatctacctccagaatctcctaccgaattccctgacccatttaaagaactcccaccgataaattctcatcaaactaattccagtttgggtggtattggtgactctaatgcctatactactatcaacagtaagaaaagatcattagaagataatgaaactgaaattaaggtatcacgagacacatggaatactaagaatatgcgtagtttagaacctccgagatcgaagaaacgaattcacctgattgcagctgtaaaagcagtaaaatcaatcaaaccaatacggacaaccttaagatacgatgaggcaatcacctataataaagatattaaagaaaaggaaaaatatatcgaagcataccacaaagaagtcaaccaactattgaaaatgaatacttgggacactgacaaatattatgacagaaaagaaatagaccctaaaagagtaataaattcaatgtttatcttcaacaggaaacgtgacggtactcataaagctagatttgttgcaagaggtgatattcagcatcctgacacttacgactcaggcatgcaatccaataccgtacatcactatgcattaatgacatccctgtcacttgcattagacaataactactatattacacaattagacatatcttcggcatatttgtatgcagacatcaaagaagaattatacataagacctccaccacatttaggaatgaatgataagttgatacgtttgaagaaatcactttatggattgaaacaaagtggagcgaactggtacgaaactatcaaatcatacctgataaaacagtgtggtatggaagaagttcgtggatggtcatgcgtatttaagaatagtcaagtaacaatttgcttattcgttgatgatatgatattgttcagcaaagacttaaatgcaaataagaaaatcataacaacactcaagaaacaatacgatacaaagataataaatctgggtgaaggtgataacgaaattcagtacgacatacttggattagagatcaaatatcaaagaagcaagtacatgaaattaggtatggaaaaatccttgacagaaaaattacccaaactaaacgtacctttgaacccaaaaggaaagaaacttagagctccaggtcaaccaggtcattatatagaccaggatgaactagaaatagatgaagatgaatacaaagagaaagtgcatgaaatgcaaaagttgattggtctagcttcatatgttggatataaatttagatttgacttactatactacatcaacacacttgctcaacatatactattcccctctaggcaagttttagacatgacatatgagttaatacaattcatgtgggacactagagataaacaattaatatggcacaaaaacaaacctaccaagccagataataaactagtcgcaataagcgatgcttcatatggtaaccaaccatattacaagtcacaaattggtaacattttcctactcaacggaaaagtgattggaggaaagtcgacaaaggcttcgttaacatgcacttcaactacagaagcagaaatacacgcagtcagtgaagctattccgctattgaataacctcagtcaccttgtgcaagaacttaacaagaaaccaattattaaaggctcacttactgatagtagatcaacgatcagtataattaagtctacaaatgaagagaaatttagaaacagattttttggcacaaaggcaatgagacttagagatgaagtatcaggtaataatttatacgtatactacatcgagaccaagaagaacattgctgatgtgatgacaaaacctcttccgataaaaacatttaaactattaacaaacaaatggattcattag

SEQ ID NO: 190884 - DNA, 2559 bp, Saccharomyces pastorianus
atgagttctgtcaaccaaatatatgacctatttcccaataagcataatatccaatttacagattctcattcacaggagcatgatacttcgtccagccttgctaagaatgatacagacggaactataagtataccaggtagtatagacactggcattttaaagagcattattgaggagcaaggttggaatgacgctgagttatatagaagttcaatacaaaatcaaagattttttttaacggataaatacactaaaaagaagcatttgactatggaggacatgcttagcccagaagaagaacaaatatatcaggaacctattcaagatttccaaacatataacaaacgtgttcaaagggaatatgagctcagggaaaggatggaagaattcttccgtcaaaacaccaaaaatgatttacatattttaaacgaggattcattaaatcagcaatattccccgttaggacctgcagattatgttctgcccctcgatagatactccagaatgaaacacattgcctcaaactttttcagaaaaaaacttggtattcctagaaaactgaaaagaagaagccattataatcccaacgcagagggccacaccaaagggaattcttctatattgagttccactactgatgtaattgataacgccagctacaggaatattgcaatagatgaaaatgttgacataacacataaagaacacgccattgacgaaataaacgagcagggtgcatcaggtagtgaatctgttgtggaaggtggatcgttattgcatgacattgaaaaggttttcaataggtccagggcaactaggaaataccatatccaacggaaattaaaagtgcgccatattcaaatgctttctatcggggcttgctttagtgtcggattatttttaacctcagggaaagccttttctattgccgggccatttggtacactacttgggtttggactcacaggtagcatcattttagccacaatgctgtcatttacagagttatccacccttattcctgtgtcttctgggttctcaggactggcttctagatttgtagaggatgctttcggatttgcattgggctggacgtattggatttcctgtatgcttgctcttcctgcccaagtttcctcaagtacattctatctcagctattataataatgtcaatatatcaaagggagtaacagcagggtttatcacgctgttttctgcatttagcattgtagtaaatttactggatgtcagcataatgggtgaaattgtatatgttgctggaataagcaaagtgataattgcaattttgatggttttcacgatgatcatcctaaatgccggacatggaaatgacattcacgaaggagtcggttttagatattgggatagctctaaatctgtccgaaatttgacctacgggctatatcgtccaacatttgacctggctgatgctggcgaaggaagcaaaaaaggaatttcaggcccaaaaggccgatttttagctacggcatcagtaatgctaatttcaacatttgcgtttagcggtgttgagatgacttttttagctagtggggaagctataaatccaaggaaaacaattccttctgctacaaaaaggacattttccattgtactgatatcttacgtttttttgattttttcggtaggcatcaacatatacagtggcgatccaagactactatcatattttcctggtatttccgaaaagaggtatgaagccattataaaaggcacaggaatggactggagacttaggactaattgtcgcggcggtattgattataggcagatttcagtaggaacaggttattctagtccttgggttgttgcattgcagaactttgggctatgtactttcgcatctgcttttaacgcaatactgatatttttcactgctacagcagggatatcctcgttatttagttgttcaagaacactatacgccatgtctgtacaacggaaggcaccgccagttttcgaaatttgcagcaagagaggtgttccttatgtttcagtgatattctcctctttattttcagtcattgcttatattgcagttgaccaaaccgcgattgaaaacttcgacgtcttggccaatgtttctagtgctagtacgtctattatatggatgggattgaatctttcctttttgcgattctattacgccctaaaacaaaggaaggatattatatcaagaaatgattcatcatacccatataaatcgccattccaaccatatctagcgatttatggtctagttggatgttcattatttgttatatttatgggatatcctaactttatacatcatttctggagtactaaagcttttttttcagcatatggtggcctgatgtttttctttatcagttacacagcttataaggttctcggaacgtcaaagattcaaagactagatcagttagatatggacagtgggaggagggaaatggacagaactgactggaccgaacatagccaatatttgggaacatatagggaaagagcgaagaagttggttacctggctgatttag

SEQ ID NO: 190885 - DNA, 5269 bp, Saccharomyces pastorianus
atggaatcccaacaattatctaattacccacatatatctcatggtagcgcctgtgcttcggttacttctaaggaagtccacacaaatcaagatccgttagacgtttcagcttccaaaattcaagaatatgataaggcttccactaaggctaactctcaacagacaacaacacctgcttcatcagctgttccagagaacccccatcatgcctctcctcaacctgcttcagtaccacctccacagaatgggccgtacccacagcagtgcatgatgacccaaaaccaagccaatccatctggttggtcattttacggacacccatctatgattccgtatacaccttatcaaatgtcgcctatgtactttccacctgggccacaatcacagtttccgcagtatccatcatcagttggaacgcctctgagcactccatcacctgagtcaggtaatacatttactgattcatcctcagcggactctgatatgacatccactaaaaaatatgtcagaccaccaccaatgttaacctcacctaatgactttccaaattgggttaaaacatacatcaaatttttacaaaactcgaatctcggtggtattattccgacagtaaacggaaaacccgtacgtcagatcactgatgatgaactcaccttcttgtataacacttttcaaatatttgctccctctcaattcctacctacctgggtcaaagacatcctatccgttgattatacggatatcatgaaaattctttccaaaagtattgaaaaaatgcaatctgatacccaagaggcaaacgacattgtgaccctggcaaatttgcaatataatggcagtacacctgcagatgcatttgaaacaaaagtcacaaacattatcgacagactgaacaataatggcattcatatcaataacaaggtcgcatgccaattaattatgagaggtctatctggcgaatataaatttttacgctacacacgtcatcgacatctaaatatgacagtcgctgaactgttcttagatatccatgctatttatgaagaacaacagggatcgagaaacagcaaacctaattacaggagaaatcggagtgatgagaagaatgattctcgcagctatacgaatacaaccaaacccaaagttatagctcggaatcctcaaaaaacaaataattcgaaatcgaaaacagccagggctcacaatgtatccacatctattaactctcccagcacggacaacgattccatcagtaaatcaactactgaaccgattcaattgaacaataagcacgaccttcatcttaggccagaaacttactgaatctacagtaaatcatactaatcattctgatgatgaactccctggacacctccttctcgattcaggagcatcacgaacccttataagatctgctcatcacatacactcagcatcatctaatcctgacataaacgtagttgatgctcaaaaaagaaatataccaattaacgctattggtgacctacaatttcacttccaggacaacaccaaaacatcaataaaggtattgcacactcctaacatagcctatgacttactcagtttgaatgaattggctgcagtagatatcacagcatgctttaccaaaaacgtcttagaacgatctgacggcactgtacttgcacctatcgtaaaatatggagacttttactgggtatctaaaaagtacttgcttccatcaaatatctccgtacccaccatcaataatgtccatacaagtgaaagtacacgcaaatatccttatcctttcattcatcgaatgcttgcgcatgccaatgcacagacaattcgatactcacttaaaaataacaccatcacgtattttaacgaatcagatgtcgactggtctagtgctattgactatcaatgtcctgattgtttaatcggcaaaagcaccaaacacagacatatcaaaggttcacgactaaaataccaaaattcatacgaaccctttcaatacctacatactgacatatttggtccagttcacaacctaccaaatagtgcaccatcctatttcatctcatttactgatgagacaacaaaattccgttgggtttatccattacacgaccgtcgcgaggactctatcctcgatgtttttactacgatactagcttttattaaaaaccagtttcaggccagtgtcttggttatacaaatggaccgtggttctgagtatactaacagaactctccataaattccttgaaaaaaatggtataactccatgctatacaaccacagcggattcccgagcacatggagtcgctgaacggctaaaccgtaccttattagatgactgccgtactcaactgcaatgtagtggtttaccgaaccatttatggttctctgcaatcgaattttctactattgtgagaaattcactagcttcacctaaaagcaaaaaatctgcaagacaacatgctggcttggcaggacttgatatcagtactttgttacctttcggtcaacctgttatcgtcaatgatcacaaccctaactccaaaatacatcctcgtggcatcccaggctacgctctacatccgtctcgaaactcttatggatatatcatctatcttccatccttaaagaagacagtagatacaactaactatgttattcttcagggcaaggactccagattagatcaattcaattacgacgcactcactttcgatgaagacttaaaccgtttaactgcttcatatcaatcgttcattgcgtcaaatgagatccaacaatccaatgatcttaacatagaatcagaccatgactttcaatctgatattgaactatatcctgagcaaccgagaaatgtcctttcaaaagctgtgagtccaaccgattccacacccccgtcaactcatactgaagattcgaaacgtgtttctaaaaccaatattcgcgcacccagagaagttgaccccaacatatctgaatctaatattcttccatctaagaagagatctagcaccccccaaatttccgatatcgagagtaccgattcgggtggtatgcatagattagatgttcctttacttgctcccatgtcccaatctaacacacatgagtcgtcgtacgccagtaaatctaaagatttcagacactcagactcgtacagtgaaaatgagactaatcatacaaacgtaccaatatccagtacgggtggtaccaacaacaaaactgttccgcagataagtgaccaagagactgagaaaaggattatacaccgttcaccttcaatcgatgcttctccaccggaaaataattcatcgcacaatattgttcctatcaaaacgccaactactgtttctgaacagaataccgaggaatctatcatcgctgatctcccactccctgatctacctccagaatctcctaccgaattccctgacccatttaaagaactcccaccgataaattctcatcaaactaattccagtttgggtggtattggtgactctaatgcctatactactatcaacagtaagaaaagatcattagaagataatgaaactgaaattaaggtatcacgagacacatggaatactaagaatatgcgtagtttagaacctccgagatcgaagaaacgaattcacctgattgcagctgtaaaagcagtaaaatcaatcaaaccaatacggacaactttaagatacgatgaggcaatcacctataataaagatattaaagaaaaggaaaaatatatcgaagcataccacaaagaagtcaaccaactattgaaaatgaatacttgggacactgacaaatattatgacagaaaagaaatagaccctaaaagagtaataaactcaatgtttatcttcaacaagaaacgtgacggaactcataaagctagatttgttgcaagaggtgacattcagcatcctgatacgtacgatacaggtatgcaatccaacactgtacatcattatgcgttgatgacatccctgtcacttgcattagacaataactactatattacacaattagacatatcttcggcatatttgtatgcagacatcaaagaagaattatacataagacctccaccacatttaggaatgaatgataagttgatacgtttgaagaaatcactttatggattgaaacaaagtggagcgaactggtacgaaactatcaaatcatacctgataaaacagtgtggtatggaagaagttcgtggatggtcatgcgtatttaagaatagtcaagtaacaatttgcttattcgttgatgatatgatattgttcagcaaagacttaaatgcaaataagaaaatcataacaacactcaagaaacaatacgatacaaagataataaatctgggtgaaagtgataacgaaattcagtacgacatacttggcttagaaatcaaatatcaaagaggtaaatacatgaaattaggtatggaaaaatccttgacagaaaaattacccaaactaaacgtacctttgaacccaaaaggaaagaaacttagagctccaggtcaaccaggtcattatatagaccaggatgaactagaaatagatgaagatgaatacaaagagaaagtgcatgaaatgcaaaagttgattggtctagcttcatatgttggatataaatttagatttgacttactatactacatcaacacacttgctcaacatatactattcccctctaggcaagttttagacatgacatatgagttaatacaattcatgtgggacactagagataaacaattaatatggcacaaaaacaaacctaccaagccagataataaactagtcgcaataagtgatgcttcatatggtaaccaaccatattacaagtcacaaattggtaacattttcctactcaacggaaaagtgattggaggaaagtcgacaaaggcttcgttaacatgcacttcaactacagaagcagaaatacacgcagtcagtgaagctattccgctattgaataacctcagtcaccttgtgcaagaacttaacaagaaaccaattattaaaggcttacttactgatagtagatcaacgatcagtataattaagtctacaaatgaagagaaatttagaaacagattttttggcacaaaggcaatgagacttagagatgaagtatcaggtaataatttatacgtatactacatcgagaccaagaagaacattgctgatgtgatgacaaaacctcttccgataaaaacatttaaactattaacaaacaaatggattcattag

SEQ ID NO: 190886 - DNA, 5314 bp, Saccharomyces pastorianus
atggaatcccaacaattacatcaaaatccacattcccaacatggtagcgcctatgcttcggttacttctaaggaagtcccatcaaatcaagatccgttagccgtttcagcttccaatttaccggaatttgatagagattccactaaggttaattctcaagaagagacaacacctgggacatcagctgttccagagaaccatcatcatgtctctcctcaacctgcttcagtaccacctccacagaatggacagtaccaacagcacggcatgatgaccccaaacaaagctatggcctctaactgggcacattaccaacaaccatctatgatgacgtgttcacattatcaaacgtcacctgcgtattatcaaccggacccacactatccgctgccacagtatatcccaccgctgagtacttcctcacctgatccaatcgattcacaggatcaacactctgaagtacctcaagctaagacaaaggtgagaaataatgtcttaccaccacacactttaacatcagaagaaaacttttctacatgggttaaattttacatcagatttttgaagaactctaatctcggtgacattattccaaatgaccagggtgaaatcaaaagacaaatgacttatgaagaacatgcgtatatatacaataccttccaagcatttgccccatttcatttattgccaacatgggtaaaacaaattttagaaattaattattctgacatccttacagtcctttgtaaaagtgtgtccaaaatgcaaactaacaatcaagaattaaaagattggatagctcttgccaaccttgagtacaacggaagtacatctgctgatacatttgaaattacagtcagcacgatcattcaaaggctaaaagaaaacaatatcaatgttagcgacagattggcctgtcaactaatacttaaaggtctatccggtgatttcaaatacctacgtaatcaatatcgtaccaaaacgaacatgaaactttcccaattattcgctgaaattcaattaatatatgacgaaaataaaatcatgaatctaaataaaccgtcccaatacaaacaacacagcgaatacaaaaatgtttctcgcacatctccaaacacgactaacacgaaggttacaactcgtaattatcatagaacaaatagttcaaaaccaagagcagcaaaagctcacaatattgctacatccagtaaattctcaagggtgaacagtgatcacattaatgaatcaaccgtttcatcacaatacttaagcgatgacaacgaacttagtcttaggccagcaacagaaagaatctaagccaacacgcacaatagactcgaatgacgaactacctgatcaccttcttattgattcaggagcttcgcaaacgcttgtcagatcagcccattatttacaccatgcaacacccaattctgaaataaacatagtcgatgctcaaaaacaagacattcctataaatgccattggtaatcttcacttcaactttcagaacggcaccaaaacatcaataaaagcactacacacaccaaacatagcctatgatctattaagtttgagtgagctggctaaccaaaatattactgcctgctttaccagaaacactttagaaagatcggatggtacagtactagctcccatagtcaaacatggagacttttactggttatctaaaaaatacctaattccttcgcacatttcaaagctaacaataaacaacgtcaacaaaagcaaaagcgtaaataaatatccatatccgttaatacatcgaatgcttggacatgctaacttccgaagtattcagaagtctcttaagaagaatgcagttacatatttgaaagaatcggatattgaatggtctaacgctagcacatatcaatgtcctgactgtctaatcggcaaaagcacgaaacataggcatgtcaaaggatcacgactaaagtaccaagaatcatatgagccttttcagtacttgcataccgatatatttggtcctgtacatcacttaccgaaaagtgcaccttcttactttatatcgtttacagatgagaaaaccagattccaatgggtgtacccattacacgaccgtcgtgaagaatctatcctcaatgtttttacatcgatattagcatttattaagaaccaattcaatgctcgcgttctagttatccagatggatcgtggctccgagtacactaacaaaactcttcataagttctttacgaacagaggtattactgcatgctatacaaccacggcagattctagagcacacggtgtcgctgaacgattaaatcgtactttattaaacgattgtcgcacactgcttcattgcagtggtctaccaaatcatctatggttctcagcagtcgaattttctactataatcagaaattcattagtctcaccaaaaaacgataaatctgccagacaacatgcaggtttagctggactggacattactactatactacctttcggtcaaccggttatagttaacaaccataatcccgactcgaaaatacatcctcgtggcattccaggttacgccttacatccgtcacgaaactcttatggctatattatctatcttccatccttaaaaaagacagtagatactaccaattacgttatattacaaaacaatcaaacgaaattggaccagttcgactacgatacactcacttttgatgatgatctcaatcgtttaacagcccataaccaatcttttattgaacaaaatgaaacggagcagtcatatgatcaaaatacagaatctgatcatgactatcaatcggagattgaaataaactctgatcctctagtgaacgatttctcgtcccaatcattgaaccctttacaattagacaaggaaccagtccaaaaggtacgtgcaccaaaagaagttgatgccgacatatctgaatacaatattcttccatctactatacgatctcgtacaccccatatcattaataaagagagtaccgaaatgggtggtaccattgaatcagatactacttcacctagacactcgtctaccttcactgcacgaaaccaaaagcgacctggtagtcccaatgatatgattgatttgacctcacaggatagagttaattatggacttgaaaacatcaaaactacacgtttgggtggtacggaggaaccatatattcaacgaaatagtgatacaaatatcaaatacaggactacaaatagtacgccctcaatagatgaccgttcgtccaacagtgaatccactactcccatcatctccatagaaacaaaggctgtatgtgataatacaccctccattgatacggatccgccagaatatcgatcttctgaccatgcgactcctaatataatgcctgacaaatcctcaaaaaatgttacggctgattctattcttgacgacctcccacttcctgacttaacccataaatctcctacggacacttctgatgttgcaaaagatattccacacatacactctcgtcagactaattccagtttgggtggtatggatgattctaatgttctgactactaccaaaagtaagaaaagatcattagaagataatgaaactgaaattgaggtatcccgagacacatggaataataagaatatgagaagtctggaaccaccaagatcgaagaaacgcataaatttaattgcagcaataaaaggagtgaaatcgatcaaaccagttcgaacgaccttaagatatgatgaagcaattacatataataaagacaacaaagaaaaagacagatatgttgaagcttatcataaagaaattagccaactattgaaaatgaacacttgggatacaaacaaatattatgatagaaatgacatagatcctaaaaaagtaataaactcaatgtttatatttaacaagaaacgtgatggtacacacaaagctagatttgttgcaagaggcgacattcaacaccccgatacatatgattctgatatgcaatccaataccgtacatcactatgcactgatgacgtcattgtcaatcgcattagacaatgactattatatcacacagctggacatatcctctgcttacttatatgctgatatcaaagaagaattatacataagacctccaccacatttaggtttgaatgataagttactacgtttgagaaaatcactctatggtttgaaacaaagtggtgcaaactggtatgaaaccattaaatcatatttaataaattgttgcgacatgcaagaagttcgcggatggtcatgcgtatttaagaatagtcaagtaacaatttgcttattcgttgacgacatgattttatttagcaaagacttaaatgcaaataagaaaatcataacaacactcaagaaacaatacgatacaaagataataaatctgggtgaaggtgataacgaaattcagtacgacatacttggattagagatcaaatatcaaagaagcaagtacatgaaattaggtatggaaaaatccttgacagaaaaattacccaaactaaacgtacctttgaacccaaaaggaaagaaacttagagctccaggtcaaccaggtcattatatagaccaggatgaactagaaatagatgaagatgaatacaaagagaaagtgcatgaaatgcaaaagttgattggtctagcttcatatgttggatataaatttagatttgacttactatactacatcaacacacttgctcaacatatactattcccctctaggcaagttttagacatgacatatgagttaatacaattcatgtgggacactagagataaacaattaatatggcacaaaaacaaacctaccaagccagataataaactagtcgcaataagcgatgcttcatatggtaaccaaccatattacaagtcacaaattggtaacattttcctactcaacggaaaagtgattggaggaaagtcgacaaaggcttcgttaacatgcacttcaactacagaagcagaaatacacgcagtcagtgaagctataccgctattgaataacctcagtcaccttgtgcaagaacttaacaagaaaccaattattaaaggcttacttactgatagtagatcaacgatcagtataattaagtctacaaatgaagagaaatttagaaacagattttttggcacaaaggcaatgagacttagagatgaagtatcaggtaataatttatacgtatactacatcgagaccaagaagaacattgctgatgtgatgacaaaacctcttccgataaaaacatttaaactattaactaacaaatggattcattag

SEQ ID NO: 190887 - DNA, 384 bp, Saccharomyces pastorianus
atgaaaacaccgccaaaccaagaaaagaacaacgaaaaaatatcacttttatttagttcacaacggctaactatcgacgttcacccttcctcagtctatcacatcgtccttagctcgaacaacgccgataggcatcaagttacattgagctttactgcacgttcccgcatgatgccattgactagggcccgcctttcggcaatcattctagcatgttccgcatgttccttgacgccatggtcatccttgccgtcgcctccggcgtttcccttccccctcagctgccagggcgccgttcacacaacgcaagcacacccggcgccaaaaaaccggggaaagaccacggcgctatggtttcggagtttcccgccaatggcgttataa

SEQ ID NO: 190888 - DNA, 1404 bp, Saccharomyces pastorianus
atgttgcttagtgcgcctgttaacagtaccgtgcggcgcaagccacacagtccaaataaaaaaaagccaaaagagacaggtacagctgcttccttttcgtcgtcctcttcaactgtcgtcctttcatccaataatgatggcagctttgatgctctttgggacccctctataagtaaggcctcggattttgagagtagctatattagtgctaaacgattaaaaccagaaagtagtaatagacagaaaaaaaaaaattcttataaatattctagggaggaaaacaccaacgaggtagaggaaaagacgtctcttggcagcagctctaagacagaagcagataatatatttaatgaccagctcacgtcagctggcaatactacatatgtcagtaataagcgcgatgtaaacttcggggcgaattcggctgtagtactgctcggtttgccaacaagtaaaagtgaatctcaccgacaataccacagtccttcggcttcaacaactaatgaagatgaagaggacattggtgttgatattttagtagacaaccacatcgatagttgcgaaacagtatcgataaataataatagaggtattacacaccaatatccagaaacggaatcagatgtcgactttgatgaggccgtgatattgacaccaatggatggtacggataagggagtgaaaaatccaagaccactcgaaaaaaaatatagtagcagttgttttgaggaccgtacgccccttaacttggatgatggtcatttcagtgaatgcaatcatttttctacattagatgtgtctagcttttttcatctcaacgagcatgtgcataaaatcgacgaagtagagctcgatggacctgatcgcacctttagtctagacaacgtcgctattaatacaaggaaaaaggatattgattgcctctataatagttcaagagaagacttatccaacctcacatgttcttcggaaggcccaaggaatgatagttatgatagtgattacaacattgatgaggtcacttatagagatgatgaatcaacagatgaagacgagagcttaccaaccccagatcgaaaaaggaagaaaattggccataaagcttgcgaaatattggattctaaaagaattggaataaaagtaccaaagttatacgtttggtctttaagtgataaaccgtttagtgttatcgatgggttgtgcacaaaatcgctgtacccattgagtgatgacataaatactcctgaaagtttgagctcatgctcaagctcagtaagttcacgggaaaatcaaaaaggagatgcaacatttgataatgatgctatgatagccgaccttctaaacataggcggactcgaagtagagaaggcatccaatggccatattgagctcataggcgagtga

SEQ ID NO: 190889 - DNA, 399 bp, Saccharomyces pastorianus
atgtccggtggtaaaggtggtaaagctggttcagctgctaaagcttctcaatctagatctgctaaggctggtttgacattcccagtcggtagagtgcacagattgctaagaagaggtaactacgcccaaagaattggttctggtgctccagtctacttgactgctgtcttggaatatttggccgctgaaattttagaattagctggtaatgctgctagggataacaagaagaccagaattattccaagacatttgcaattggctatcagaaatgatgacgaattgaacaagctattgggtaacgttaccattgcccaaggtggtgttttgccaaacatccatcaaaacttgttgccaaagaagtctgccaaggctaccaaggcttctcaagaattataa

SEQ ID NO: 190890 - DNA, 4816 bp, Saccharomyces pastorianus
atggaatcccaacaattatctcaacattcacccatttctcatggtagcgcctgtgcttcggttacttctaaggaagtccacacaaatcaagatccgttagacgtttcagcttccaaaacagaagaatgtgagaaggcttccactaaggctaactctcaacagacaacaacacctgcttcatcagctgttccagagaacccccatcatgcctctcctcaacctgcttcagtaccacctccacagaatgggccgtacccacagcagtgcatgatgacccaaaaccaagccaatccatctggttggtcattttacggacacccatctatgattccgtatacaccttatcaaatgtcgcctatgtactttccacctgggccacaatcacagtttccgcagtatccatcatcagttggaacgcctctgagcactccatcacctgagtcaggtaatacatttactgattcatcctcagcggactctgatatgacatccactaaaaaatatgtcagaccaccaccaatgttaacctcacctaatgactttccaaattgggttaaaacatacatcaaatttttacaaaactcgaatctcggtggtattattccgacagtaaacggaaaacccgtacgtcagatcactgatgatgaactcaccttcttgtataacacttttcaaatatttgctccctctcaattcctacctacctgggtcaaagacatcctatccgttgattatacggatatcatgaaaattctttccaaaagtattgaaaaaatgcaatctgatacccaagaggcaaacgacattgtgaccctggcaaatttgcaatataatggcagtacacctgcagatgcatttgaaacaaaagtcacaaacattatcgacagactgaacaataatggcattcatatcaataacaaggtcgcatgccaattaattatgagaggtctatctggcgaatataaatttttacgctacacacgtcatcgacatctaaatatgacagtcgctgaactgttcttagatatccatgctatttatgaagaacaacagggatcgagaaacagtaaacctaattacaggagaaatccgagtgatgagaagaatgattctcgcagctatacgaatacaaccaaacccaaagttatagctcggaatcctcaaaaaacaaataattcgaaatcgaaaacagccagggctcacaatgtatccacatctaataactctcccagcacggacaacgattccatcagtaaatcaactactgaaccgattcaattgaacaataagcacgaccttcatcttaggccagaaacttactgaatctacagtaaatcatactaatcattctgatgatgaactccctggacacctccttctcgattcaggagcatcacgaacccttataagatctgctcatcacatacactcagcatcatctaatcctgacataaacgtagttgatgctcaaaaaagaaatataccaattaacgctattggtgacctacaatttcacttccaggacaacaccaaaacatcaataaaggtattgcacactcctaacatagcctatgacttactcagtttgaatgaattggctgcagtagatatcacagcatgctttaccaaaaacgtcttagaacggtctgacggcactgtacttgcacctatcgtaaaatatggagacttttactgggtatctaaaaagtacttgcttccatcaaatatctccgtacccaccatcaataatgtccatacaagtgaaagtacacgcaaatatccttatcctttcattcatcgaatgcttgcgcatgccaatgcacagacaattcgatactcacttaaaaataacaccatcacgtattttaacgaatcagatgtcgactggtctagtgctattgactatcaatgtcctgattgtttaatcggcaaaagcaccaaacacagacatatcaaaggttcacgactaaaataccaaaattcatacgaaccctttcaatacctacatactgacatatttggtccagttcacaacctaccaaatagtgcaccatcctatttcatctcatttactgatgagacaacaaaattccgttgggtttatccattacacgaccgtcgcgaggactctatcctcgatgtttttactacgatactagcttttattaaaaaccagtttcaggccagtgtcttggttatacaaatggaccgtggttctgagtatactaacagaactctccataaattccttgaaaaaaatggtataactccatgctatacaaccacagcggattcccgagcacatggagtcgctgaacggctaaaccgtaccttattagatgactgccgtactcaactgcaatgtagtggtttaccgaaccatttatggttctctgcaatcgaattttctactattgtgagaaattcactagcttcacctaaaagcaaaaaatctgcaagacaacatgctggcttggcaggacttgatatcagtactttgttacctttcggtcaacctgttatcgtcaatgatcacaaccctaactccaaaatacatcctcgtggcatcccaggctacgctctacatccgtctcgaaactcttatggatatatcatctatcttccatccttaaagaagacagtagatacaactaactatgttattcttcagggcaaggaatccagattagatcaattcaattacgacgcactcactttcgatgaagacttaaaccgtttaactgcttcatatcattcgttcattgcgtcaaatgagatccaagaatccaatgatcttaacatagaatctgaccatgacttccaatccgacattgaactacatcctgagcaaccgagaaatgtcctttcaaaagctgtgagtccaaccgattccacacctccgtcaactcatactgaagattcgaaacgtgtttctaaaaccaatattcgcgcacccagagaagttgaccccaacatatctgaatctaatattcttccatcaaagaagagatctagcaccccccaaatttccaatatcgagagtaccggttcgggtggtatgcataaattaaatgttcctttacttgctcccatgtcccaatctaacacacatgagtcgtcgcacgccagtaaatctaaagatttcagacactcagactcgtacagtgaaaatgagactaatcatacaaacgtaccaatatccagtacgggtggtaccaacaacaaaactgttccgcagataagtgaccaagagactgagaaaaggattatacaccgttcaccttcaatcgatgcttctccaccggaaaataattcatcgcacaatattgttcctatcaaaacgccaactactgtttctgaacagaataccgaggaatctatcatcgctgatctcccactccctgatctacctccagaatctcctaccgaattccctgacccatttaaagaactcccaccgataaattctcgtcaaactaattccagtttgggtggtattggtgactctaatgcctatactactatcaacagtaagaaaagatcattagaagataatgaaactgaaattaaggtatcacgagacacatggaatactaagaatatgcgtagtttagaacctccgagatcgaagaaacgaattcacctgattgcagctgtaaaagcagtaaaatcaatcaaaccaatacggacaaccttacgatacgatgaggcaatcacctataataaagatattaaagaaaaagaaaaatatatcgaggcataccacaaagaagtcaatcaactgttgaagatgaaaacttgggacactgacgaatattatgacagaaaagaaatagaccctaaaagagtaataaactcaatgtttatcttcaacaagaaacgtgacggtactcataaagctagatttgttgcaagaggtgatattcagcatcctgacacttacgactcaggcatgcaatccaataccgtacatcactatgcattaatgacatccctgtcacttgcattagacaataactactatattacacaattagacatatcttcggcatatttgtatgcagacatcaaagaagaattatacataagacctccaccacatttaggaatgaatgataagttgatacgtttgaagaaatcactttatggattgaaacaaagtggagcgaactggtacgaaactatcaaatcatacctgatacaacaatgtggtatggaagaagttcgtggatggtcatgcgtatttaaaaacagtcaagtgacaatttgtttattcgtagatgatatggtattgtttagcaaaaatctaaattcaaacaaaagaattatagagaagcttaagatgcaatacgacaccaagattataaatctaggcgaaagtgatgaggaaattcaatatgacatacttggcttagaaatcaaatatcaaagaggtaaatacatgaaattaggtatggaaaactcattaactgagaaaatacccaaattaaacgtacctttgaatccaaaaggaagaaaacttagcgctccaggtcaaccaggtctttatatagaccaggatgaactagaaatagatgaagatgaatacaaagagaaggtacatgaaatgcaaaagttgattggtctagcttcatatgttggatataaatttagatttgacttactatactacatcaacacacttgctcaacatatactattcccctctaggcaagttttagacatgacatatgagttaatacaattcatgtgggacactagagataaacaattaatatggcacaaacacaaaacctcttccgataaaaacatttaa

SEQ ID NO: 190891 - DNA, 5314 bp, Saccharomyces pastorianus
atggaatcccaacaattacatcaaaatccacattctctacatggtagcgccgctgcttcggttacttctaaggaagtcccatcaaatcaagatccgttagccgtttcagcttccaatttaccggaatttgatagagattccactaaggttaattctcaacaagagacaacacctgggacatcagctgttccagagaaccatcatcatgtctctcctcaacctgcttcagtaccacctccacagaatggacagtaccaacagcacggcatgatgaccccaaacaaagctatggcctctaactgggcacattaccaacaaccatctatgatgacgtgttcacattatcaaacgtcacctgcgtattatcaaccggacccacactatccgctgccacagtatatcccaccgctgagtacttcctcacctgatccaatcgattcacagaatcaacactctgaagtacctcaagctaagacaaaggtgagaaataacgtcttaccaccacacactttaacatcagaagaaaacttttctacatgggttaaattttacatcagatttttgaagaactctaatctcggtgacataattccaaatgaccagggtgaaatcaaaagacaaatgacttatgaagaacatgcgtatatatacaataccttccaagcatttgccccatttcatttattgccaacatgggtaaaacaaattttagaaattaattatgctgacatccttacagtcctttgtaaaagtgtgtccaaaatgcaaactaacaatcaagaattaaaggattggatagctcttgccaaccttgagtacgacggaagtacatctgctgatacatttgaaattacagtcagtacgatcattcagaggctaaaagaaaacaatatcaatgttagcgacagattggcctgtcaactaatacttaaaggtctatccggtgatttcaaatacctacgtaatcaatatcgtaccaaaacgaacatgaaactttcccaattattcgctgaaattcaattaatatatgacgaaaataaaatcatgaatctaaataaaccgtcccaatacaaacaacacagcgaatacaaaaatgtttctcgcacatctccaaacacgactaacacgaaggttacaagtcgtaattatcatagaacaaatagttcaaaaccaagagcagcaaaagctcacaatattgctacatccagtaaattctcaagggtgaacaatgatcacattaatgaatcaaccgtttcatcacaatacttaagcgatgacaacgaacttagtcttaggccagcaacagaaagaatctaagccaacacgcacaatagactcgaatgacgaactacctgatcaccttcttattgattcaggagcttcgcaaacgcttgtcagatcagcccattatttacaccatgcaacacccaattctgaaataaacatagtcgatgctcaaaaacaagacattcctataaatgccattggtaatcttcacttcaactttcagaacggcaccaaaacatcaataaaagcactacacacaccaaacatagcctatgatctattaagtttgagtgagctggctaaccaaaatattactgcctgctttaccagaaacactttagaaagatcggatggtacagtactagctcccatagtcaaacatggagacttttactggttatctaaaaaatacctaattccttcgcacatttcaaagctaacaataaacaacgtcaacaaaagcaaaagcgtaaataaatatccatatccgttaatacatcgaatgcttggacatgctaacttccgaagtattcagaagtctcttaagaagaatgcagttacatatttgaaagaatcggatattgaatggtctaacgctagcacatatcaatgtcctgactgtctaatcggcaaaagcacgaaacataggcatatcaaaggatcacgactaaagtaccaagaatcatatgagccttttcagtacttgcataccgatatatttggtcctgtacatcacttaccgaaaagtgcaccttcttactttatatcgtttacagatgagaaaaccagattccaatgggtctacccattacacgaccgtcgtgaagaatctatcctcaatgtttttacatcgatattagcatttattaagaaccaattcaatgctcgcgttctagttatccagatggatcgtggctccgagtacactaacaaaactcttcataagttctttacgaacagaggtattactgcatgctatacaaccacggcagattctagagcacacggtgtcgctgaacgattaaatcgtactttattaaacgattgtcgcacactgcttcattgcagtggtctaccaaatcatctatggttctcagcagtcgaattttctactataatcagaaattcattagtctcaccaaaaaacgataaatctgcaagacaacatgcaggtttagctggactggacattactactatactacctttcggtcaaccggttatagttaacaaccataatcccgactcgaaaatacatcctcgtggcattccaggttacgccttacatccgtcacgaaactcttatggctatattatctatcttccatcattaaaaaagacagtagatactaccaattacgttatattacaagacaaccaatccaaattggaccaattcaattatgatacactcacctttgatgatgatctcaatcgtttaacagcccataaccaatcttttattgaacaaaatgaaacggagcagtcatatgatcaaaatacagaatctgatcatgactatcaatcggagattgaaataaactctgatcctctagtgaacgatttctcgtcccaatcattgaaccctttacaattagacaaggaaccagtccaaaaggtacgtgcaccaaaagaagttgatgccgacatatctgaatacaatattcttccatctactatacgatctcgtacaccccatatcattaataaagagagtaccgaaatgggtggtaccattgaatcagatactacttcacctagacactcgtctaccttcactgcacgaaaccaaaagcgacctggtagtcccaacgatatgattgatttgacctcacaggatagagttaattatggacttgaaaacatcaaaactacacgtttgggtggtacggaggaaccatatattcaacgaaatagtgatacaaatatcaaatacaggactacaaatagtacgccctcaatagatgaccgttcgtccaacagtgaatccactactcccatcatctccatagaaacaaaggctgtatgtgataatacaccctccattgatacggatccgccagaatatcgatcttctgaccatgcgactcctaatataatgcctgacaaatcctcaaaaaatgttacggctgattctattcttgacgacctcccacttcctgacttaactaataaatctcctacggacacttctgatgtttcaaaagatattccacacatacactctcgtcagactaattccagtttgggtggtatggatgattctaatgttctgactactaccaaaagtaagaaaagatcattagaagataatgaaactgaaattgaggtatcccgagacacatggaataataagaatatgagaagtctggaaccaccaagatcgaagaaacgcataaatttaattgcagcaataaaaggagtgaaatcgatcaaaccagttcgaacgaccttaagatatgatgaagcaattacatataataaagacaacaaagaaaaagacagatatgttgaagcttatcataaagaaattagccaactattgaaaatgaacacttgggatacaaacaaatattatgatagaaatgacatagatcctaaaaaagtaataaactcaatgtttatatttaacaagaaacgtgatggtacacacaaagctagatttgttgcaagaggcgacattcaacaccccgatacatatgattctgatatgcaatccaataccgtacatcactatgcactgatgacgtcattgtcaatcgcattagacaatgactattatatcacacagctggacatatcctctgcttacttatatgctgatatcaaagaagaattatacataagacctccaccacatttaggtttgaatgataagttactacgtttgagaaaatcactctatggtttgaaacaaagtggtgcaaactggtatgaaaccattaaatcatatttaataaattgttgcgacatgcaagaagttcgcggatggtcatgcgtatttaagaatagtcaagtaacaatttgcttattcgttgatgatatgatattattcagcaaagacttaaatgcaaataagaaaatcataacaacactcaagaaacaatacgatacaaagataataaatctgggtgaaggtgataacgaaattcagtacgacatacttggattagagatcaaatatcaaagaagcaagtacatgaaattaggtatggaaaaatccttgacagaaaaattacccaaactaaacgtacctttgaacccaaaaggaaagaaacttagagctccaggtcaaccaggtcattatatagaccaggatgaactagaaatagatgaagatgaatacaaagagaaagtgcatgaaatgcaaaagttgattggtctagcttcatatgttggatataaatttagatttgacttactatactacatcaacacacttgctcaacatatactattcccctctaggcaagttttagacatgacatatgaattgatacagttcatatggaatacgagagataagcaattaatatggcacaaaagcaaacctgttaagccaacaaataaattagttgttataagcgatgcatcgtatggtaaccaaccgtattataaatcacaaattggcaacatatatttacttaatggaaaagtgattggaggaaagtcgacaaaggcttcgttaacatgcacttcaactacagaagcagaaatacacgcagtcagtgaagctataccgctattgaataacctcagtcaccttgtgcaagaacttaacaagaaaccaattattaaaggcttacttactgatagtagatcaacgatcagtataattaagtctacaaatgaagagaaatttagaaacagattttttggcacaaaggcaatgagacttagagatgaagtatcaggtaataatttatacgtatactacatcgagaccaagatgaacattgctgatgtgatgacaaaacctcttccgataaaaacatttaaactattaactaacaaatggattcattag

SEQ ID NO: 190892 - DNA, 1866 bp, Saccharomyces pastorianus
atgttcgaccaattagcagtctttacccctcaaggtcaagtactttaccaatataactgtttaggaaaaaagttttctgaaatacaaattaacagctttatatcccagctgattacttccccagtaactagaaaagaaagtgttgcaaacgcaaatacagacggatttgatttcaatcttttaacaatcaacagcgaacacaaaaattctccttcatttaatgcactattttatttgaataagcaaccagaattgtatttcgtagtgacttttgccgagcagactttagagcttaatcaagaaactcaacaaacacttgcactggtgttaaaactctggaactcattgcatttaagtgaatccattctaaaaaatcgtcagggccaaaacgaaaagaacaagcataactacgtcgatattcttcagggaattgaagacgacctgaagaaatttgagcaatattttaggataaaatatgaagagtcaataaaacaagaccatatcaatccagataattttaccaaaaatggatcagtaccccaatcgcataataaaaataccaagaaaaaattgagggatacaaaaggtaagaagcaatctacaggaaatgttggtagtgggagaaagtggggccgtgatggtggcatgcttgatgaaatgaatcatgaagatgcagccaaattagatttctcatcatccaacagccacaatagtagccaagtagctctagactccactattaataaagattcttttggggatagaacagaaggaggcgatttcttaatcaaagaaattgatgatcttttgtcttctcataaagacgagataactagtgggaacgaagctaaaaattctggatacgtcagtacagcttttggattccttcaaaaacacgttctaggtaacaaaacgatcaatgaaagtgatttgaaatctgtattagagaagttaacacaacaattgataaccaaaaatgtagcaccagaggcagcagactatttaacacagcaagtctcacatgatcttgtaggctcaaaaactgcaaattggaccagtgttgagaatactgctcgtgaatctttaacaaaagcattaactcaaatattaacgcctggtgtatccgttgatctcctccgtgaaattcagagcaaaagaagcaaaaaggatgaagaaggtaaatgtgatccctatgtgttctctatagttggtgttaatggtgttggtaagtcaacaaatctttcaaagctagcgttttggttactgcaaaataatttcaaggtcttaattgttgcttgtgatacgtttaggtctggtgcagttgagcaactaagggtccatgttgaaaatttggcacagctaatggatgattcacacgttcgtggctccaagaacaaaaggggtaaaactggtaatgactacgttgaactatttgaagctggttatggtggatctgacttggtaaccaaaattgcaaagcaagccatcaaatattctcgtgatcaaaacttcgatatagtgttaatggatactgccgggagaaggcataatgatcctactttaatgtcgccattgaagtctttcgctgaccaagccaagccagataaaatcattatggttggagaggctttagtaggtactgattctgtccagcaagccaaaaattttaatgatgccttcggaaagggaagaaatcttgacttctttattatctccaagtgtgacacagttggtgaaatgctgggtactatggtaaatatggtttatgctacggggattcctatcttattcgttggcgtgggacaaacctataccgatttgaggacattaagcgtaaaatgggctgttaatacattaatgtcttaa

SEQ ID NO: 190893 - DNA, 660 bp, Saccharomyces pastorianus
atgccagctaaaaaaaggactagaaagacagtgaaaaaaaccgtatcattctccgatgacacaacattaacaacgcaccaaaatcgtgagaaaaagaacgtagatcatgatcgtccacctgtgtatgtgaggaaaacccctctgatgacatttccataccatttagtagcactactttattactacgtttttgtatcttcaaatttcaatacggtgaagttgctaagttttttgattcctacacaagttgcttatttagttttacaattcaataaatgcacagtttacggtaacaaaatcattaagatcaattactcattgaccattatttgtctaggtgttacatttttgttgagctttcccacaatgttattaactatattatttggtgcgccattaatggacttattgtgggaaacctggctgttgtcactgcattttgcatttttagcataccctgcagtttattctgtatttaattgtgatttcaaagtgggattatggaagaagtattttatctttatcgttgtagggggttggattagttgtgttgtcattcctttggattgggatagagattggcagaattggccaattcctattgttgttggaggttatttgggcgctttggtgggctatactatcggtgcctatatataa

SEQ ID NO: 190894 - DNA, 678 bp, Saccharomyces pastorianus
atgaagcttcaatttttttcctttattaccttatttgcttgtctcttcacaacagccatttttgcgaaagaggacacggcagaagatcctgagatcacacacaaggtctactttgacattaatcacggtgataaacaaattggtagaattgttatgggattgtatggtctcaccacaccccaaaccgttgaaaacttttaccagttgaccatttccagggaccctaagatgggttatttgaactctatcttccatcgcgttattcctaacttcatgattcaaggtggcgatttcactcacagatcaggtattgggggtaagtctatcttcggaaacacgttcaaagatgagaattttgatgtcaaacatgacaaaccaggcagattgtctatggccaatcgtggtaaaaacaccaacggatcccaatttttcatcaccaccgtcccatgcccatggttggacggtaagcacgttgtctttggagaagtcttggatggtatggacgtagttcactacattgaaaacgttaagaccgacagtagaaatatgcctgtaaaggaagttattattgtggaaagtggtgaactggaaactgttcctttggacaataaagacgccgccaagctacaggaagagatcaaagcggaagctagcgaagcagcccacgatgaactctaa

SEQ ID NO: 190895 - DNA, 743 bp, Saccharomyces pastorianus
atgatcttaagcaaaacaaagaaacctaaaagcatgaataagccaatatatttcagcaagtttcttgtaactgaacaagttttctatgtatgcactctcatatgtttttttgtaccccattcgcaccattgcgttactaactatatggagaccttataatctctgcttctttacagaagtcaaaatatacgtatgcattggtaaacttgaaaccaattgtacccggacatgtactgatcgttccactgagaactacggttttaaacttatcagatctgaccatgcctgaatctcaagattatttcaagactttacagttaatacatagatttattaagtggcaatataaggctgactctatcaacgttgccatccaagatggacctgaggccggacagtcggtaccccacttgcatacacacattattccacgttataaaataaacaatgtaggggatttaatatacgataaattagatcattgggatggtaatgggactttgactgattggcaaggaagaagagacgaatatttgggtgttggtggtaggcaagcaagaaaaaataactctacatcggccactgtagacggggatgaactctcacaaggtcctaatgtcttgaagccagacagtcaaaggaaggttcgagctttaaccgaaatgaaaaaagaagctgaggatcttcaagccagactagaagaatttgtatcttctgatcctggtttaacacaatggttatag

SEQ ID NO: 190896 - DNA, 1713 bp, Saccharomyces pastorianus
atgtcacaagacgctgctattgcagagcaaactcctgtggagcatctctctgctgttgactcagcctcccactcggttttatctacaccatcaaacaaggctgaaagagatgaaataaaagcttatggtgaaggtgaagagcacgaacctgtcgttgaaattccaaagagaccagcttctgcctatgtcactgtctctattatgtgtatcatgatcgcctttggtggtttcgttttcggttgggatactggtaccatttctggtttcatcaatcaaaccgatttcatcagaagatttggtatgaagcataaagatggtactaattatttgtctaaggttagaactggtttgattgtctccattttcaacattggttgtgccattggtggtattattctttccaaattgggtgatatgtacggtcgtaaggtgggtttgattgtcgttgttgtcatctacatcatcggtattattattcaaattgcatctatcaacaaatggtaccaatatttcatcggtagaattatttccggtttgggtgttggtggtattgccgttttatctcctatgttgatttctgaagtatccccaaagcatttaaggggtactttagtctcttgctaccaattgatgattactgccggtattttcttgggttactgtaccaacttcggtactaagaactactccaactctgtgcaatggagagttccattaggtttgtgttttgcctgggctttgtttatgattggtggtatgacatttgttccagagtctccacgttatttggctgaagtcggtaagatcgaagaagccaaacgttctattgccgtttctaacaaggttgctgttgatgatccatctgttttggctgaagtcgaagctgtcttggctggtgtagaggcagagaaattagctggtaatgcatcctggggtgaattgtttagtagcaagacaaaggtccttcagcgtttgatcatgggtgctatgattcaatctctacaacaattgacaggtgataactatttcttctactatggtactactattttcaaggctgttggtttgagtgactctttcgaaacctctattgtcttgggtattgttaactttgcttccacctttgttggtatttacgttgttgagagatatggtcgtcgtacttgtttgctatggggtgctgcatccatgactgcttgtatggttgtctatgcttccgtgggtgtcaccagattatggccaaatggtcaagaccaaccatcttccaagggtgctggtaactgtatgattgtctttgcctgtttctatattttctgttttgctactacatgggctccaattccttatgtcgttgtttctgaaactttcccattgagagtcaagtctaaggctatgtctattgctacagctgctaattggttgtggggtttcttgattggtttcttcactccatttattactggtgctattaacttctactacggttacgttttcatgggctgtttggtcttcatgttcttctatgttttgttagttgttccagaaactaagggtttgactttggaagaagtcaacaccatgtgggaagaaggtgttctaccatggaagtctgcctcatgggttccaccatccagaagaggtgccaactacgacgctgaagaaatgactcacgatgacaagccattgtacaagagaatgttcagcaccaaataa

SEQ ID NO: 190897 - DNA, 444 bp, Saccharomyces pastorianus
atggcctttctgtcctggacattttttccttccttttttcatttccttgaaaggaacagattttttttgacttttgccacacagctgcactatctcaaccccttttacattttaagttttcgggttgaatggcatcaaatttgggaaaatttagcttactcagacaccaacacattttttcatgagtattgttggaaaatctttccatgcttatcagccggaatacggaacaacggctgctgtgatgccgcaaaggggcaaggaaaaaataagcaacacacaccgaaacaggaggaagaaattccgaacacaagcctaagaagacaccgcagttgttgcaacatgttcacatgttcatccccctgctactacttggaaattaatgtaggggtaattggagtgcgccggcccgtgctttcagaggaacaaaggaagaattgttaa

SEQ ID NO: 190898 - DNA, 1368 bp, Saccharomyces pastorianus
atgggtttagtagacggttatgacacaagctcagactctgatttgaacttcgacgaaggcaaatctgttcatgaaaagaaaaatggtaatttgcatgaagatacttcgtatgaaccttcttcaaataatattcataagagaaaatcacattttacaaagtcagaactaaaaagaagacggaaaactcgcaaaggagatgggccgtggggcagttggtcaagtagtgacgatgaaacttcacaagccagcgaaactcagaaagaagatcaggatatcttcgtgcacgcgctggctgaggacaacctagattcggaacagatagaggtagaggaagtctcccatttttatggtaaatcagaaaaggactatcaaggcagaggatatttatatccaccaaatgacgtcgatgttgatcttcgtgaggaaaggatatcctttcggtgttacttaccaaaaaaagttatacgtaattatccggggcatccagaaggaaccactgccctgaaattcttacctaaaactggacacttaattctctctggtggtaatgatcatactataaaaatttgggatttctaccatgactatgaatgcctacgagattttcaaggtcataacaagcctattaaagcattacgattcaccgaagactgtcaatcttttttgagctcttcctttgatagaagcgttaaaatttgggatactgaaactggtaaagtgaaaaccaggttgcaccttaattcaacgcctgcagatgttgaatctcggcccactaacccacatgagttcattgtaggtttatcgaattcgaaaatattacattatgatgatcgtgtttcagaaaatcaaggtcttgtgcagacatatgatcatcacctaagtagcattctggctctcaagtattttcccgatggttcgaagtttatttcttcttcagaggataagacggtaagaatttgggaaaatcagatcaatgtaccaataaaacaaataagtgacacggctcaacattctatgccatttttaaatgtacatccgtctcagaactatttctgtgcacaaagcatggataatagaatatattctttcagtttgaaacccaaatataagaggcatccaaaaaagatatttaaagggcattcatctgctggttatgggataagcttggctttttctggtgatggtcgttacatatgttcaggcgattcaaaaagcagactatttacttgggattggaatacgtcgcgcttattaaataacatcaagattccaggcaacaagcctataactcaagtggactggcatcctcaagaaacaagtaaagtcatttgcagcggagcggcaggtaagatatatgtatgtgactag

SEQ ID NO: 190899 - DNA, 5269 bp, Saccharomyces pastorianus
atggaatcccaacaattatctcaacattcacccatttctcatggtagcgcctgtgcttcggttacttctaaggaagtccacacaaatcaagatccgttagacgtttcagcttccaaaacagaagaatgtgagaaggcttccactaaggctaactctcaacagacaacaacacctgcttcatcagctgttccagagaacccccatcatgcctctcctcaacctgcttcagtaccacctccacagaatgggccgtacccacagcagtgcatgatgacccaaaaccaagccaatccatctggttggtcattttacggacacccatctatgattccgtatacaccttatcaaatgtcgcctatgtactttccacctgggccacaatcacagtttccgcagtatccatcatcagttggaacgcctctgagcactccatcacctgagtcaggtaatacatttactgattcatcctcagcggactctgatatgacatccactaaaaaatatgtcagaccaccaccaatgttaacctcacctaatgactttccaaattgggttaaaacatacatcaaatttttacaaaactcgaatctcggtggtattattccgacagtaaacggaaaacccgtacgtcagatcactgatgatgaactcaccttcttgtataacacttttcaaatatttgctccctctcaattcctacctacctgggtcaaagacatcctatccgttgattatacggatatcatgaaaattctttccaaaagtattgaaaaaatgcaatctgatacccaagaggcaaacgacattgtgaccctggcaaatttgcaatataatggcagtacacctgcagatgcatttgaaacaaaagtcacaaacattatcgacagactgaacaataatggcattcatatcaataacaaggtcgcatgccaattaattatgagaggtctatctggcgaatataaatttttacgctacacacgtcatcgacatctaaatatgacagtcgctgaactgttcttagatatccatgctatttatgaagaacaacagggatcgagaaacagcaaacctaattacaggagaaatctgagtgatgagaagaatgattctcgcagctatacgaatacaaccaaacccaaagttatagctcggaatcctcaaaaaacaaataattcgaaatcgaaaacagccagggctcacaatgtatccacatctaataactctcccagcacggacaacgattccatcagtaaatcaactactgaaccgattcaattgaacaataagcacgaccttcaccttaggccaggaacttactgaatctacggtaaatcacactaatcattctgatgatgaactccctggacacctccttctcgattcaggagcatcacgaacccttataagatctgctcatcacatacactcagcatcatctaatcctgacataaacgtagttgatgctcaaaaaagaaatataccaattaacgctattggtgacctacaatttcacttccaggacaacaccaaaacatcaataaaggtattgcacactcctaacatagcctatgacttactcagtttgaatgaattggctgcagtagatatcacagcatgctttaccaaaaacgtcttagaacgatctgacggcactgtacttgcacctatcgtacaatatggagacttttactgggtatctaaaaggtacttgcttccatcaaatatctccgtacccaccatcaataatgtccatacaagtgaaagtacacgcaaatatccttatcctttcattcatcgaatgcttgcgcatgccaatgcacagacaattcgatactcacttaaaaataacaccatcacgtattttaacgaatcagatgtcgactggtctagtgctattgactatcaatgtcctgattgtttaatcggcaaaagcaccaaacacagacatatcaaaggttcacgactaaaataccaaaattcatacgaaccctttcaatacctacatactgacatatttggtccagttcacaacctaccaaatagtgcaccatcctatttcatctcatttactgatgagacaacaaaattccgttgggtttatccattacacgaccgtcgcgaggactctatcctcgatgtttttactacgatactagcttttattaagaaccagtttcaggccagtgtcttggttatacaaatggaccgtggttctgagtatactaacagaactctccataaattccttgaaaaaaatggtataactccatgctatacaaccacagcggattcccgagcacatggagtcgctgaacggctaaaccgtaccttattagatgactgccgtactcaactgcaatgtagtggtttaccgaactatttatggttctctgcaatcgaattttctactattgtgagaaattcactagcttcacctaaaagcaaaaaatctgcaagacaacatgctggcttggcaggacttgatatcagtactttgttacctttcggtcaacctgttatcgtcaatgatcacaaccctaactccaaaatacatcctcgtggcatcccaggctacgctctacatccgtctcgaaactcttatggatatatcatctatcttccatccttaaagaagacagtagatacaactaactatgttattcttcagggcaaggaatccagattagatcaattcaattacgacgcactcactttcgatgaagacttaaaccgtttaactgcttcatatcattcgttcattgcgtcaaatgagatccaagaatccaatgatcttaacatagaatctgaccatgacttccaatccgacattgaactacatcctgagcaaccgagaaatgtcctttcaaaagctgtgagtccaaccgattccacacctccgtcaactcatactgaagattcgaaacgtgtttctaaaaccaatattcgcgcacccagagaagttgaccccaacatatctgaatctaatattcttccatcaaagaagagatctagcaccccccaaatttccaatatcgagagtaccggttcgggtggtatgcataaattaaatgttcctttacttgctcccatgtcccaatctaacacacatgagtcgtcgcacgccagtaaatctaaagatttcagacactcagactcgtacagtgaaaatgagactaatcatacaaacgtaccaatatccagtacgggtggtaccaacaacaaaactgttccgcagataagtgaccaagagactgagaaaaggattatacaccgttcaccttcaatcgatgcttctccaccggaaaataattcatcgcacaatattgttcctatcaaaacgccaactactgtttctgaacagaataccgaggaatctatcatcgctgatctcccactccctgatctacctccagaatctcctaccgaattccctgacccatttaaagaactcccaccgataaattctcgtcaaactaattccagtttgggtggtattggtgactctaatgcctatactactatcaacagtaagaaaagatcattagaagataatgaaactgaaattaaggtatcacgagacacatggaatactaagaatatgcgtagtttagaacctccgagatcgaagaaacgaattcacctgattgcagctgtaaaagcagtaaaatcaatcaaaccaatacggacaaccttacgatacgatgaggcaatcacctataataaagatattaaagaaaaagaaaaatatatcgaggcataccacaaagaagtcaatcaactgttgaagatgaaaacttgggacactgacgaatattatgacagaaaagaaatagaccctaaaagagtaataaactcaatgtttatcttcaacaagaaacgtgacggtactcataaagctagatttgttgcaagaggtgatattcagcatcctgacacttacgactcaggcatgcaatccaataccgtacatcactatgcattaatgacatccctgtcacttgcattagacaataactactatattacacaattagacatatcttcggcatatttgtatgcagacatcaaagaagaattatacataagacctccaccacatttaggaatgaatgataagttgatacgtttgaagaaatcactttatggattgaaacaaagtggagcgaactggtacgaaactatcaaatcatacctgatacaacaatgtggtatggaagaagttcgtggatggtcatgcgtatttaaaaacagtcaagtgacaatttgtttattcgtagatgatatggtattgtttagcaaaaatctaaattcaaacaaaagaattatagagaagcttaagatgcaatacgacaccaagattataaatctaggcgaaagtgatgaggaaattcaatatgacatacttggcttagaaatcaaatatcaaagaggtaaatacatgaaattaggtatggaaaactcattaactgagaaaatacccaaattaaacgtacctttgaatccaaaaggaagaaaacttagcgctccaggtcaaccaggtctttatatagaccaggatgaactagaaatagatgaagatgaatacaaagagaaggtacatgaaatgcaaaagttgattggtctagcttcatatgttggatataaatttagatttgacttactatactacatcaacacacttgctcaacatatactattcccctctaggcaagttttagacatgacatatgagttaatacaattcatgtgggacactagagataaacaattaatatggcacaaaaacaaacctaccaagccagataataaactagtcgcaataagcgatgcttcatatggtaaccaaccatattacaagtcacaaattggtaacattttcctactcaacggaaaagtgattggaggaaagtcgacaaaggcttcgttaacatgcacttcaactacagaagcagaaatacacgcagtcagtgaagctataccgctattgaataacctcagtcaccttgtgcaagaacttaacaagaaaccaattattaaaggcttacttactgatagtagatcaacgatcagtataattaagtctacaaatgaagagaaatttagaaacagattttttggcacaaaggcaatgagacttagagatgaagtatcaggtaataatttatacgtatactacatcgagaccaagaagaacattgctgatgtgatgacaaaacctcttccgataaaaacatttaaactattaactaacaaatggattcattag

SEQ ID NO: 190900 - DNA, 1182 bp, Saccharomyces pastorianus
atgtttaataatcatgaaattgacaccatattaagcactctccgcatggaggcagatccctctttgcatcctttattcgaacaatttgagaaattttatgaagagaaattgtggttccaattgtccgaatccttgactaaattttttgatgatgctaaatctacaccattgaggctcagattatatgataacttcgtttctaaattttatgataaaatcaaccaattgtcagtagtaaagtatctacttgcctctttgaaggattctaaggatttcgatgagtctttaaaatatttggatgatttgaaggctcaatttcaagaattggactctaaaaaacaaagaaataatggatcaaaagaccatggtgatggtattttgttgatagatagcgaaattgctagaacttacctgttaaagaacgacctcgttaaggcaagagatttattagatgatttggaaaagacattggataaaaaggattccattccattaaggataacaaacagcttctattctacaaattcccagtattttaaatttaaaaatgatttcaattctttctactacacaagtctattatacctttctaccttagaaccatctacaagcattactttagccgaacgtcaacaattggcctatgatttgagtatctcagcattgttaggtgacaaaatctataattttggcgaactattacaccatccaataatggaaactatagtcaacgattccaattacgattggcttttccaattattaaatgctctaaccgttggtgattttgataaattcgactcattgataaaagttcaaatatcaaagattcctatattggctcaacatgaatcatttttacgacaaaaaatttgcctaatgacattaattgaaacagtttttgtcaaaaatattaggatgctttcatttgaagatatttcaaaggctacacacctaccaaaggataatgtcgaacacctggtcatgagagccataagtttgggtctattaaagggttctattgaccaagtaaatgaactcgttaccatctcctgggtccaaccaagaatcataagtggtgaccaaattacaaagatgaaggacagactggttgaatggaacgatcaagtagaaaaactgggcaaaaaaatggaagctcgtggccaatccatctgggtttag

SEQ ID NO: 190901 - DNA, 441 bp, Saccharomyces pastorianus
atgacaatcctccaccaatcagaagatcaaatagaggtggcttcagaggtcgcggcggcttcagaggcggcttcagaggtggcttcagaggcggtttctccagaggcggcttcggtggccccagaggtggatttggtggtccaagaggtggttacggtggctattccagaggtggctacggtggctactccagaggcggatatggtggctccagaggtggttacgatagtcctagaggtggttacgatagtccaagaggtggttattccagaggtggctatggtggtccaagaaatgattacggtcctccaagaggtagctacggtggttcaagaggtggttatgatggtccaagaggcgattatggtcctccaagagatgcatacagaaccagagatgctccacgtgaaagatcaccaaccaggtaagccatttatatag

SEQ ID NO: 190902 - DNA, 795 bp, Saccharomyces pastorianus
atggctaaatttttgaaagcaggtaaagttggtacgtaaatttaacagagcaaacgctctaattaagatatcgaataaaaggggactttcaggtgcataagatgggaaattgtacaatctgagggacaaacaatatggaaagcagtacatgattgtattgtcattgtaggaggtaccaattgtgccagtaaaaaagagagggcccggggagcaccacattcacgaccaatcgtgtcgatctgcaaaaaaggcacatggaaaatgtaatttatcagtgttcaacactgagttgaacagatagctatctaatcaatgttaactttccagggaacaaaaagctaaatccacttctcttttatttcaaaatatcattagaaatagaaaaatttactaacaaattttcgtattatcgtagctgtcgttgttcgtggtcgttacgctggtaagaaggttgtgatcgttaagccacacgatgagggttctaaatctcatccattcggtcacgctttggttgccggtattgaaaggtacccatcaaaggtcaccaagaagcacggtgccaagaaggtcgctaagagaactaaaatcaagccattcatcaaagtcgtcaactacaaccacttattgccaaccagatacaccttggatgttgaagctttcaagagcgttgtatctacagagacttttgaacaaccatcccaacgtgaagaagccaagaaggttgtaaagaaggcatttgaagaaagacatcaagctggtaaaaaccaatggttcttctccaagttgagattctaa

SEQ ID NO: 190903 - DNA, 117 bp, Saccharomyces pastorianus
atgttatataatatgaattatttagttttttcattactatggtattttttggtgggtggggggaagggagaggtttgttggcgttttttaggcattgttaagagtcctaatacgtag

SEQ ID NO: 190904 - DNA, 300 bp, Saccharomyces pastorianus
atggcccatctctcactaaatcagtacaaatgcactcacatcattatacacggcacttgcctcagcggtctataccctgtgccatttacccataacgcccatgattatccacattttaatatctatatctcattcggcggccccaaatattgtaaaactgctcttaatacatacgttataccgcttttacaccgtatactaaccactcaatttatatacacttatgccaatattacagaaaaatcaccaccaaaatcacctaaacataaaaatattctatccttcaacaataatacataa

SEQ ID NO: 190905 - DNA, 429 bp, Saccharomyces pastorianus
atgtccctacggccttgtctaacaccatccagcatgcaatacagtgacatatatatacacaccacaccacacccacacacaccacaccacacccaccacacccacaccacacccacacccacaccacacccacacacccacacacccacaccagagagaagcctaagcctaagactaagacaagccaagcctgaccaacctgtctctcaaattaccctccattaccctacctccccactcgttaccctgactcattcaactataccaccccaaccaccatccatctccctgtgtactaccaccaaccgaccgtccaccataaccgttaccctccaattacccatatccaactccactaccacttaccctaccatctcccatctactactcaccatactattgttctacccaccactattgaaacgctaa

SEQ ID NO: 190906 - DNA, 780 bp, Saccharomyces pastorianus
atgaggtatgtttgataagatatatacgtatatttatatatcactcttctgagaaagtatgccatagaatgaggatcactaacaaagaaaatgtcaatgaacttcaaagatatcgtttaatgaaacagtagctctaaaagaaggatcgagacagatgttatgaaactgttgatgagtgatcatcaagtggatttaatcaatgatagcatgcaagagtttcatgtaaagttcttgggaccaaaggatacaccctacgaaaatggggtttggaggttacatgtagagttgccggataattacccatacaagtcgccaagcatagggttcgttaacaagatattccatcctaacattgatatcgcatcggggtccatatgtttggacgtaattaactctacatggtcgcctttatatgatctgataaatatagtggagtggatgataccaggtttattaaaggagcctaatggtagcgatcccttgaataacgaagctgccacattgcaattacgagataaaaaactgtatgaggaaaaaatcaaagagtatatagacaagtatgctacaaaggaaaagtaccaacaaatgtttggcggagataatgatagcgatgacagtgatagcggcggtgatttacaagaagaggacagtgattctgatgaagatatggatggcactggtgtttccagtggcgatgatagcgtagatgagttaagcgaggatctaagtgacatagatgtcagtgatgacgatgactacgacgaagtcgcaaatcaataa

SEQ ID NO: 190907 - DNA, 612 bp, Saccharomyces pastorianus
atgggttcttcattcgtaatagatcgatcctcttcgtcaccagcgccaccacggggacccgccccgaaattgagtgcacatgctcgcaagataatatgcaaaatatcacccaatcggtcctttttgttcatcatatcgttacatatctgtgaaaagtactttatctcaatgggtttacgtgggcatagatcacgcttcagccgctctgtgtcgactttcttttcgccaggtaaacttgcttgcatagctcatctacgtgtaggctgccaaattgtacccatatttccttatggtgcttttctgaagactccttacaataggtgcgccggaaacaaagtcagtgaaagtacgcatcgtagagctgtcgttcggcctagcactcgctatttcgtgacaacgttccaggacacggaaactcaactcattatagtatcctctgttgaggtaaaaaagagaaagggtatcgtaatcctttctattgaatttcaaagtatgcacttgaaacaacgtgtagaccatcacgtggtttgtttgaagggattggtccgccctggaaatctggttcgtcttcaacaaacgtcaggaacttttttacatttttcccgaccatga

SEQ ID NO: 190908 - DNA, 219 bp, Saccharomyces pastorianus
atgagcaagcataagcatgaatggacggaatcagtggccaactctgggccggcttcaatcttatcttactgcgcgtcctcgattttgatgacagtaacgaacaaattcgtggttaacctggacaactttaacatgaactttgtgatgttgtttgtacaatcactggtgtgcactgtgacgctatgtatcctacgaattgtaggcgttgctaatttttga

SEQ ID NO: 190909 - DNA, 330 bp, Saccharomyces pastorianus
atgcagaacatattttatcgatccgcttatgtgcacacagtttgtccagctaggctagaatattatttattattaccattattattatattattattattattatcatcatcatgaacctgatgatccgaattgtgaagcccacttttcgtacttcactaatccgtcctgggatacagagggcttgatatacactaaactgttcttaaaatccacaaggcctatgggtcttatcatctccctctctgtttctaataacttatcacccagatctcgtagtgggcccatggcagcatccttcgctaaagacgttatatcacttcctgaatag

SEQ ID NO: 190910 - DNA, 763 bp, Saccharomyces pastorianus
atggcccaacgtgttactttcagaagaagaaatccatgtatgttaaaggcacacttataaattacgagaaattctgacgagatgatgattattcaactaaaaaagagcaagagaggagaggataccatgtcaggggtcctagtatagttatcaaaagcaatttaccccgtttttgtaatccactatcaataacttattctgcgcgaaatattgtgtccagaaataatacaatattagtagcaatgagaagaaaaacgatagttaataagagcagccacttttaaccctgatactgactagagctaataatctcaatctgtgttacgaaaatttcttttaaagttttctcgaactccttcctattgaaacatttcgtactaacatatttttcaaatgagaaagtataccaactttctgaaaacattttcaaatagacaacacccgttctaacaaaatcaaggttgttaagaccccaggtggtattttgcgtgcccaacatgtcaagaagttagctaccagaccaaagtgtggtgactgtggtagcgctttgcaaggtatctctactttgagaccaagacaatacgccactgtttccaagacccacaagactgtttccagagcttacggtggttccagatgtgccaactgtgttaaggaaagaattattagagctttcttgatcgaagaacaaaaaattgtcaagaaggttgtcaaggaacaaaccgaagctgccaagaaatctgaaaagaaggctaagaaataa

SEQ ID NO: 190911 - DNA, 1593 bp, Saccharomyces pastorianus
atgccagaaaagttagccatgtcaatggtcgatataaaagatgcggggagtgaactaagggacctcgaatctggagctctggacacaaaatcttccgccgctgatgtatactatgagggtgtagaattgcatagaaccaacgaattcattgataataagccgtcctttttcaataggattgcagctgctttaaatgctgagacgaaaggtattgaaccagttacagaagatgaaaaaaatgatgactcgatactcaatgccgccactatatggttttcagctaatatggtgattgtagcctattccgtaggtgccttgggtcctctagtatttggcctaaatttcggccaaagtgttttagttatcatttttttcaatattttgggtttgatccctgttgcattattctcactttttggggtagaactgggcctaagacagatgattctatcgagatatttggctggtaacatcacagcaagatttttctctcttgttaatgtcattgcttgtgtcggttggtgtgttttaaatatttctgtttctgctcaacttttgaatatggtgaatgaaggctctgggcacaactgtcctatttgggcaggttgtttgattattgctggtggtaccgtgcttgtgactttttttggttacagtgtcgttcatgcatacgaaaaatggtcgtgggtacccaattttgctgcctttttggtcattattgcccaactatcgagatcaggaaaatttaaaggtggtgaatgggtagggggtgcaactactgcaggtggtgttctttcttttggttcatctgtttttgggtcagctgcgggttgggcgacttatgcagcagattacactgtttatatgccaaagaccacaagtaaatacaaaatttttttttccgtagtagccggtctagcgttccctctatttttcaccatgattcttggtgctgcttgcggtatggcggcccttaatgacccaacctggaagtcatattatgataaaaacgccatgggtggtgtcatatatgctatcctggtccctaactctctaaacggattcggtcaattctgctgtgttttgttggctctttcaactgttgctaataatgtccctggaatgtacactgtcgctttatccgctcaagctttgtgggcacctttggctaaaataccaagagtagtctggacaatggcaggtaatgctgccactttaggtatttccatccctgctacctattactttgacggctttatggagaattttatggattccattggttattatttggctatttatattgccattgcatgttcagagcattttatttataggcgttccttcagtgcttacaatattgatgattgggataattgggagcatctacctatcggtatcgcaggtactgctgccttaattgctggtgcctttggagtagcgttgggtatgtgccaaacttattgggttggtgagatcagtcgtttgatcggagagtacggcggtgacattgggttcgagttaggcggaagttgggcgttcatcatctataacattgtaagacctttagaactcaaatatttcggtcgatga

SEQ ID NO: 190912 - DNA, 874 bp, Saccharomyces pastorianus
atggtatgttaaaaagtgctcagatgaaagatgacgtcccatattccatgttaaagttgccatgagttagtataaaaggcaataaaggtaccataacgagaaaagaaagtaaaagaagaaatgttttgcaaatttaaggtggcgtaacagcaactattggctaatatattaatggcaatcattgtgaaaagaaatgtgaaatccgtatcgtaattggttaaatttataactcaaatttaaacactcgaatagctgacccgtaatattttatcccgctttaagagttcaacgctaaaaaatgatatctagctaaccattatgctacaggaaccttttttggactattatccctatcatgaaaactggaaggatctttcaaggacgccatttccaaagatttcccccacactggaacctattttactaacaatttttaaaatggttttttacctaaattgttttttctcagtctgacgctgttactatccgtactagaaaggttatctccaacccattgttggccagaaagcaattcgtcgtcgacgtcttgcacccaaacagagctaatgtctccaaggatgaattgcgtgaaaaattagctgaagtctacaaggctgaaaaggacgctgtctccgttttcggtttcagaacccaatttggtggtggtaagtctgttggtttcggtttggtctacaactctgttgccgaagctaagaagttcgaaccaacttacagattagtcagatacggtttggctgaaaaggttgaaaaggcttccagacaacaaagaaagcaaaagaagaacagagacaagaagatcttcggtactggtaagagattggctaagaaggttgctcgtcgtaacgccgattaa

SEQ ID NO: 190913 - DNA, 5269 bp, Saccharomyces pastorianus
atggaatcccaacaattatctcaacattcacccatttctcatggtagcgcctgtgcttcggttacttctaaggaagtccacacaaatcaagatccgttagacgtttcagcttccaaaacagaagaatgtgagaaggcttccactaaggctaactctcaacagacaacaacacctgcttcatcagctgttccagagaacccccatcatgcctctcctcaacctgcttcagtaccacctccacagaatgggccgtacccacagcagtgcatgatgacccaaaaccaagccaatccatctggttggtcattttacggacacccatctatgattccgtatacaccttatcaaatgtcgcctatgtactttccacctgggccacaatcacagtttccgcagtatccatcatcagttggaacgcctctgagcactccatcacctgagtcaggtaatacatttactgattcatcctcagcggactctgatatgacatccactaaaaaatatgtcagaccaccaccaatgttaacctcacctaatgactttccaaattgggttaaaacatacatcaaatttttacaaaactcgaatctcggtggtattattccgacagtaaacggaaaacccgtacgtcagatcactgatgatgaactcaccttcttgtataacacttttcaaatatttgctccctctcaattcctacctacctgggtcaaagacatcctatccgttgattatacggatatcatgaaaattctttccaaaagtattgaaaaaatgcaatctgatacccaagaggcaaacgacattgtgaccctggcaaatttgcaatataatggcagtacacctgcagatgcatttgaaacaaaagtcacaaacattatcgacagactgaacaataatggcattcatatcaataacaaggtcgcatgccaattaattatgagaggtctatctggcgaatataaatttttacgctacacacgtcatcgacatctaaatatgacagtcgctgaactgttcttagatatccatgctatttatgaagaacaacagggatcgagaaacagcaaacctaattacaggagaaatctgagtgatgagaagaatgattctcgcagctatacgaatacaaccaaacccaaagttatagctcggaatcctcaaaaaacaaataattcgaaatcgaaaacagccagggctcacaatgtatccacatctaataactctcccagcacggacaacgattccatcagtaaatcaactactgaaccgattcaattgaacaataagcacgaccttcaccttaggccaggaacttactgaatctacggtaaatcacactaatcattctgatgatgaactccctggacacctccttctcgattcaggagcatcacgaacccttataagatctgctcatcacatacactcagcatcatctaatcctgacataaacgtagttgatgctcaaaaaagaaatataccaattaacgctattggtgacctacaatttcacttccaggacaacaccaaaacatcaataaaggtattgcacactcctaacatagcctatgacttactcagtttgaatgaattggctgcagtagatatcacagcatgctttaccaaaaacgtcttagaacgatctgacggcactgtacttgcacctatcgtaaaatatggagacttttactgggtatctaaaaagtacttgcttccatcaaatatctccgtacccaccatcaataatgtccatacaagtgaaagtacacgcaaatatccttatcctttcattcatcgaatgcttgcacatgccaatgcacagacaattcgatactcacttaaaaataacaccatcacgtattttaacgaatcagatgtcgactggtctagtgctattgactatcaatgtcctgattgtttaatcggcaaaagcaccaaacacagacatatcaaaggttcacgactaaaataccaaaattcatacgaaccctttcaatacctacatactgacatatttggtccagttcacaacctaccaaaaagtgcaccatcctatttcatctcatttactgatgagacaacaaaattccgttgggtttatccattacacgaccgtcgcgaggactctatcctcgatgtttttactacgatactagcttttattaagaaccagtttcaggccagtgtcttggttatacaaatggaccgtggttctgagtatactaacagaactctccataaattccttgaaaaaaatggtataactccatgctatacaaccacagcggattcccgagcacatggagtcgctgaacggctcaaccgtaccttattagatgactgccgtactcaactgcaatgtagtggtttaccgaaccatttatggttctctgcaatcgaattttctactattgtgagaaattcactagcttcacctaaaagcaaaaaatctgcaagacaacatgctggcttggcaggacttgatatcagtactttgttacctttcggtcaacctgttatcgtcaatgatcacaaccctaactccaaaatacatcctcgtggcatcccaggctacgctctacatccgtctcgaaactcttatggatatatcatctatcttccatccttaaagaagacagtagatacaactaactatgttattcttcagggcaaggaatccagattagatcaattcaattacgacgcactcactttcgatgaagacttaaaccgtttaactgcttcatatcaatcgttcattgcgtcaaatgagatccaacaatccgatgatcttaacatagaatctgaccatgacttccaatctgacatcgaactacatcctgagcaaccgagaaatgtcctttcaaaagctgtgagtccaaccgattccacacctccgtcaactcatactgaagattcgaaacgtgtttctaaaaccaatattcgcgcacccagagaagttgaccccaacatatctgaatctaatattcttccatcaaagaagagatctagcaccccccaaatttccaatatcgagagtaccggttcgggtggtatgcataaattaaatgttcctttacttgctcccatgtcccaatctaacacacatgagtcgtcgcacgccagtaaatctaaagatttcagacactcagactcgtacagtgaaaatgagactaatcatacaaacgtaccaatatccagtacgggtggtaccaacaacaaaactgttccgcagataagtgaccaagagactgagaaaaggattatacaccgttcaccttcaatcgatgcttctccaccggaaaataattcatcgcacaatattgttcctatcaaaacgccaactactgtttctgaacagaataccgaggaatctatcatcgctgatctcccactccctgatctacctccagaatctcctaccgaattccctgacccatttaaagaactcccaccgataaattctcatcaaactaattccagtttgggtggtattggtgactctaatgcctatactactatcaacagtaagaaaagatcattagaagataatgaaactgaaattaaggtatcacgagacacatggaatactaagaatatgcgtagtttagaacctccgagatcgaagaaacgaattcacctgattgcagctgtaaaagcagtaaaatcaatcaaaccaatacggacaaccttacgatacgatgaggcaatcacctataataaagatattaaagaaaaagaaaaatatatcgaggcataccacaaagaagtcaatcaactgttgaagatgaaaacttgggacactgacgaatattatgacagaaaagaaatagaccctaaaagagtaataaactcaatgtttatcttcaacaagaaacgtgacggtactcataaagctagatttgttgcaagaggtgatattcagcatcctgacacttacgactcaggcatgcaatccaataccgtacatcactatgcattaatgacatccctgtcacttgcattagacaataactactatattacacaattagacatatcttcggcatatttgtatgcagacatcaaagaagaattatacataagacctccaccacatttaggaatgaatgataagttgatacgtttgaagaaatcactttatggattgaaacaaagtggagcgaactggtacgaaactatcaaatcatacctgataaaacagtgtggtatggaagaagttcgtggatggtcatgcgtatttaagaatagtcaagtaacaatatgtttatttgttgacgacatgattttattcagcaaagacttaaatgcaaataagaaaatcataacaacactcaagaaacaatacgatacaaagataataaatctgggtgaaagtgataacgaaattcagtacgacatacttggcttagaaatcaaatatcaaagaggtaaatacatgaaattaggtatggaaaactcattaactgagaaaatacccaaattaaacgtacctttgaatccaaaaggaagaaaacttagcgctccaggtcaaccaggtctttatatagaccaggatgaactagaaatagatgaagatgaatacaaagagaaggtacatgaaatgcaaaagttgattggtctagcttcatatgttggatataaatttagatttgacttactatactacatcaacacacttgctcaacatatactattcccctctaggcaagttttagacatgacatatgagttgatacaattcatgtgggacactagagataaacaactgatatggcacaaaaacaaacctaccgagccagataataaactagtcgcaataagtgatgcttcgtatggcaaccaaccgtattataaatcacaaattggcaacatatatttacttaatggaaaggtaattggaggaaagtccaccaaggcttcattaacatgtacttcaactacggaagcagaaatacacgcgataagtgaatctgtcccattattaaataatctaagttacctgatacaagaacttaacaagaaaccaattattaaaggcttacttactgatagtagatcaacgatcagtataattaagtctacaaatgaagagaaatttagaaacagattttttggcacaaaggcaatgagacttagagatgaagtatcaggtaataatttatacgtatactacatcgagaccaagaagaacattgctgatgtgatgacaaaacctcttccgataaaaacatttaaactattaactaacaaatggattcattag

SEQ ID NO: 190914 - DNA, 426 bp, Saccharomyces pastorianus
atgctcatcgatcaaatcgtggcagcggtaccaggggtacctgatataagtggcaacgcttcggccctatcgttacagagacgcagtcaagagttcgccacctcatggatatcaatgacatatagtcagagttatggtgacctggcacagaactggcagaatgacgaaggtggagcaggaaattttgattcttatgctgaagagaagttacagaatttcttttcaggtaatagggattggaaatactgctttgctgctgaggacacgaaaaacggtgagccacttgattacgatgacatacctggtgacggtgcaggcacgggttcggcattcaagtctgagatatattttaacacttacggtggtatagataattattgtaatgacgagcatatcggtgctcagaacactggagatggtcgataa

SEQ ID NO: 190915 - DNA, 300 bp, Saccharomyces pastorianus
atggcccatctctcactaaatcagtacaaatgcactcacatcattatgcacggcacttgcctcagcggtttataccctgtgccatttacccataaagcccacgattatccacattttaatatctatatctcattcggcggccccaaatattgtataactgcccttaatacatacgttataccactttttcaccatctactatccactcaatttatatacacttatgtcaatattacaaaaaaatcaccactaaaatcacctaaacataaaaatattctatccttcaacgataatacataa

SEQ ID NO: 190916 - DNA, 576 bp, Saccharomyces pastorianus
atggaatctattatcctcagcattgccatctttattggcgtcctccttggcactagcgttggtactttcagtggtagtggcattagtgctggagttggtgctagcagtggtagtggcattagtgctggagttggtgctagcagtggtagtagcactagtgttggagtcggtactttcggtggtagtagcactagtgttggagtcggtactttcggtggtagtagcactagtgttggagttggtactttcagtggtagtcgcactagtcctgacgttgatgctggcagtggtagtagcactagtcctgacgttggtgctggcagtggtagtagcattagtgctggagttggtactttcagtggtagtcgcactagtcctgacgttgatgctggcagtggtagtagcactagtcctgacgttggtgctggcagtggtagtagcattagtgctggagttggtagtcgcattggtactggcattagcactaccatgaatgcacgtgtcgctgtcctcatcactgctgcaatactttctgcacctgtcactgctattgctctcctggaagctagacggtaa

SEQ ID NO: 190917 - DNA, 5314 bp, Saccharomyces pastorianus
atggaatcccaacaattacatcaaaatccacattctctacatggtagcgcctatgcttcggttacttctaaggaagtcccatcaaatcaagatccgttagccgtttcagcttccaatttaccggaatttgatagagattccactaaggttaattctcaacaagagacaacacctgggacatcagctgttccagagaaccatcatcatgtctctcctcaacctgcttcagtaccacctccacagaatggacagtaccaacagcacggcatgatgaccccaaacaaagctatggcctctaactgggcacattaccaacaaccgtctatgatgacgtgttcacattatcaaacgtcacctgcgtattatcaaccggacccacactatccgttgccacagtatatcccaccactgagtacttcctcacctgatccaatcgattcacagaatcaacactctgaagtacctcaagctgagacaaaggtgagaaataacgtcttaccaccacacactttaacatcagaagaaaacttttctacatgggttaaattttacatcagatttttgaagaactctaatctcggtgacatcattccaaatgaccagggtgaaatcaaaagtcaaatgacttatgaagaacatgcgtatatatacaataccttccaagcatttgccccatttcatttattgccaacatgggtaaaacaaattttagaaattaattatgctgacatccttacagtcctttgtaaaagtgtgtccaaaatgcaaactaacaatcaagaattaaaggattggatagctcttgccaaccttgagtacgacggaagtacatctgctgatacatttgaaattacagtcagtacgatcattcagaggctaaaagaaaacaatatcaatgttagcgacagattggcctgtcaactaatacttaaaggtctatccggtgacttcaaatacctacgtaatcaatatcgtaccaaaacgaacatgaaactttcccaattattcgctgaaattcagttaatatatgacgaaaataaaatcatgaatctaaataaaccgtcccaatacaaacaacacagcgaatacaaaaatgtttctcgcacatctccaaacacgactaacacaaaggttacaactcgtaattatcatagaacaaatagttcaaaaccaagagcagcaaaagctcacaatattgctacatctagtaaattctcaagggtgaacaatgatcacattaatgaatcaaccgtttcatcacaatacttaagcgatgacaacgaacttagtcttaggccagcaacagaaagaatctaagccaacacacacaatagactcgaatgacgaactacctgatcaccttcttattgattcaggagcttcgcaaacgcttgtcagatcagcccattatttacaccatgcaacacccaattctgaaataaacatagtcgatgctcaaaaacaagacattcctataaatgccattggtaatcttcacttcaactttcagaacggcaccaaaacatcaataaaagcactacacacaccaaacatagcctatgatctattaagtttgagtgagctggctaatcaaaatattactgcctgctttaccagaaacactttagaaagatcggatggtacagtactagctcccatagtcaaacatggagacttttactggttatctaaaaaatacctaattccttcgcacatttcaaagctaacaataaacaacgtcaacaaaagcaaaagcgtaaataaatatccatatccgttaatacatcgaatgcttggacatgctaacttccgaagtattcagaagtctcttaagaagaatgcagttacatatttgaaggaatcggatattgaatggtctaacgctagcacatatcaatgtcctgactgtctaatcggcaaaagcacgaaacatagacatgtcaaaggatcacgactaaagtaccaagaatcatatgagccttttcagtacttgcacaccgatatatttggtcctgtacatcacttaccgaaaagtgcaccttcttactttatatcgtttacagatgagaaaaccagattccaatgggtgtacccattacacgaccgtcgtgaagaatctatcctcaatgtttttacatcgatattagcatttattaagaaccaattcaatgctcgcgttctagttatccagatggatcgtggctccgagtacactaacaaaactcttcataagttctttacgaacagaggtattactgcatgctatacaaccacggcagattctagagcacacggtgtcgctgaacgattaaatcgtactttattaaacgattgtcgcacactgcttcattgcagtggtctaccaaatcatctatggttctcagcagtcgaattttctactataatcagaaattcattagtctcaccaaaaaacgataaatctgcaagacaacatgcaggtttagctggactggacattactactatactacctttcggtcaaccggttatagttaacaaccataatcccgactcgaaaatacatcctcgtggcattccaggttacgccttacatccgtcacgaaactcttatggctatattatctatcttccatcattaaaaaagacagtagatactaccaattacgttatattacaagacaagcaatccaaattggaccaattcaattatgatacactcacctttgatgatgatctcaatcgtttaacagcccataaccaatcttttattgaacaaaatgaaacggagcagtcatatgatcaaaatacagaatctgatcatgactatcaatcggagattgaaataaactctgatcctctagtgaacgacttctcgtcccaatcaataaaccctttacaattagacaaggaaccagtccaaaaagtacgtgcaccaaaagaagttgatgccgacatatctgaatacaatattcttccatctactatacgatctcgtacaccccatatcattaataaagagagtaccgaaatgggtggtaccgttgaatcagatactacttcacctagacactcgtctaccttcactgcacgaaaccaaaaccgacctggtagtaccaatgagatgattgatttgacctcacaggatagagttaattatggacttgaaaacatcaaaactacacgtttgggtggtacggaggaaccatatattcaacgaaatagtgatacaaatatcaaatacaggactacaaatagtacgccctcaatagatgaccgttcgtccaacagtgaatccactactcccatcatctccatagaaacaaaggctgtatgtgataatacaccctccattgatacggatccgccagaatatcgatcttctgaccatgcgactcctaatataatgcctgacaaatcctcaaaaaatgttacggctgattctattcttgacgacctcccacttcctgacttaacccataaatctcctacggacacttctgatgtttcaaaagatattccacacatacactctcgtcagactaattccagtttgggtggtatggatgattctaatgttctgactactaccaaaagtaagaaaagatcattagaagataatgaaactgaaattgaggtatcccgagacacatggaataataagaatatgagaagtctggaaccaccaagatcgaagaaacgcataaatttaattgcagcaataaaaggagtgaaatcgatcaaaccagttcgaacgaccttaagatatgatgaagcaattacatataataaagacaacaaagaaaaagacagatatgttgaagcttatcataaagaaattagccaactattgaaaatgaacacttgggatacaaacaaatattatgatagaaatgacatagatcctaaaaaagtaataaactcaatgtttatatttaacaagaaacgtgatggtacacacaaagctagatttgttgcaagaggcgacattcaacaccccgatacatatgattctgatatgcaatccaataccgtacatcactatgcactgatgacgtcactgtcaatcgcattagacaacgactattatatcacacagctggacatatcctctgcttacttatatgctgatatcaaagaagaattatacataagacctccaccacatttaggtttgaatgataaattactacgtttgagaaaatcactctatggtttgaaacaaagtggtgcaaactggtatgaaaccattaaatcatatttaataaattgttgcgacatgcaagaagttcgcggatggtcatgcgtatttaagaatagtcaagtaacaatttgcttattcgttgatgatatgatattattcagcaaagacttaaatgcaaataagaaaatcataacaacactcaagaaacaatacgatacaaagataataaatctgggtgaaagtgataacgaaattcagtacgacatacttggattagagatcaaatatcaaagaagcaagtacatgaaattaggtatggaaaaatccttgacagaaaaattacccaaactaaacgtacctttgaacccaaaaggaaagaaacttagagctccaggtcaaccaggtcattatatagaccaggatgaactagaaatagatgaagatgaatacaaagagaaagtacatgaaatgcaaaagttgattggtctagcttcatatgttggatataaatttagatttgacttactatactacatcaacacacttgctcaacatatactattcccctctaggcaagttttagacatgacatatgagttaatacaattcatgtgggacactagagataaacaattaatatggcacaaaaacaaacctaccaagccagataataaactagtcgcaataagcgatgcttcatatggtaaccaaccatattacaagtcacaaattggtaacattttcctactcaacggaaaagtgattggaggaaagtcgacaaaggcttcgttaacatgcacttcaactacagaagcagaaatacacgcagtcagtgaagctattccgctattgaataacctcagtcaccttgtgcaagaacttaacaagaaaccaattattaaaggcttacttactgatagtagatcaacgatcagtataattaagtctacaaatgaagagaaatttagaaacagattttttggcacaaaggcaatgagacttagagatgaagtatcaggtaataatttatacgtatactacatcgagaccaagaagaacattgctgatgtgatgacaaaacctcttccgataaaaacatttaaactattaactaacaaatggattcattag

SEQ ID NO: 190918 - DNA, 330 bp, Saccharomyces pastorianus
atgtctgacgcaggtagaaaaggattcggtgaaaaagcttctgaagctttgaagccagactctcaaaagtcatacgctgaacaaggtaaggaatacatcactgacaaggccgacaaggtcgctggtaaggttcaaccagaagacaacaagggtgtcttccaaggtgtccacgactctgccgaaaaaggcaaggataacgctgaaggtcaaggtgaatctttggcagaccaagctagagattacatgggagccgccaagtccaagttgaacgatgccgtcgaatatgtttccggtcgtgtccacggtgaagaagacccaaccaagaagtaa

SEQ ID NO: 190919 - DNA, 354 bp, Saccharomyces pastorianus
atgatagttgaactttattcaaatatcatcgaagtaagaagatatactactaaagactccctttgctctatattcgagtcaggctccaccagtcatttcgaaattaaccagttacaggtcaaaagactaaacttactgcaaaaccaatttgcttctgttttcacttctttccaccccaaagataatacaaagggcatacatatcaattttttttcacctgtcactaggataactgaccttcaatattcctttttttatacgaatcagatactgttcggtacacgatatctaattaaaatgattcaaaactttgtaacaggtaaagttttcactagaaccaatcaatccaagtga

SEQ ID NO: 190920 - DNA, 369 bp, Saccharomyces pastorianus
atggtcaaattaacttcaatcgccgctggtgtcgccgccattgccgctggtgcctccgctgcagcaaccactacactatctcaatctgacgaaagagttaatttggttgaattaggtgtctatgtttccgatatcagagctcatttggctgaatactactccttccaagctgcccacccaactgaaacttatccagttgaaattgcagaagctgttttcaactacggtgatttcaccaccatgttgactggtattcccgccgaccaagttaccagagttatcactggtgttccatggtactctagcagattaaagccagctatctctagcgctctatccgcagacggtatctacactattgcaaattag

SEQ ID NO: 190921 - DNA, 1158 bp, Saccharomyces pastorianus
atgactaaatctgtagatacgctgctgatcccaggccccattatcctaagcggagcagtccagaaggccctggacgttccctctttgggccacacctctcctgagttcgtctctatttttcaaagggtgctaaagaacacaagagctgtcttcaaatccgctgctgcctcgaagtctcagccttttgtgcttgccggctctggtacgttggggtgggacatatttgcctcgaactttattctttcgaaggcccccaacaagaacgtgctggtcgtatccactgggacattttctgacaggtttgctgactgtctgcgtagctacggtgcgcaagtagatgttgttaggcccctcaagataggcgaatcagttcccttagaactgattactgaaaagttgtcgcaaaatagctatggggctgtcacggttacgcacgttgacacttcaacggcagtgctgtccgatctgaaagccatttcgcaagcgattaagcagacttcgccggaaacgttcttcgtagtcgatgctgtatgctcgattggatgcgaagagtttgaatttgatgaatggggggtggatttcgccttgactgcttcgcaaaaggctattggcgctccagcgggtctttctatctcgctatgcagtagcagattcatggattatgcactcaacgacagcaaaaatggtcatgtacatgggtatttttcctcgttgagaagatggacaccaataatggaaaattatgaggctggtaaaggagcttattttgcaaccccacccgtacaactaattaatagccttgatgtagccttgaaagaaattctcgaagaggggttgcataagagatgggatttgcaccgtgaaatgagtgattggtttaaagacagtttggttaatggcttgcaattgacatccgtcagtaggtatccttctaacatgtctgcgcacgggttgacagccgtatacgtagcagatcctcctgatgtcattgcttttttaaagtcacacggtgtagtcattgccggaggtattcacaaggacatcggacccaagtatatccgtattggacatatgggtgtgaccgcttgcaacaagaatttaccgtacatgaagaactgcttcgacttaataaaactagctcttcagaggaaaaagtga

SEQ ID NO: 190922 - DNA, 969 bp, Saccharomyces pastorianus
atggaaatgactgattttgaactaactagtaattcgcaatcgaacttggctatccctaccaacttcaagtcgactctgcctccaaggaaaagagccaagacaaaagaggaaaaggaacagcgaaggatcgagcgtattttgagaaacagaagagctgctcaccagagcagagagaaaaaaagactacatctgcagtatctcgagagaaaatgttctcttttggaaaatttactgaacagcgtcaaccttgaaaaactggctgaccacgaagacgcgttgacttgcagccacgacgcttttgttgcttctcttgacgagtacagggatttccagagcacgaggggcgcttcactggacaccagggccagttcgcactcgtcgtctgatacgttcacaccttcacctctgaactgtacaatggagcctgcgactttgtcgcccaagagtatgcgcgattccgcgtcggaccaagagacttcatgggagctgcagatgtttaagacggaaaatgtaccagagtcgacgacgctacctgccgtagacaacaacaatttgtttgatgcggtggcctcgccgttggcagacccactctgcgacgatatagcgggaaacagtctaccctttgacaattcaattgatcttgacaattggcgtaatccagccgtgattacgatgaccaggaaactacagtgaacaagaacactagccccagcttttgctttctgctttttttctttttttttttttttagtcgtggttctctgatgggggaggagccggttaaagtaccttcaaaagcagaatgcagggttattggaagctttctttttttcttttatgctagtttttcctgaacaaatagagccattcttttcttattactaagaaatggacggcttgcttgtactgtccgaagcgcagtcaggtttgaattcatttgaattgaatgatttcttcatcacttcatga

SEQ ID NO: 190923 - DNA, 483 bp, Saccharomyces pastorianus
atgtctataccccattccgtattttcggcactcttggtcttcgtggcgctagctactacaaccttagccagtacagaagcttgcttaccaacaaacaaaagggaagatggtatgaatattaatttttatgagtacacaataggcgaccaaaccacatacttggagcctgaatatatgggctatgaatactccaatacaaagaagttaggttccgttagcggacagaccaatctctccatatactatagtccgccttgtgagagcactcctacctgtgtgacttatgcagttttgaagcgtgatgaggatggatatgatccttgcggacctctttatgaaactaaaaaacgtgacactgaatactgtgacccaaatactgcctattggagttctgatctttttggtttctatactactccaactaatgtaactgtggaaatgacagggtacttaatatggagtatgggcaaccgacgccgttga

SEQ ID NO: 190924 - DNA, 1398 bp, Saccharomyces pastorianus
atggcccgcaatagacaagcgtgcgactgttgttgcattcgtcgagtaaagtgtgatcgtaaaaaaccatgtaaatgttgtcttcaacacaatctgcaatgtacatatcttcgacctttgaagaaaagaggtccaaaacccgtcaaggtgagaaatttaaagaaagtagatgatgtacaggtatttagtaaaagtagtagtggtggcataatgaaggttccaaaggcactaattgatcagtgtctgcggctctataatgataagttgtatgtgatctggcctttgctgtgttatgatgatctttacgaacttttagagaaaagatatgacgaaacctgtgtgtattggttcctggtatctctttctgccgccacgcttagcgatttgcagactgaaattgagtcggaaggaggggttacctttactgggatacagttatccagtttctgcatgtcatcacgccaagaatttgacgattttaacggtagtgatatattcaagattatgacgtactattgtctaaaccgctgctacgcacagatgtccaactcaagaacttcgtatcggctttcttgtgaagccgtggggctcattaagttggcggggttccatcgcgaggaaactttgaaacttcttcctttcgatgagcagcagcttggaaggaaagtttattatttgcttctcttaacggaaagatacttttctgtgtatacgcattgcgccacgagcctggataccacgattgctccaccacaaccggagaacgtaacggacccccgactatctctcgacagcttcttggagatgattagggtatttactgtaccgggaaaatgcttctttgatgctctagctaccgactctgctaatgtaacctgtactgaagactcccttaaaaagatatggagggaacttcatacggtgccacttgagatagaaccatggtcttacggctatgtagacatatctttttcacggcattggattagaacacttgcttggaagctagtgcttcaaataagcggtatgcgaatcagtttcctttcaaatagcaagaatacgcatattccagtagaaattgctagagacatgttagaagacacatttttaatcccaaaaaatctttatgcagttcacggtccagggatatcagtgaaagcactagaaatagccgacgcattggtagatgttgtgaatcagtacgatcaaaatgcagagtcggaggcttggaattttttgttcgatatatccaaatttgtcttctctcttaagcattgtgatagcacattagttgataagtttacgacaaagtgtcagtgtgcgcttatcacgcttcctctttctaatccgcttgaatcgacagatggttctaaagaagatgtagatgcgcttccttaa

SEQ ID NO: 190925 - DNA, 1776 bp, Saccharomyces pastorianus
atgtctcacaaacaattcaaatcagatggaaacatcgttactccctacctacttggccttgctcgaagcaatcccggccttacagtgattaagcacgacagagtggttttccggactgcgtcagctcctaattcagggaaccctcctaaagtttcattggtttctggaggtggcagtggtcatgagccaacgcatgccggttttgttggtgaaggtgccttagatgcgattgcagcaggtgccatttttgcttctccttcaactaaacagatctattctgctattaaagctgttgaatctcctaagggtaccttgatcattgtaaaaaattacaccggtgatattatacattttggtctcgctgctgaaagagctaaagctgctggaatgaaagtcgaactggttgctgtaggagatgatgtctctgtcggtaagaagaaaggttctttagtcgggcgtcgaggtctcggagccaccgtattggtgcataaaattgctggggcagccgcttctcatggactggagttggcagaagttgccgaagttgctcagtcagtagttgacaatagtgtcacaattgcggcatctcttgatcactgcacggttcctggccacaaacctgaagccattttgggcgagaatgagtatgaaatcggtatgggtattcataacgagtctggtacctataagtcttctccgctgccatcgatttctgagctcgtttcccagatgcttcctcttcttctcgatgaggatgaagaccgttcttatgtgaagtttgagcccaaagaggacgtagttcttatggttaacaacatgggtggtatgtctaatctagaattgggttatgctgcagaggtcatttctgaacaattgattgataagtatcaaattgtgcccaagagaacgattactggagcattcattactgcattgaatggtcctgggtttggtatcactcttatgaacgcttcaaaagctggtggcgatatccttaagtatttcgattatcctaccacagcgagtggatggaatcaaatgtaccattctgccaaagattgggaggtacttgccaaagggcaggttcccaccgccccctctttaaagacattgaggaatgaaaaaggttcgggtgtgaaagctgattatgacacttttgctaaaattttgcttgctgggattgcaaaaattaacgaggttgaaccaaaggttacttggtacgataccattgcaggagatggtgattgcggaactactcttgtgtccggtggtgaagcattggaagaagctattaaaaaccatacgttgcgcctcgaggatgctgctcttggtatcgaagatattgcgtatatggttgaggattctatgggtggtacgtccggtggtctgtactctatctatctttctgctctcgcacaaggagttagggattctggggacaaggaacttactgcggaaactttcaaaaaggcatcaaacgttgcactagatgctttgtataagtatacgagagcccgtcctggttacaggactctgatcgatgctctgcaaccttttgtcgaagcgctgaaagccgggaagggtcccagagccgccgcccaagctgcttatgatggtgccgaaaagacaaggaagatggatgcccttgttgggcgtgcttcttacgtggctaaggaggagctgagaaaactcgacagcgaaggtggattaccagatccaggagcagttggtcttgctgcactactcgatggatttgttacagctgctgggtactag

SEQ ID NO: 190926 - DNA, 1941 bp, Saccharomyces pastorianus
atgagttacgaatctgggaggtcatcctcctcttccgagagtacacggccaccaacgctaaaagaagaacctaatggtaaaatagcttgggaagaaagtgtcaaaaaatctagggaaaataacgaaaatgacagcactctcttgaggcgaaagctaggtgagactcgaaaagcaattgaaactggaggatcatcgagaaataaactttctgctttgacacccttgaaaaaagtggttgacgagaggaaggattcggtacaaccacaggtcccttccatgggttttacttattctttgcctaatttgaagactttaaacagtttttcagatgctgagcaagcacgtataatgcaagattatctatccaggggggtaaatcaaggcaacagtaataattatgtagacccactatatcggcaattaaatccaactatgggtagtagcaggaacaggcctgtttggagtttaaatcagccgttaccgcatgtattggatcgaggcttggcagcaaagatgatacaaaagaatatggatgcaaggtcccgcgcatcatcgagacgagggtcgaccgatatttcaagggggggttctactacgtcagtgaaagactggaaaaggctccttagaggtgcagcaccgggtaaaaagcttggtgacatcgaagctcaaacgcaacgcgataatactgttggtgcagatgtgaaacctactaagttagagcctgaaaacccacaaaagccctctaacacgcatattgagaatgtttcacgtaagaaaaagcgtacttcgcataatgtcaatttttcattaggcgatgaaagctacgcatcctccatagccgatgcagaatccagaaaattaaagaacatgcaaaccctcgatggttctactccggtttatacgaagcttcctgaagaacttattgaagaggaaaataaaagtacgagtgcattagatggtaatgaaattggtgcctcagaagatgaagacgcggatataatgacatttcctaacttttgggcaaaaattcgctatcatatgcgagaaccgtttgcggagtttctcgggacactagttcttgtcatttttggtgttggtggtaatcttcaagcaactgtaacaaaaggtagtggtggttcctatgaatccctatcatttgcatgggggttcggttgtatgcttggtgtttacgtcgcaggcggtattagtggtggtcatattaaccctgctgttacgatttcaatggcaatttttcgaaaattcccctggaaaaaggtgcccgtatatattgttgctcagattatcggtgcatattttggaggagctatggcttatggttatttttggagctctatcacagaatttgagggaggtccgcacataagaacaacggcgaccggtgcgtgtttgtttactgatccaaagtcttacgtcacgtggagaaatgccttctttgacgaattcataggagcctctatacttgtgggttgtttgatggcgctattggatgatagtaatgctccacctggcaatggtatgaccgcattaattattggattcttagtcgctgcaattggtatggcccttggatatcaaacaagtttcacaatcaatcctgcaagagatctcggtcctcgcatatttgcttccatgattggctatggtccacatgcttttcatctcacacattggtggtggacatggggagcctggggtggtccaattgccggcggtattgctggagcactcatatatgacattttcatttttactggatgcgaatccccagtcaactacccagacaacggttatattgagaatagggtaggtaaacttttacatgcggagttccaccagaatgatggcactgtctcagatgaatctggtgttaacagcaacagcaacactggcagcaagaaatctgtgcctacttcgtcataa

SEQ ID NO: 190927 - DNA, 1677 bp, Saccharomyces pastorianus
atggcagtccttaacttgaaacgtgaaactgtcgacattgaagagacagcgaagaaagatatcaaaccttattttgcttcgaatgttgaagcggttgatattgatgaagatcccgatgtttcaagatacgatccccagacaggagtgaaaagggcgctcaaaaataggcatatctcattgctagctttgggtggtgttattggcccaggttgtcttgttggtgcaggaaacgcactcaacaaaggtgggccacttgctttacttttaggctttagtattattgggatcattgctttctcagtgatggaatctataggtgaaatgatcactttatatccctcgggcggtggatttaccactttggctcgaagatttcatagcgatgcactgcctgcagtttgcggttatgcttacgttgttgtgttcttcgcagttttggcaaatgagtacaacactctctcctccatactacagttttggggcccacaagtccctctatatggttacatcttgatattctggtttgcatttgaaatttttcaactagttggcgttggtctttttggtgaaacggagtactggcttgcttggttgaaaatagtaggattagtagcctattatattttctcgattgtttacatatctggggatattaggaatagaccagctttcggctttcattattggaatagtccaggtgcattatcacatgggtttaagggaattgcgatagtgtttgtgttttgttcgaccttctattctggaacggaatcagttgccttggctgcaacggaatcaaaaaaccctgggaaggctgtgccacttgctgttcgacaaactctgtggagaattttagttgtttatattggaattgctgttttctatggagcaactgttccgtttgacgacccaaacctctctgcttctaccaaagtcctaaaatctcccattgctatcgccatatctcgtgctggttgggccggcggagctcatctggttaatgccttcattttgataacttgcatctccgccattaatgggtcactttatatagggagcagaaccttgacgcatttagcacatgaaggcctagctccaaaaattctggcttggaccgatcgaagaggcgttcccatccccgccatcactgttttcaacgccttgggcctaatatcattgatgaatgtgagcgttggagctgcaaatgcgtactcttatatcgttaatctttctggtgttggcgtctttattgtctggggtgtaataagttatacgcacctgagaataaggaaggcgtgggttgctcaaggaagatccatagaagagctaccttatgaagcgctattttatccgtggacgccagtacttagtctggccgctaacatttttctagcactcatccaaggatggagctatttcgtaccttttgatgcgggcaattttgttgatgcttatatccttctgcctgttggaattttattgtatattggcatatgtgtttttaagagcaatcattttagaactgttgatttgcggtcaatcaacctagacgaaggacgaagaaaagacatggaggctgatctttctgatcaagagagtagcttagcatcttcggaaacgatgaaggattataaaagtgcaacttttttcagatacctcagcaacattttcacctga

SEQ ID NO: 190928 - DNA, 639 bp, Saccharomyces pastorianus
atggctgatttatttgctcctgctcctgaaccatctacagagttaggacgtctcagagttctttctaaaagtgctggtattagagtttcccctctcattttgggaggaatgtcaattggcgacgcttggtctgaaatcctaggatcaatgagcaaggagcgagcttttgagttgctcgatgctttttatgaggcaggtggaaatttcattgatactgcaaataattatcaaaacgaacagtcagaagcttggatcggtgaatggatggtttcaagaaaattacgcgaccagattgtaatcgccaccaagtttaccactgactataagaaatacgacgttggtggtggtaaaagcgcaaactactgtggcaatcacaagcgtagtttgcatgtgagtgtgagggattctctccgcaaattgcaaactgattggattgatatactttacgttcactggtgggattatatgagttctatcgaagaagttatggatagtttacacattctagtgcagcaggcaaggtcctctatttgggtgtgtctgatacgcctgcctgggttgtttctgcggcaaattactacgctaaatctcatggtaaaaccccttttagcatctatcaaggtaaatggaacctgttga

SEQ ID NO: 190929 - DNA, 459 bp, Saccharomyces pastorianus
atggctaggcatttcggtatggccctcgccccatgggatgtcatgggaggtggaagatttcagagtaaaaaagcaatggaggaacggaggaagaatggagagggtattcgttctttcgttggcgcctctgaacaaacagatgcagaaatcaagattagtgaagcattggccaaggttgctgaggaacatggcactgaatctgttactgctattgctattgcctatgttcgctctaaggcgaaaaatgtttttccattggttggaggaaggaaaattgaacacctcaaacagaacattgaggctttgagcattaaattaacaccagaacaaataaagtacttagaaagtattattccttttgatgttggttttcctactaattttatcggtgatgatccggctgttaccaagaaggcttcacttctcacggcaatgtctgcgcagatttccttcgattaa

SEQ ID NO: 190930 - DNA, 678 bp, Saccharomyces pastorianus
atgtcacagtacggatttgtaagagttcctagagaggtagaaaaggccattccagtggtgaatgcacctagaccacgggccgttgttccgcctccaaacagtgaaactgctaggcttgttcgggaatatgccgctaaagaattgactgcccccgttctaaaccactctttgcgtgtttttcaatatagtgtagctatcataagagaccaatttccagcatgggacttggatcaggaagttttgtacgtcacctgcttacttcatgatattgcaacaacagataagaatatgagagccacgaagatgtcatttgagtattatggtggcatactttcaagggagcttgtatttaatgcgacaggtggaaatcaggactatgcagatgcagtaactgaggccatcattcgtcaccaggatttgactgggactggctacattaccaccttggggctcattctgcagattgctactacgcttgacaatgtcggatccaataccgatctgattcatatcgatacagttagtgccattaacgagcaatttccaagactgcactggttatcatgttttgctacggtggtggacactgaaaactcgagaaaaccgtggggccacaccagttctttgggtgatgatttttcaaagaaagtcatatgcaatacatttgggtataactaa

SEQ ID NO: 190931 - DNA, 456 bp, Saccharomyces pastorianus
atgatcgtaaacaatgcacacatacttaccctgccaataccctaccatgccccatctgtcatactcaccatcacttgtatactgatacggcatacgcacacggatgctacaatagtatatactatctcaacttaccctactttcacattccactccatggcccatctctcacttcatgagtacaaatgcacccacatcattatgcacggcacttgcctcagcggtctataccctgtgccatttacgcataactcccactattatccacattttaatatttatatcttattccgcggccccaaatattgtataaatgcccttaatacatacgttatacctctttttcaccgtatactaaccactcaatttatatacacttatgccaatattacaaaaaaatcaccactaaaatcacctaaacataaaaatattctatccttcaacaataatacataa

SEQ ID NO: 190932 - DNA, 309 bp, Saccharomyces pastorianus
atgcgtactttcactgactttgtttctggcgcacctattgtaaggagtcttcagaaaagcaccataaggaaatatgggtacaatttggcaccccacatgtttttgttactacacgtagatgagctatcgattttttctgcataccaagcaagtttacctggcgaaaagaaagtcgacacagagcggctgaagcgtgatctatgcccacgtaaacccattgagataaagtacttttcacagatatgtaacgatatgatgaacaaaaaggaccgattgggtgatgttttgcgtgtgtgctgcccaagttga

SEQ ID NO: 190933 - DNA, 1179 bp, Saccharomyces pastorianus
atggcagacacaccctctgtggcagtacaggccccaccgggctatggtaagacggagttatttcatctccccttgatagcactggcgtctaagggcgacgtgaaatatgtgtcgtttctgtttgtaccgtacacagtgttgcttgctaattgcatgatcaggttgggccgacgcggttgcttgaatgtggcccctgtaagaaactttattgaagaaggttacgatggcgttactgatttatacgtggggatctacgatgatcttgctagcactaatttcacagacaggatagctgcgtgggagaatattgttgagtgcacctttaggaccaacaacgtaaaattgggttacctcattgtagatgagtttcacaactttgaaacggaggtctaccggcagtcgcaatttgggggcataactaaccttgattttgacgcttttgagaaagcaatctttttgagcggcacagcccctgaggctgtagctgatgctgcgttgcagcgtattgggcttacgggactggccaagaagtcgatggacatcaacgagctcaaacggtcggaagatctcagcagaggtctatccagctatccaacacggatgtttaatctaatcaaggagaaatccgaggtgcctttagggcatgttcataaaatttggaagaaagtggaatcacagcccgaagaagcactgaagcttcttttagccctctttgaaattgaaccagagtcgaaggccattgtagttgcaagcacaaccaacgaagtggaagaattggcctgctcttggagaaagtattttagggtggtatggatacacgggaagctgggtgctgcagaaaaggtgtctcgcacaaaggagtttgtcactgacggtagcatgcaagttctcatcggaacgaaattagtgactgaaggaattgacattaagcaattgatgatggtgatcatgcttgataatagacttaatattattgagctcattcaaggtgtagggagactaagagatgggggcctctgttatctattatctagaaaaaacagttgggcggcaaggaatcgtaagggtgaattaccaccaattaaggaaggctgtataaccgaacaggtacgcgagttctatggacttgaatcaaagaaaggaaaaaagggccagcatgttggatgctgtgtctgctga

SEQ ID NO: 190934 - DNA, 528 bp, Saccharomyces pastorianus
atggaatctattatcctcagcattgccatctttattggcgtcctccttggcactagcgttggtgctggcagtggtagtagcattagtcctgacgttgatgctggcagtggtagtcgcactagtcctgacgttgatgctggcagtggtagtcgcattagtgctggagttggtactttcagtggtagtagcactagtcctgacgttgatgctggcagtggtagtagcactagtcctgacgttggtgctggcagtggtagtagcattagtgctggagttggtagtcgcattggtactggcattggtagtcgcattggtactggcattggtactggcattggtagtcgcattagtactagcattggtagtcgcattagtcctgacgttggtactagcagtggtaatcgcattagtactggcgttagtactggcattagcactaccatgaatgcacgtgtcgctgtcctcatcactgctgcaatactttctgcacctgtcactgctattgctctcctggaagctagacggtaa

SEQ ID NO: 190935 - DNA, 87 bp, Saccharomyces pastorianus
atgctccccagaaagtacaagcccgcctacaaaaaacaggcacatcgtgtgaagagtaatccacaaccagcttatactttccaatga

SEQ ID NO: 190936 - DNA, 1629 bp, Saccharomyces pastorianus
atgatttcacccataagctttctatcatcgctgctatgcttaacttatctaacctcagctttaccgattcttcctaagagagaagttgtaacgagagttcacacagcaagcacaactaatgttgtgactgatttttactccactactaccgaagttgttattgccccaactgtcgaattcctaataagcgatagtgttacctttacaacaaccttaattccacaaggtgtgaacccaacagctgaaccaactacgactatcactaaagttctcttaaaaaaggctgaaatgagtacatcttcgcagccaacctctactttgcagccaagcactattccacaatcaacctcctcttttcaagcagaatctactttgcaagccgtctctacgcaacaaactgctatgtctgtttctgcaggtactagtgaggatgtgcaacaattagctactacttctacctctatctcctcctctccttcccctaccactacgtctacttccacacaaaatatcgtgagtggtgtcggtgaagccaatgttgaaggcaacactcaaagtcagcatcattcttaccaagcagctgcgacttcaactttgaatcaacaaacgagtacctcaattgcttctcaggagtccaccgaatcaaccaatacacctacgtcgtcctctacgtcgtcctctacttcttcttctacttcttcttctacttcttcctctacttcttcttctacttcttcctctacttcgtcctctacttcgtcctctacttcatccacacaggaaacagccgctaccacctctgaaggttcctctagtagcagcgctgctataacttcttctccaaaggctattgcatattcaccatataatgatgatggctcttgtaagtctgcagacgctgtctcttctgacttaacgttgatcaaatctaaaggtatttccaaaatccgtgtttatggcaccgactgtaattcctttgaaaccgtccaaccagcagccgtaaaactaggtattaagattaaccaaggtttgtatatcaccagtagcggcgttgattccatagatgattctgttaccacattgattcaatatggtcaaactaacggttgggatgtctttgatttcattactgttggaaatgaagctatcaataatggttggtgttcagtttctgatttgattagtaaaatttcctctgtcaaatccaaattaagcgaagctggctattctggccaaattactaccagtgagccccctgtctcatttgaaaataaccctgatttgtgcaaaaaatctgatattgacttcgttggtatcaacccacatgcctactttgatactagcgccagtgctgaaactgccggtacatttgttaagggtcaagttgaattaattcaaggtgtttgtggtacttctaatgttttcgtcacggaaacaggttacccatcgtctggtattcaaaatggaggcaacattccatccactgctaaccaaattactgcagtccaaaacatcttgaatgaaatggacttggatgttacaatcttatcgacttacaatgattactggaaggctcccggtgattacggtatcgaacaatctttcggtgtgattgaatattttccataa

SEQ ID NO: 190937 - DNA, 315 bp, Saccharomyces pastorianus
atgccagatttttccaattccaatttaaattccttcatagcgtgtctcagatctctgtccattaagatcttaatcatttgccatggtttcatcgtattttcttcattggcagaagtcccatctagattaaccaattttttttcgatcatgatattgctaaccttttctaacttttcccagaacattaggcctcgaatttatttgatccatgagtttctgcacctttatgtgtgcatctattttgtcattaggctgtctgtcgtcccaagattgagcgtaaaatcttctcggagaaatccaggaaagcctccttaa

SEQ ID NO: 190938 - DNA, 306 bp, Saccharomyces pastorianus
atgcagttgccccaaaaacaccacggaacctcatctgttctcgtactttgttgtgacaaagtagctcactgccttattaccacattttcattatacatcacttcgcaaaatgcaatattgaaaatgcctctagagatgaaaaacaatcgtgaaaagggtcctgcgttattaaaacatttgatcagtatgcaatggcacagagacaatcaggaatactatagtcatagacgatacaaggtatatattggtcatgcagacccctctagaaagtaccgacgtcaagttagatacactcaacgaacctag

SEQ ID NO: 190939 - DNA, 231 bp, Saccharomyces pastorianus
atggcagagacagtactaatgaatatcctacgtggtgacgtagcaagattggaaaaatcgactgcgattatcacacaaagtagcggctctcccatcaagagatcaaaaccatttaaatattcttaccaaaaggaaattgtcctgtatgcgcactacatgaagctggattatttttcactgagtgtacctatgccccagaagcgtttaggggcactgcgagagaatacatga

SEQ ID NO: 190940 - DNA, 498 bp, Saccharomyces pastorianus
atgcaattgttttccatcctctctttgttgtcatcattgatgtgttcattgaccgttttagggtcttccgcaagttcctatgttaagtttcctgttcaaaagtttgctgatattataaatataggcacacaggatgtttctaccgtcttcaaaagaaatgaggttcttaacaccacagtgataaatggaataggagtgtatgttgtcaagatggaaatcggaacgcctccacaaacggtgtacctacagttagatactggctcttcagatatgattgtgaataatgctgacattgcctattgcaaatcgatgtctgacggatctgactacgcttcaactgataattacgaactcacggcaacattcactgggcctcgttctactaccacctcaccagagcttataacactgtccgctcttataggggtaaattcaatgcaagaaactcatctacttttaagaataacgcgactttcttcaatgacatatacgtattag

SEQ ID NO: 190941 - DNA, 528 bp, Saccharomyces pastorianus
atgcgtaataatgtgactgaattggtcaacagtataataggtgttcaaacacctggatcgctaccagatactctttctggggcacattcattgcagagacgcataagctattttgacgtcaattggatatcatggaattgggacaatgtaaatgttgatcttaataaagaggtaaaaaaaagtaggcccctccttggggaggaggacgatcaatgcatgttcggttggttcgcaaataatccagggtggaaatattactggtcggtaactgataatcctgatccaggatataaagagaattactctgacattggagatgaaaatgctgtccacggtgaattatattttaacacatatggggggttgatggcttctgtaatgacaacaaagatggtgctcaatgcgaagagacagcttgtggttattgatacaattgtggtaaaggccatctgcgattatgttatgaaatattggaaaaaaaaggttaaccttactacgatatcattatatttgatgttaaagttataa

SEQ ID NO: 190942 - DNA, 1143 bp, Saccharomyces pastorianus
atggatggagccaaatttgaaaatactgtagcttttttaccatctgaaatatttgattgctacaattccacgctacccaagaatgtattccgaagttttgttacctggtcctgctatgagaaattcaattccttagaattccgcacttggctattaatgtggttaccactcattattgcgtggaaaatacgtggtaaaagacactatctcgttatcgttactgctcttatgtttgaagtgctgtatttcttatggacatattcgtacatattccgagaacgcaccttaggaaagcaagtttctcaatttgctaaagagatcattacaaatactccgggtatagacactgaagactgggaacgtgttgcagtaaatttcaattcttatttatatgaaaataaactttggaatactgagtactttttttttgatggttccagctgccaagaagcgttcagaaagatgcttcttgagccattttccttgaaaaaaaatgactttgctaatgccaaggtacctgacggatctgtttgttacactgaaaaagctttgcaggtttattttacacagatagagagaaaatggcactggattaattctgaaggatttttacacaataaaaccacacagagtgttcaattttcgaaacatggttacggttccaaacttctctgggctttcaaggaagtgacaataatgaattcacgctttgcgttcttcagtattgcttacttaaacggtctccttactataccaagactaagaaattcactgcatatcctctatgtatgtgcagttctttcatctatgataattgaatatttaatagggatcgacaaattcaggttcaaatcaatgaatctgatacataaactacagttcttgtcatatattacatgtggacacgagaagtctgatgcaactaattggtctcaaattgcgaagaggacgaatacttacatgtttgagcagaaaatttggaattcgccaatactgttctcagatggtattgattgtgaaaagttttttaaatggtatttcagtacccctgtatcttcgcaagcgtctttgtcagttggttccactgattttgaactctggccatatataaaagaagcacaatcagcttgcaatgatgtgtaa

SEQ ID NO: 190943 - DNA, 744 bp, Saccharomyces pastorianus
atgttaaattattgtaaaacaatgtgtatgatgaggaggaatgtacctaagccaaaaaaaaaaaaaaaaaaaaaaaaaaaaaaagaaacagcttttgcatattcaatccaggcatagggcgactatttagcactcaacgatttttaagcttgtgtattgctgacataaattccggctttagaatccaatattgaaaaacgtgagtacgcagaggagatagaagaaaagtaggaagttaccgtttatattgatttgtgaaatgcatactccgttggatgtggggcaacatagatttaagtgtggatgaaaattatgtgctcattgtgaaaaaaaagttttgcttttactaacaaatttttttattatttgttttcaatagacgtttcctctgacagaagaaaggccagaaaggcttatttcactgctccatcctctgaacgtcgtgttttgttatctgctccattatccaaggaattgagagctcaatatggtatcaaggctttgccaatcagaagagacgatgaagtcttggttgttcgtggttccaagaagggtcaagaaggtaagatttcatctgtttacagattgaagtttgctgttcaagttgacaaggtcaccaaggaaaaggtcaacggtgcttccgttccaattaacttgcacccatccaagcttgttatcactaagttacacttggacaaggacagaaaggctttgatccaaagaaagggtggtaaattggaataa

SEQ ID NO: 190944 - DNA, 5269 bp, Saccharomyces pastorianus
atggaatcccaacaattatctcaacattcacatatatctcatggtagcgcctgtgcttcggttacttctaaggaagtccacacaaatcaagatccgttagacgtttcagcttccaaaattcaagaatatgataaggcttccactaaggctaactctcaacagacaacaacacctgcttcatcagctgttccagagaacccccatcatgcctctcctcaacctgcttcagtaccacctccacagaatgggccgtacccacagcagtgcatgatgacccaaaaccaagccaatccatctggttggtcattttacggacacccatctatgattccgtatacaccttatcaaatgtcgcctatgtactttccacctgggccacaatcacagtttccgcagtatccatcatcagttggaacgcctctgagcactccatcacctgagtcaggtaatacatttactgattcatcctcagcggactctgatatgacatccactaaaaaatatgtcagaccaccaccaatgttaacctcacctaatgactttccaaattgggttaaaacatacatcaaatttttacaaaactcgaatctcggtggtattattccgacagtaaacggaaaacccgtacgtcagatcactgatgatgaactcaccttcttgtataacacttttcaaatatttgctccctctcaattcctacctacctgggtcaaagacatcctatccgttgattatacggatatcatgaaaattctttccaaaagtattgaaaaaatgcaatctgatacccaagaggcaaacgacattgtgaccctggcaaatttgcaatataatggcagtacacctgcagatgcatttgaaacaaaagtcacaaacattatcgacagactgaacaataatggcattcatatcaataacaaggtcgcatgccaattaattatgagaggtctatctggcgaatataaatttttacgctacacacgtcatcgacatctaaatatgacagtcgctgaactgttcttagatatccatgctatttatgaagaacaacagggatcgagaaacagcaaacctaattacaggagaaatccgagtgatgagaagaatgattctcgcagctatacgaatacaaccaaacccaaagttatagctcggaatcctcaaaaaacaaataattcgaaatcgaaaacagccagggctcacaatgtatccacatctaataactctcccagcacggacaacgattccatcagtaaatcaactactgaaccgattcaattgaacaataagcacgaccttcatcttaggccaggaacttactgaatctacggtaaatcacactaatcattctgatgatgaactccctggacacctccttctcgattcaggagcatcacgaacccttataagatctgctcaccacatacactcagcatcatctaatcctggcataaacgtagttgatgctcaaaaaagaaatataccaattaacgctattggtgacctacaatttcacttccaggacaacaccaaaacatcaataaaggtattgcacactcctaacatagcctatgacttactcagtttgaatgaattggctgcagtagatatcacagcatgctttaccaaaaacgtcttagaacgatctgacggcactgtacttgcacctatcgtaaaatatggagacttttactgggtatctaaaaagtacttgcttccatcaaatatctccgtacccaccatcaataatgtccatacaagtgaaagtacacgcaaatatccttatcctttcattcatcgaatgcttgcgcatgccaatgcacagacaattcgatactcacttaaaaataacaccatcacgtattttaacgaatcagatgtcgactggtctagtgctattgactatcaatgtcctgattgtttaatcggcaaaagcaccaaacacagacatatcaaaggttcacgactaaaataccaaaattcatacgaaccctttcaatacctacatactgacatatttggtccagttcacaacctaccaaatagtgcaccatcctatttcatctcatttactgatgagacaacaaaattccgttgggtttatccattacacgaccgtcgcgaggactctatcctcgatgtttttactacgatactagcttttattaaaaaccagtttcaggccagtgtcttggttatacaaatggaccgtggttctgagtatactaacagaactctccataaattccttgaaaaaaatggtataactccatgctatacaaccacagcggattcccgagcacatggagtcgctgaacggctaaaccgtaccttattagatgactgccgtactcaactgcaatgtagtggtttaccgaaccatttatggttctctgcaatcgaattttctactattgtgagaaattcactagcttcacctaaaagcaaaaaatctgcaagacaacatgctggcttggcaggacttgatatcagtactttgttacctttcggtcaacctgttatcgtcaatgatcacaaccctaactccaaaatacatcctcgtggcatcccaggctacgctctacatccgtctcgaaactcttatggatatatcatctatcttccatccttaaagaagacagtagatacaactaactatgttattcttcagggcaaggaatccagattagatcaattcaattacgacgcactcactttcgatgaagacttaaaccgtttaactgcttcatatcattcgttcattgcgtcaaatgagatccaagaatccaatgatcttaacatagaatctgaccatgacttccaatccgacattgaactacatcctgagcaaccgagaaatgtcctttcaaaagctgtgagtccaaccgattccacacctccgtcaactcatactgaagattcgaaacgtgtttctaaaaccaatattcgcgcacccagagaagttgaccccaacatatctgaatctaatattcttccatcaaagaagagatctagcaccccccaaatttccaatatcgagagtaccggttcgggtggtatgcataaattaaatgttcctttacttgctcccatgtcccaatctaacacacatgagtcgtcgcacgccagtaaatctaaagatttcagacactcagactcgtacagtgaaaatgagactaatcatacaaacgtaccaatatccagtacgggtggtaccaacaacaaaactgttccgcagataagtgaccaagagactgagaaaaggattatacaccgttcaccttcaatcgatgcttctccaccggaaaataattcatcgcacaatattgttcctatcaaaacgccaactactgtttctgaacagaataccgaggaatctatcatcgctgatctcccactccctgatctacctccagaatctcctaccgaattccctgacccatttaaagaactcccaccgataaattctcatcaaactaattccagtttgggtggtattggtgactctaatgcctatactactatcaacagtaagaaaagatcattagaagataatgaaactgaaattaaggtatcacgagacacatggaatactaagaatatgcgtagtttagaacctccgagatcgaagaaacgaattcacctgattgcagctgtaaaagcagtaaaatcaatcaaaccaatacggacaaccttaagatacgatgaggcaatcacctataataaagatattaaagaaaaggaaaaatatatcgaagcataccacaaagaagtcaaccaactattgaaaatgaatacttgggacactgacaaatattatgacagaaaagaaatagaccctaaaagagtaataaattcaatgtttatcttcaacaggaaacgtgacggtactcataaagctagatttgttgcaagaggtgatattcagcatcctgacacttacgactcaggcatgcaatccaataccgtacatcactatgcattaatgacatccctgtcacttgcattagacaataactactatattacacaattagacatatcttcggcatatttgtatgcagacatcaaagaagaattatacataagacctccaccacatttaggaatgaatgataagttgatacgtttgaagaaatcactttatggattgaaacaaagtggagcgaactggtacgaaactatcaaatcatacctgataaaacagtgtggtatggaagaagttcgtggatggtcatgcgtatttaagaatagtcaagtaacaatttgcttattcgttgatgatatgatattgttcagcaaagacttaaatgcaaataagaaaatcataacaacactcaagaaacaatacgatacaaagataataaatctgggtgaaagtgataacgaaattcagtacgacatacttggcttagaaatcaaatatcaaagaggtaaatacatgaaattaggtatggaaaactcattaactgagaaaatacccaaattaaacgtacctttgaatccaaaaggaagaaaacttagcgctccaggtcaaccaggtctttatatagaccaggatgaactagaaatagatgaagatgaatacaaagagaaggtacatgaaatgcaaaagttgattggtctagcttcatatgttggatataaatttagatttgacttactatactacatcaacacacttgctcaacatatactattcccctctaggcaagttttagacatgacatatgagttaatacaattcatgtgggacactagagataaacaactgatatggcacaaaaacaaacctaccgagccagataataaactagtcgcaataagcgatgcttcatatggtaaccaaccatattacaagtcacaaattggtaacattttcctactcaacggaaaagtgattggaggaaagtcgacaaaggcttcgttaacatgcacttcaactacagaagcagaaatacacgcagtcagtgaagctattccgctattgaataacctcagtcaccttgtgcaagaacttaacaagaaaccaattattaaaggcttacttactgatagtagatcaacgatcagtataattaagtctacaaatgaagagaaatttagaaacagattttttggcacaaaggcaatgagacttagagatgaagtatcaggtaataatctatacgtatactacatcgagaccaagaagaacattgctgatgtgatgacaaaacctcttccgataaaaacatttaaactattaactaacaaatggattcattag

SEQ ID NO: 190945 - DNA, 2811 bp, Saccharomyces pastorianus
atggaggaacaatttactaatcagaagaaagtatcacatctacagtcattaatgaacactaaaaggagtgaacagcccaccgaatttgccaaaaaacataggtttaaagatacgcttgcattgttcctggtttttttgagttttaaccacttcacttccctatgtttattggtttcctttattgttgctaccaaatgcaaagattttctggcaaattgttttattatacttttcctatcgaaaaaaccttcccgccatatcggtgaagtggcgcacatagatataagtacttccaaagtgaccaatggtagttcaaaccgaaaatctaattcacgattttttggcaattcaaaaaatagcttcgtcattccgatccccgtattaatttgtgaaattttatttgcaatgttactaaagatttacggtggcgattattttgttaagccaataaaaaatctggcaatttctattattgcctcatttttgatcaatgatccaagcgattgcttaagctatgcaacttcatgctcagtattgtatgctgtgtcaactaacacttttcaaagagtgtcacacttctttgacattatacagttatttgatatgtctttacgaggaaccggccaatcaattaaattattcacggtttttcgcaagtattcacagtttttcaaaaagcttttctctctatttttgccaatgcctttcaagatgcttggcaaacattcagacagtatgatttattatctatcctttcacatcctttttttctcatttgcttcaagtttattacaccctcatagacaaacagcggaaaacaagccattgaaaaagggtttcaattcaactaaaccagatgtagcccgtgttcaaggtctgcaaaagatgagaatttcttcttcttcttccgtttctgccgattcgaacactttagaggaccaaagtcctatgataccgaacgatccaggtggacttagcagcagcaatcaaactatccatccatcccaacaaaataactcgccagttcccctatcatcacacagtaatattttgaaccctgccgcctcttatcctactgatgctacttctagttttccctatttcacttctatggtcaaggaatataagtcatatcagccatcggtaatctctgctgaaggaagcaattctcaagccgttactactactaccagtacaacaacctctcctacaacgttcaacttttctggtgataacactagtttgtcaaatgaaatctctctatctgattcctcgaatggaaattcgaaaaaggattctgatttcttttccccttccaatgacaagtatactaaccaactgtttgaactgaatgttgattttgggaacatgttttcttctagcaaattatcttcagacatatctgttacatcaaacttggaaaattttatccgtcttctattcagaagaaagaatcaacacttgattgcacctctttggtctatggtagttacattaaaaacaacgaattttgaaaaaaaatacttacaagaaacctctgaaaattcactaacaccaacaaattcgaatacttcatacgtcagtaatcaggaaaaacatgacaaagatttggacacgattaatacacattcagtttcatcaagaattagtttcacccatgccggaaagtttaagaagagcgtgtttaacaatttcgaaccttcaaatactatggccctgattgcaaagacaacatctgatgactacaatcttttaaatttagtttccaccaatgaaaatattttcaatagaaatgataatgactacaaagtttgcattattgatattagcacaaactctattacattccatattgaaaatttacatgatggcgaactcattgttttagtaaacggtgttatctggtcagaagtttcttgcgctttaattttagagcatgtaggcgaagaatacgttgtcgttaacggattagtcccttcttgttcttatgatattcaattcatcaacagactaaatcaccgagatgattatttggtttctgatttaattgtaaggacttgtgggaataacaatgcgattgccggaaaatttgaaaaccttgatttcagcttcccttcatactaccataggaaattcttatctccgttgctaactctgaagcattccgtgctaactacaaacgcaaatttgtccgatgaaaggacaaaattgaaaaagacaaaaaaggaattcagcaagaagttaagtcttttgagacaagaaattgattattttaaaggcaggatttcacagaacgcaacacatgacgaaaagagcactttaaaagtcgaaaatttgaaggttgccctacagcaaagtgagactgcggtaaataagttagagatgcaattgaaaactctcactgaaaaagagcttgaattagaagaggaatacttgaaaaagaaagatctacacttgaaaaatcaattagagttcagtaagttagaagaaagcttatcgaaagacctgaaaaactcagaagggaggttccaaaaggtcaatcaagaattagttcaactaggctctaaactggacaaattgaacgcgagaaacgagaagttacaaaaggaggtcgatcagaacgcagaagagatagaaaagttcagtactcaatttttgagtaaaagagaaaaggatagatttagaagaaaggagtacaggatacgcgaagccaataaatttgaattgactataaaggggttagagcaagatatcaacagattagaaaatgagaatgaaaatatacatagtctaattggtaatagttactga

SEQ ID NO: 190946 - DNA, 450 bp, Saccharomyces pastorianus
atggtgttatccaattatttagtaagcttcgcttgtactcagtcattttttttttttgcatccaattttattgaaagtccgcccgctctgttaaaaaaggcgtttcttccaaatttgaataggacacgatcgagattccctccgattaattatgtgctactggctcctctttcgtcgtattgcaagtggacttttcaacgaggctatgcatgcccagtgtcattcttgaagcaggcacacacagacgcgcttcaattagttttctttactagatgcatcatttgggcggtttttcactaccgttttcgagtaggggctctcacaaaacgggcacgaccttttgtttacaaccgcccaaagaggaaaaacatcaacaatcaagaagcggacacaaaatatagaagcaccataaaactcacgtcaacggtaactttaaatttgttgtattaa

SEQ ID NO: 190947 - DNA, 873 bp, Saccharomyces pastorianus
atgagctttatggatcaaatcccaggaggaggaaattatccaaaactcccagtagaatgccttcctaacttcccgatccaaccatctttgaccttcagaggtagaaatgactcgcataaactgaaaaactttatctccgaaataatgttaaacatgtctatgatatcttggccgaatgatgccagtcgtattgtgtactgcagaagacatttattaaaccccgctgctcagtgggctaatgactttgtacaagaacaaggtatacttgaaataacattcgacacattcatacaaggattatatcagcatttctataagccaccagatatcaataaaatctttaatgcaatcacgcaactttccgaagctaaacttggtattgagcgtctcaaccaacgattcagaaagatttgggacagaatgccaccagacttcatgaccgaaaaagctgccataatgacatatactaggctattgacaaaggaaacctataatattgtcagaatgcacaaaccagagacattaaaagacgccatggaagaggcttaccagacaactgcactaactgaaagattcttcccaggattcgaacttgatgctgatggagacactatcatcggtgccacaacccacttacaagaagaatacgactctgactatgattcagaagataatctgacccagaatggatacgtccataccgtaaggacaagaagatcttacaataaaccaatgtcaaatcatcgaaacaggagaaataacaacccatctagagaagaatgtataaaaaatcggctatgcttctattgtaagaaagagggacatcgcctgaacgaatgtagagcacgtaaggcgagttctaaccgatcttga

SEQ ID NO: 190948 - DNA, 129 bp, Saccharomyces pastorianus
atggaattggtgtccctatgtaatacaattacgattatttctcattcggttttatatgtttcattatcctattacattatcaatccttgcacttcagcttcctctaacttcgatgacagcttctcataa

SEQ ID NO: 190949 - DNA, 636 bp, Saccharomyces pastorianus
atgagcaccgcattcaacgattactgcactgtttgtgatcgtctcattccaacatctccacagaaaacgaacattaataccaggaagatccaaagggacaatgaaaccaagagcagtttacaatcaaataagttatattgctccgaagattgtaagctgaaggattcgaaccctcttaatgagaaattattatcccacttgcataaaaaatcaaaaacttctcattcgcataatctcactccaccgctttcatattctaaaaatttaactgcatcaaacctcttcgagccgactacctcactatcttcatctccgacatcttcaactatcccctttgacgagttggagaagctagagtccttattaatttcaccattgctgctacctcaggatggtatagtcaatcctaagcaggagtctaatccttctcgtgttgacgaatatgatgaaaatgaacattatttgaacttagccgactctcttagactcgattctagttaccaattgcattcaaaggcacatttgggttacgaaaacaacttgccacgatcaaacgatctaattgatgatcatttgatctcagatcagatcattgagaataactacaacctatggtttagactatcctccagttaa

SEQ ID NO: 190950 - DNA, 468 bp, Saccharomyces pastorianus
atgaaggttgaagttgattccttttccggcgctaagatctacccaggtagaggtactttatttgtccgtggtgactccaaaattttcagattccaaaactccaaatctgcttctttgttcaaacaaagaaagaacccaagaagaatcgcttggaccgtcttgttcagaaagcatcacaagaagggtatcaccgaagaagttgctaagaagagatctagaaagaccgttaaggcgcaaagaccaatcactggtgcttctttggacttgatcaaggaaagaagatctttgaagccagaagttagaaaagctaacagagaagaaaaattgaaagccaacaaggaaaagaagagagctgaaaaggctgctagaaaggctgaaaaggctaagtccgctggtgtccaaggttccaaggtttccaagcaacaagctaagggtgctttccaaaaggttgccgccacttcccgttaa

SEQ ID NO: 190951 - DNA, 5314 bp, Saccharomyces pastorianus; identical to SEQ ID NO: 190917

SEQ ID NO: 190952 - DNA, 354 bp, Saccharomyces pastorianus
atgtctcgccaaagcgcattcaaatttcagaatggaaatagacacgaacgagcctgtctgtcagatgttcacaaaatccttattataattttatattctactaaaggaaaaagagaattaggaaaaagaataactcattttatgtatatacatatattttgtacatatctataccaagcaagtatagtgcaatactgttcttcgacgttattaaacgtaatagcattttcttggtatcctttgaatcttatatacaagtacgagtacatactgcgcagtaaattgatcctgatggtgtgtttagatttcgccagaagcggaggcgttctggattctggagatgtaagcctttga

SEQ ID NO: 190953 - DNA, 414 bp, Saccharomyces pastorianus
atggtatgttggtgtgtgtgtgtgctgcttcacatttcaggctaaaaatgttatccgtggaatcttccttagccaagtatcatgggctttggaaattagtttcccaccgatgagcgcaacgacttagcgaagcttatgaaattggtgacagcagctctatgaatatgttccatgcgtttccattcaggttactaacaatgcataaattatgagtagtctttttcatcactatataaaacctttttcaaacgaaacgctgtttttgttggtactatctttgcaggtgcctttgttttccaaactgtatttgatactgctattacttcatggtacgagaatcacaacaaaggaaaattatggaaagatgtcaaggctcgaatagctgcaggcgatggagacgacgatgatgagtaa

SEQ ID NO: 190954 - DNA, 192 bp, Saccharomyces pastorianus
atggatgcgaacaccttaaacgtatctttcgaagagatattgaagggaaagaaattggatgaagattccatcggattaacattatcacctgataaagatcatgaggatggatcacaagtatcacctacacaggatagaaaagaattggatcaagttgtgggagaagatgaaaaggatgacttttttgagtaa

SEQ ID NO: 190955 - DNA, 444 bp, Saccharomyces pastorianus
atggaccacagggctgcttttggatattttagcaacgcctgcttcaaagtcatgcttttttcctcgctgttagcttcatttgcatcatcagtagcgttcatctcattaatcacattctcgttatcttcgtcagaatctcctaactgggctgaattggtggtgaactctaagtggtctagctcaaaggcactatcctttttcccttcttcaaaatcttcagtattgaaaacctcctgttggtttacaatatctcttgaagactcagaaatgtttttatcctcattttttgaggcagccttcttcttgcttaccaatgaaatgatatttttcatattatactatttttttagttgtttgatgttcttctatgtagcatcagaaagaaacaccaacccgaaaattcttcaaacaatcaataccaaaccgctttatataaaaaattaa

SEQ ID NO: 190956 - DNA, 222 bp, Saccharomyces pastorianus
atggaactttttataccttgcccagagcgcctcaagaaaatgatgctgcaagaagaattgaggaaggaactattcatcttacgttgtttgtatcatcccacgatccaaatcatgttacctacgttaggtacgctaggaactaaaaaaagaaaagaaaagtatgcgttatcactcttcgagccaattcttaattgtgtggggtccgcgaaaatttccggataa

SEQ ID NO: 190957 - DNA, 1146 bp, Saccharomyces pastorianus
atgaaagagaatgaacttaaaaatgagaagagtgtagatgtattatccgtcaaacagctcgaatcccaaaagactgttctacctcaagatcttttcagaagcagctttacctggttttgttatgaaatttacaagtccttagtgtttcgcatctggatgctattatggctaccacttagcgtctggtggaaactttccaacaattggatttacccgcttatggtttcacttcttgtcctgttttggggaccagtatttgttcttgttatttttagactttctcgtaaacgttccttatcgaaacaactcactcagttttgcaaagagattactaaaaacacaccaagttcggatcctcatgattgggaagtcgttgcagcaaatctaaattcgtacttctatgaaaataaggcttggaataccaagtacttttttttcagtgccatgagctgccaagaagcattcagaacaacccttctcgaacccttctctttgaaaaaagacgaagctgccaaggttaagtcatttaaggattccgtcccttacattgaagaagcattggaagtttattttacagaagttgaaaaacaatggaagttgtttaattctgagaaatcatggagccctgttggcctggaagatgctaaacttcccaaggaagcttaccgatttaagcttacctgggttctcaaaaggattttcaaccggcggtgtttaccactcttccttttttatttgcataatgtcttcatttcacgaaatgatggcactatagcacgtcccttgtttcttgtggtgctgttttttatcatgacgagagatttccggaatatgaggatgatcgttttatccgtgaaaatggaacacaagatgcagtttttatcgactattataaatgagcaagaaagtggtgcaaatggatgggacgaaattgcaaagaaaatgaataggtacttgtttgagaaaaaagtctggaagaatgaagagtttttctttgacgggattgactgtgaatggttttttagccacttcttctaccgcgttctctctgcaaagaaatctatgcgggctctatcattgaatgtggaactatggccatatattaaagaagcgcaattatcctgcagtgaggagtccttagcgtaa

SEQ ID NO: 190958 - DNA, 1242 bp, Saccharomyces pastorianus
atggcgaccccagtgagggatgaaacaagaaatgttattgacgacaacatttctgcgcggattcaatcgaaagtcaaaacaaatgatactgtcagacagacgccatcatcattaagaaaagtttctattaaagatgaacaggtgaaacaatatcaaagaaacttaaataggtttaaaaccatactaaatggtttaaaggcagaagaggaaaaactttctgagactgatgatattcagatgctagctgaaaaattattaaaactcggagaaaccattgacaaggttgagaataggattgtggatctagttgaaaagatacaattattggaaacaaacgagaacaataatatattacatgaacatatagatgctacagggacttactatttattcgatacgttaacttcaaccaacaaaagattctaccctaaggattgtgtttttgattataggactaataatgtcgagaacattcctattctcttaaacaattttaaaaaattcatcaagaaatatcaatttgatgatgtctttgaaaatgatatcatagaaatcgatcctcgtgaaaatgaaatcttgtgcaagataatcaaagaaggactcggtgaaagtttagatatcatgaacacaaatacaactgacatttttaggataatcgatggtttaaaaaacaaatatagaagtttacatggtagagatgtcagaattagagcctgggaaaaggttttggttgatacaacatgtagaaattccgcattgttaatgaataaacttcaaaagttggtactaatggaaaaatggattttttctaaatgctgccaagattgtcctaatctaaaggattacctacaagaagctatcatgggaaccttacatgaatccttaagaaattctgtgaaacaacgtttgtacaacattccacataacgtaggaattaatcacgaagaatttctaatcaatactgttattgaaacagtaattgatttgagcccaattgcagacgatcaaatagaaaatagctgcatgtattgcaaatctgttttccattgctcaattaactgcaaaaagaaaccaaatagggaacttaggcctgactcgaccaatttctcaaaaacctattatctacaaggtgcacagagacaacaacaacttaagtccagtgcaaaacgaacaaaagtcttggaacaagacacaaaaaaagtcaaacaaagtgtacaacagcaaaaaactggtaattattga

SEQ ID NO: 190959 - DNA, 5410 bp, Saccharomyces pastorianus
atggcgaccccagtgagggatgaaacaagaaatgttattgacgacaacatttctgcgcggattcaatcgaaagtcaaaacaaatgatactgtcagacagacgccatcatcattaagaaaagtttctattaaagatgaacaggtgaaacaatatcaaagaaacttaaataggtttaaaaccatactaaatggtttaaaggcagaagaggaaaaactttctgagactgatgatattcagatgctagctgaaaaattattaaaactcggagaaaccattgacaaggttgagaataggattgtggatctagttgaaaagatacaattattggaaacaaacgagaacaataatatattacatgaacatatagatgctacagggacttactatttattcgatacgttaacttcaaccaacaaaagattctaccctaaggattgtgtttttgattataggactaataatgtcgagaacattcctattctcttaaacaattttaaaaaattcatcaagaaatatcaatttgatgatgtctttgaaaatgatatcatagaaatcgatcctcgtgaaaatgaaatcttgtgcaagataatcaaagaaggactcggtgaaagtttagatatcatgaacacaaatacaactgacatttttaggataatcgatggtttaaaaaacaaatatagaagtttacatggtagagatgtcagaattagagcctgggaaaaggttttggttgatacaacatgtagaaattccgcattgttaatgaataaacttcaaaagttggtactaatggaaaaatggattttttctaaatgctgccaagattgtcctaatctaaaggattacctacaagaagctatcatgggaaccttacatgaatccttaagaaattctgtgaaacaacgtttgtacaacattccacataacgtaggaattaatcacgaagaatttctaatcaatactgttattgaaacagtaattgatttgagcccaattgcagacgatcaaatagaaaatagctgcatgtattgcaaatctgttttccattgctcaattaactgcaaaaagaaaccaaatagggaacttaggcctgactcgaccaatttctcaaaaacctattatctacaaggtgcacagagacaacaacaacttaagtccagtgcaaaacgaacaaaagtcttggaacaagacacaaaaaaagtcaaacaaagtgtacaacagcaaaaaactggtaattattgataccggttccggcgtaaacattaccaatgacaaaaccttactgcataattacgaagacagtaatcgcagtacacgattttttggtattgggaaaaacagttcagtgtctgttaaagggtatggctatataaaaatcaagaatggtcacaacaatactgacaataagtgtttattgacttactatgtaccggaagaagaatccactataatcagctgttatgacttagccaagaaaaccaaaatggttttaagtcgaaaatataccagattgggaaacaaaatcataaaaattaaaaccaagatagttaatggtgtcattcacgtaaaaatgaacgagttaattgaacgtccttccgatgattcaaaaataaatgcaataaaacctacttcttctcctggatttaaactaaataaaaggtctattaccttggaagatgctcataaaagaatgggccatacaggaattcaacaaattgaaaattccataaaacataatcattatgaagaatcccttgacttaatcaaagaaccaaatgaattttggtgtcaaacctgtaaaatctctaaagccacgaaaagaaatcattataccgggtctatgaataatcatagtactgatcatgaaccaggatcatcatggtgcatggatatatttggccctgtatcaagttcaaacgcggacactaaaaggtacatgcttattatggtggataacaacacgagatattgcatgacctccacacacttcaataagaatgctgaaactattttagctcaaatcagaaagaatattcagtacgtggaaacacaatttgacaggaaagtcagagaaattaattcagacagaggtactgaattcacaaatgatcagatagaagaatattttatttcaaaaggaatacatcacatacttacttctacacaagatcatgctgctaatggaagagcagaaagatacatcagaacaatagtaactgatgcaacaacactcctaagacaaagtaacttaagagtaaaattttgggaatacgcagtaacttctgctaccaatataagaaattgcctggaacacaaaagtacaggtaaactaccattgaaggcaatctcacgtcaacctgttacagtgagattaatgtcattcttaccatttggcgaaaaaggaataatttggaatcataatcacaaaaaattgaaaccatctggacttccttctataattctatgcaaagatccaaatagttatggatacaaattctttataccatccaaaaataaaattgtcacatctgataattatacaattcccaactatacgatggacggtagagtaagaaatactcagaatatttacaagagtcatcaattcagttcacataatgataatgaagaagatcaaatcgaaacggtcacaaacttatgtgaagctttggaaaactacgaagatgataataaaccaattactcgcctggaagatttgttcacagaggaagagttatctcaaatagactcaaacgcaaaatacccatctcctagtaataacctagaaggggacttggattacgtattttctgatgttgaggaatctggagattatgacgttgaatctgaactttcaacgacaaatacttcaatctcaactgataaaaacaaaattttgtcaaacaaggattttaattcagaacttgcatcgactgaaatatccatcagtgaaatcgataagaaaggattaataaatacaagtcatattgatgaagataagtatgatgaaaaagtccacagaattccatcgattatacaagagaaactggtaggaagtaaaaatactattaaaatcaatgacgaaaacagaatctccgacagaattcgtagtaaaaatattgggagtatcttaaacactggactcagtagatgtgtagatatcaccgatgaatctattactaacaaagatgagtcaatgcacaacgcaaaacccgaactaattcaggagcagttcaataaaacaaatcatgaaacttcgtttcctaaagaagggagcattggaacaaatgtaaaattccgaaatacagacaatgagatttctttaaaaacaggcgatacgagtttaccaataaaaactttagaaagcattaacaatcaccatagtaatgattattccacaaacaaagttgaaaagtttgagaaggaaaatcatcatccgcccccgattgaggacattgtggatatgagtgatcaaactgatatggaatcaaactgtcaggatggtaataacttaaaagaattaaaagtcaccgataaaaatgtaccaactgacaatggaacaaatgtgtcaccaaggttggaacaaaatattgaagcatctggatcaccagtacaaacagttaataaaagtgccttcttaaacaaagaattcagttctttgaacatgaaaagaaaacggaaaagacacgataaaaacaatagtctaacaagctatgaattagaaagagataagaagcgttcaaaaaggaatcgagtgaaattaattccagataatatggaaacagtttcagcacaaaaaattagagccatatattataatgaagctatttcaaaaaatcctgacctcaaagaaaaacatgaatacaaacaggcatatcataaagaattacagaatttaaaagatatgaaggtatttgatgtcgatgtgaagtacagtagatcagaaatccctgataatttaatagtacccaccaacacgatattcacaaagaaaagaaatgggatttataaggctaggatagtctgcagaggtgatactcagtcaccagacacttacagtgtaataactacagaatctttaaatcacaatcatattaagatattcttaatgattgcaaacaacagaaatatgtttatgaagaccctggatatcaatcatgcattcctatatgctaaattggaagaagaaatatacatcccacatccgcatgataggagatgtgtagtcaagctaaataaggcgttatatggtctaaaacagagtcctaaagaatggaatgatcatctaagacaatacttgaatggaattggactgaaagataactcttatactccgggattataccaaaccgaggataaaaatctaatgattgcagtctatgttgatgactgcgtaattgcggcaagcaatgaacagagattggatgaattcataaacaaattgaaaagtaattttgaactgaaaattacaggaacattaatagatgatgtactcgatacagatatattaggaatggatctagtatacaacaaaagacttggtactatcgatttaacattaaaatcattcataaatagaatggataaaaaatacaacgaggaattgaaaaagattagaaaaagttcaattccgcatatgtcaacttataaaatagatcctaagaaagacgtactgcaaatgtcagaagaagagtttagacaaggtgttctaaagctacaacaattactaggtgaactaaactatgtcagacacaaatgcagatacgacattaattttgctgttaagaaagtggctagactagtaaattacccacatgaaagagtcttttatatgatttacaaaataatccagtacttggttcggtataaagatattggaatacactatgaccgagactgtaataaagacaagaaggttattgctataactgatgcatcagttggatcagaatatgatgctcaatcaaggattggagttatattatggtacggtatgaatatttttaatgtttattctaacaagagcacaaacagatgtgtatcatcaacagaagcagagcttcatgccatttatgaaggctatgcagactcagaaacgttgaaggtaacattaaaggagctaggagaaggagacaataatgacattgtcatgatcactgactcaaagccagccattcaaggattaaatcgcagctatcaacaaccaaaagagaaattcacttggataaaaactgaaataataaaagaaaaaattaaagagaagagtataaaactgttaaaaattaccggcaaaggtaatattgctgatttactaacaaaaccagtatcagcatctgattttaaaagatttatacaagtattaaaaaataaaataacatcacaggatattttggcctcaacagactattga

SEQ ID NO: 190960 - DNA, 84 bp, Saccharomyces pastorianus
atgactgcttttgcatctttaagagaacctttggtcttggctaatctcaaaattaaagttcatatctaccgtatgaagcgctga

SEQ ID NO: 190961 - DNA, 327 bp, Saccharomyces pastorianus
atgaatgcagaaaacaggaatatagcttttaattgccaagtatcatactttttagccattagctcagacttacgaataatcaatgattttgttccctttaatttatctttcatttcatctctgggcgacgaatcgtcatccatcttttcatcaaccatcagttcattacaatttttttcagtattcttacgctttgtttggctagaacgattgtcttctgggacttcgatcatatttcctttggcccaaagagttacaactgtttttggagctcaagtggaaaggacacaagcaaagttcttctaccaggatctcatgtctttatag

SEQ ID NO: 190962 - DNA, 1914 bp, Saccharomyces pastorianus
atgatcgaagtcccagaagacaatcgttctagccaaacaaagcgtaagaatactgaaaaaaattgtaatgaactgatggttgatgaaaagatggatgacgattcgtcgcccagagatgaaatgaaagataaattaaagggaacaaaatcattgattattcgtaagtctgagctaatggctaaaaagtatgatacttggcaattaaaagctatattcctgttttctgcattcatttgcactttcgcttatggattagatagcagcataaggggtacatatatgacctacgcaatgaactcgtactccgcacattctctcatttctacagtaagcgtcatagttctaatgatatctgctgtttcacaggtgatctttggagggttatcagatatctttggaaggctaacgttgtttcttgtatccattgtactttacattgtgggtacaataattcaatctcaagcatatgatgtccagaggtatgctgctggagctgtcttttattatgtgggacttgtcggtgttatgctacaggttgttttgatgttgtctgataattcttcattaaaatggaggctattttacacattgataccttcatggccctcgattatcactacgtgggtctcaggtagtgtagtggaggcagcaaacccgttagagaactggtcgtggaatattgctatgtgggcgttcattttccctctatgctgtatcccattgattttgtgtatgctccatatgagatggaaagtaagaaatgacgtggaatggaaagaattacaggatgaaaaatcgtactatcaaacgcacggattagtacaaatgctggtacagttgttctggaagctagatgttgtcggtgtgttgttgtttactgctggtgttggttgtattcttgtaccactcactcttgctggtggcgtctctacaaattggagaaattcaaagattatcgggccctttgtgcttggctttgtcctggttccaggcttcatatattgggaaagtcgacttgctttggttcctttcgctccattcaagctgctaaaagatcgtggcgtgtgggccccattgggaattatgttttttatctgctttgtatatcaaatggctgctgggtatctctacaccattctagtagttgcggtagatgagagcgcttcctcagctacaagaataataaacttatactcttttgtgactgctgttgttgctccatttctggggctcatcgttacgagatcatctagattgaagtcgtatattatttttggtggctcactttatttcattactatgggactattttaccgctacaggtcaggtcaagacgccgatggaggtataattgctggtatggttatttggggtctcagtagttgtttattcgattatcctacaattgtttctattcagtcggtaacatcccatgagaatatggctactgtcacagcattaaactatacagttttcagaataggtggagcagttgcagctgccatttccggtgccatatggacgcagtcattgtaccctaaattattgcactacatgggagacgctgacctggctacagcagcatatggctcaccactaacttttattctttccaatccctggggtactccagttaggtctgcgatggttgaagcttacagacacgttcaaaaatacgaagttattgttgcgcttgtattttcagcgcctatgttccttctaacattctgcgtaagagatcctcggttgactgaagattttgcccaaaagttacctgacagagaatatgtccaaaccaaggaagatgatcctatcaatgactggatcgcgaaacgttttgcaaaggccttaggaggtcataagaaagatttacaaaaccccaacaggatatgtgttcgaaaaaatgatctctga

SEQ ID NO: 190963 - DNA, 135 bp, Saccharomyces pastorianus
atgcatgacatctgggtaatcaccacttctcccgcttgctttgagattctgtataaatattgcaaacaaaagggtagagcacggatgggaggccttatagtaaaaattattcgttttaatcatgcgtcagtgtga

SEQ ID NO: 190964 - DNA, 1146 bp, Saccharomyces pastorianus
atgaaagagaatgaagtcaaagatgagaaaagcgtagatgtgttatccttcaaacagctcgaattccaaaagaccgttctacctcaagatgttttccgaaacgaattgacctggttttgttatgaaatttacaagtctttagcgtttcgcatctggatgctgttatggctaccacttagcgtctggtggaaactttccagcaattggattcacccacttatagtttcacttcttgtcctgttcctgggaccattttttgtccttgttatttgtggactttctcgtaagcgttccttatcgaaacaactcattcagttttgcaaagagattactgaagacacaccaagttcggatcctcatgattgggaagtcgttgcagcaaatctaaattcgtacttctatgaaaataagacttggaataccaagtacttttttttcaatgccatgagctgccaaaaagcgtttaaaacaacccttctcgaacccttctctttaaaaaaagacgaatctgcaaaggttaagtcatttaaggattccgttccttatatcgaagaggccttgcaagtgtatgctgcaggatttgacaaagagtggaagctgtttaatactgagaaggaagagagtcctttcgacctggaagacattcagctccccaaagaagcttaccgatttaagcttacctggattcttaaaaggattttcaacctgcggtgtttaccactcttcctttattattttttaattgtctacacgtctggaaatgctgaccttatatcacgtttcttgtttccggtagtaatgttttttatcatgacgagagatttccaaaatatgaggatgattgttttatccgtgaaaatggaacacaagatgcagttcttgtcaactattataaatgagcaagaaagtggtgcgaatggatgggacgaaattgcaaagaaaatgaataggtatttgtttgagaaaaaagtctggaataatgaagagtttttctacgatggacttgactgcgaatggttttttaggcgctttttctatcgtctcttatctttaaaaaaacctatgtggtttgcttcgttgaacgttgagctatggccatacattaaagaagcgcaatcggcccgcaatgagaagcccctaaagtag

SEQ ID NO: 190965 - DNA, 816 bp, Saccharomyces pastorianus
atgaaagtttccgataggcgtaagtttgaaaaagcaaactttgacgagtttgagtcggctctaaataacaaaaacgacttggtacattgtccctcaataactttatttgaatcgatccccacggaagtgcggtcattctacgaagacgaaaagtctggcctaatcaaagtggtaaaattcagaactggtgcaatggataggaaaaggtcttttgaaaaaattgtcgtttccgtcatggtcgggaaaaatgtacaaaagttcctgacgtttgttgaagacgaaccagatttccagggcggaccaatcccttcaaagtatcttattcccaagaaaatcaacttgatggtctacacgttgtttcaagtgcatactttgaaattcaatagaaaggattacgataccctttctcttttttacctcaacagaggatactataatgagttgagtttccgtgtcctggaacgttgtcacgaaatagcgagtgccaggccgaacgacagctctacgatgcgtactttcactgactttgtttctggcgcacctattgtaaggagtcttcagaaaagcaccataaggaaatatgggtacaatttggcaccccacatgtttttgttactacacgtagatgagctatcgattttttctgcataccaagcaagtttacctggcgaaaagaaagtcgacacagagcggctgaagcgtgatctatgcccacgtaaacccactgagataaagtacttttcacagatatgtaacgatatgatgaacaaaaaggaccgattgggtgatgttttgcatgtgtgctgcccaagttga

SEQ ID NO: 190966 - DNA, 120 bp, Saccharomyces pastorianus
atgaagggcagcaaactttttcaaatgcaaaaatgcatgcccgtttggtgccgtacgggcacgtgtattattttgccggtggcatgccacatggcgaaacccttaaaattaccaacataa

SEQ ID NO: 190967 - DNA, 180 bp, Saccharomyces pastorianus
atgaaactccttcagggtcgaatgacgtataggggagatgcacacccccacccccgcatcacacccagtcttctagccaattatgttggtaattttaagggtttcgccatgtggcatgccaccggcaaaataatacacgtgcccgtacggcaccaaacgggcatgcatttttgcatttga

SEQ ID NO: 190968 - DNA, 507 bp, Saccharomyces pastorianus
atggtatgtgccattacattacgtgtcaacacttctgtctctaacaagcgttcttactaacatgaaaaacttttttaaaactgtgctctcttgttggactggtacctcgtgacaaaggtattggttttttcattgttgctcagaactatgtaatattctctttagtcccaaaaaaacggaattgccaccctactacaagctgaaaaggaagcccacgaaatagtatcaaaggctagaaagtacagacaagataagttgaagcaagccaagactgatgcagccaaggaaatcgactcatacaaaattcaaaaagacaaggaattgaaggagtttgaacaaaagaatgccggtggtgttggtgaattggaaaagaaagcagaggctggtgtgcaaggtgaattagctgagattaagaaaattgcagagaagaaaaaggatgacgttgtcaaaattttgatcgagactgtcatcaagccttctgctgaagtccatatcaatgccttgtaa

SEQ ID NO: 190969 - DNA, 741 bp, Saccharomyces pastorianus
atgccacaattttcagtagatctttgtctttttgacctagatgggactattgtcagcacaacaactgcagcggaaagtgcctggaaaaaattatgccgtcagcatggggttgatcctgttgagttattcaagcattcccatggtgcaagatcacaagaaatgatgaagaaattttttccaaaattggacaataccgataataaaggtgttcttgcgttagaaaaggatatggcagataattatttggacacagtaagccttatccctggtgcagagaatttattgttatcgttagatgtagatactgagactcaaaaaaagttacctgaaaggaaatgggctatcgttacctctggttctccatatttggcattttcatggttcgagacaatattgaaaaatgttggaaagcccaaagttttcattactggatttgacgtgaagaacggtaagcctgatcccgagggttactcaagagctcgtgatttattgcgtcaagatttgcaattaactggtaaacaggatctgaagtatgttgtctttgaagatgcacccgtgggcataaaggccggcaaagcaatgggcgcaattactgtgggtataacatcctcgtatgataagagcgttttatttgacgcaggtgcagattatgtggtctgtgatttgacacaggtttccgtggttaagaacaatgagaacggtatcgttatccaggtaaacaaccctttgacgagagattaa

SEQ ID NO: 190970 - DNA, 411 bp, Saccharomyces pastorianus
atgacgcatcgcgcagtgccctgtcagccccgcgccttctcgaagataaaggtgttagtcatctcgtttctttttctaatggtcgcctttttgcctttttcctcccacggcaaactgcaagagcagatcgcttcatacgttagctggaagttggaaactcgcgcaatacatcggtttggtgggtgcaactttgcgcaccaaatgcaacgaaacggcattcaacggaagatcgtctgcagtgaccttgagcgcggcaataatacgggcatgaacgcgtgcatgcaactcgtcctcagtgacttggtcgccaggcgggtacttctcaaaacagtgcacgtgcacccatggcatttggatggtatcagtggcgcctttagtgtgtgctgcaaagatgccacggaagtttcctaa

SEQ ID NO: 190971 - DNA, 321 bp, Saccharomyces pastorianus
atggtgggtcgtttgcggcttgctgaggggttaaatattcccagctttctcggcctagctcatcagttctcagtctccaaagacgtggatctgtctttggtagaccgattgtgtcagaataaaattctgtcatctgttttgtactttctttgtgggcgacgattattggtaaggttattgggcacagcagtacattactggagaggcttgtgctcaatggctttattaaaagctgagggcatgtattatatttttttttttttgagaaaatgtatatctgtaaataaccgatataaaaacttttcacctaaacgattataa

SEQ ID NO: 190972 - DNA, 690 bp, Saccharomyces pastorianus
atggatggaaatcataggtttactccagattccaaagaatttaatactgttgtaaaaagtaaagagtcttccactggcagaaatccgtatcagactccgcccttagagcacaacggtactcatcatcagacaaattacagcagaaagaaaacaaatctagcaattatcatatcgaatttcttgtccgagatcagtcggcctctttcaaatggcaaaatcaataattctacccacaacattttaaaatttctaaatgaagtgcttaagagatcgaagtgcagtaaagaaaacgctgtgttagccactttctactttcaaaagattcaccaatccagaggtgtccgggatgagtcctcattgcctgaattctcgcactgttcccgcagaatttttctctgctgtcttattctatcgcacaaatttttgaacgacaacacttactcgatgaaaaattggcaaattataagtgggctccatgcaaaggatctatctctaatggaaagatggtgtctgggtaagctgaattatgagctggccattccatatgacgagtttttgctatgggaaacgaacactttaatgaaagcgaaattgcgcgtcggaactcccgccaacgctccggtgaagagacccagagaatcagacaatgattatgatgcaaattcttggaaacagattaaatcttgttaa

SEQ ID NO: 190973 - DNA, 762 bp, Saccharomyces pastorianus
atgggtatgtggacgattaggaatagacaaaccatgttatttatctccattagggcgtgagagtgtaattagtacacaggtactactagaatgctaaagaactttttaaaatatcctgaatcgtagggcaaatccatgtcaagcaagaaactaatagttattaaacttcatttacttttgagctagttaaatattttcatcatttcctaaagtactgaacacctgaatgatacttttattggcccttttaataagaactctggttagaaaatatattgaggatatcattagtaatactcattagatatttgtgaatttagccgtttccccattacagaaaaaagatacaactaattacatgtgcagtcaaattactttttttttaagatcaattactaacaatcaactatcatgctaaatttgctgtgatatcattttgaaccagttaacgtcccaaagaccagaaagacctactgtaagggtaagacctgtcgtaagcacactcaacacaaggttactcaatacaaagctggtaaggcttccttgttcgctcaaggtaagagacgttatgaccgtaaacaatctggtttcggtggtcaaaccaagcctgttttccacaagaaagctaagactaccaagaaggttgttttgagattggaatgtgtcaaatgtaagactagagcccaattaaccttgaagagatgtaagcacttcgaattgggtggtgaaaagaagcaaaagggtcaagctttgcaattctga

SEQ ID NO: 190974 - DNA, 312 bp, Saccharomyces pastorianus
atgtccaattttctctttccatgtaattctactttcttttctgctttagtctctaattcatctagacctggagggggtggtggcggtggtaatgtgaagtccacaatttcttcagcgtttatttcgaagttgcttggaggaggtggtggaggcggaaggaatgtatcctcatttaccgatgatggcaccatcggattatccagttcttcgatttcgtatccaggcggtggtggtggtggtggtggaagtgctaagtcgctgtcctcttcaaaaccaggaggtgggggcggtagtccactcatctttctttga

SEQ ID NO: 190975 - DNA, 1203 bp, Saccharomyces pastorianus
atgccatttgttaaggactttaagccacaagctttgggtgacaccaacttattcaaaccaatcaaaattggtaacaatgaacttctacaccgtgctgtcattcctccattgactagaatgagagcccaacatccaggtaatattccaaacagagactgggccgttgaatactacgctcaacgtgctcaaagaccaggaaccttgattatcactgaaggtacctttccctctccacaatctgggggttacgacaatgctccaggtatctggtccgaagaacaaattaaagaatggaccaagattttcaaggctattcatgagaataaatcgttcgcatgggtccaattatgggttctaggttgggctgctttcccagacacccttgctagggatggtttgcgttacgactccgcttctgacaacgtgtatatgaatgcagaacaagaagaaaaggctaagaaggctaacaacccacaacacagtataacaaaggatgaaattaagcaatacgtcaaagaatacgtccaagctgccaaaaactccattgctgctggtgccgatggtgttgaaatccacagcgctaacggttacttgttgaaccagttcttggacccacactccaataacagaaccgatgagtatggtggatccatcgaaaacagagcccgtttcaccttggaagtggttgatgcagttgtcgatgctattggccctgaaaaagtcggtttgagattgtctccatatggtgtcttcaacagtatgtctggtggtgctgaaaccggtattgttgctcaatatgcttatgtcttaggtgaactagaaagaagagctaaagctggcaagcgtttggctttcgtccatctagttgaacctcgtgtcaccaacccatttttaactgaaggtgaaggtgaatacaatggaggtagcaacaaatttgcttattctatctggaagggcccaattattagagctggtaactttgctctgcacccagaagttgtcagagaagaggtgaaggatcctagaacattgatcggttacggtagattttttatctctaatccagatttggttgatcgtttggaaaaagggttaccattaaacaaatatgacagagacactttctacaaaatgtcagctgagggatacattgactaccctacgtacgaagaagctctaaaactcggttgggacaaaaattaa

SEQ ID NO: 190976 - DNA, 105 bp, Saccharomyces pastorianus
atgccacctgccagaattgaactagcgacctttgcattacaagtgcaacgctctaccactaagctaaggaggctaaaaatacaactatgttgtatctcaaaataa

SEQ ID NO: 190977 - DNA, 183 bp, Saccharomyces pastorianus
atgacgtattgtcatactgacgtatcttattttgagatacaacatagttgtatttttagcctccttagcttagtggtagagcgttgcacttgtaatgcaaaggtcgctagttcaattctggcaggtggcattataccggtattattttttttccctttgttcttatttctctatcatttataa

SEQ ID NO: 190978 - DNA, 2358 bp, Saccharomyces pastorianus
atgtctgttaaagagcataacgaagaagatattattggtgatgaattacagaattcgaggcaactctccattgattgcgactcagttaaaatttcactaaggaacacatattggaccaaagactatacaacaggtatcaaattattcataaaacatatgaagagagaaaatgatttgctgattaaagacatcaaattttacaatgattttgtcaacaaattttggaaaccaacattgaacaatttacaaaaaatggaagcaaccaattcaatgaatagcaggctgctggaagtgatgagcaaacagtttaatataatatcaacagagcaagttgaaagagattgtaaaattccattgcaagaactaagagatcttaatgagagcttccttcgtgaggcagaaaacgatttgtcatctcgttattcagcttacattaaggatttagtcgcagctaaagaggcactaattggatgtgagaaaagagttcagtctatatataaattgaaaaaagccaatacgccagtggaaaattcttcctctgtttttgataatggaaaggatagtgcaccgttaaccaggttgaacttcgtatgcgagtttccttacactttagacgagaggttaaaatttgaggattgcgaccaatttatgtcatttttgcaaaccttgaagggaaaagtcatcctggagaaaagtgtcttttccgttccaggattgtcaaatcaaagtttccaaggcaggtcattgatcaaagaattgaaaaaacttgaacccagactaaacctgtccttatttaatatcgataggataggtaacgaattcatccaactgggtataatacaagaatattccctgagtttttactctagcaaagtttctcagtttgaccaggaaaaatactattactggaacagtgaagtccttgctacgcaagagagtaatggtaatgctggaaacagaaaaaaaaaatcgtatggtgagttaacacactccgacaatgaacacgaagaaaagtccaacgtttcatctatcaaaacatctatatccgattggatccgcaaagttagtcaacatgataatgatgattgcgatgcagcgggaagtacagatatgaataaaaatgagtggaagagtttaaaacagcaacttgaatcatcacaagatatttttttctccaagtgttgccagttggaatattctaaagtgcagttggaaaaaaccatttatgattattgtaaaaattactctaaaatggaggacggaatcaaacgagctctagaatcatcaaacatgatgtttcaacaaaaatgtgaaaaatttactgactcacctgtgtgttctctacaagaagcacaactgccacaggaaactgccaatgcggatgtaagagggtttttcctcagggataatggcataccctttcgcaggtggaatatcctagaagcgagtgatccagtcgacgcttgcaaagaaatctccataaaaagcgaaaagtttttctgtggtagtgaaataaataatgaactggctgctcttgatacgttaggggcaataaagattatactgcggcagattgaaaaggaaccaaatgctaataaagtcatacaaagttggcacagggatattgattttgtaagggtttctaatttgaaaagagacttattgggggaattcaaaggatcgaaaactaccgaaaatacaaactctataatcactgctcatttttttgaaaactcgcacagctatgtcactaatgatctcgtcggactgataaaattatggctgttagagctacccgacagcctaataccttcaaaccactacgatgacttaattaaggccgaaaaatcgctaacatccctatgtgaacagtttccgacgagctccttaaggtttctacaagaactagcaaaccattttcaattgatcaatagcaaatactcacttccgccgcaaacaatacaagatttgtttagagacaacagtgacatagacataccattggcccatcacttcgtaagaagaacaggcttacagaaccctatcgacatcaaaatcttgtcaccaacattatctacatttttcatcaacgaaagaactgtagaaactttgcaaacgttgatcgcaaacaggatcacgacggcaactactgcgacactcactgaaccgccgacgataattataaaggatacaacggcacctatacactctacccctaagccaccgccaaacgacaaggatggccatttcatacctcggccattcaagactagttctactccgacaaccccagagagacctaaacgtaagagtggtttattccttcccatcaacgtcaacgatgtcccttctacataa

SEQ ID NO: 190979 - DNA, 525 bp, Saccharomyces pastorianus
atgtctgctatcccagaaaacgccaacgttaccgtcttaaacaagaacgaaaagaaagccagagaattgattggcaaattgggtttgaagcaaatcccaggtatcatcagagtcactttcaggaagaaggacaaccaaatctatgctattgaaaagccagaagtcttcagatctgccggtggtaactacgttgtcttcggtgaagctaaggttgacaactttacccaaaagctagccgctgctcaacaacaagctcaagctagcggtattatgccatctaacgaagacgtcgctaccaagtccccagaagacatccaagctgacatgcaagccgccgcagaaggcagtgtcaacgccgcagcagaagaagatgacgaagaaggtgaagttgatgccggtgacttgaataaggatgatatcgagttagtcgttcaacaaactaacgtttccaaaaaccaagccatcaaagccctgaaagctcacaatggtgacttagtcaacgctatcatgtccttgtctaaataa

SEQ ID NO: 190980 - DNA, 375 bp, Saccharomyces pastorianus
atgaatatgaaaatgttgctcacgaggatccatgagatgaacgcacttatatcgtctgaattgaacggccgggtggactttttcaagaaccatcgtatgtttattttgagcttagtaaaaatattgttggtctgcaccagcagggaatccctttcagtaatgtatttcaggtttgatagcttttttgattttttgtcgggaggagcatcccttccagttttagactcattagaatatgctcttagcgatgccgctgctattgacggtattctcaagttacttcgaagggcagggcttctagcccaatacacataccttgctacagaaaactgccgggggctccttagaaaaggcctggtaaaaagggacatatag

SEQ ID NO: 190981 - DNA, 1581 bp, Saccharomyces pastorianus
atgacattgactatcaaaataggaaccttaaacgatagcgatcaatctgcagtgcataatggtacagaaaatggctctgattttcgaaagataactcccacagaggaagagatctgtgatgacgtagttttgttatggaaggaagagcccggaactgaagacgctacgattcagcatctttatgacaggattacggaaagaaatcaatcgtggaaattgagtgcttctcgttttcgaaaaattctaaatgagcaccatctttatgacacagatctagagaccgtttctctatataaagataaaatacattttccaaaagccctagattctgatgctaaggtcgaagtgaaatttattgatgacgaacatggaaggggccttttcgctaaaagagatttttccaagggccaaatcatcctgaaagaaaataaacctatcgtatatattccaccactggacaagctttttttaatatctaatggaaaggcatgtgctcgatgtggtaaggcgctatatgatttgacccagcacaaaattatggtccattatttggattgtgaagtttgcaaagctatttggtgcagtgaaaaatgtaaaaaagcacatgcgtcgttacatgagcttttataccactcatggagatcgaatagaatagacattcttcatgctggtaattggaaaagatttgttaactactgtgagaaatattgttttaccgctgccttttcagttggtcttatatatggatccatgcttttggatactacaggagaggtcaaagagcaatggcaaaaattggcaagcatctcacaaagggaaagaattaaattaagagacgccagcggtatcggcagtacgtttagtttactgaatggtacaactgtacatactgaagaggaatctgataatggtaccaaaaagggcgttgagaagaatattgatgacgagactgtttgggagaagtgctacgaattattttgcggtgcatttccaaaagcttctgaagaaatagatttcgagaaatttttgaccatgatcgggacgttcaatatcaatcaatataacggccaggtatatcattggatctccttcataaaccatgattgtgaaccaaacgcctatattgagcaagtagaagaacatgaggaactgaggttgcatgcaaggaaaccaataaagaagggggaacaaatacgtattacgtacgtcaatcccttacatggggtgaggttgaggcgtagggaattaagagttaactggggcttcttatgccagtgtgaccgctgtcaaaatgaactatctacatttgaaagagttccaaatctagagaaaaagaatgcggatgctaatttaggagtagaaaaaatagattccaatgatagtagtgaagatggctctaagaaatcaactggtaatcgtaaatcttccatgagagaggcccagccagatttaaaagaaatactgaagaatggaaaagaatttgaattagacataccagaaactgttgatacacaagggaatgtaagaaaaacctcagtcagattcgattcaaacgtttcggtcgcagtggatgaaagataa

SEQ ID NO: 190982 - DNA, 3228 bp, Saccharomyces pastorianus
atgacaattgcacaccactgcatatttttggtaatcttggcctttctggcactaattaatgtggcctcaggagccacagaggcgtgcttaccagcaggccagaggaaaagtgggatgaatataaatttttaccagtattcattgaaagattcctccacatattcgaatgcagcatatatggcttatggatatgcctcaaaaaccaaactaggttctgtcggaggacaaactgatatttcgattgattataatattccctgtgttagttcatcaggcacatttccttgtcctcaagaagattcctatggaaactggggatgcaaaggaatgggtgcttgttctaatagtcaaggaattgcatactggagtactgatttatttggtttctatactaccccaacaaacgtaaccctagaaatgacaggttattttttaccaccacagacgggttcttacacgttttcttttgcaacagtagatgattctgcaattttatcagtcggtggtagcattgcgttcgaatgttgtgcacaagaacaacctcccatcacgtcgactaacttcacaatcaatggtatcaagccatgggatggaagtctccctgacaatatcacagggactgtctacatgtatgcaggctactattatccgctgaaggttgtttactccaatgccgtttcctggggcacgcttccaattagcgtggaattgcctgatggtactactgttagtgataactttgaagggtacgtttactcttttgacgatgacctaagtcagtcaaattgtactatccctgatccttcaatacatactactagcactatcacaactaccaccgagccatggaccggtactttcacttctacatccactgagatgaccaccatcaccgatactaacggtcaattaactgatgaaactgtcattgtcatcagaactccaacaacagctagcaccatcacaactaccaccgagccatggaccggtactttcacctctacatccactgagatgactactgtcaccggtaccaacggtcaaccaactgacgaaactgttattgtcattagaactccaactagtgagggtttgattactacaactaccgaaccatggaccggtactttcacctctacatccactgagatgactactgtgaccggtaccaacggtcaaccaactgacgaaactgttattgtcattagaactccaactagtgagggtttgattactacaactaccgaaccatggaccggtactttcacctctacatccactgaggttaccaccatcactggtaccaacggtcaaccaactgacgaaaccgtgattgtcattagaactccaactagtgagggtttgattactacaactaccgaaccatggaccggtactttcacctctacatctactgagatgactactgtcaccggtaccaacggtcaaccaactgacgaaactgttattgttatcagaactccaaccagtgaaggtctaatcagcaccaccactgaaccatggactggtactttcacctctacatctactgaggttaccaccatcactggtaccaacggtcaaccaactgacgaaaccgtgattgtcattagaactccaactagtgagggtttgattactacaactaccgaaccatggaccggaactttcacctctacatccactgagatgactactgtgaccggtaccaacggtcaaccaactgacgaaactgttattgtcattagaactccaactagtgagggtttgattactagaactaccgaaccatggactggtactttcacttctacatctactgaggttaccaccatcaccggtaccaacggtcaaccaactgacgaaactgttattgtcatcagaactccaactactgccatctcatccagtttgtcatcttcttcaggacaaatcaccagctctatcacgtcttcgcgtccaattattaccccattctatcctagcaatggaacttctgtgatttcctcctcagtaatttcttcttcagtcacttcttctctagtcacctcttcttcattcatttcttcctctgtcatttcttcttctacaacaacctccacttctatattctctgaatcatctacatcatccgtcattccaaccagtagttccacctctggttcttctgagagcaaaacgagttcggctagttcttcctcttcttcctcttctatctcttctgaatcaccaaagtctcctacaaattcttcttcatcattaccacctgttaccagtgcgacaacaggccaggaaactgcttcttcattaccacctgctaccactacaaaaacgagcgaacaaaccactttggttaccgtgacatcctgcgaatctcatgtgtgtactgaatccatctcctctgctattgtttccacggccaccgttactgttagcggcgtcacaacagagtataccacgtggtgccctatttctaccacagagacaacaaagcaaaccaaggggacaacagagcaaaccaaggggacaacagagcaaaccacagaaacaacaaaacaaaccacagtagttacaatttcttcttgtgaatctgacatatgctctaagactgcttctccagccattgtgtctacaagcactgctactattaacggcgttaccacagaatacacaacatggtgtcctatttccaccacagaatcgaagcaacaaactacgctagttactgttacttcctgcgaatctggtgtgtgttccgaaactacttcacctgccattgtttcgacggccacggctactgtgaatgatgttgttacggtctatcctacatggagaccacagactacgaatgaacagtctgtcagctctaaaatgaacagtgctaccagtgagacaactaccaatactggggctgctgagacaaaaacagcagtcacctcttcactttcaagattcaatcacgctgaaacacagacagcttccgcgaccgatgtgattggtcacagcagtagtgttgtttctgtatccgaaactggcaacaccatgagtctaacaagttccgggttgagcactatgtcgcaacagcctcgtagcacaccagcaagtagcatggtaggatctagtacagcttctttagaaatttcaacgtatgctggcagtgccaacagcttactggccggtagtggtttaagtgtcttcattgcgtccttattgctggcaattatttaa

SEQ ID NO: 190983 - DNA, 234 bp, Saccharomyces pastorianus
atgctggcgaaaacgggcgatgtagtggtacagaaggtgccggttatccgtttgtccgtttttcttcattttttttttgtttttcccttttgtcttttgcaccgcttatatatgggtatgaaacaagttcaagaatttataatggaacccaaaggttcagtctttgtagttcgagcgacattgcgcgtttccttagaaaacgctggaaagatattctttaacgagacggagtaa

SEQ ID NO: 190984 - DNA, 1572 bp, Saccharomyces pastorianus
atggccgccattagagactacaagaccgcactagactttaccaagagcctaccaagaccggatggtttgtcagtgcaggaattgatggactccaagatcagaggtgggttgacttataacgattttttaatcttaccaggtttagtcgattttgcgtcctctgaagttagcctacagaccaagctaaccaggaatattactttaaatattccattagtttcctctccaatggacacggtgacagagtcagaaatggccacttttatggctctgttgggtggtatcggtttcattcaccataactgtaccccagaggaccaagctgacatggtcagaagagtcaagaactatgaaaatgggtttattaacaaccctatagtgatttctccaactacgaccgttggtgaagctaagagcatgaaggaaaagtatggatttgcaggcttccctgtcacgacagatggaaagagaaatgcaaagttggtgggtgtcatcacctctcgtgatatacaattcgttgaggacaactctttactcgttcaggatgtcatgaccaaaaaccctgttaccggcgcacaaggtatcacattatcagaaggtaacgaaattctaaagaaaatcaaaaagggtaggctattggttgttgatgaaaagggtaacttagtttctatgctttcccgaactgatttaatgaaaaatcagaactacccattagcgtccaaatctgccaacaccaagcaactgttatgtggtgcttctattgggactatggacgctgataaagaaagactaagattattggtaaaagctgggttggatgtcgtcatattggattcatcccaaggaaactctatcttcgaattgaacatgctcaagtgggtcaaagagagtttcccaggtctggaagtcatcgctggtaacgttgtcaccagggaacaagctgccaatttgattgctgccggtgcggacggtttgagaattggtatgggaactggctctatttgtattacccaagaagttatggcttgtggtaggccacaaggtacagccgtctacaatgtgtgtgaatttgctaaccaattcggtgttccatgtatggctgatggtggtgttcaaaacattggtcatattaccaaagctttggctcttggttcttctactgttatgatgggtggtatgttggccggtactaccgaatcaccaggtgaatatttctatcaagatggtaaaagattgaaggcgtatcgtggtatgggctccattgacgccatgcaaaagactggtaccaaaggtaatgcatctacctcccgttacttttccgaatcagacagtgttttggtcgcacaaggtgtctccggtgctgtcgttgacaaaggatccattaagaaatttattccatatttgtacaatggtttacaacattcctgtcaagacatcggctgtaggtcgctaactttattaaagaataatgttcaaaggggtaaagttagatttgaattcagaaccgcttctgctcaactagaaggtggcgttcataatttacattcttacgaaaagcgtttacataactga

SEQ ID NO: 190985 - DNA, 462 bp, Saccharomyces pastorianus
atgtccctacggccttgtctaacaccatccagcatgcaatacagtgacatatatatacacacaccacacccacacccacacccacacccacacacacccacacacacacacccacacacacccacacccacaccacacccacacccacacacaccacacccacacaccacacccacacccacaccacaccacacccacacaccacacaccaccctatctaacctgtctcttaacctaccctcacattaccctacctccccactcgttaccctgccccactcaaccataccactcccaaccaccatccatctctctacttactactaccatccaccgcccatcataaccgttaccctccaattacccatatccaactccactaccattaccctgctattaccctaccatccaccatgtcctactcactgtactgttgttctaccctccatattgaaacgttaa

SEQ ID NO: 190986 - DNA, 318 bp, Saccharomyces pastorianus; identical to SEQ ID NO: 190838

SEQ ID NO: 190987 - DNA, 429 bp, Saccharomyces pastorianus
atgcggttaattttcattgcgaaaatgcttcaatattcatttctaccattttccccgttcaatcttttgaattttgataatagtataagcgtaagctggtttataacatactcagtgatcgtttccatttgggggtttgctgtgtggattgaaggagcatataggaataagattaatctacagcttccaagatgtacgaagataaaatgctcccgctacaatacgagaataaaatcccccaagtggttcaactgtaaaaattggatgcattttttcctattatacctttttctaaccgcttctaacttaattgttcaattggcctatttttcaaaagaaatgtgtagtcagggtataaacgttcctggaacgaagaaaccaggtaatagagtttatttatcggttatcatactaatggggaacgggtga

SEQ ID NO: 190988 - DNA, 838 bp, Saccharomyces pastorianus
atggctcaacgtgttactttcagaagaagaaatccatgtatgttactgaactatttttttgagttttcatgaaaacttattatgaacttattatgaacttattttgaactttcattgtgggaaaatgaggttaaaaggcgaacgagtgctatttagagaagcgtaccacttagaaataggaagaaccagatcatcgataggggaatcaactatgcaagaactttcaaatatattggcatgacattaaaacattagacagcatgaacgaacagtatccagtaatgtggacagcaataagttgacttcagtttctaagtggaagaccttggtcgacccaaatggaaaatgaatttttctccgctgttgaaagattgaaatgagataatattcattcagcaacgccgaaatacttttcatatggagcaatcccactcaagttcttaaatcataggataataaagaagtgattactaacattaatgggaaaattttctctttactacgtacagacaacacccgttctaacaaaatcaaggttgttaagaccccaggtggtatcttgcgtgcccaacacgttaagaagttggctactagaccaaagtgtggtgactgtggtagtgctctacaaggtatttccactttgagaccaagacaatacgctactgtctccaagacccacaagactgtttccagagcttacggtggttccagatgtgccaactgtgtcaaggaaagaatcgtcagagctttcttgattgaagaacaaaagattgttaagaaggtcgttaaggaacaaactgaggctgctaagaagtctgaaaagaagtctaagaaataa

SEQ ID NO: 190989 - DNA, 817 bp, Saccharomyces pastorianus
atggtatgtcgaacttgtactgaaccagcagaaattgaaacagactgcaagtaagctctattccggttatagcattatgggtggctgtataaatacaatacaatcacgggagaaatttccaacaaaaaagatctagtgatacgtttggtgccacaagtttaaaatacaaattggttaaaggactttacggctaaaacacaagaattgcaataatgctaatatttattctgtgtattcctcagtaacgtaagatcagcgagaacaaattcccagggttggaaagaataaaaaaaaaagtactgctgtaatgtttctggattatttttctgattaattgttctgtttagattactaacgtattctgctaaaaatgactggtgagctttgcttccattcattttattttttatagtctgacgctgtcactattcgtaccagaaaggttatctccaacccattgttggccagaaagcaattcgttgttgacgtcttgcacccaaacagagctaatgtctccaaggatgaattacgtgaaaaattagctgaagtctacaaggctgaaaaggacgctgtctccgttttcggtttcagaacccaatttggtggtggtaaatctgttggtttcggtttggtctacaactctgttgccgaagctaagaagttcgaaccaacttacagattagtcagatacggtttggctgaaaaggttgaaaaggcttccagacaacaaagaaagcaaaagaagaacagagacaagaagatctttggtactggtaaaagattggccaaaaaggttgctcgtcgtaacgctgattaa

SEQ ID NO: 190990 - DNA, 4498 bp, Saccharomyces pastorianus
atgagctttatggatcaaatcccaggaggaggaaattatccaaaactcccagtagaatgccttcctaacttcccgatccaaccatctttgaccttcagaggtagaaatgactcgcataaactgaaaaactttatctccgaaataatgctaaacatgtctatgatatcttggccgaatgatgccagtcgtattgtgtactgcagaagacatttattaaaccccgctgctcagtgggctaatgattttgtacaagaacaaggtatacttgaaataacattcgacacattcatacaaggattatatcaacatttctataagccaccagatatcaataaaatctttaatgcaatcacgcaactttccgaagctaaacttggtattgagcgtctcaaccaacgattcagaaagatttgggacagaatgccaccagacttcatgaccgaaaaagctgccataatgacatatactaggctattgacaaaggaaacctataatattgtcagaatgcacaaaccagagacattaaaagacgccatggaagaggcttaccagacaaccgcactaactgaaagattcttcccaggattcgaacttgatgctgatggagacactatcatcggtgccacaacccacttacaagaagaatacgactctgactatgattcagaagataatctgacccagaatagatacgtccacaccgtaaggacaagaagatcttacaataaaccaatgtcaaatcatcgaaacaggagaaataacaacgcatccagagaagaatgtataaaaaatcggctatgcttctattgtaagaaagagggacatcgcctgaacgaatgtagagcacgtaaggcgagttctaaccgatcttgaactcgaatcaaaagaccaacaaactctttttatcaaaaccttaccaattgtacactatatcgccatccccgagatggacaataccgccgaaaaaaccataaaaatacaaaacacgaaagtaaaaaccctgtttgacagtggatcacccacgtcatttatccgaagagatattgtagaacttctcaaatacgaaatctacgagacccctccactccgttttagaggattcgtagccaccaaatccgccgttacatccgaagcagtcaccattgacctcaaaatcaatgacctgcagataactttagccgcgtacatactggataacatggactaccaattgttaattggaaatccaatcttacgccgctacccgaaaatcctgcacacagtactgaataccagagagagccccgactccttaaagcccaagacttatcgctccgaaaccgttaataacgttagaacctactccgctggtaatcgtggtaaccccagaaacataaaactgtcttttgcccccaccattctcgaagcaactgacccgaaatccgctggtaatcgtggtaaccccagaaacacaaaactgtctcttgcccccaccattctcgaagcaactgacccgaaatccgctggtaatcgtggtgactccagaaccaaaaccctgtctcttgcaaccactactcctgcagcaattgacccgcttacgacccttgataacccaggtagtactcaaagtacatttgcgcaattcccgatacctgaagaagcgagcatcctagaagaggatggaaaatactccaacgttgtctcaaccattcagagtgtagaacctaatgctactgatcacagcaataaggacaccttttgcactttgccagtttggttacaacagaagtatagagagatcatacgtaatgatctcccaccaagacctgccgacattaacaacatccccgtaaaacatgatattgaaattaaacctggcgcaagactacctcgactacagccataccatgttacagaaaagaatgaacaagaaatcaacaaaatagttcaaaaactgctcgataacaagttcattgttccctcaaagtcgccctgcagctcccctgtagtcctcgtcccgaagaaagacggtaccttccgactctgcgtcgattaccgcaccctgaacaaagctaccatctccgacccattcccattacccagaatcgacaacctattgagccgtattggaaatgcccagatatttaccacgctagatttgcatagtggttaccaccagatcccgatggaacccaaagaccgctacaaaaccgcctttgtcaccccatccggtaagtatgaatataccgtcatgccatttggcttagtcaatgcacctagtacattcgcaagatacatggctgatacatttagagacctgagattcgtcaatgtttaccttgatgatatattaatcttctccgaatctccagaagaacattggaaacatttagacacggtactagaaagattaaagaacgagaacctcattgttaagaagaaaaaatgtaaatttgcatctgaagaaactgagtttttaggctatagtattggaatccagaaaatagctccactacagcacaaatgtgcagcaatccgagactttccgacgcctaaaacagtaaaacaagcacagagatttttaggaatgattaattactacagacgattcattccgaattgctccaagattgcacagccaatccaactgtttatttgtgacaaaagtcaatggacagaaaaacaagacaaggcaattgagaaactaaaagccgccttgtgtaactcccccgtcctagtaccattcaacaacaaagcaaactaccgacttacaacagacgcctcaaaagacggcattggtgctgttctagaagaagtcgacaacaagaacaaacttgttggtgtcgtcggttacttctctaaatccttagagagtgcccagaaaaactatcctgctggcgaattagaactacttggaattatcaaagcactccaccacttccgatatatgcttcacggaaagcatttcacgttaagaacagaccacattagtttgttatcattacaaaacaagaacgaacccgcacgacgcgtgcaacgctggttagatgacctagccacatatgacttcaccttagaatacttagctggacccaagaacgttgtcgcagatgccatatcccgtgccatatatactataacccccgaaacatcccgacctatcgacacagaaagctggaaatcttactacaaatcagacccattatgtagtgctgtcttaattcatatgaaagaattgacacaacacaacgtcacacctgaagatatgtcagccttccgtagttaccagaagaaactcgaactatcagagaccttccgaaagaattattccctagaagacgaaatgatctattaccaagaccgactagtagtaccaataaaacaacagaacgcagttatgagactgtatcatgaccataccttatttggaggacatttcggtgtaacagtgacccttgcgaaaatcagcccaatttactattggccgaaactacaacattcgatcatacagtacatcaggacctgcgtacaatgtcaactaataaaatcacaccgtccacgcttacatggactattgcaaccactccccatagcagaaggaagatggcttgatatatcaatggattttgtgacaggattacccccaacatcaaataacttgaatatgatcctcgtcgtagttgatcgtttctcgaaacgcgctcacttcatagctacaaggaaaactttagacgcaacacaactaatagatttactctttcgatacattttttcatatcatggttttcccaggacaataaccagtgatagagatgtccgtatgaccgccgacaaataccaagaactcacgaaaagactaggaataaaatcgacaatgtcttccgcgaaccacccccaaacagatggacaatccgaacgaacgatacagacattaaacaggttactaagagcctatgtttcaaccaatattcagaattggcatgtatatttaccacaaatcgaatttgtttacaactctacacctactagaacacttggaaaatcaccatttgaaattgatttaggatatttaccgaatacccctgctattaagtcagatgacgaagtcaacgcaagaagttttactgccgtagaacttgccaaacacctcaaagcccttaccatccaaacgaaggaacagctagaacacgctcaaatcgaaatggaaactaataacaatcaaagacgtaaacccttattgttaaacataggagatcacgtattagtgcatagagatgcatacttcaagaaaggtgcttatatgaaagtacaacaaatatacgtcggaccatttcgagttgttaagaaaataaacgataacgcctacgaactagatttaaactctcacaagaaaaagcacagagttattaatgtacaattcctgaaaagtttgtataccgtccagacgcgtacccaaagaataaaccaatcagctccactgagagaattaagagagcacacgaagttactgcactcatag

SEQ ID NO: 190991 - DNA, 821 bp, Saccharomyces pastorianus
atgcaaatgtatgcaccatatccattctaaacatagtttttcgaacgttcagagcttaaagggacaattattttagaaactgaatttttacccagtggaataacatcgtatctgtaaagtctacaaaattttttatccatcaaaaattaaaacaaagaaaactgccaaactgaatatgaggaactttcctctctaggaatgacttagtgaatgtacagtgacttgtggaaaatatgattagattttgagcgggtgatgcgacttaacagtctcattgcctaagaaatatccaaatttgtggttcatgctctcccccaagatatgacgatgagagctcgtttaaaattttgtcttcttccgaacagttatgaaaaaactattacgtgtttttatgatatccttactaacttgtcatttttttataaaattatttttttaacagttttgtcaagactttgactggtaagaccatcactttggaagttgaatcttctgacactattgacaatgtcaagtcaaagattcaagacaaggaaggtatcccacctgaccaacaaagattgatctttgctggtaagcaattggaagacggtagaaccttgtctgactacaacattcaaaaagaatccactttgcacttagtcttgagattgagaggtggtatcattgaaccatctttgaaagctttggcttccaagtacaactgtgacaaatctgtttgccgtaagtgttatgctagattgccaccaagagctaccaactgtagaaagagaaagtgtggtcacaccaaccaattgcgtccaaagaagaagttaaaatga

SEQ ID NO: 190992 - DNA, 360 bp, Saccharomyces pastorianus
atgaaaaatattgcatacgaaggtcgtctattcttgattagtgcagtgcagttcatgccagatgcgacagcaatgggctttggggagattattgaccaagctacaggtaagagaaaattacctggatggccatctgctgacgacaactgtattaatggaggtagtgttattattgatccttatggagagattattgcagggccattgctagggcaggagggccttttaaccgccgaaattaacactgacttgattgctgaagctcgctttgatcttgaccctgtcggacattatgctaggggagatgtcttccagttgactgtcaatgaaaggtcacacgatgtcaagtttacgaaatga

SEQ ID NO: 190993 - DNA, 330 bp, Saccharomyces pastorianus
atgtccggtgttaataatacatccgcaaatgatttatccactaccgagtctaactctaactcagcagtaggcgctccttctgttaagactgagcacggtgactccaaagactccctcaaccttgatgctactgaagcacctattgacttacctcaaaaacccctctctgcatataccaccgtcgcaatcctatgtttgatgattgcatttggcggtttcatctttggttgggataccggtaccatttctggttttgttaacctttctgactttatcagaaggtttggtcaaaaaaaaacgacaaggggacttactacttatcgaaagtaa

SEQ ID NO: 190994 - DNA, 228 bp, Saccharomyces pastorianus
atgccaattataggggtgccgaggtgccttgaaaaacccttttgcgcgcctgcgaagtttccattttcggtcaaaaagaatatccgaattttagatttggaccctcgtacagaagcctattgtctaagcctaaattcagtctgctctaaacggcttccatgcaagaaatatttctatctcttgaattcgtacaacattaaacgtgtgttgggagtcgtatactgttag

SEQ ID NO: 190995 - DNA, 363 bp, Saccharomyces pastorianus
atggtcaaattaacttcaatcgctgctggtgtcgctgccatcgctgctactgcttccgcaaccaccactctagctcaatctgacgaaagagtcaacttggttgaattgggtgtctacgtctctgatatcagagctcacttggcccaatactacatgttccaagccgcacacccaactgaaacctacccagtcgaagttgctgaagccgttttcaactacggtgacttcaccaccatgttgactggtatttctccagaccaagtgaccagaatgatcaccggtgtcccatggtactccagcagattaaagccagccatctccagtgctctatccaaggacggtatctacactatcgcaaactag

SEQ ID NO: 190996 - DNA, 138 bp, Saccharomyces pastorianus
atgcctagtgattatacttcccattacccagtaatacttatcaaaaaaaaaaaaaaaaaaattgcaggaatgtataggcatagtaagcggtaccttgagataatgtccaccgcttcagctcaattcgtcggaaactaa

SEQ ID NO: 190997 - DNA, 375 bp, Saccharomyces pastorianus
atggtcaaattaacttcaatcgctgctggtgtcgccgccatcgctgctggtgttgccgctgccccagccactaccactctatctccatctgacgaaagagttaacttggtcgaattgggtgtttacgtctccgatatcagagctcatttggcccaatactacttgtttcaagcagctcatccaagtgagacctacccagttgaaattgctgaagctgttttcaactatggtgacttcaccaccatgttgactggtattccagctgaacaagtcaccagagttatcactggtgttccatggtactctaccagattgagaccagctatctccagtgctctatctaaggacggtatttacactgctattccaaaatag

SEQ ID NO: 190998 - DNA, 711 bp, Saccharomyces pastorianus
atggcgaatttaaatatatttgggcaagaagttggtgctgacgtcgaaggttggacaacaagggccttcccagagaaagttgtattgaaaggtaacacttgcagactagaacctctagatagagaaagacatggttcggaactttttagtgcctatagtgaggcaggccaaaaattatggacgtatttacctgcgggaccattcactaacttggaggaatatctagaattcattaaggaactcaatgaaactaaagatactgtgcctttcgcaattattaataaagagactgaacgtgccgttggtacattgtgcttaataagaatcgatgaagccaacggttcactagaagttggatatgttgttttttcaccagaattacagaagacgattattgcaactgaagctcaatttctgttaatgaagtatgtatttgatgatcttcaatacaggagatatgagtggaagtgtgatagtttaaatgggccgtcaaggagggcagcgatgcgcttaggctttaagtatgaaggcacgtttcgacaagtggtggtatataagggtcgcactcgcgacactcaatggttttcaataatcgataaagaatggttacgcattcgtaaaacctttgaagaatggttagacaaaacaaattttgaaaatggcaaacaaaagagaggaatagcagcaataagagaaagcttgtcaaactga

SEQ ID NO: 190999 - DNA, 693 bp, Saccharomyces pastorianus
atgggctgccaagaagcgttcagaacaacccttctcgaacccttctctttgaaaaaagacgaagctgccaaggttaagtcatttaaggattccgtctcttacattgaagaagcattgggagtttattttacagaagttgaaaaacaatggaagttgtttaatactgaaaaatcatggagccctgttggcctagaagatgctaaacttcccaaagaagcttaccgatttaagcttacctggattcttaaaaggattttcaagctgcggtgtttacaagtcttcctttattattttttaattgtctacacgtctggaaatgttgaccttatatcacgtttcttgtttccggtagtaatgttttttatcatgacgagagatttccaaaatatgggaatgattgttttatccgttaaaatggaacacaagatgcagttcttgtcaactattataaatgagcaagaaagcggtgcgaatggatgggacgaaattgcaaagaaaatgaataggtatttgtttgagaaaaaagtctggaataatgaagagtttttctacgatggacttgactgtgaatggttttttagctgctttttctatcgccttttatctttaaaaaaaactatgtggtttgcttcgttgaacgttgagctatggccatacgttaaagaagcacaatccgtggtaacaagtctttag

SEQ ID NO: 191000 - DNA, 186 bp, Saccharomyces pastorianus
atgaaagagaatgaagtcaaagatgagaaaagcgtagatgtgttatccttcaaacagctcgaatcccaaaagactgttttaccccaggatgttttccgaaacgaattgacctggttttgttatgaaatttacaagtctttagcgtttcgcatctggatgctattatggctaccacttagcatctga

SEQ ID NO: 191001 - DNA, 198 bp, Saccharomyces pastorianus
atgattggctccattgggttctttattacttccttggctgtgttgatacgtactgttatggtttatgccaagagagtggtaaacattagactaaagagagcagtagattatgaggataagatcgggcccggcatggtttctgtgtttctaattctctctattttattttcctttttctgcaacctagttgctaaatga

SEQ ID NO: 191002 - DNA, 1605 bp, Saccharomyces pastorianus
atgcaagctccagtggtatttatgaatgcttctcaagagagaactaccggtcgtcaggcccaaatctccaatatcactgctgcaaaggcagttgccgatgtcattcgaacttgcttaggtccaaaagctatgttaaagatgttattggatcctatgggcggtcttgtgttgactaacgatggccacgctattttaagggaaattgatgttgcacatccagcagctaaatcaatgttggagttatcccgtactcaagacgaagaggttggtgacgggactacaacagttattattctagctggtgagattttagctcagtgtgcaccttatttgattgaaaaaaatattcaccctgttattattatccaagccttgaagaaagcactgactgatgcactagaagttatcaaacaagtaagtaaacctgtcgatgtggaaaatgatgccgctatgaaaaaattgattcaagcctctatcggtactaaatatgtcatacattggtcagagaaaatgtgtgaattagctctagacgctgttaagactgtccgtaaagacctgggacaaactgtggaaggtgaacctaattttgaaatcgatatcaaaagatatgtccgtgtggagaagattcctgggggggatgttctagattctcgcgtcttaaagggtgtcttattgaacaaggatgttgttcatccaaagatgtcccgtcacatagagaatccacgtgttgttcttttggattgtccactagaatataagaagggtgaatctcaaaccaacatagaaattgaaaaggaggaagattggaataggattttacaaatcgaggaagaacaagttcagctaatgtgtgaacaaattttagccgttaggccaacactagtcatcactgaaaaaggtgtttcagatctagcacagcattatttactaaagggtggatgtagtgttttaagaagagtgaagaaatcagacaataatagaattgctcgtgtaactggtgcaaccattgtcaatcgtgtagaggacttgaaggaaagtgatgtcggtacaaactgtggattattcaaagtagaaatgattggggacgaatatttctcatttttggataactgcaaggaaccaaaagcttgtaccataatgttacgtggtggttccaaagatatattaaacgaaatagatcgtaacctacaagatgctatggctgttgctcgtaatgtgatgttgagtccttccttgtccccaggtggtggtgccaccgagatggcagtttctgtcaaattagcagaaaaggcaaagcaattagaagggatccagcaatggccataccaagctgtagctgatgctatggagtgtattccacgtactttgatacaaaatgcaggtggtgatcctattagactcctatcccaactaagagccaaacacgcacagggaaattttacaacaggtattgatggtgacaaggggaaaattgtagatatggttagttacggtatttgggaacctgaagtcatcaagcagcaaagtgtcaaaaccgctattgaaagtgcatgtttactattaagggttgatgatattgttagtggtgtaagaaaacaagaataa

SEQ ID NO: 191003 - DNA, 258 bp, Saccharomyces pastorianus
atggttttgaatccgtccaagtaccaagacacccgcacgtggaagatgacgcctgccatgatcagggcccgtaaaccctttttcaaaggcaatatgctcggtctcacgctgctgctgggtgtcacgggctctgtttactactacacatatcattttctgcacaaggacaacgactttgcagacgtgcccattccacccatcgatccgcaggagctcgaggctctcaaaaaggagtacgaagccaagaagaaggcatga

SEQ ID NO: 191004 - DNA, 724 bp, Saccharomyces pastorianus
atggaaaacgataagggtcaattagtacgtaaattatagcagatgatggcgcgcaaaggaagaaagaagaggactgagtaagcgtggacagacaagggagcatcgacagaaaaataaaattataataagttaagtgtgcaagattagtggtacaaatagggtgggaccaacatgggtttataatcatattggttagtaatacatcaaattcaagaaaatgcaaataacccatttaaattggcacaagtgttacctgatactttatcatgtgtggtctaagtacacatctctaagaaatgtggcgttttaacgacaaaattggaatcccaagagagatatgctgaaaagacatcataattccgaattagtgggtttccatattccagaactactcttagaacttttctttcattcatgtgcagaataattttacaagaatataagcgcaaatgtactaacattgaataatttctttttttactaggttgaattatatgttccaagaaagtgttctgctaccaacagaatcatcaaagccgatgaccacgcttctgttcaaatcaacgttgccaaggttgatgaagaaggccgcgccattccaggtgaatacatcacttacgctttgtccggttacgttagatccagaggtgaatccgatgactctttgaaccgtttggctcaaaacgatggtttgttgaagaacgtttggtcttactcccgttaa

SEQ ID NO: 191005 - DNA, 513 bp, Saccharomyces pastorianus
atgtttttaacgtcaccatttgaatcctgtattgtgctgtcttccttaatagcaggcttattgttttcattgtctaccgggttcgtaggtatactaggagtgtttgcctcattgttcgaaacagaactctcggtttcgccaaagagattatcactatcctcattatcttggccaaagacgttctgggccctgctttcttctgtagaaggtgtttcctgggaatctagcttattcgcttgcatagtcggctgctgctttgccgttaccgttatcgcctcactttctgcatcgcgtgtgttcggaacagttgcttcatccttcagagactcatcttgttgctgcgattcttcaccagcagtatctgtattggcaacccctgccacagctgcattagcgttgctatcactattgttgtcattgccatgttggtccacgtccacggaagcgtttaccgtggacccctcacccagtgtattctccatgcttgcaaaccgtatcacaattggtctctga

SEQ ID NO: 191006 - DNA, 138 bp, Saccharomyces pastorianus
atgaagatgttcttgtttttgaacgaatcatacatctttgatagacttcgtatgtggagtattgttttatggcactcatgtgtattcgtatgcgcagaatgtgagaatgccaattataggggtgccgaggtgccttga

SEQ ID NO: 191007 - DNA, 735 bp, Saccharomyces pastorianus
atgtcttcacaagatgttctgatacattcagatgatccgtgccatccagcaaatctcatttgcacgctatgcaagcagttttttcataataattggtgcaccggaactggaggtgggatttcaataaaagatcctaacacgaattattattatctcgccccatctggggtgcagaaggagaagatgatacctgaggatttgtttgtcatggacgctcagacattagagtatttgcgctctcccaagctttacaagccaagcgcatgtactccattgttcttagcgtgctaccaaaagaaaaatgcaggtgctataatacatacacactcccaaaatgctgtgatatgctccttgctatttggcgatgagttcaggattgctaacatcgaacaaatcaaagcaattccaagcggaaaggtggaccctgtgaccaagaaacccatggcgctatcgttttttgatacgctgaagattcccatcattgaaaacatggcgcatgaggacgagttgatcgatgacttgcacaagacttttaaagattatccagacacatgcgccgtaattgtgaggagacatggcatttttgtttggggtccgacaatcgataaggccaaaattttcaacgaagccatcgattatttgatggagctggccataaagatgtaccaaatggggattcctcccgactgtggcattggcgaagagaagaagcatctgaagatggccagtccgtga

SEQ ID NO: 191008 - DNA, 5269 bp, Saccharomyces pastorianus
atggaatcccaacaattatctcaacattcacatatttctcatggtagcgcctgtgcttcggttacttctaaggaagtccacacaaatcaagatccgttagacgtttcagcttccaaaacagaagaatgtgagaaggcttccactaaggctaactctcaacagacaacaacacctgcttcatcagctgttccagagaacccccatcatgcctctcctcaacctgcttcagtaccacctccacagaatgggccgtacccacagcagtgcatgatgacccaaaaccaagccaatccatctggttggtcattttacggacacccatctatgattccgtatacaccttatcaaatgtcgcctatgtactttccacctgggccacaatcacagtttccgcagtatccatcatcagttggaacgcctctgagcactccatcacctgagtcaggtaatacatttactgattcatcctcagcggactctgatatgacatccactaaaaaatatgtcagaccaccaccaatgttaacctcacctaatgactttccaaattgggttaaaacatacatcaaatttttacaaaactcgaatctcggtggtattattccgacagtaaacggaaaacccgtacgtcagatcactgatgatgaactcaccttcttgtataacacttttcaaatatttgctccctctcaattcctacctacctgggtcaaagacatcctatccgttgattatacggatatcatgaaaattctttccaaaagtattgaaaaaatgcaatctgatacccaagaggcaaacgacattgtgaccctggcaaatttgcaatataatggcagtacacctgcagatgcatttgaaacaaaagtcacaaacattatcgacagactgaacaataatggcattcatatcaataacaaggtcgcatgccaattaattatgagaggtctatctggcgaatataaatttttacgctacacacgtcatcgacatctaaatatgacagtcgctgaactgttcttagatatccatgctatttatgaagaacaacagggatcgagaaacagcaaacctaattacaggagaaatctgagtgatgagaagaatgattctcgcagctatacgaatacaaccaaacccaaagttatagctcggaatcctcaaaaaacaaataattcgaaatcgaaaacagccagggctcacaatgtatccacatctaataactctcccagcacggacaacgattccatcagtaaatcaactactgaaccgattcaattgaacaataagcacgaccttcaccttaggccaggaacttactgaatctacggtaaatcacactaatcattctgatgatgaactccctggacacctccttctcgattcaggagcatcacgaacccttataagatctgctcatcacatacactcagcatcatctaatcctgacataaacgtagttgatgctcaaaaaagaaatataccaattaacgctattggtgacctacaatttcacttccaggacaacaccaaaacatcaataaaggtattgcacactcctaacatagcctatgacttactcagtttgaatgaattggctgcagtagatatcacagcatgctttaccaaaaacgtcttagaacgatctgacggcactgtacttgcacctatcgtacaatatggagacttttactgggtatctaaaaggtacttgcttccatcaaatatctccgtacccaccatcaataatgtccatacaagtgaaagtacacgcaaatatccttatcctttcattcatcgaatgcttgcgcatgccaatgcacagacaattcgatactcacttaaaaataacaccatcacgtattttaacgaatcagatgtcgactggtctagtgctattgactatcaatgtcctgattgtttaatcggcaaaagcaccaaacacagacatatcaaaggttcacgactaaaataccaaaattcatacgaaccctttcaatacctacatactgacatatttggtccagttcacaacctaccaaaaagtgcaccatcctatttcatctcatttactgatgagacaacaaaattccgttgggtttatccattacacgaccgtcgcgaggactctatcctcgatgtttttactacgatactagcttttattaagaaccagtttcaggccagtgtcttggttatacaaatggaccgtggttctgagtatactaacagaactctccataaattccttgaaaaaaatggtataactccatgctatacaaccacagcggattcccgagcacatggagtcgctgaacggctcaaccgtaccttattagatgactgccgtactcaactgcaatgtagtggtttaccgaaccatttatggttctctgcaatcgaattttctactattgtgagaaattcactagcttcacctaaaagcaaaaaatctgcaagacaacatgctggcttggcaggacttgatatcagtactttgttacctttcggtcaacctgttatcgtcaatgatcacaaccctaactccaaaatacatcctcgtggcatcccaggttacgctctacatccgtctcgaaactcttatggatatatcatctatcttccatccttaaagaagacagtagatacaactaactatgttattcttcagggcaaggaatccagattagatcaattcaattacgacgcactcactttcgatgaagacttaaaccgtttaactgcttcatatcaatcgttcattgcgtcaaatgagatccaagaatccaatgatcttaacatagaatctgaccatgacttccaatctgacattgaactacatcctgagcaaccgagaaatgtcctttcaaaagctgtgagtccaaccgattccacacctccgtcaactcatactgaagattcgaaacgtgtttctaaaaccaatattcgcgcacccagagaagttgaccccaacatatctgaatctaatattcttccatcaaagaagagatctagcaccccccaaatttccaatatcgagagtaccggttcgggtggtatgcataaattaaatgttcctttacttgctcccatgtcccaatctaacacacatgagtcgtcgcacgccagtaaatctaaagatttcagacactcagactcgtacagtgaaaatgagactaatcatacaaacgtaccaatatccagtacgggtggtaccaacaacaaaactgttccgcagataagtgaccaagagactgagaaaaggattatacaccgttcaccttcaatcgatgcttctccaccggaaaataattcatcgcacaatattgttcctatcaaaacgccaactactgtttctgaacagaataccgaggaatctatcatcgctgatctcccactccctgatctacctccagaatctcctaccgaattccctgacccatttaaagaactcccaccgataaattctcatcaaactaattccagtttgggtggtattggtgactctaatgcctatactactatcaacagtaagaaaagatcattagaagataatgaaactgaaattaaggtatcacgagacacatggaatactaagaatatgcgtagtttagaacctccgagatcgaagaaacgaattcacctgattgcagctgtaaaagcagtaaaatcaatcaaaccaatacggacaaccttacgatacgatgaggcaatcacctataataaagatattaaagaaaaagaaaaatatatcgaggcataccacaaagaagtcaatcaactgttgaagatgaaaacttgggacactgacgaatattatgacagaaaagaaatagaccctaaaagagtaataaactcaatgtttatcttcaacaagaaacgtgacggtactcataaagctagatttgttgcaagaggtgacattcagcatcctgatacgtacgatacaggtatgcaatccaacactgtacatcattatgcgttgatgacatccctgtcacttgcattagacaataactactatattacacaattagacatatcttcggcatatttgtatgcagacatcaaagaagaattatacataagacctccaccacatttaggaatgaatgataagttgatacgtttgaagaaatcacattatggattgaaacaaagtggagcgaactggtacgaaactatcaaatcatacctgataaaacagtgtggtatggaagaagttcgtggatggtcatgcgtatttaagaatagtcaagtaacaatttgcttattcgttgatgatatgatattgttcagcaaagacttaaatgcaaataagaaaatcataacaacactcaagaaacaatacgatacaaagataataaatctgggtgaaagtgataacgaaattcagtacgacatacttggcttagaaatcaaatatcaaagaggtaaatacatgaaattaggtatggaaaactcattaactgagaaaatacccaaattaaacgtacctttgaatccaaaaggaagaaaacttagcgctccaggtcaaccaggtctttatatagaccaggatgaactagaaatagatgaagatgaatacaaagagaaggtacatgaaatgcaaaagttgattggtctagcttcatatgttggatataaatttagatttgacttactatactacatcaacacacttgctcaacatatactattcccctctaggcaagttttagacatgacatatgagttaatacaattcatgtgggacactagagataaacaactgatatggcacaaaaacaaacctaccgagccagataataaactagtcgcaataagcgatgcttcatatggtaaccaaccatattacaagtcacaaattggtaacattttcctactcaacggaaaagtgattggaggaaagtcgacaaaggcttcattaacatgtacttcaactacggaagcagaaatacacgcgataagtgaatctgtcccattattaaataatctaagttacctgatacaagaacttaacaagaaaccaattattaaaggcttacttactgatagtagatcaacgatcagtataattaagtctacaaatgaagagaaatttagaaacagattttttggcacaaaggcaatgagacttagagatgaagtatcaggtaataatttatacgtatactacatcgagaccaagaagaacattgctgatgtgatgacaaaacctcttccgataaaaacatttaaactattaactaacaaatggattcattag

SEQ ID NO: 191009 - DNA, 1182 bp, Saccharomyces pastorianus
atgattcaagatccccttgtatatttagacatctccattgataaaaaaccaattggtcgtattgtctgcaaactttttcgtgagaaggctcctaaaacaacagagaatttttataagttatgcgctggtgatgttaagagtcctttgaaggatcaacagtacctgagctataagggaaatggttttcatagagtcgttaagaattttatgatccaggcaggtgacattgtctttgggacacaaaaggattcctcttcatcgtctgttggaaaaggtggatgttcaatttacgctgataaagaggaagtgaaaaccgatgatgaatctttctgttacgggaattttgaagacgaaaacttgggagagtttgtagaaccctttaccttaggtatggccaatttaggttctccaaatacgaacaattcccagtttttcataactacatacgccgcacctcatttgaacggcaagcattctatttttgggcaggtggttcatggaaaatcagtggttcgcactatagaaaactgcagggtagattctgatggagtccctgaatcagacgttagaatcagcgactgtggagtgtgggaaaaaactatgggtgtcccgctttacaacgcttctaatgaccaaattggcggtgacgtatacgaagaatatccagacgatgatacacatttcggtgacgatgattttggtaaggctcttgaggctgctaatataatcaaagaatctgggacgctcttatttaagaaaaaggattactctaatgcctttttcaaatacagaaaatctttaaattatatcaatgaatacatgcctgaacccgacgtagacaaagaaagaaacatccaatttattaacctaaagatgaaaatttacctaaatttatctttggtgctctttaatctggaaagatacgatgatgctatcatgtatgctacgtatttattggagatggataacgttcctaacagagatcaagcaaaggcttattatagaagaggtaacagttacttaaaaaaaaagagactagacgaagctttacaagattatattttttgtaaagagaaaaatcccgatgacgaagttatagaacaaagaatagaatatgtcaataggctcatagaagagaataaggaaaagacaagaaagaatatatcaaagtttttctcctaa

SEQ ID NO: 191010 - DNA, 1698 bp, Saccharomyces pastorianus
atgtatcgcagtagaaaccgaccaaaaagaggtggagaaaatgaagttaagggaccaaattctgccttgactcaatttttaagagaagaagggatcagtgctgaaaatatcaaacaaaaatggtaccagcgacagtcgaagaagcaagaagatgcaacagacgaaaaaaaaggtaaagcggaggatgatagctttactgccgagatatctcgagtagttgaagatgaagaaattgatgaaattggaacaggtagtggtaccgagacagaaagagctcaggtttcctacgatgccaggatgaaattagtccctgctgatagtgatgaagaagaatatgaaactagccacatttctgacacgccagtcagtttaagttcggctaatgaccgggaatcattgactaaaaaaaggcaaaatactgcaaaaattatccaaaatcgtcgcagaaagcgtaaaagagcagctgacctattggatagacgcgtcaacaaagtatccagcttacaaagtctttgtattacgaaaattagtgaaaatatatccaagtggcaaaaagaggctgatgaatcatcaaagttggtatttaacaaattgagagatgtccttggtggcgtatcaaccgctaatttgaataatttggcaaaagcactatcgaagaatagggccctgaatgatcatactctgcaacttttcttgaagacagatctaaaaaggttaactttcagcgattgttctaaaatttcatttgatggttacaaaacgctagccattttttcgccacacctaaccgaattatccctacaaatgtgtgggcagttgaaccatgaatcattgctttacattgctgaaaagcttccgaacttgaaatcactgaatttagatggaccatttctgatcaacgaggacacatgggagaagttctttgtaataatgaaaggtagattagaagagttccacatttctaatacgcaccgcttcaccgacaaatcattatctaatttattgatcaactgcggttctaccttggtatccttagggttatccagactagattctatatcaaattacgctttattaccgcagtacctagtcaacgacgaatttcacagtctctgtattgaatatccattcaatgaagaggatgttaacgatgagatcatcataaatctgctaggtcaaatcgggcgcacgttacgtaaattggttttgaatggctgtattgacttgacagattcaatgataatcaatggtctgactgcattcattcctgagaaatgtccattggaggtattgagcttggaagaatcagatcagatcactacagattcactgtcgtactttttcagcaaagtagaactgaataatttgattgaatgcagctttagaagatgtctacaattgggcgatatggcaattatagagctattgcttaacggagcaagagatagtctgagaagcttaaatctcaattcattaaaagagctaactaaggaggcatttgtggcgttagcctgtcctaatctgacgtatcttgatcttggttttgtacgttgtgttgatgactcggtgattcaaatgttgggtgagcaaaatccgaatttaactgtaattgatgttttcggagacaatttggttactgaaaaggccacaatgaggcctggacttacgttgatagggagacagagtgacagtatataa

SEQ ID NO: 191011 - DNA, 1725 bp, Saccharomyces pastorianus
atgtcaattaggcctctcacgttaaacggtttagatgagccagaaacctcttttgaagaactgaatacaactctacctcgctttcaatcccatgaaacattaactttggaagaaaacgtgccaccattgagtacatcaacttatataccgcctccatcctcggtaggtacttctgacactggcacggtattttccaatagtaccagcgcgttttggtctaataagcaagcagacgatgatcaggacatggaggtagaccaggatgatgaatttctaaatgacttccaggaattccaaaataaaaaggatgattttgacgatgctattaaaacaaattttcatttgagaaatggatgtcgaactggccctttcaaaaacgacattttcgcagaagagtttgatagaaaactgagtttggaagataaaccaaggctaaagcaacctagatcaatgatggaattgaaaccaaaaagaaaactatcaaatagcgtcacttcaagaaacttaaggtctggtaattctgtaagatttaagaaatctatgcctaacttagctttagttaatccagctatcagagaagaagaagaggacgaagaacgagaaagagaagatcaacgagagtttaattacaagattgataacgatacgcaggacacaattttggcgaaattcagttcagatgatgaaggtgactttctgacaggatttgaagaattagagggtgaagcaattgatgaaacgatttcttcgaacgataaagaaagtgccgaccatccgcgtttcttaaagaagtcatcctcatctttgccattaaaaatatcacctgcacaatatgatatagtaaagcatgacgaattattaactccaggtcttcataggcgacaacgagattggaatacccagcaggaactggactcttttaaagaaaaacgatcagtaagacactgttctaatcaaaatgtacaactcaatggtccagctaaaatcaaaacaataaaacagcaaattgatcataatactccaatgaagaaaggttctatgatatataacccgaaaactatgaagtgggaaggaaatgaaaacgtcttaagcaaatttagtgatgtagacacggcaaacaggaaagctttattgataaaaaacaagctacaacgagatgcagattctaagaagcaaaaatattctgatctacagcatgcaagagccacttcgagaaatcaaaaggtcatcgggaacatgattttagatgaacaaaatttaagatgggttagtgtttcagaggaagaagcagacccttttgcaggcattcctgagataaacttaccaccagttggcaaaagtatgaaaaaacgtagctcctcaccatttttgcgttccaaaagccaagttaatacgccatttgtttcaaatgacaatgatggcgtttatcaaagtacggctgctcaagcaagactccgtaaataccattcaatgaggacacttaacggtacaacagaaactccagaaataagctctactttccatttgagttcaagagcattggaaaaattttaccacgaggagaacaggtggtgtaaaaagttagcctcatggtttataccccgagatgagaccattatcagtgttgatgaggaaacaatcatggatgaaagtacggtcaatagcaagagaaaatcctatatgtatgaaatcaggaacatggtaatcaattcgacaaaagattag

SEQ ID NO: 191012 - DNA, 1494 bp, Saccharomyces pastorianus
atgtttaaccatgattggaagtactccattaattctaagactttcgccgatttaaacattgaattatttcgaaaccacaagttcaaaactgttttaaattacataataggtgtagttgggtggaatggattaaaactcgccctttttgtttctgacatttacacatgtatcaaattgctggcattcaactcctggtcaaacaacatcatcaaaccatacttaccctttaaaatatccaaatggttgtttagcggttgtattttagcatcgattgtgctattgatatgggaggctatagcgggaatgaggatttacaaaacgggaaatatctctttgacttatgtcaacaatttttccagaaacctaaattcagtgctcaattattccaagttttgtgtttataatatgatcgaacgaaagggttttcgacagaaaatgacattttttactttttttcaactgaaagattgtattagattaatcttcacggataccccaaggcaagttattaatggtcttacgctgtggtcagttctcgtaacagtaaataaaaacgaggatctaggcgatctggaatcatttaccggtttgatcaacaaaataaagaacattggccagaccaatcatgaagaagcagtgatattgtcgctgatgctattttcctttataatctgggcattatttgtcttcaagtttctgcttgctgtcatttgctcgatttttgtttattataaaataatcaatgatcaggaatatagcgggttgcgtgagtacatttgtgttaccgtcagcgaaaatgttgatgaacttgttgaaagacaaaggaaaaaggaaaatgatgacacgatttataagacaggtcttctcgaatctcagacttttgacgattttaaagaagttgaaaataaaattgaaacatcttttaatgatacgtcatatgcttctaataatgattctatgattgagctaatagagagaagacccgaatacaaaagtcaggatgtatgtgggcccattcccacaatgaagaaaacggaaacaatggaatcgttcgttgacaatggcaatccacaatataccactagattctctgcgattctagattcaccatatatcaacagctatgaaagtaatgatataaagaaagcaaaaatacaaagcagaagcgtaaatactccaaaatatgaggatttgtcttcttctgacattttcaacaaaatacactctgctggacaattaaaatctacaacttctatggagtttcacgggccattagattctatgccaaatacaacaaacaacatccgtaattttaatagcaacagtagtagacctagaccacctcctttacagacaaaaagttcgattaattcaaaagctgactcgaatgataatggaaggatttatacaccaatgaaagcgtacttcagggagcctgatcttccgaggaagggtttgctggaagatgaagatcgtacatataattatacttaa

SEQ ID NO: 191013 - DNA, 554 bp, Saccharomyces pastorianus
atgtatgcatataatagaggaattggatgactaaatgttcttatattggagttagtggagatgcgtggtagatttgaattaaatagaaagtgctggggttgataaaccacgaaatatcgcagttgaggagaatgataagccaggatagatggtagcgcatttttggggcaatctcactgtaggtccaccacaactcaatatgactacatcgaatcagttataaggcaagtttttagtttactaacaaatatttccatcttattttttttttttgcagggctaagagaacaaagaaggtcggtatcacaggtaaatacggtgtccgttatggttcatcattgagaagacaagttaagaagcttgaaattcaacaacatgccagatatgactgttccttctgtggtaagaagactgttaagagaggtgcagctggtatttggacttgttcctgttgtaagaagaccgttgccggtggtgcttatactgtttctactgcagctgccgctactgttagatctaccatcagaagattaagagaaatggttgaagcttaa

SEQ ID NO: 191014 - DNA, 1023 bp, Saccharomyces pastorianus
atgaccgcaccattggtagtattgggtaacccacttttagatttccaagccgacgtcacggctgaatacctggccaagtattctctaaaggaaaacgacgcaattttggtcgatgccaaatcaggcgatgctaagatggctatttttgacgagctcttacagatgccagaaacaaagcttgttgcaggtggtgctgctcaaaacactgctagaggggcagcatacgttttgggcgccggccaggtggtgtacttcggttccgtcggtaaggacaagttcagcgagagattgcttaacgaaaacgaaaaagctggtgtcaagtctatgtaccaagttcaaaatgatattggtaccggtaagtgtgccgcattaatcactggccataaccggtccttggtcactgacttgggtgctgccaatttctttactccagaccacttggacaagcattgggacttggtcgaagcagctaagctcttctacatcggtggtttccacttgaccgtgtctccagacgctatcgttaagttgggccaacatgctaaagagaacagcaaacctttcgtgttgaactttagtgctcctttcattcctcatgtcttcaaagacgcattggccagagttttgccttatgctaccgtcatcatcgctaacgaatcggaggccgaagccttttgcgacgccttccaattagactgtgccaacactgatttggaagctattgctcaaagaattgtcaaggactctccagttgaaaagactgtcatcttcacccacggtgtcgaaccaacagtggtcgtgtcctccaagggtaccagcacatatccagtcaaacctttggactcttctaagatcgtcgacaccaacggtgctggtgacgccttcgctggtggctttatggctgggttgactaaaggtgaagatttggaaacctctattgacatgggtcaatggctagctgctttgtctattcaagaagttggtccctcttacccttccgaaaaaatatcttactctaaatag

SEQ ID NO: 191015 - DNA, 987 bp, Saccharomyces pastorianus
atgcctgttgttcattgttcgtccaacctgcccatcaccctatatatctatgagcgtctagtatattttattaaggcaagctctatatcaagctgcatatctgacaacttacttcttgttaataaaaccttcaacgacggaggttgtccaccacatattaacttctgcaatgatgagataattaacccaacagcgcctcaaacagtggttgaattagttcttaatgcaaaaaaaggtgaattaggctcgggttatctggctgttgaccacggaaaaaaggttgttattttagcatttagaggatccacaacaagacaagattggtttagtgattttgaaatatatcctgttaactattctcccctttgcgttaaggaatatcgtaagcttatagaggaaggaaaaatcagagaatgtgaaggttgtaaaatgcatagaggatttctaaggttcacagaaactctcgggatggacgtctttaaaaaaatggagtcgattctggaaagctttccggaatataggatcgttgtcactgggcactccttgggggcagcattagcaagtttggctgggattgaattaaagataagaggctttgatccgttagtgctgacattcgcaacaccaaagatatttaacagtgaaatgaaacaatgggtagacgagttatttgaaacagatgctatagaaaaggagtcaattcttaaagatgaaattcaatttcgtaagggctattttagggttgtgcatacaggtgattatattcctatggttccaccattctatcatccggctggtttagagatgtttattaacaaagttggtctacctcagaatgcggaagatattgaataccgtggtaaaaataacaggttaactttaaaggatggatttcgagagggtatgagcggtttggttgaagactggttacatgtctatgaacatcgagcctacttcattgacgtagtgggatgttctggactttaa

SEQ ID NO: 191016 - DNA, 2067 bp, Saccharomyces pastorianus
atggagtacatcaagattgccaaagtatctaatgtagtgctgcatagaagaggtacggccacacaaggtactttacatttgactactcaccatttgatctttgagtcaccacaattgtcgacggaattttggtttccatatcctttgatctatggagtgcataaaaacccgggtagtacattactgtccaagttgacttccactaatcaaatccaattggagggaacggattcacagaattacaagctttaccagggtaaggatctatggtcttttgtaaatatcaaggtaattgggaaagattatgcggtattctcattggatttcggtggtgatttacatctacaggcaagaaaggtgtatgattccatcttaaatttgacggtcctgtccaatatcacgcaactatatgcatttatttacatatccaacaatctggaaaggaaactaccttcacccgatagctgggatatatatgacccaattaaggaatttcgaaggcagggcctcgacagtaaagatgaaacatgtccttggaggctatccacggtaaacgaacactatgaattttgtccaacgtatccctcaaaactttttgtaccaagatccacgtcagatatattattgaagcatgcttcgaagtttagatcacagaaaagaattcctgttttaacttatcatcacaaggcaacagattgcaacattcttaggtcatctcaaccattaccggggttgatcaatcagaggtccattcaagatgaaaaattagtttgggaaagcttcaactcattttgtaataaagatattagaagaacgaaacatgtaatagtagatgccagacccagaacaaatgcattagcacagatggcgttgggtggcgggacagaaaatatggataattataatttttttttagctgataacaatatgggtgtcgataaaagtctaaaactgcccacagttacacggttatttcttggtatagataacattcatattgtttccaacacagctgcatacatgacggaagttatctgccaaggtggcgatttgaatttaccactggaacagaatttaattaggagtcaaaaattttccaattggttgaagttgaacactcttattttaaaatccgttgatatgcttttaaagtccatcattttcaatcattccaacgttttggttcattgttctgacggttgggacagaaccagtcaagttgtatcactattagaaatttgtttggatcctttctatagaacttttgaaggttttatgatcctagtggaaaaagattggtgctcttttggtcaccggtttttggaaagaagtggtcatttaaactctgatattagatttcatgataacactatgcattccaacttcaacgatgtggataccaatggcgatgatcttgacataggtgttaacactcaagacgattatgctgaagatgatgaaggaggtgaagatgagacgaatttaattaatttgagtagaatttccaaaaaatttaacgaaaactttaaattgaacaagaaaagtctaaagttcgtctccccagttttccaacaatttttagactgtgtataccaacttttgacgcaaaacccagatctatttgaattcaacgaaagatttttaagaagactagtttaccacttgtattcatgccaatatggaacattcctttccaatagcgagaaggagaaatttcaacagaatttgccaaacaagactaaaagtgtctgggactacttcagatctagaagaaagcagttcataaatccaaatttcatacagagaaaaagaagcggcatgaatgagcacgatcaaaaccttgaagaggaagaaaaagtggagtggatttcgccggatctgaagaaagtccaatggtggtggcagttatatggaagaaaagattcagaaatgaatgatgaattacgccataaacgagactcagtacccatatcggtggataaaaagagtaaagagcatagtaattccgatggcggtaagggtttaaatttgtcaatttttggatttgatatgtttaatagaaagtga

SEQ ID NO: 191017 - DNA, 852 bp, Saccharomyces pastorianus
atgaaccagatactaaatgcacaaaggctgatacaattatcacaatttcaccctaaactgaagaatatatggtaccttgttgcggccgccacgttcagtgtttgtaatgagccacaggaaatacctaaattataccactatgccatgctactgagtaatgataatgcacacatgtatagattcacattagcttcccaaaccattgacttactgcgctcagaattaccaatgagaaaaactttgatcaatgagaattaccaacaacctacttttttccaaaagcaattgacagcaaaatttagagaagttattcttaaaacaggacctctggccggccttccaagagcgatcaatggcctgactatgctaaaggaaactactccggacattttagtaccgcacttagacccaatagacccgtgggaggctgccatgggaaacagttctcccctttcggaaacctctatgagaaggaagcatgacaagacaatccaggaaagagatcataccatacagaacggcttacggcattggaattcaatatacaacaaagtctcaacccgcgtggtaaacaatctaaactcttcgtacccagacttatggtattatacactggtccatgtatatggccctttgtttgcctttgatgagatactatctgcgcaagagacaagtttagtgataattgcttctttggttccacaagatgttaatcctcaattgcgtgggcatttgaaaggtgccttgaatattggttgtgataaggaaactgtggaggcagtgagaggattggctatactaatatctcagtggtgtggtgttagttggaaatctggtgttgtaaaattgtaa

SEQ ID NO: 191018 - DNA, 150 bp, Saccharomyces pastorianus
atgcccaagcaaacgctgtcaaatgcaattccgctatgtccctttttcaactggaaagcaagttttaacccggatgatatttcttcagggtactttccttggtcgaaaacttggttcagttgctcactaatcttcaggaattcttggtag

SEQ ID NO: 191019 - DNA, 3486 bp, Saccharomyces pastorianus
atggttaatataagcatcgtagcaggaattgtagccttagctactagtgcggctgctattacagcgaccactactttatctccttacgatgaaagagtcaaccttattgaattggctgtttatgtttctgacatcagagcccacatatttcagtactactctttccggaatcaccataagactgaaacatatccttcggaaatcgcagcagccgtttttgactacggtgatttcactactcgattgaccggtatttcgggtgatgaagtaactagaatgatcactggtgttccgtggtactctaccagattaaagccggctatctcttcagcgctttcaaaggatggtatttacacggctatcccaacctctacttctacaacgactacaaaatctagtacttcgactactcctaccaccactatcacttctactacttctaccacatcgactactcctacaacctctactacttctaccactcctacaacttctaccacatcgactactcctacaacctctactacttctaccactcctacaacttctaccacatcgactactcctacaacctctactacttctaccactcctacaacttctaccacatcgactactcctacaacctctactacttctaccactcctacaacttctacaacttctaccactcctacaacttctaccactcctacaacttctacaacctccaccacttctcaaacttccaccaaatcgactactcctactacttcaagcacatcgactactcctacaacttctaccactcctacaacttctacaacctctaccgctcctacaacttctacaacttctacaacctctaccacttctaccatttctaccgctcccacgacctctacaacttcaagcactttcagtacttctagtgcctctgcatcctctgtcatttctaccactgctacaacctctaccacttttgccagtcttactacacctgccacatctacggcttctactgaccatacaacctctagtgtctcaacaactaacgcattcactacttctgcaactactactactacgagcgatacatatatcagttcaagtagtcccagccaagtcacttcatccgctgagcctactactgtcagtgaagtcacctcttctgttgaacctaccaggtctagtcaagtcacttcatccgctgaacctactactgtcagtgaattcacctcttctgttgaacctaccaggtctagtcaagtcacttcatccgctgaacctactactgtcagtgaattcacctcttctgttgaacctaccaggtctagtcaagtcacttcatccgctgaacctactactgtcagtgaattcacctcttctgttgaacctaccaggtctagtcaagtcacttcatccgctgaacctactactgtcagtgaattcacctcttctgttgaacctaccaggtctagtcaagtcacttcatccgctgaacctactactgtcagtgaattcacctcttctgttgaacctatcaggtctagtcaagtcacttcatccgctgaacctactactgtaagtgaagtcacctcttctgttgaacctatcaggtctagtcaagtgaccacgacagaacctgtttcttccttcgggtctactttcagtgaaatcacctcttctgctgaacctctctctttcagtaaagcaaccacttccgcagaatctatctcctctaatcaaatcaccatttccagtgaactaatagtttctagtgtaattacttcctcttctgagattccttcttccattgaagtacttacttcaagcgggatcagttcatcagttgaacccacttctttggttggaccttcttctgatgaatccatttcttctactgaaagtctatctgcgacatccactttcacttcagccgttgtttcctcgagcaaggctgctgatttctttaccagatccactgtttctgctaaatctgatgtctctggtaactcctctacccaatctactaccttttttgctacgccttccactccacttgctgtttcttcaactgtggtcactagctctaccgattcagtttctcctaatattcccttcagtgaaatcagttcctctccagagtcgtctactgcaattacgtctacatccactagcttcattgctgagcggacttcttccttatatctttcgtcatcaaatatgtcaagtttcactttaagtactttcactgtttcccaatcgatcgtctcttcattttctatggaacctacatcgtcagtcgcatcttttgcatcaagttcccctctcttagtatcctcaagaagtaattgcagtgatgccagaagttccaacaccatcagtagcggtctgttcagcacgatagaaaatgttcgtaatgcaacctcaacatttacaaacctatcaacagatgaaattgtcatcacgagctgtaagagtagttgtactaatgaagatagtgttttgacgaaaactcaagtttctaccgttgaaactactataactagttgttcgggtggtatttgtaccacgctgatgtctccggttactactattaatgctaaggcgaacacattaacaactacagaaacttccacggtcgaaacaactataacaacatgccctggtggtgtttgctcgaccctgactgttccagttactacaatcaccagcgaagccactaccaccgctaccattagttgcgaagataatgaagaagatatcacttctactgaaaccgagttgctaactttggaaactactataactagttgttcgggtggtatttgtaccacgctgatgtctccggttactactattaatgctaaggcgaacacattaacaactacagaaacttccacggtcgaaacaactataacaacatgctctggtggtgtttgctcgaccctgactgttccagttactacaatcaccagcgaagcaactaccaccgctaccattagttgcgaagataatgaagaagatgtcgcctctactaaaaccgagttgctaactatggaaactactattactagttgttcgggtggtatttgcaccacgctgatgtctccggttagtagtttcaactccaaagccactacatcgaacaatgcagagtcgaccatccccaaagcgattaaagtcagttgctctgcgggtgcctgtaccaccctgactactgtcgatgcagggattagcatgtttaccagaaccggattgtctatcactcaaactactgtgaccaactgctcaggtggaacctgtaccatgttaactgcaccaatcgcgaccgctaccagcaaagtcatctcaccaattccaaaagcctcctcggctacttccattgctcattcatctgcttcttatactgtcagtatcaataccaacggtgcctataatttcgataaagataacatttttggtaccgctatcgttgctgttgtcgctttattactgctatag

SEQ ID NO: 191020 - DNA, 1632 bp, Saccharomyces pastorianus
atgtcagcggatgctagtacaaattcgaatgcttccctagacgaaaaaaatttaaacatcacttcagaagctgaaatcaagaatgaagacgtaaccgcggagccagttctaagcacggtactatcacccaacggtaaaattgtctacatcagtgacaaggttgatgaggccatgaagttggctgaagaagccaaagaaatcgaagtgacaccagaagaagatagaaaacttcgttggaagatcgactattgtatgtttcctttgatgtgtatattgtatgctgttcaatttatggacaagatttccactagttcagcggcggtcatgggattaagaactgacttgaaaatgcatggtgaccagtattcatgggttacttccgccttttatttcggctatctatttatgaacctaggcccggtacagttcattttccaaaggaccagtcacatgtcaaaaatgcttgcggtttttattgtcatatggggaatgttattagctttacatgcagctccaacagttaagtatccttctttcattgttttgagagtacttttaggttgcgcagaaagtgttgtcacaccttgctttaccattatcactgctcaatactggaagacagaggaacaattcacaagagtatcaatttggtttggtatgaacggtcttggctccatcctgatcaacgcaattgcgtacggtgtttacattcaccaggattcttatgctattaaaggctggagaaccttatttgtcattactggtgtgataacaatcttcattggtatcttgatattcctgtggatccctgacgatccatcaaaagcaaggtttttatctaaaagagagaaattaatggttgtccaaagaattaggtctaaccaacaagggttcggtaatcacgagatcaaaaaataccaaattatagaggcgttgaaggatgttaggacgtggttatatttcctctttactgtgagctctaatattcctaatggtggtatttcaagttttatgagtattctattgaatagtgattttggatattcatcaaaggaaaccctattaatgggtttacctacaggtgctgttgaattggtaggttgtccactttttggtattctagcagtttatgcagccaataagaagataccattttggaaatataagttgagttgggctatttttgcagctgtcttagcattgattgctagctgcatgttagggtttgcaacaaactccaaaaaagcaagactggctggtgcttacctgtggtacatctcgcccgtctcatttatttgcgtactttccaatatcagtgcgaattcctcgggatatagtaaaaaatggactgtatcttcaataaacttagtagcatatgctgcagctaacttggcaggaccacaaacctttattgctaagcaggctcctaaatatcatggcgctaaggtcgctatggtcgtatgttatgctgttatgatcgtgcttctatctatactgctcatcgtcaatttaagggaaaacaagagacgtgataagatagctgccgagagagggttccctgaagaaacagagaatttagagttttctgatttgactgattttgaaaatccaaatttcagatacactttatga

SEQ ID NO: 191021 - DNA, 1086 bp, Saccharomyces pastorianus
atgatttctgctaattcattacttatttccactttgtgcgcttttgcgatcgcaacacctttgtcaaaaagagattcctgtaccctaacaggatcttctttgtcttcactctcaaccgtgaaaaaatgtagcagcatcgttattaaagacttaactgtcccagctggacagactttagatttaactgggttaagcagtggtactactgttacgtttgaaggcacaaccacatttcagtacaaggaatggagcggccctttaatttcaatctcagggtctaaaatcagcgttgttggtgcttcgggacataccattgatggtcaaggagcaaaatggtgggatggcttaggtgatagcggtaaagtcaaaccgaagtttgtaaagttggcgttgacgggaacatctaaggtcaccggattgaatattaaaaatgctccacaccaagtcttcagcatcaataaatgttcagatttaaccatcagcgacataacaattgatatcagagacggtgattcggctggtggtcataatacggatgggtttgatgttggtagttctagtaacgtcttaattcaaggatgtactgtttataatcaggatgactgtattgctgtgaattccggttcaactattaaatttatgaacaactactgctacaatggccatggtatttctgtaggttctgttggtggccgttctgataatacagtcaatggtttctgggctgaaaataaccatgttatcaactctgacaacgggttgagaataaaaaccgtagaaggtgcgacaggcacagtcactaatgtcaactttatcagtaataaaattagcggcataaaaagttatggtattgttatcgaaggcgattatttgaatagtaagactactggaactgctacaggtggcgttcccatttcgaatttagtaatgaaggatatcaccgggagcgtgaactccacagcgaagagggttaaaattttggtgaaaaacgctactaactggcaatggtctggggtgtcaattaccggtggttcttcctattctggatgttctggaatcccatctggatctggtgcaagctgttaa

SEQ ID NO: 191022 - DNA, 1041 bp, Saccharomyces pastorianus
atgaacacagattcacacaaccttagtgagccatacaatataggtggccaaaaatacattaatatgaaaaaaaaggaagatcttggcgtatgccagcctggcttaacgcaaaaggcattcacagtcgaagacaagttcgattacaaagcaattattgaaaaaatggaagtatacggactttgcgtggtcaagaattttatagagacctccagatgtgatgaaatattgaaagaaatcgaaccgcatttttatagatacgaatcatggcaaggctcaccgtttcctaaggaaactactgtggcaacgagatcggttttacactcatctacagtcttaaaggatgtggtatgcgaccgtatgttttgtgatatctcaaaacattttttgaatgaagaaaactactttgcggcgggaaaggtgattaataaatgcactagtgatattcaactgaactccggtatagtctacaaggttggcgctggtgcaagtgaccagggctaccaccgagaagatattgttcatcatacgacccatcaagcatgtgaacgtttccagtatggaaccgaaaccatggtagggttaggtgtagcttttacagatatgaataaagaaaatggctctacgcgaatgatagtcggttcacatttgtggggtccgcacgattcctgtgggaactttgacaagaggatggaatttcacgttaatgttgcaaagggagacgcagttctattcttagggagcctctaccatgcagccagtgcaaatcgtacgtcacaagacagagttgctggatatttttttatgacaaagagctacttgaaaccagaggaaaatcttcacttagggactgatttgcgagtgtttaagggtttaccattggaagccttgcaactgttggggctcggaattagtgagccattttgtggtcacatagattataagagtccaggacatcttatcagttctagtttgtttgaaaatgatatcgaaaaggggtactatggagagacaataagggtgaattatgggtccacgcaataa

SEQ ID NO: 191023 - DNA, 867 bp, Saccharomyces pastorianus
atggcatcaagaaaactgcgtgaccagattgtaattgccactaaatttaccacggattataaggggtatgatgtaggcaaggggaagagtgccaatttctgtgggaatcacaagcgcagtttgcatgtaagtgtgagagattcccttcgtaagttgcaaactgattggattgatattctttacgttcactggtgggattatatgagctccattgaggaagttatggatagtttgcacattcttgtgcagcagggcaaagtactctatctaggtgtgtctgatactcctgcctgggttgtttctgcagcaaattactacgccacatctcatggtaaaactccctttagtatctatcaaggtaaatggaatgtattgaacagggactttgaacgtgatatcattccaatggctaggcattttggtatggctcttgctccatgggatgttatgggaggcgggagatttcagagtaaaaaggcagtggaagagcggaagaagaaaggagaaggcttgcgtaccttttttggtacttcggaacagacggatatggaggttaaaatcagcgaagcattgttaaaagttgcggaagaacatggcactgagtctgtcactgctattgccatagcttatgttcggtctaaagcgaaacatgttttcccattagtgggaggaagaaagatcgaacatctcaaacagaacattgaggctttgagcattaaattaacaccagaacaaataaagtacttagaaagtattgttccttttgatgtcggatttcccactaattttattggagatgacccagctgttaccaagaaaccttcatttctcaccgaaatgtctgccaagattagcttcgaagattag

SEQ ID NO: 191024 - DNA, 351 bp, Saccharomyces pastorianus
atgctacagtatataccactctcaaacttaccctactctcacattccactccatcacccatctctcaccatcagtaccaaatgcactcgcatcattatgcacggcacttgcctcagcggtctataccctgtgccatttacccataactcccacgattatccacattttaatatctatatctcattcggcggccccaaatattgtataactgctcttaatacatacgttataccacttttacaccgtatactaaccactcaatttatatacacttatgccaatattacaaaaaaatcaccactaaaatcacctaaacataaaaatattctattcttcaaccataatacataa

SEQ ID NO: 191025 - DNA, 990 bp, Saccharomyces pastorianus
atgaccaccgtgtccatcaataagcccaacctgctgaaattcaagcatgttaaaagctttcaacctcaagaaaaagactgcggacccgtaacctcattgaatttcgacgataatggccagtttctactgacctcttcttccaacgatacaatgcaattgtacagtgccacgaactgcaaattcttggacactatagcctctaagaaatatggctgtcactccgctatctttacgcacgcacaaaacgaatgtatctattcctctacaatgaaaaattttgacattaaataccttaatctggaaacaaaccaatatctaagatatttttccggtcatggcgccctagtgaatgatttgaagatgaaccccgtgaacgatacgtttctatcgtcgtcatacgatgaatccgttaggctttgggatttgaagatctctaaaccgcaagttattataccaagtctcgtaccaaattgtatcgcatatgatccaagtggccttgtattcgcattggggaacccagagaatttcgaaatagggctatataatctgaaaaaaattcaggagggtcctttcttgataattaaaattaatgatgcgactttcagtcaatggaataaattagaattttctaacaatggaaagtatttattagttggctcctcgataggaaagcatttaatttttgacgcattcacaggtcaacaattattcgaactaataggaacaagggccttcccgatgagagaatttctagattctggatctgcttgtttcacaccagatggtgaattcgtccttggaaccgattatgacggtaggattgccatttggaatcattctgattcaataagtaacaaagtattaaggccgcaagggttcattccctgtgtttctcatgagacctgccccaggtcaattgcattcaaccctaaatattcgatgtttgttaccgcagacgaaacagtagatttttacgtgtacgatgaatga

SEQ ID NO: 191026 - DNA, 3249 bp, Saccharomyces pastorianus
atgatgagtggcacaggaaacgtttcctcgatgctccacagctatagcgccaacatacagcacaacgatggctctccggacttggatttactagaatcagaattactggatattgctctgctcaactctgggtcctctctgcaagaccctggtttattgagtctgaaccaagagaaaatgataacagcaggtactactacaccaggtaaggaagatgaaggggagctcagggatgacatcgcatctttgcaaggattgcttgatcgacacgttcaatttggcagaaagctacctctgaggacgccatacgcgaatccactggattttatcaacattaacccgcagtcccttccattgtctctagaaattattgggttgccgaaggtttctagggtggaaactcagatgaagctgagttttcggattagaaacgcacatgcaagaaaaaacttctttattcatctgccctctgattgtatagcgaaggacaagtttttcaccagctcggacgatcccaccaacttgacaatacccaatagggacatcaacgaaaggactcttttcttggacgcctttcttttgtgtgcatctaacaacaatagcaacaacttcaagcagacctatgtttgtaatagatgtatcaacagggaaaaaagaagagcgtcgagaagaaagtctgggttgaacgacaactccatctggcaaaataacgaaaacaaaagagcaatcatattcaatagtaaacaacttttcatcattagtaataacggtttgagtggtaactctaactgtatcaatttcgacttaccgacgagaatcgtctgttactgcagacaccacaaggcaactaacgggtttgtagttttgttccttctaagggaccataacggcgatatcttggcgaaaactataacagatcccataatgatcatggacaagaaaaatgccagcaataccacaactccaaccagcaccagcaatgcccaggtttcgccaatgacaaatgacactagatccttttcatcgccgcaaagtgacttaaacttcccatccgaattccccctgccttctaacagtaaaaattttgtcatttctacgaactgtatgcttgatagcaattgtaataacaacaacaatgataatgataacaaaaacaacattaagactaataccgcaatgatgaacaacaacagacactttccatcaccaaattcctccagtgaggacagcaaccattctttttcagatattcatttttctaataacaacgacaacaatttacatcgttcactagactcttggtcgtccacaggttttaatagttcatctaatcccgctcttactacattaactagtgatttcagtgcggcctctgcgagacacactggcaagaggcagcgttcggtaaacgagccttttatgtctacgcctaatacgttttcccgtcttccccagaaattcatcgattcttccaaagatatatcgaaccataatagtgtccccgtggcgctaaataacaagccttctattcagcgtgtcatccccgcacaaggttccatcaacggaggtatagaagtgactctacttggctcaaagtttaagcagggcttaatcatcaagtttggcgaaaatatagcattgtccagccaatgctggaatgaatctacgatggtgacttatttaccgccttcatctaaacctggaccggttttggtaaccatagtcgacccaagtgaaacgtctatgagaaataatagcaatagtagtgtttccaccagcaatagtaccaatgacattctgcacttaaacaagtataccggtgagaaagcaatctttacttatgttgatgatactgataggcaactaattgaattggctctgcaaattgtggggctgaaaatgaacggtaaactggaagatgcaagaaatattgctaaaaggattgttggcagtgattcatctccatctaataataacgcaggattacactcacagaatagctctttaaattcgtacacgaatatgatgcgaaatataaacgatgaacaattgatcactgaagttattaagtcatttaagagaaataataatctctctaccgtcaatctttccatgtgtgacgttaggggtagaactctattacatctggcagcattcaataactggtatagtcttgtctcattactaatcaaatatgggtcgcatttgaacgaccaagatttatttggttttactccgctacatatggcgtgtattaatggtgacttgagaattataagactattgttagaatgcaacgttaatattatgaagaaaaccagaaacggctttatcgctaaacagttcttcctgatgaattatactgtcaacaagaccagatattctaattatgaaaccagtctgtttgacgacattctgactagattaacgaagaatacaacaggatccagtgatactcaaccgtttgagagaaatgtatcccagtcaagtttcaactcaagtttatttgatgatgacgatgctgatcatgactatgtccaagaaagaaaatatttattggcggattccgctgcccttgcccccgaacaatccaactgtaatgacaatacgtcattctcaatcctagattcggattcaggttatgacataagtgattgtgaatcatcttcagatgagattgctttggagttctttaacacccacaaaatcaaggacttctcttcaaagccaaatgaaataccaaaaactactaagactagcatagagcctgacggatctttatggaacagaatgctaactcgtttaaatgacgagctcccaaagtatgaagacttgttcccaaaaaaacccaaaaactgggaacttggtagcaaatctgtggagattgggccagataattctgcccaaatgaccgtggatgattctcaaacttcttctgaagacgatgaattagaagctttacaggtcgggttcaacacaatcttttccaagaagcaaaactttcagaatgataagatgctcctattcttttggatccccttaactttagtactcttattatgtttcacattatcgaatttggggaaagatgatgatatgtttcataatttatccaaaattgttcaggaatatttaagaattggtttagccaaggtactactaggcaacgaaaggatgaaaacctcttttaaaatgcagttatcgaagtttcaaaacaataacattctaaacgacatgcgagtcaattaa

SEQ ID NO: 191027 - DNA, 321 bp, Saccharomyces pastorianus
atgggttacgtaattatgacgttttcgagtgcgaggatgtcagaaaggagagccagaattatatatatatggatgcatctctctgcatataaaattaatttccctttcgtacagttccctacttttttttccctctttcgtttgcaaaagaaggcggccatactcattaaaaacccctccccatttttccttttttttttgtttccatataggaagaactctacagctcgaacaatacatcaaatcaatcaagcagtcgctctcgttctattgtgtgtttctcaccaccttacatatctcccctcagttcccagcctataa

SEQ ID NO: 191028 - DNA, 720 bp, Saccharomyces pastorianus
atgaaattctccactgctttgtctgtcgctttattcgccttggctaagatggtcattgccgattccgaagaattcggcctggtgagtatccgttccggctcggatttacaatacttgagtgtttacagtgataacggcactttgaaacttggcagcggtagtggctcatttgaggcaactattaccgatgacggtaaactgaaatttgacgacgataagtatgctgttgtcaatgaggatggctcattcaaagaaggttctgagagcgatgctgccactggtttttctattaaagatggccatctaaactacaagagctcttctggtttctacgctatcaaggacgggtcgtcttacattttctcttctaagcaatccgacgacgctaccggtgttgcgattagaccaactagtaagagcggatctgttgcagcagatttttctccaagcgactctagttcctcttcatctgcttctgcttcgtctgcttccgcatcatcttctacaaagcatagttcgagtatagaatctgtcgagacctctactactgtggaaacttcctctgctagctccccaactgcttcagttatctctcaaattactgatggacaaatccaagctccaaacacagtttacgaacaaacagaaaatgcaggtgccaaggctgccgtcggcatgggtgctggtgctctagcggtcgcagctgcttacttgttgtaa

SEQ ID NO: 191029 - DNA, 372 bp, Saccharomyces pastorianus
atggtcaaattaacttcaatcgctgctggtgtcgccgccatcgctgctggtgttgccgctgccccagccactaccactctatctccatctgacgaaagagttaacttggtcgaattgggtgtttacgtctccgatatcagagctcatttggcccaatactacttgtttcaagcagctcatccaagtgagacctacccagttgaaattgctgaagctgttttcaactatggtgacttcaccaccatgttgactggtattccagctgaacaagtcaccagagttatcactggtgtcccatggtactctaccagattgagaccagctatctccagtgctctatccaaggacggtatctacactatcgcaaattag

SEQ ID NO: 191030 - DNA, 348 bp, Saccharomyces pastorianus
atgctacgtatataccactctcaacttaccctactctcacattccactccatggcccagtctcactaaatcagtacgatgcactcacatcattattcacggcacttgcctcagcggtttataccctgtgcaatttacccataaaacccacgattatccacattttaatatctatatctcattcagcggctccaaatattgtataactgctcttaatgcatacattataccacttttactccatatactaaccattcaatttatacacacttatttcaatatacccacaaaatcaccactaaaattacctaaacataaaaatattctactcttcaacaataatacataa

SEQ ID NO: 191031 - DNA, 378 bp, Saccharomyces pastorianus
atgaacgtcgttagagtctggccattttctacacgaactataccttgtaccactacagtggcagcttggtggacatgttgcgtgacagtcacagcaactggggcagataaagcgacagatgcagatgcggccagtagtgagactttagaaaatttcatctttgtaagttttattaaaggaatggtattgttttatgatgggctgtttcgaggaacgatgataccaagagccaacagatccatcacagcaatatgtaacactctgcgacaagcatatatatatacaaagatccaaagcattgcctttgaacgacgtctatgtttccaaaacattacatatagagaagtgcgtgagatacacgaaatgtactgtaaatag

SEQ ID NO: 191032 - DNA, 990 bp, Saccharomyces pastorianus
atgaaattttctaaagtctcactactggccgcatctgcatctgtcgctttatctgccccagttgctgtgactgtcacgcaacatgtccaccaagctgccactgtagtggtacaaggtatagttcgtgtagaaaatggccagactctaacgacgttcattaccaagggcactcaaacggcttctgctagtcccgttgccacaacatcagctcctattgtggttgctaatgctcaagtggacagcatagctacttccgttatccaagaaagcgctgtcgtggctgaatctgcaacatttgaagaatcctctacagaaacatctgaagcattttctacagcaactgcaaccatacaagcggtgcaaacctccgcaagtgccacacaggatgatgtaaccacaactttaacatcttcaacacaacctaccagcacaactactccaacaaccactaccactagcccaaccactaccactagcccaactactaccgctagtccaactactactgctagcccaaccaccgctaccaccactcaatctaccgcctcaagcactcaatcctcaagctccgatttctcaacgtcaatggttaacgaacacaacactaaaagggcgttgcacaaggataccggttctttgacatggtctgacacactagcaacatatgcacaaaactacgctgactcctacgattgttcaggcaacctagtccactccggcggtccatacggtgaaaacttggcacttggttacggtacgaccggctctgttgatgcctggtataacgaaattaccagctacgactattccaaccctggttttagtgaaagcgcaggtcacttcacccaagtcgtatggaagggaacttctgaagttggttgcggtttgaaatcttgcggtggcgaatggggcgattacatcatttgttcctacaaagccgctggtaatgtcattggtgagtttgctgacaacgttatgccattagcttaa

SEQ ID NO: 191033 - DNA, 1656 bp, Saccharomyces pastorianus
atgagtagtggtaccgaaaatgatcaattttatagttttgatgaaagtgattccagctctattgaactttatgaatctcacaatacatctgaatttactatacatggactagttttcccgaagttaattagtgtaacaagccaagattcagaatttgacatcaatgaagatgaagatggagtcgataccatatatgaggggatgctagatgctcctcttacgaaaaacaacaaaagaatactgtgtgaagggagtgtaccgaatctcagttatgaatgcttaaccaccaagggtatatttgaaagaatgcttcaaagggttgaccatttacaacctatttttgcaattccatctgcggatatattgatattactacagcattatgattggaacgaggaacgtttgctagaagtttggaccgaaaaaatggacgaattgcttgtggagcttggcttaagtaccacagcaaatatcaagaaagataatgattataattcacatttcagagaagttgaattcaaaaatgactttacatgtattatttgttgtgataaaaaggatacggaaacatttgcgttggaatgtggccatgaatattgtatcaattgctaccgtcattacatcaaggataagttgcatgaggggaacatcattacatgcatggactgttccctggcattgaaaaatgaagatatagataaagtgatgggacatccttcgagtagtaagttgatggattcttcaatcaaaagttttgttcaaaaacataatcgtaactataaatggtgcccgtttgctgactgtaaatccatcgtgcacttgcgagatacgtcatcattaccagaatatacccgtttgcattattcacctttcgttaagtgtaattcatttcatagattctgtttcaattgcggattcgaagttcattccccagcagattgtaaaataaccactgcttgggttaaaaaagccagaaaagaatcagaaattttgaattgggtcttgtcccacactaaagaatgtccaaaatgttctgttaatattgaaaaaaatggtggctgcaaccacatggtttgctcaagttgtaaatacgaattctgttggatttgtgagggcccctgggcgccccacggtaagaacttttttcaatgtacaatgtataagaataatgaggataataaaagtaagaaccctcaagacgctaataaaaccttgaagaaatacactttctactatagattgtttaacgaacatgaagtttcagccaagcttgattggaacctggggcaaactttgggcacgaaagttcatgcactacaagaaagaataggtatctcatggattgatggacagttcctatcagaaagtttaaaagtgttgaatgagggacgaaccgtattaaaatggtcatttgccgtggcatattactcggatgcatctcataatttgacgaagattttcgttgataaccaaatgctcttagccaacgcagtggaatcgctatcggagctattgcaaataaaaacccccgaagtgatcatgaaacgaagaccagagttttataataaggccggatatgtggaaaatagaaccactgcattaatggaatgcggtagagaactgctatgtaagggaatttgcaaagctgcagaatga

SEQ ID NO: 191034 - DNA, 2178 bp, Saccharomyces pastorianus
atgtttaaagtgtttggttttggtgcgaaggaagagattcctgagctttcacaggaagaaaaaactaaagccattctaaaacaagctcatgatttcgaacaggcactgcgtgcgatggactatgtcttagatgataatgctgacgagggtttggctttgctggatgagagtgatgctaaagaagcttccgaccaaactataaatgcgttagctcgtggtgtcattgaatttttggaggccactttaggttttgaagctgaagagatgaaaaaagcttctgcgactttggccaaggcagaagctttatctttgaaaagtagagagagggctcaaaaaattggattgaagagcagttctttatatcctccaggaacagtttatgccgtgacttatacagaatcatgccttctacatgccctattgatgattttcagtgaaagtatgatggaggcggccaaggccattttaaagctcagaaagtcgtactatatgttacaagaaatcttggaaactattaaagctgctaacaaagccaagaaattgaaaattacgtcaggcagtgaagataaggagtccaccccagcgactttcataactggtggcgatgcgttcaattccgttgatataccttatgaactgactcctgaagaacaaaaggataaggatcttttacaatttgctgaacaaattcatagcatgaggactgaaagattatctggcgcccacattggcaactctcctgcaattaacaggttgagaggtgagctaggactacaagcaatggaagacttgccagaagaggaaataacagatcataaagttctttcggatgatatagatttaagtcaagcaacaattgatgagtttgtccattctggtgtcaatttatgctttggtattttacaggttgtgatatcactattaccacccgctattggcgcggtcctatctgtggttggattcaggggttccagagaagaaggtttgagacttgtttggaaagccacaaagcaaagaaacgtgcatggttgtattggtttgttagccctgatgttttactatgatggacctttccaattcactgacgatgattttgatattcctgcagcagttaaggattccagtaacagtgaagattctgaagatgaagagatggatggccctacgttgttgcatcctgggaaaatactggaagatgcgttgctgcaatcaagagcgctatttcccaatagtgcgctatggttattgaatgaggcaaggatgctatctggtaaagggcgtttagaggaagcagtcgcattgatggattcgattgatgttagcaagatacggatgagacaggtcaaatccttgatgatttttgaccgtgctataacattgatccatttgcatcaatacgatagagctgcagaagatattttatcgctattagacatcagtgattggtcacacgctttttacacatattttgctggctgctgttatttagaaaattggagaatgtgcgaaatgggattaatgaagtcagacaaaaaggatgaataccaaaagaaggccgaagaacttatcttcacctctgtgaatttgctaggtaagaaaaccttcaaatcgaagaacctgccattagataggtttattctgagaaaagttgagcaatttaaagcgaaaaaggaggaacttggggtggaaaatcctctggatggtatcgctacttcaccagtacacgaaattgcgtacttctacaatggttataatagaatgtctgaagagcatttggagctaacaaagaaaatgctaactgagtatagaaatcccgccattgaagctttagactcagatcaggagttaatcaaagatctcttggtctctttgacattaagaagattaggtcatatccaagaaggttgtgatatattggatgaaaaggttctacctaagtttttctccattcaaaatggcaaggtcaaatatataaagaaaactgaagatccatgggcctatccgactgcactttatgaacgtgctctatttacatggaagttggagggcatggatggccttccagagagtaaagaatggttactgagggctcagggctacgcagatgattatgaattgagtacgagagtaggtatgaaaattaaggctgccattgaccgcgttgaccattcattgtaa

SEQ ID NO: 191035 - DNA, 1848 bp, Saccharomyces pastorianus
atgagactttcgtttggtaaacagcgttatcatggcggtacaacagtaactttgactgaacaaggagcttcagattcccttcgcgctgcgcaagctatcttccagaaccattccaatgaggtcagcagtccatgccctccagtaacggtgagcaggaatcctcaaactaggttatcagagccatcgctacaaaagtcagggcggaaacaagaacaaaagaaggcacgcatacgaacaaaacaggtacctaagattaaaacaacggcgcctaatgatgttgagttgtctaagaaacacaggtcaagccctgcaggtaaagataatgttagtagtactgctcaaatggcagctgctttagcgcattcacaatcgaaacttagttctgacaataactcctcccattcttcggcattggatacactaaaagttctagaaactccgaacttgaatggcttgctgggcattcattcacgctcaagctcaagaaacggctccaatgaatcactgacgcctggccaaagaactcccgacaatagatctcaagagaatttacttacttcctttagtagcggtagaaggctatcctcgagctctatggagcctgcaactaataaagacagcaacaaagctctgcccaaacgcaggccgtctcctcccttgcaatcatcacttgtcggcagtggtcagcttcatgaaaatgaaaacctatcatcaattagcatcgattccagacatagtctcaatccggacacttcagacgttatttctaataggtcacaaacaagtctatctcaaacaattaatcaactctcgttatgtgaatcagagccatctattgcaagctcaaacactactactacaacgagcaaccagggaagtggtttgcccaacttggttccgaactattcatccgatatgaggaagaagaagcttgttaacaagttcaaaaggaaagtatttggtagtaagcccaagcacttatcttcacaatatgaaatggatgcaagcagcgaagaactgggacaacatgaacaacaaccgagtatgagatttaaaacaacattacgtaaaacctctgtaagtacaaacgcagaaaatgatcatgcatcctctctacatgagggaaatctgaggtataagtacaatccgtccaacgacacgtatgatgtgtatgacgatactgattctgattctgaatctgatcagaaccaggacgccttgaccaagccacgcaaaagagatagaattaagagaaagatcaggaattctgccaataaaactgcacatcataggcctatccaccgcacgagagatcggaaattcaatgaggataaaccctggaaatcacatacagatataactttcgtaacagacaacgaaaggaagcgttacgaaagcatgtgggtaagcaacagacaccgtcatttgaacctgttgagctggtggccctctataacgggtgattccggagcaattaatactttacccgaagatggattgatattgggtatcatagtccgtgatatctggaagcggtctaacttgcccaatagtctattggcagaaatttacacgaaggtagacacaagaaaagatggtactttagataggaaatcttttattgtgggtatgtggctggtcgatcagtgcctgtatggcagaaaacttcccaatgttgtcgagcaatgcgtttgggatagcgtagatagatatgcttccaccacggttgtgccagtgagtacgctaaaggcgatggccaaacaaaagagaaaacagatgaaagaagaaatcaagaatatcaagaaggaaaaccgtgtagttcttgtagaccacaatagctcgtcgtga

SEQ ID NO: 191036 - DNA, 495 bp, Saccharomyces pastorianus
atggcagaacaaattagtcacaaaaagtccctgagggtgagcagtctgaacaaagatagaagattgctcttaagagaattctacaacttggaaaatgaaccgaataaaggtcgtcaagaagcacgtataggggaaaaagccagcgaggctcattctggggaggagcaagtcacagatgtgaatatagataccgaagcaaacactgagaaaccagtgaaagatgacgaattgagtgcaactgaagaggatctcaaggaggggtcagaagatgcagaagaagagataaagaacctgccctttaagaggctagtacaaattcacaataagctcttgggcaaagaaaccgagactaacaattctatcaagaataccatttacgaaaactattatgacctaataaaagtcaacgaccttctcaaagaaattacaaacgccaatgaagaccaaattaacaagttgaagcaaacagtagaatctttaatcaaggaactgtaa

SEQ ID NO: 191037 - DNA, 642 bp, Saccharomyces pastorianus
atgttttttcagcccctcaatgctcttagtctttgtgcaagtttgtcttccttttcgtcgtcaacattaacctctttcgcctttatctccggaacattgtccagttttgcactttgcttcaattccatgccattttcgtcagcaactttgctcattagttcatccaccttatcgttgtccaccagcatggcatccgaattcacacccatatcttcatatacgttaacactggtgtccaaatcttcgaattgctgttcgaacttgtccattatcatggttatctgttggaggttcatattctgtaacgccttatccatgcctttgcaaacttgccccattgatgctgacacctgcctcatcgtgacggcggtttgtacccttgatgcgaccgaatccacccgtgatgccaacttcaacagttgtaatctttcatttttctttcttatagcattggatgcatatatacgagatatatcttcattttcattaagagcacgtttgagcttattagtttcctgtttttcttcctttgaggctttattggcttgcttttgtaattgttttgatgtaaactttagttggaaaagagtgttttccaaacctgctgcagaattacgtgacatttctcagtgcgatgtctga

SEQ ID NO: 191038 - DNA, 1980 bp, Saccharomyces pastorianus
atgacatataagattaccacgagcgagagtaaaaaagagtatctctatatgggttcgggcgatactagaggagaaagctctctggtagctaaaccaatcgaaattatacttaataagctaccacatgccatactagcgcaacaacaatttcaaaaatatataacgagccccatctacagatatctttccaaacttctactgttcagagaggtggcttggcccgaaagtacaaaagatacccagaaaggacaagtagggatattttcctttcaaaacaattatgcagactctgcaacaactttcagaatacttgctcatttagatgagcacggatacccgctacccaacggtgccgctgaaaagaatttaccttctttatttgaaggattcaaagctaccgtttccatcattcaacagagactgttgttagacaatgtagacggggccacgaatagtgataaggaaaaatacgttcaattgccggatattaatactggttttgtgaataaaacgtactctagaattgacctaacacatttacttgaggatgtagaaactaacgtggaaaatctgtcaatcaataaaacgttagagatggatgagttgaccagattagattccatgatcaacgaactagaatccaggaaattaaaaatcctggaaagggttaagcacattgatagtaagtctaccaatcttgagaatgatgtaacactgataaaggatagaataaattttatcgaggaatacaatttggaagctgatcgtgaacagagcttacggaagcaaatggaagaagaaagatcatctgaagcgtcgtccttcacgcaaaatgaagaagccatatcgtcgttatgtgatgttgaaagtaaggatacgagattaaaagatttttacaagatgccccatgaaaaaagccacgataaaaacaggcaaattatctcagaaacatatagccgaaataccacggctttcagaatgacaataccccatggcgaacatggaaacagcataaccgcattagactttgatacaccatggggaaccttgtgctcatcaagctaccaagatcgtatagtaaaagtgtgggatttgaaccatgggatacaagttggagagctgcctggtcaccttgctactgttaattgcatgcaaatagataagaaaaattacaatatgttgattactggaagtaaggatgccactctgaagttatgggacttaaatctgagtagagaaatatatttggaccatagtccattgaaggagaagacagaagaaattgttacaccatgtatccataattttgagttacataaagacgaaatcacagccctgtcttttgattctgaagctttggttagcggatctagggacaaaaaaatattccactgggatttaacgacgggcaaatgtattcagcaacttgaccttatcttcacacctacacatagcgacattaaaatgcctgcacgttcattaaacaatggtgcatgtttacttggcacagaagcaccaatgataggagccctccaatgttacaactctgcattagcaacaggaacaaaagatggcattgtgcgactatgggatctaagagttggcaaaccggtgagattactagaaggccataccgatggaattacaagtttgaagtttgattccgaaaaattggtaacaggctcgatggacaatagcgtaaggatttgggatttgaggacaagctcaattcttgacgtgattgcttacgatttaccagtatcgtccttagatttcgatggtaaattaatcactgttggcgcaaacgagggaggggttaatgtctttaacatggagcgcgatgagcattggatgactcctgaaccaccgcattcactagatggggatgagctgagcagaagaattgctattgtcaagtataaagacggatttctgatcaatgggcacaacgatggagacatcaatgtatggacactttag

SEQ ID NO: 191039 - DNA, 504 bp, Saccharomyces pastorianus
atgacttcgtttcaagcggtctctttcgctctcggttgtaacacacttgtagcctgctatgctttcaccgtactcgaaaagcgtagcctcatgactagttgtaccaacgccctttcttttcttttttttctcttgacacttcggcgtattcatcgccactggtacaagccgtatggtgcttttttgctcattttcgttttgacgttgcgatggtttcgcggaccaatcgcatgggtggtggtggatgttgtctttgctagttgcaacgtagtcttcttctctcctgcgctttctgacgaaaattggccttacgtatcttttttcggcgtcgttgtcgtcatcgctgttcatataatcgtcgtcactcatatcggcgcttttactgcatgctgtcttttgaagagagtttcattgaaaagtagtgaagaaaaaaaaaaaaaaaaaaaaaaaaaaaaggaaaaaagcttacatacggaaagagaaaaaaaaaaaaagaaattttaa

SEQ ID NO: 191040 - DNA, 753 bp, Saccharomyces pastorianus
atgagtgacgacgattatatgaacagcgatgacgacaacgacgccgaaaaaagatacgtaaggccaattttcgtcagaaagcgcaggagagaagaagactacgttgcaactagcaaagacaacatccaccaccacccatgcgattggtccgcgaaaccatcgcaacgtcaaaacgaaaatgagcaaaaaagcaccatacggcttgtaccagtggcgatgaatacgccgaagtgtcaagagaaaaaaaagaaaagaaagggcgttggtacaactagtcatgaggctacgcttttcgagtacggtgaaagcatagcaggctacaagtgtgttacaaccgagagcgaaagagaccgcttgaaacgaagtcatgaaagcgaaagcagcagtgaaagcgaggtagacgttttcgcctttgaccaggcaaaaggtatcagctctaaggttgaagccgaagaacgctacgcgcgggccgttcgacagtattggcgcatgaccaaagacgagccggctaccttaccactgccaggcacacctaccctagcggctgtgagtttagatatgattgatgacaaaagcgtagaacaattttacacaatgagcagtgccttgatggatgcaaacagactagacttgattcgccgcgatagaatccggtggcacccggacaaacatcgttatcataagtccaaagtcacaaaactgtttcaggccattaacggcctgtgggagcaagaaaagaccgagaaaaggtaa

SEQ ID NO: 191041 - DNA, 1353 bp, Saccharomyces pastorianus
atgtgtttccttctcgagacctcggcgtctcccagatcaaagctcagcaaagattttaaaccgcaatttacgctcctttcatcggtaactaagaagaaaaaaaaaaaagtacgaccacacaatttccagtgtattcattccttaaacttcgtttattttttattcattcattcatttttatttgaatataaccaactactagtccttcctttaaacaaaaatttaccctcccttaatttttcaagaaattccagtatgaaattatccgctctattagctttatcagcctccaccgccgtcttggccgctccagctgtccaccatagtgacaaccaccaccacaacgacaagcgtgccgttgtcaccgttactcagtacgtcaacgcagacggcgctgttgttattccagctgccaccaccgctacctcggcggctgctgatggaaaggtcgagtctgttgctgctgccaccactactttgtcctcgactgccgccgccgctactacctctgccgccgcctcttcttcctcctcttcctcttcctcctcttcctcttcttcctctgttggttctggagattttgaagatggtaccatttcctgttctgatttcccatccggacaaggtgctgtctccttggactggttaggtctaggcggctgggcttccatcatggacatgaacggtaacaccgccacctcttgtcaagacggatactactgttcttacgcttgttctccaggttacgctaagacccaatggccttctgaacaaccttccgatggtagatccgttggtggtttatactgtaagaacggtaaattataccgttccaacaccgacactaacagtttgtgtgtagaaggtcaaggctctgctcaagctgttaacaaggtctccggctccattgctatctgtggtaccgattatccaggttctgaaaacatggtcgttcctaccgtagttggcgctggttcctcccaaccaatcaacgtcatcaaggaggactcctactatcaatggcaaggtaagaagacctctgcccaatactacgttaacaacgctggtgtctctgtggaagatggttgtatctggggtactgagggttccggtgtcggtaactgggccccagttgtcttgggtgctggttacactgatggtatcacttacttgtccatcattccaaacccaaacaacaaagaagcaccaaactttaacatcaagatcgttgccaccgatggctctaccgtcaatggtgcttgctcttacgaaaatggtgtctactctggctctggctctgacggttgtactgtttcagttacttctggttctgctaactttgtcttctactag

SEQ ID NO: 191042 - DNA, 915 bp, Saccharomyces pastorianus
atgaatacttcagaactgtcaatagctgaggaaatcgactacgaagctcttccatcacatgctccgctacattcccagttactggcaggagcatttgcaggtataatggagcattctttgatgtttccaatagatgctctgaaaacccgagtgcaggctgcaggattgaataaagctgcctctacagggatgatatctcagatatccaaaatatctacaatggaaggttcgatggctttatggaagggtgttcaatcggtaatactgggggcagggcctgcgcatgcagtatattttggtacatacgagttttgcaaagctcgcctgataagccctgaagatatgcaaactcatcaaccaatgaagaccgcactgagtggtaccattgctaccattgctgcggatgcattgatgaacccctttgacaccgttaaacaaagactacaattggatactaatctaagagtttggaatgttactaagcaaatatatcaaaatgaaggctttgcagcattttactactcctatcccacaacattggccatgaatatcccatttgcagcgttcaatttcatgatatatgaatctgccagcaaattcttcaacccacaaaattcctacaatccattgattcattgtctttgcggtgggataagtggtgcaacatgtgctgcgttaactacaccgttggattgcataaagactgtattacaggttagaggcagcgaaactgtctccatcgaaataatgaaggatgcgaacacttttggtagagcctcaagagccatactggaggttcatggttggaaggggttttggcgaggtttgaaaccaaggatagtggctaatataccagccactgccatttcttggactgcatatgaatgtgctaagcattttttaatgaaaaattga

SEQ ID NO: 191043 - DNA, 1215 bp, Saccharomyces pastorianus
atgaccattattcagacggttactgaattgggtgttaccgaggacaccattaaggttcagatggctccttccggcggcaaacacctattggcagatcccggtaatcatccagcggagcattttgagagccagatgtcgtggctaaggtttcaaacaaggcagtatctaactagattcacagacaaccaatcagatttcgtacattctttacaaaaaaagcacagaacgccttttagagacgtttatttcaaatacacttcgcttatgggttcccacatgttttatgttatcgtgcttcccatgcctgtgtggcttggataccgcgatttaacacgggacatgatctacgttcttggttattcaatttatttgagtggctacttaaaggattattggtgcctaccaaggccaaaatcaccgccagttgacagaatcacactaagtgaatacactacgaaagaatatggtgcacccagttcacattctgctaacgctactgcggtaagtctattattcttttggagaatatgtttatctgacacactggtatggccaacaaagcttcttttactgagtctggtgatattttactacttaaccctggtttttggtagagtttactgcggtatgcatggtatgctggatttatttagcggcgccgcagttggagctatctgtttttttataagaatctgggtggtgcatgctttacgaaatttccagattggtgaacatctctggtttccccttttgagtgtagcatggggcttgtttattctgtttaaccacgtcaggcccattgatgaatgtccttgtttcgaagatagcgtagcgttcattggcgtagtcagtgggctggattgcagcgactggttaaccgaaagatacggatggaaccttgtatgtagtaggtacgcatcatgtggttctaaggtgttcttgaggcctctggtaggtgtcgcttctgtgattgtttggaaagacgtcattagcaagacagctgtctacacgctgttaattaaactactcagatttcacgatgatagaagcgaaaaggttcatttccataacgagacaagtgaagaagaagagtgtttattgtacagcggtgtttccaaagtggaaatcgtcggaaggtttctcatatacgcaggtatacctacaaccgtctttttgctatgcccagtttttttcacttggacaaacttaaggtag

SEQ ID NO: 191044 - DNA, 586 bp, Saccharomyces pastorianus
atggaaaacgataagggccaattagtatgttcgagaaatctataagattttttatattttaacggatgaatggaaagtgcatggctgtttaaataaatgtaagaaagatatcataatgcaaacaaaacgtaggcatccgcaatgtatggaaaacatacttatggttaccgataataagcaactccgaaggtgccatagaccagctctgaatgcagcctacaaaagttgagcaatttctgacaaaattcttcgattactttcttcacatgtattaaatcatcactcaccaccaccaacaatgtgttttttaaactagcataactaacaaagatttgttttacatcaggtcgaactttacgttccaagaaaatgttctgctaccaacagaatcatcaaggctgatgaccacgcatctgttcaaatcaacgtcgctaaggttgatgaagaaggacgtgctatcccaggtgagtacgttacctacgctttgtccggttacgttagatccagaggtgaatctgatgattctttgaaccgtttggctcaaaacgatggtttgttaaagaacgtctggtcttactcacgttaa

SEQ ID NO: 191045 - DNA, 987 bp, Saccharomyces pastorianus
atgagtaaaaacagggaccctctactggctaatttgaacgctttcaaaagcaaagtgaagtctgccccggtgatcgcacccgctaaagttggacagaagaagaccaatgacacagtgattactatagatggaaacactaggaagaggacggcctccgaacgtgcgcaagaaaacactttgaactctgcgaaaaatcctgtgttagtggatatcaagaaagaagctgggagcaatagctctaatgctatttcattagatgacgacgatgacgacgaagattttggtagctctccttcaaaaaaagtaaggcctggctctattgctgcagccgctttacaagcaaatcaaacagatatttccaagagtcacgattcttcaaagttgctttgggcgactgaatacattcaaaagaaaggtaagcccgttttggtgaatgagttattggactacttgtcaatgaaaaaagatgacaaggttattgagcttttaaaaaaattagatagaatagagtttgaccccaagaaggggactttcaaatacctttccacctacgatgtccattccccttcggaactgctgaagttgttacgttcacaagtaacattcaaaggtatttcctgcaaagacttgaaagacggttggccacaatgcgatgaaacgattaaccaactggaggaagacagcaaaattttggtgttaagaactaaaaaggataaaactccaagatacgtttggtataacagcggtggtaacttgaaatgtattgacgaggagtttgttaaaatgtgggaaaatgtgcaattaccgcaatttgcagaattgccaagaaagctgcaagatttaggtctaaagcctgctagtgtcgatcctgctactatcaaaagacaaacaaagagagttgaagttaaaaagaagagacaaagaaagggtaagattactaacactcatatgaccggtatcttgaaagattattcccatagagtatga

SEQ ID NO: 191046 - DNA, 755 bp, Saccharomyces pastorianus
atgcaaatgtatgttacggcgaatacagaatactatgttcgaaataatatgaggattatacgatagcaaaaaagccataaacgaaagacataaatggaaaatgattgacaagctcacaatttattaaacaagtagcaattgagaaaaactattactcgcggcaagcttctgagtttacattaaatctgtagagcaaattgaaaatgtcgcatatgtgctgaagggtttgtttgttccatcttattttgcataacatagttatatttacttggtcgcataaaaaatattttttactaacgtgaagtttctttctttatgatgtacgcacgcacgtctgtgcttactccataaatgaacttattccaattttgtacagcttcgttaagactttgactggtaagaccatcactttggaagttgaatcttctgacaccattgacaatgtcaagtccaagatccaagacaaggaaggtatcccacctgaccaacaaagattgatctttgctggtaagcaattggaagacggtagaactctatctgactacaacatccaaaaggaatccactttacatttggtcttgagattaagaggtggtatcattgaaccatctttgaaagccttggcttccaaatacaactgtgacaaatctgtttgtcgtaaatgttacgccagattaccaccaagagctaccaactgtagaaagagaaagtgtggtcacaccaaccaattgcgtccaaagaagaagttgaaataa

SEQ ID NO: 191047 - DNA, 3510 bp, Saccharomyces pastorianus
atgcctgtggctgctcgatatatatttttgaccggcctatttttgctatctgtagctaatgttgctctaggtactacagaggcttgtttgccagctggagagaagaaaaatggtatgactataaacttttaccaatattccttaaaagattcatctacatactcaaatccgtcatatatggcctatggttatgctgatgcagaaaaactgggttctgtaagtgggcaaacaaagctttccatcgattattccatcccatgtaatggcgcatcagatacttgtgcttgttccgatgatgatgctactgaatatagcgcttcccaggttgtaccagtgaagcgtggcgttaaactttgttctgataatacaactctttcttctaaaactgagaaacgtgaaaatgacgattgcgatcaaggcgctgcctactggagttcagatctgttcggattctacacaacacccaccaacgtaaccgtggaaatgacaggttactttttaccaccaaaaactggtacctacacatttggcttcgctactgtggatgattcagcaattttatcggttggaggtaatgttgcctttgaatgttgtaaacaggaacagcctcctatcacatcaacggatttcactattaacggtattaaaccatggaacgcagatgcacctaccgacataaaggggtcaacgtacatgtacgccggttactattacccgatcaaaattgtttattcaaatgctgtatcctggggtacgcttcctgttagtgtggtattgccagatggtactgaggttaatgatgattttgaaggatatgttttttcttttgacgataatgctactcaagctcactgttccgttccaaaccctgctgagcatgcaagaacttgtgtatcatctgcaacatcttcctggtcgtccagtgaagtctgtacagagtgtaccgagaccgagtctaccagttatgtgacaccatatgtcactagctcttcctggtcgtccagtgaagtctgtacagagtgcaccgagaccgagtctactagcacctctactccatatgtcaccagctcttcctcgtcgtccagtgaagtctgtacggagtgcaccgaaactgagtctaccagttatgtgacaccatatgtcagctcgtctactgctgccgcaaactacactagctcattctcatcgtccagtgaagtctgtacagagtgcaccgaaactgagtctactagcacctctactccatatgtcactagctcttcctggtcgtccagtgaagtctgtacagagtgcaccgagaccgagtctaccagttatgtgacaccatatgtcagctcgtctactgctgccgcaaactacactagctcattctcatcgtccagtgaagtctgtacagagtgcaccgaaactgagtctactagcacctctactccatatgtcactagctcttcctcgtcgtccagtgaagtctgtacagagtgcaccgagaccgagtctaccagttatgtgacaccatatgtcagctcgtctactgctgccgcaaactacactagctctttctcatcgtccagtgaagtctgtacagagtgcaccgaaaccgagtctactagcacctctactccatatgtcaccagctcttcctggtcgtccagtgaagtctgtacagagtgcaccgagaccgagtctaccagttatgtgacaccatatgtcagctcgtctactgctgccgcaaactacactagctcattctcatcgtccagtgaagtctgtacagagtgcaccgaaaccgagtctacaagcacatccactccatatgcaacctcatctactggcacagctacttcatttaccgcttcaacttccaataccatgacgtctttggtccaaacagacacaaccgtttctttcagcctatcttcaactgtaagcgagcataccaacgctccaacttcatctgtagagtcaaatgctagtactttcatatcgtcaaataaaggcagcgttaaaagttatgttacgtcatccatacatagcattacgcccatgtatcctagtaaccaaaccgtaacatctagctctgttgtctccacaccaattacttccgaatcttctgaatcctcggcctcagttaccattctaccctcaactatcacttctgaattcaaaccatctacaatgaaaacgaaggtcgttagtatctcctcatcaccaactaatttgattaccagctatgacactacatctaaggattcaactgttggttcatccacatcgtctgtaagcctgatctctagtatttctctaccaagtagttattcagcttctagcgaacaaatatttcacagctccatcgttagttcaaacggtcaagcattaacaagtttttcttcgaccaaagtcagttcctcagaatcttctgaatcacatagaacatcgcccactacatccagtgaatcaggcatcaaatcttcaggcgttgaaatcgaatctacaagtacctcttctttcagctttcacgaaacttctacagcctccacctccgttcaaatatcttctcagtttgtgactccatcctcccctatttccacagttgcccctcgttctacagggctcaatagtcaaactgaaagtacaaattcttccaaggaaaccatgtcgtctgaaaatagcgccagcgttatgccttcttcatcagctacatctcccaaaacaggcaaagttaccagtgatgaaacttcttccggattttctcgtgatcgcaccactgtgtataggatgacttcagaaacaccctccacaaatgaacaaacaactttgattactgtaagttcttgtgaatcaaatagctgctcaaacacagtctcaagtgctgtagtttccacggccaccactaccatcaatgggattaccactgaatatactacatggtgccctctttctgctacggaattaacaacggtaagtaaattagagtcagaagaaaaaaccaccctaattacggttacttcttgtgagtctggtgtctgttccgaaactgcttcacctgctatcgtttcgacagccactgctaccgtcaatgatgtcgttacagtttattccacatggagcccacaggctacaaataaactagcggttagttctgacatcgaaaatagtgccagtaaggcttcattcgtttcagaggctgctgagacaaaatccataagcagaaacaacaattttgttccaacttctgggactacttctattgaaacacatacaaccactacaagcaacgcgtctgaaaatagcgacaatgtttctgcttctgaggctgtcagtagcaaaagtgtcacaaatcccgtgttgattagtgtatctcaacagcctcgtggcacaccagcaagtagtatgataggatctagtacagcctctttagagatgtcaagctacctcggcattgcaaatcatctactaaccaatagtggtattagtattttcattgcctccctattactggcaatcgtttaa

SEQ ID NO: 191048 - DNA, 3657 bp, Saccharomyces pastorianus
atgataaaaaatggtacatgcccctattgggaacgtgatgatctttcggaatgtgctaggcgagaatatatcgagtttaaatttcctctatttatattgttgactggtatgatatacgcgttttgcaaagtctttcgagccttttatctaagggggaaaaatcatacaaatgaagcgccagaatttgaagaacaaggtaatggaaaccacgaatatgcaaggttctcagttttaagactaaaatctgcatgggaaagccgtagcttttgtaatgttaataatagatctactttcgacaaattcaaaaaatttatagagggtgccttcattgttttgcagcttactatccacctgtatattttatctagtatgccaatggataacaaaaagttctttcaccaaggttttctggttcaaatgtttctctggattttactgcttgttgttattacacttcgtttaatttcagcaagccagtcatttcggtgggttttagcatgtaagcgtgatttatgggctgtttcgttttactcatatgcatccctgtttactctttcgattttacctcttcgttccgtcttcattggaaagataaaagataaaattatggtcaaatatatcatttccgagactttcattgatttagcgcttttattattattatcaacgtcaagtatagaaggaactaggtactcatttttggttgaaaatgagaacaaaaagttgccaccggctcctaccgtctttggccttcttactttttctaggattgatcggcttatttggaaagcatacaaacactgccttggaaacgctgatatttgggatttggatattaataataagtctatagcaattttggcgaactttgaaatgtcttctaaaaaaggaaggctccttccaaacattatttgttattttaaggctgttttcatctcccaattatttctggcttttgtatctagttttttgaactttgtaccctcattgttgatgccaagaatactatcatacgttaatgacccaaagtcaaaatcatggaacttggtgtctttatacgtctcatctatgctcgtcagtaaaatcattgccacgacttgtagaggtcaaggattgtttttaggtgaaaagggtactatgcaactaagaacagttttgatatccaatatctattccaaaaccttaagaagaacaattctaaaagactcaacaacgtcacttcaaaaaaatgcgtcaacatcctttgaagaaaatcctgactcttctgaagcggaacctagaaaaaagtctagtaggaaagacaactctgtgaacaatgttatgtcaattgacgctttcaaggtttctgaagctatgaacactttttatctggcatgtgaagcagttttcatgacagttacggccctaatgatactatattccctactgggatggtccgcctttgctggtacctttgctcttcttgccatgattcctttgaatttttggtgtgcaactttttacgggaactatcaggccgatcaattaatcctaactgacaagcgtacctctgggattagtgaggctctgaactcaatacgtgtaataaagctactggcatgggaaaatctgttttatcaaaagattataaacgtaagagatggggaaataagactccttaaaaagaaggcaacaattttctttttgaaccatctcatttggttctttgggcccactttggtctctgcaataacattctcagtgtttattaaattccaaaatcagacacttactcctacaatagcatttacagctctttctttatttgcaatattgaggacacccatggaccaaattgcttcgactgtcagccttttgatacagtcttttatttctcttgaaagaatccaggattatcttaatgaatcagaaacaagaaaatatgagattttggaacaaagcaatactaaatttggctttgaagatgcaagcatggaatgggaagctgctgaaacaagttttaaacttaagaacatttctattgattttaagctgaatagtctcaacgcaattataggtccgactgggtcaggaaagtcttcgctattacttggactattgggagaattgaaccttctttctggaaaaatatacgtacctacagttgaatcccgcgacgacttagagattggtaaagacggaatgacgaattcaatggcatattgttctcaaactccgtggttgattagtggaacaattaaagataacgttgtttttggagaaatcttcaacaaacaaaaatttgatgatgtaatgaaatcctgttgtcttgacaaagatatcaaagcaatgacagctggcataagaacagacgtgggtgatggaggattttccttatctggcggacagcagcaaaggattgctttagccagagcaatttactcctcttccaggtatttgatccttgatgattgcttgagtgcagtagatcctgaaactgcactttatatatatgaagagtgtttatgcggccccatgatgaaaggaaggacctgcatcattacgagtcataatatttctttagttacgaaacgggctgactggcttgtgattttagatcgtggcgaggtgaaatcacagggtaaaccatcggacctcattaaatctaatgagtttttgagggaaagcataaacaatgattcaaaaaatacaactcacaatcaaattgacttgaaaagatcaacaacatcaaagaaaactaagaatggagatcccgagggagggaactcgcaagacgaagtgtgtgctgaagttgaaaattttgaggaaacaaaaatggaaggatcagttaaattttcagcttacaaatggttagcagactatttcgggggactgggagttgtttttgttttcacctcgtcctccatccttattcatggaatcacactgtctcagggcttttggctcagatactggctggacactggatcttcagggagtaagtctacctggctttatagaatagttgagggtcactctaacatctatttcttactgacttatattatcataggtcttgtttcttcatttttaacttctggtaaagtttggatagcaataatttcaggtaccaacgtcaccaagaaaatatttgcgaagcttctatccagtatcttatatgccaagttacgttttcataatgtcacgccgactggaagaataatgaacagatttagcaaggatatggatattattgatcaacaattgatccctaatttcgaaggactctcttatagcgtcgttgtttgtctgtggattatacttttaattggatatgttactcctcaatttctgttatttgctattcctttatgcgctctttattataccgtatgtacgttatatcttcgtgcatctagagagttgaagagaatagataacatcaatatctctccaatacaccagttattcgctgaagccatcaaaggagtaactacaattagagcattagcagatgagcgtaggtttatcactcaatctttggttgcaattgacagaagtaatgctccatttttttatctcaatatggccaccgagtggatcacatatagagtggatataattgggacacttgttctttttagttcttctgtaatgatcataatgaaggcctcatag

SEQ ID NO: 191049 - DNA, 921 bp, Saccharomyces pastorianus
atgagttcagtagagagaataaaagaatatacagatataccttccgaatcaaacggctacatatcacctccagctaattggcctcaaacaggagatgttgaactaaaaaacttatcattgcgctattctcctcattcctctaaggcactagataatgtatcattcaaggtaaaagcaggaacaaaagttggtattgttggtagaacaggggctgggaaatcttctattatagcggctatttaccggctttcagactgggaaaacggtacgattactattgataacaaagacataaaacatatccctttagagcgtttaagaaattctataagctgcatcccacaggatcctactttatttgatggaactgttcgatctaatttagatcctttcgatcggtattctgatgtacaaatttatggcgtactatccaaagtgggattaattgaagaatgcgatgaattgtgcttgatttttgagcaagagcagcctaatttttctagtcataaactaagaaatagattcattgatttgaatactgttgtgaaatcaggtggttcaaacttatctcaagggcaaagacaacttttgtgcttggcacgatccatgcttggtgcacgtaatataatgctaattgacgaagcaaccgcctcaatagattatatttctgatgctaaaattcagaaaactataagagaaacaatgaaaaatacaacaattttgactattgctcatcgattaaggtcagtaatagattatgacaaaattctggtgatggaaatgggcagagtcaaggagtatgatcatccatacactctaatatctgatcgaaataccattttttaccgcctctgtaggcagagtggcgagttcgaaaaccttttcgagttggctaaagtctcattcgataataaaagataa

SEQ ID NO: 191050 - DNA, 327 bp, Saccharomyces pastorianus
atgagctcaaatgaagaggtatttactcagataaacgcaactgcgaatgtggttgataataagaagcgtttacttttcgtgcaagatagctcagcacttgttctagggcttgttgcaggatttttgcaaatcgagtcagtccatgggtttatttggttcctgattctgtacaacttgattaatgtcatttacattgtttggatctgtcaacttcaaccaggaaagttctaccaaagcccacttcatgacatttttttcgaatcgttttttagagagataactggttttgtcatggcatggacatttggatacgccctaatcggatga

SEQ ID NO: 191051 - DNA, 4680 bp, Saccharomyces pastorianus
atgtcttcactagaagtggtagatgggtgcccctatggataccgaccatatccagatagtggcacaaatgcattaaatccatgttttatatcagtaatatccgcctggcaagccgtctttttcctattgattggtagctatcaattgtggaaactttataagaacaataaagtaccacccagatttaagaactttcctacattaccaagtaaaatcaacagtcgacatctaacgcatttgaccaatgtttgctttcagtccacgcttataatttgtgaactggccttggtatcccaatctagcgatagggtttatccatttatactaaagaaggctctgtacttgaatctccttttcaatttgggtatttctctccctactcaatacttagcttattttaaaagtacattttcaatgggcaaccagcttttctattacatgtttcaaattcttctacagctcttcttgatattgcagaggtactatcatggttctagtaacgaaaggcttactgttattagcggacaaactgctatgattttagaagtgctccttcttttcaattctgtggcaatttttatttatgatctatgcatttttgagccaattaacgaattatctgaatactacaagaaaaatgggtggtatccccccgttcatgtactatcctatattacatttatctggatgaacaaactgattgtggaaacttaccgtaacaagaaaatcaaagatcctaaccagttaccattgccgccagtagatctgaatattaagtcgataagtaaggaatttaaggctaactgggaattggaaaaatggttgaatagaaattctctttggagggccatttggaagtcatttggtaggactatttctgtggctatgctgtatgaaacgacatctgatttactttctgtagtacagccccagtttctacggatattcatagatggtttgaacccggaaacatcttctaaatatcctcctttaaatggtgtatttattgctctaacccttttcgtaatcagcgtggtttctgtgttcctcaccaatcaattttatattggaatttttgaggctggtttggggataagaggctctttagcttctttagtgtatcagaagtccttaagattgacgctagcagagcgtaacgaaaaatctactggtgacatcttaaatttgatgtctgtggatgtgttaaggatccagcggtttttcgaaaatgcccaaaccattattggcgctcctattcagattattgttgtattaacttccctgtactggttgctaggaaaggctgttattggagggttggttactatggctattatgatgcctatcaatgccttcttatctagaaaggtaaaaaagctatcaaaaactcaaatgaagtataaggacatgagaatcaagactattacagagcttttgaatgctataaaatctattaaattatacgcctgggaggaacctatgatggcaagattgaatcatgttcgtaatgatatggagttgaaaaattttcggaaaattggtatagtgagcaatctgatatattttgcgtggaattgtgtacctttaatggtgacatgttccacatttggcttattttctttatttagtgattctccgttatctcctgccattgtcttcccttcattatctttatttaatattttgaacagtgccatctattccgttccatccatgataaataccattatagagacaagcgtttctatggaaagattaaagtcattcctacttagtgacgaaattgatgattcgttcatcgaacgtattgatccttcagcggatgaaagagcgttacctgctatagagatgaataatattacatttttatggaaatcaaaagaagtattaacatctagccaatctggagataatttgaggacagatgaagagtctattatcggatcttctcaaattgcgttgaagaatatcgatcattttgaagcaaaaaggggtgatttagtttgtgttgttggtcgggtaggagctggtaaatcaacatttttgaaggcaattcttggtcaacttccttgcatgagtggttctagggactcgataccacctaaactgatcattagatcatcgtctgtagcctactgttcacaagaatcctggataatgaacgcatctgtaagagaaaacattctatttggtcacaagttcgaccaagattattatgacctcactattaaagcatgtcaattgctacccgatttgaaaatactaccagatggtgatgaaactttggtaggtgaaaagggcatttccctatcaggcggtcagaaggcccgtctttcattagccagagcggtgtactcgagagcagatatttatttgttggatgacattttatctgctgttgatgcagaagttagtaaaaatattattgaatatgttttgatcggaaagacggctttattaaaaaataaaacaattattttaactaccaatactgtatcaattttaaaacattcgcagatgatatatgcgctagaaaacggtgaaattgttgaacaagggaattatgaggatgtaatgaaccgtaagaacaatacttcaaaactgaaaaaattactagaggaatttgattctccgattgataatggaaatgaaagcgatgtccaaactgaacaccgatccgaaagtgaagtggatgaacctctgcagcttaaagtaactgaatcagaaactgaggatgaggttgttactgagagtgaattagaactaatcaaagccaattctagaagagcttctctagctacgctaagacctagaccctttgtgggagcacaattggattccgtgaagaaaacggcgcaaaaggccgagaagacagaggtgggaagagtcaaaacaaagatttatcttgcgtatattaaggcttgtggagttttaggtgttgttttatttttcttgtttatgatattaacaagggttttcgacttagcagagaatttttggttaaagtactggtcagaatctaatgaaaaaaatggttcaaatgaaagggtttggatgtttgttggtgtgtattccttaatcggagtagcatcggccgcattcaataatttacggagtattatgatgctactgtattgttctattaggggttctaagaaactgcatgaaagcatggccaaatctgtaattagaagtcctatgactttctttgagactacaccagttggaaggatcataaacaggttctcatctgatatggatgcagtggacagtaatctacagtacattttctccttttttttcaaatcaatactaacctatttggttactgttatattagtcgggtacaatatgccatggtttttagtgttcaatatgtttttggtggttatctatatttactatcaaacattttacattgtgctatctagggagctaaaaagattgatcagtatatcttactctccgattatgtccttaatgagtgagagcttgaacggttattctattattgatgcatacgatcattttgagagattcatctatctaaattatgaaaaaatccaatacaacgttgattttgtcttcaactttagatcaacgaatagatggttatccgtgagattgcaaactattggtgctacaattgttttggctactgcaatcttagcactagcaacaatgaatactaaaaggcaactaagttcgggtatggttggtctactaatgagctattcattagaggttacaggttcattgacttggattgtaaggacaactgtgacgattgaaaccaacattgtatcagtggagagaattgttgagtactgcgaattaccacctgaagcacagtccattaaccctgaaaagaggccagatgaaaattggccatcaaagggtggtattgaattcaaaaactattccacaaaatacagagaaaatttggatccagtgctgaataatattaacgtgaagattgagccatgtgaaaaggttgggattgttggcagaacaggtgcagggaagtctacactgagcctggcattatttagaatactagaacctaccgaaggtaaaattattattgacggcattgatatatccgacataggtctgttcgatttaagaagccatttggcaattattcctcaggatgcacaagcttttgaaggtacagtaaagaccaatttggaccctttcaatcgttattcagaagatgaacttaaaagggctgttgagcaggcacatttaaagcctcatctggaaaaaatgctgcacagtaaaccaagaggtgatgattctaatgaagaggatggcaatgttaatgatattctggatgtcaagattaatgagaacggtagtaacttgtcagtggggcaaagacaactactatgtttggcaagagcgctgctaaaccgttccaaaatattggtccttgatgaagcaacggcttctgtggatatggaaaccgataaaattatccaagacactataagaagagaatttaaggaccgtaccatcttaacaattgcacatcgtatcgacactgtattggacagtgataagataattgttcttgaccagggtagtgtgagggaattcgattcaccctcgaaattgttatccgataaaacgtctattttttacagtctttgtgagaaaggtgggtatttgaaataa

SEQ ID NO: 191052 - DNA, 342 bp, Saccharomyces pastorianus
atgtattttgcatttaaaggattatgcgggagaagatttctgcccattgcctcttttcttactatattgaatagaatattattccaatactggcttttttacaattcattaaaagaggaaaagacatttcagaaaattttcttctctatgaaccttaaatgtaggaaaaaaaaggaaccaaaccacatcatttactctcaaccgcctttcttgttggggttcatggtacaattgcaaagttgtgtcaagttgttgccactctatcttttgtttttgttacagggtaatggcgcacattatgcaagcgcgatgacgagcaaggtactttcttttttcctttaa

SEQ ID NO: 191053 - DNA, 381 bp, Saccharomyces pastorianus
atgctttctaggcttattcaacacataacctcaattttcgttttctcattcttttttctttttttttttttctcactaaagcgttgtcctagagatgtaaaaagagaaggaaatgaaatttttactggaaatgttactactattacacaggtttatttagaaagtacaaacgtgtcagcgtatttagggtgtcaatgcaacaatattgaaactatcatttgtcttcagaatagcggcaataccaccatctccgcataccacgtccatatcagtgaaatcggcagtgtcgctttgcaaacagagggcgctctcctcgtctttagtccaattttttgttttcttgtcaaatttgtatatcgtcagcgaattgctctcgtttga

SEQ ID NO: 191054 - DNA, 744 bp, Saccharomyces pastorianus
atgcctttgttagataccttcaagagttttattcaatcaccgacggaatcaaaggtgaaacaggctaccaacgaggacgaaacaagtggagcaacggggacgcttatgaacgaaatatcaatcttgacctacagccccaagacagtacgagaaatcatccaggtaatccggaagcgattgctacttgggcagaacagaagaaattctcatcgaaattgtatccaggtgatgaagacgctgactttggtctcatatctgatgaataacgggtccaatgaattcatcaagtggctgaaaggaaacatgatactaattgagatcctggaggattttcaggttcaggatcctcgggatgaacgtaaggcggaagatattcaaaagctaagcaggaacgttctggggctgctgcaagacgacgggttactagaaaaacaacgcaaggatgtaatacaattccgctcaagcatatcgactccgggcaggaagtccacggacaatagccatttgaagctggaggaaatgagaagcgagctcacgcgacaaagcttagaaaagaaagcaaagcctcccaccaccagcactagcttagatttccagagacaacggacaaggaatacgcacgaatatgcccgattctctttggatcccctggccgaagaagacagtgaagatacgcccggcgtggcgggtggaataagcaagctctcatttagacccaagtcttcaaataacccgttcagatga

SEQ ID NO: 191055 - DNA, 2010 bp, Saccharomyces pastorianus
atgagtaatcctcaaaaagctctaaacgactttctgtccagtgaatctgttcatacacatgatagttctaggaaacaatctaataagcagtcatccgacgaaggacgctcttcatcacaaccttcacatcatcactctggtggtactaacaacaataataacaataataataataataataacagtaacaacaacaacaacggcaacgatgggggaaatgatgacgactatgattatgaaatgcaagattatagaccttctccgcaaagtgcgcggcctactcccacgtatgttccacaatattctgtagaaagtgggactgctttcccgattcaagaggttattcctagcgcatacattaacacacaagatataaaccataaagataacggtccgccgagtgcaagcagtaatagagcattcaggcctagagggcagaccacagtgtcggccaacgtgcttaacattgaagatttttacaaaaatgcagacgatgcgcataccatcccggagtcacatttatcgagaaggagaagtaggtcgagggctacgagtaatgctgggcacagtgccaatacaggcgccacgaatggcaggactactggtgcccaaactaatatggaaagcaatgaatcaccacgtaacgtccccattatggtgaagccaaagacattataccagaaccctcaaacacctacagtcttgccctccacataccatccaattaataaatggtcttccgtcaaaaacacttatttgaaggaatttttagccgagtttatgggaacaatggttatgattattttcggtagtgctgttgtttgtcaggtcaatgttgctgggaaaatacagcaggacaatttcaacgtggctttggataaccttaacgttaccgggtcttctgcagaaacgatagacgctatgaagagtttaacatccttggtttcatccgttgcgggcggtacctttgatgatgtggcattgggctgggctgctgccgtggtgatgggctatttctgcgctggtggtagtgccatctcaggtgctcatttgaatccgtctattacattagccaatttggtgtatagaggttttcccctgaagaaagttccttattactttgctggacaattgatcggtgccttcacaggcgctttgatcttgtttatttggtacaaaagggtgttacaagaggcatatagcgattggtggatgaatgaaagtgttgcgggaatgttttgcgtttttccaaagccttatctaagttcaggacggcaatttttttccgaatttttatgtggagctatgttacaagcaggaacatttgcgctgaccgatccttatacgtgtttgtcctctgatgttttcccattgatgatgtttattttgattttcattatcaatgcttccatggcttatcagacaggtacagcaatgaatttggctcgtgatctgggcccacgtcttgcactatatgcagttggatttgatcataaaatgctttgggtgcatcatcatcatttcttttgggttcccatggtaggcccatttattggtgcgttaatgggggggttggtttacgatgtctgtatttatcagggtcatgaatctccagtcaactggtctttaccagtttataaggaaatgattatgagagcctggtttagaaggcctggttggaagaagagaaatagagcaagaagaacatcggacctgagtgacttctcatacaataacgatgatgatgaggaatttggagaaagaatggctcttcaaaagacaaagaccaagtcatctatttcagacaacgaaaatgaagcaggagaaaagaaagtgcaatttaaatctgttcagcgcggcaaaagaacgtttggtggtataccaacaattcttgaagaagaagattccattgaaactgcttcgctaggtgcgacgacgactgattctattgggttatccgacacatcatcagaagattcgcattatggtaatgctaagaaggtaacatga

SEQ ID NO: 191056 - DNA, 351 bp, Saccharomyces pastorianus
atgctacagtatataccactctcaaacttaccctactctcacattccactccatcacccatctctcaccatcagtaccaaatgcactcgcatcattatgcacggcacttgcctcagcggtttataccctgtgccatttacccataaagtccatcattatccacattttaatatctatatctcattcggcgaccccaaatattgtataactgcccttaatacatacgttataccacttttgcaccatatactaaccactcaatttatacacacttatttcaatatacccacaaaatcaccaccaaaatcacctaaacataaaaattatttatctttcaactttacgaaataa

SEQ ID NO: 191057 - DNA, 615 bp, Saccharomyces pastorianus
atgggtgcctacaaatatttggaagaattgcaaagaaagaagcaatctgatgttttgagattcttgcaaagagtcagagtctgggaatacagacaaaagaatgtcattcacagagccgctagaccaactagaccagacaaggctagaagattgggttacaaagctaagcaaggtttcgttatctaccgtgtcagagttagacgtggtaacagaaagagacctgttccaaagggtgctacttacggtaagccaactaaccaaggtgtcaatgaattgaaataccaaagatccttgagagctaccgctgaagaaagagttggtcgtcgtgccgctaacttgagagtcttgaactcctactgggttaaccaagattctacttacaagtacttcgaagttatcttggtcgaccctcaacacaaggctatcagaagagatgctcgttacaactggatctgtgacccagttcacaagcaccgtgaagctagaggtttgactgccactggtaagaaatccagaggtatcaacaagggtcacaaattcaacaacaccaaggctggtagaagaaagacctggaagagacaaaacactttgtccttgtggagatacagaaaataa

SEQ ID NO: 191058 - DNA, 792 bp, Saccharomyces pastorianus
atggaaggtgaacaaattatggagtatgttcaagagacaccgatcattccaaaaaggattatccattattcgattccaaaacaaatgatcacaaagcccgctccccatgtcgagatgacgttggtagctaatacttttcgggacatggacttgccgcagcatccggttatccatgattgttggcaaaataaagagtactcaactcaaagatattcaggaaatgtggctcaacagagattaagttttgaggaacatccaaatgaagagtgtcaaaattctgttgggttaatcaagagagtgagtactttctttaaaaagaggccattgtctcgaaagaatagcataaagtcaatcggtgacgtaaaatcggaggcacgtaaccggggagaaggcctcctgggtgaagttgataatcttaacgagcagaatgtccgagaaaacctgactagtgaacatgaaaagagtcctgaaggagattccaaaaggtatggcctgttctcctttgaagagaccccccctatacaagtgttggagcagggcaatatcaattctgagctttcttcatttaaaaacacttctttggcggaaaacaaacgctcttctgacagcttcgtttcgttaaaaccgggtgaagatgaacatagccctttagagattagtacgtgtggtaatttgactgaaagagaggatttgcaatctggcgaagaacggtttgactcagcagcccaaaatataaaggtagcttcgatgaaggaaaaaaaaaaaatcttcaaagggaacaaaacagattaa

SEQ ID NO: 191059 - DNA, 378 bp, Saccharomyces pastorianus
atgaatttattcttcgtcttcttcttcgtcttcttctggagtgacttggtagaaggccaatctgtattcgttggtcttggtagagacaaatctgatccagtctctcaattggttcttcttcaagtacttctttgtcaagtacttcaagtacttaccagagaacttggcagtggaaacaacagtaacaacggtaccatcttcagtgacagtgacagcgttacccaagttaccgacagcaccttcgaccttgatgtggtcgatcaagtacttagcgtaggaagctgggtcgaagacaccgttttcagttggagaagagacatcgacggtaaaggtcttggcaatcttttgctttctggaagtctatatcaaaaaaattaa

SEQ ID NO: 191060 - DNA, 1947 bp, Saccharomyces pastorianus
atgatgttggagccttcacctccacctttaacaacaacggtaacaccctcccttccgtccagtttaaagaaatctgtgacagataatgaccagaataataacaacgtgcccaggaagagaaaactagcatgccagaattgccgtagaagaagaaggaaatgtaacatggaaaagccttgttcaaactgtatcaagtttcgtaccgaatgtgtattcactcaacaagacttaaggaacaaaagatattctacgacttacgtagaagctttacagagccagattcggtctttgaaagaacagttgcaaatattaagttcctcgtcttccacaattgctagcaatgctctctcctcgttaaaaaacaacagtgatcatggtgatgctcctaatgaaaaaatcttaaagtatggcgaaacagcacaatcagcactaccatcatctgaaagcaacgatgagaatgagtctgatgcgttcaccaagaaaatgccttccgagagccctccaccagttggcacaaatagtatatatccatcaaattccttgtctataataaaaaagaagacggatggaagcacaagatatcagcaacagcaggtcagcctaaaaaatttatcaagaagtccccttatcttaagatcgttgtcactctttttcaaatggctatacccgggacattaccttttcattcatagagaaactttcttaagtgctttcttcggtgatactaacactaaaagttactattgttccgaagaattggtatttgcaatcgctgcattgggatctttgatttcatacaaatcagaaactgagctttttcaacaatctgaagtgttttatcaaagagccaagacgatagtactcaaaaaaatttttcaactggaagattcttcgttagctgaatcgtcgtcctcttcgaaattagcaatcatccagactctattgtgtttggcattttatgacattggaagcggagaaaaccccatggcttggtatctttctgggctggcatttaggattgcccacgaaatcggcctacatttgaatccagaagcatggagtaatgtttatgaagacgagctgtcaataatggattttgaagtgagaagtagaatttattggggctgctacattgctgatcatttaatagcgatcctctttggaagatcaacttccttgcgtttgtccaattccactgttccagaaacagacgagctacctgaaattgagactggtatagaggagtacatatatgacccaaaagtaatattgtccactgcaaaccccttgaagaaactgattgtgttatcgagaataacggagatttttgcatccaagattttcagcccaaacgaaactctacttcaaaggagtgaatacttggccaaatttaatctggaggtatacaattggagaagggatttgccccctgaactacaatggaccaagaggtcattgatggaaatgacagattttaacccaaccatagcttacgtatggtttcattactatatcgtgctaatttcctataataaacctttcatatacgaaatcaaacaaagccgggaattggttgaaggttatgttgatgaactgtattatcttttaaaagtttggaaaaataaatttaagacgtttgagaaggccacaatttacatgatttattctgcgattttagccatccaatgcatgaagtccaacttgattaaaaaggatagaaaacaagacttcttaaattttttaagtgcgcctaccctgaattacgaacttgctagaaaattcatagaaaactctgaagatgctttgcataattcagaaactatggatttattagggactctatctcacggtaacgattttgccttagagtacaattttgactttactttattgaatgagattgatatgctgattggtggaaacaccaatgatggtttgtcgaagtaa

SEQ ID NO: 191061 - DNA, 264 bp, Saccharomyces pastorianus
atggcagatagcgaggatacctctgtgatcctgcagggcatcgacacaatcaacagcgtggagggcctggaagaagatggttacctcagcgacgaggacacgtcactcagcaacgagctcgcagatgcacagcgtcaatgggaagagtcgctgcaacagttgaacaagctgctcaactgggtcctgctgcccctgctgggcaagtatataggtaggagaatggccaagactctatggagtaggttcattgaacactttgtataa

SEQ ID NO: 191062 - DNA, 1215 bp, Saccharomyces pastorianus
atgggaagtttgttgagaccggttgatctggtaaatcaaccgcttggattccaagaaagatataaaattttgcagaaattattcaagcagctacaaaaggcatatgcacacacaaaaggaactaatattgaccttgaaagacttgccactcgcttagaagtccatgttgctaaaaacagcttgtctggtcagagttacaagtttaacatgagcattttactgcgggatgtgcttaaatataaaggagatctctcgaagatcaaaattaatgggcgcccccttaaaggagctaagcctcatttatcctcaattggtaatgcaaactctatcactacaaaatcaaaagcgatggaagctttaaaggctctgattttggattcgaaggtcttagagaaaaatgggtatattgttaaggaaatgcaaaataaaactaatgatgacaatagtacgcaactgtatgcaccttgtttgcgttgcagctcaaatttcaaaaaaacagacatcatggaaaagactctatgtaggtatcaccctttgaaaagaatatacaacagagataccaagaaccatcagtatccatgctgtggtgaaactactgattccgtttcttttctaaggctaggatgcaagacgttttttcaccatgtgtttagaggagaatcatatgacgagttatgcaaaatttcgaagttttctagtacagatgacattgatggtgttgagaatgttctttctcttgactgtgaaatggcttttacatcattgggctatgagatgatacgtttaacaattgtggattttttcaccggcaagacactatttgatcatgtaattcagccaataggggatattgtcgatctgaattcagacttcagtggtgtccatgagattgaccgaaccaattgcccgacgtacaaggaggcacttgatgtttttttatccgaaaacttaataaataaaaatagtattcttatagggcacggactagagaacgatctgaacgtcatgaggctatttcataataaggttatagatactgcaatactttattcaagaacaaagtttaaggtttctttgaagaacttagcgtttgaagttttgagtagaaaaatccaaaatggcgagcatgatagttctcaagatgcaatagcaacgatggacgttgttaaagtcaaaataggtatttctccaagtcaaaacaagtgggaaaaataa

SEQ ID NO: 191063 - DNA, 1932 bp, Saccharomyces pastorianus
atgtggaaattcaacaaaaagctcgcccgtcttacttaccgtctttattcaagctcaggcccaagctcgccccttcatgggaagaagaaactgccgcaaaatctgaaattcgtcgtcttgaaccctacccaatctgggctagtgaaaaatgatcagaagcagcctagacacaggccgtctaagaaacgtagccataaggaaactggagataacaacctcgatttcggctcgaaactccttgtcttcgaaaagcagaattcactagattccgcattgaactccatccgattgaagaaaccgacaagcgccagtctgccctccctggaatacaatgcccttctccaatcgcttacatcaagctacaatcgctaccaactgcgcgagttcatctccacacatcagccagactcctcttcacatctgacgcactggaagaaaagcaagctgtcccaatatataattgaaaaaatctggaattgccaaccaatttcaacacccaccactcccacaggcatcaagtccacatcattgactttccagttcgattctcctagagaaattttccttttactcatcactcaaaatggtaaaatactcaccaacttcaataagctcgggctgacattcatcatctccattcaggataacgaattgaccgtcaagggttcgcctagcttgctcaaatacgcagaaatatccttaaacaaaatatggtcaaacatcactcatgaaaatgtgcgtatgtattccctcatgccatcaaaagacgtcatcaaccttattcagaaggaaactcacactttttttgaatacctcccggacttgcaaatgtacaagatttcagccctaagcaccaagaaaatatccatggccaaagtctttttattaaatgccgtcgcttctaatcctaacacaactcaacaccaccacacaatagcctcaccagcactcaagacagaactctatccgttcaacaatactctagagaacttggactggctaaacaagtcacaagattgggcaagattacagtcagttgtccctaaaaattgcacagatctgatgactcccactgaaaacgccacaccagaattgacagatgcgcaggtcagccaattcgaatcttccttgtctaaaaatataccatctctctccccttccgactctatttcccaatctttatcaataacgctaggtcactccttacagtccgcgtctttttctagtattttccaacctctaatacataagagttttatttcaaaattactgaatctaccaatgtacaaagaatcatcatcatcagccgtacctgtgcctgtgcctcttgatcaacatctaataacaaatgcgcatcaatccttcatacagctgaacttcactcctgtgccgcccacctctggctcctcctcgtccccttttttgcagatttggttcgagattgacgaattcgataacattgttaccacctcaatgaggcctcttttgaaattacaagaaaattctgttatcttaagaactccacaatgccagacagactataagatcacgtcagattacattcaagatcttttacctgatttcgaccagaccaatccggatgcttggttatctgaacaaaaaggcctccaagaatttcttctcaagtcacactggaagttaaacaaatatcagaatcttatgaaaaaaatcaacatttctttaccagataacctaatacagcaataccaattgactgatgttttgacccatcgtgtcttgaatttacgatttcctacgaacactgcccaagatgataaatacatcattcaatattcagatatcagccgcggatttttgaacaatggctcctacagacaattagatttcatcaatgtgaaccccagtgaaacctcactaaaaacctttatcaatgatgttttaagcttttaa

SEQ ID NO: 191064 - DNA, 327 bp, Saccharomyces pastorianus
atgcttactctatattttctccagtgccttcaagctccgtatatattatgtactagttttattacattaaagatacataactttttttttttttttcagttcactgaaataagaaaaggcgggcgaggtgaaaaacaaaaaaaaaagtatagagaaacagaagtggaagaagagctaggaaagcacagcgcatacgacggtcacctaggatggagcaccaacaattgcggaagtacgtcgaattgtacaataaggaggtcgaggaattctacaatggtgccgcgtcaggccgcccagctgagttccatccttccaaagtacatgtaa

SEQ ID NO: 191065 - DNA, 1431 bp, Saccharomyces pastorianus
atgatagcttccaaaagctccttattagttactaaatcgcgcataccctctctatgctttcctttgataaagaggtcctatgtgtcaaagactccgacacactctaacacggctgctaatctgatggttgaaactccggccgccaatgccaacggcaatagtgtgatggcacctcctaactcaatcaattttctacagacacttcccaagaaggaactattccaactgggattcatcggtattgcgaccttgaacagcttcttcctgaacacgatcattaagttgttcccttacatccccatcccagtaataaaattcttcgtctcttctttatactgtggcggtgagaactttaaagaggtcatcgaatgcggcaaacgtctgcagaagagaggtatatcgaacatgatgctttcattaactattgaaaattccgaaggtacaaagagtttgtccagtactccagtagaccaaattgtcaaggaaacaatcagctctgtccacaacatcctactgcccaatattattggccagctggaatctaagccaatcaatgacattgctccaggttatatcgctctaaaaccctctgctttggtcgataaccctcacgaggttctgtacaatttcagtaatcccgcctacaaggctcaaagggatcagctgatcgagaactgctctaagattacaaaagagatttttgaactaaatcaatctttgttaaagaagtaccctgaaagaaaggccccatttatggtttccactattgacgctgagaagtatgatttgcaggagaatggtgtttacgaattacagagaatcttatttcaaaaattcaatcccacttcatctaaactgatatcatgtgtcggtacttggcagttgtacctaagggactctggtgaccatattttgcacgaattgaagctggcccaagaaaacggctataagcttgggctgaaactggttcgtggtgcttatattcattctgaaaaaaaccgtaaccaaattatctttggcgataaaacgggcactgacgaaaattacgatcgtatcatcactcaagttgtcaatgatttaatcatcaatggcgaggattcttattttggtcacttggttgtcgcctctcataattaccaatcccaaatgctcgttactaatttgctaaaatctacccaagacaactcttatgccaaatcgaacattgtgttggggcaattactaggtatggcagataatgttacctatgacctaattaccaaccatggcgctaaaaacataatcaagtatgtcccatggggcccaccattggaaactaaagattatcttttgagaagattgcaagaaaacggggatgctgtgagatctgataatggctggccattaatcaaggccatagcaaagtcgattccaaaaagagtaggcctatga

SEQ ID NO: 191066 - DNA, 2340 bp, Saccharomyces pastorianus
atgtgttacagtaggcaagccattcctccacctgttcctaatagacctggcggtactaccaatagaggacctcctcccttaccacctcgcgcaaatgttcagccaccagtttgttcttctgagaactccagtaaacctcgagaaaatagggtggcaggtgaatcactgcgcacaccaagcagttctaaccctttagctgacagccaggtgaatagtgacaatatttttcaatcacctgtcctttctaacttaaaagctcctccttccgtcttcaacaaagttcaacacccggtaccaaagccgaatattgatgatcaatctgttgatccattggagacaaacaagttctacacaaacatgttattagacgataatacacaacctatatggacacatccttattcaatttggttttctcgtgatccagaattgtttggtttggccgccaatcatactttagcgtctcaaagggtttttgatacaactacaaatcctcccagattctacttcaatcccacaaatataaaatcatttgtattcaaggccagggaatttgtctcttcaaatgatatcaagcttgaattccgggatatgaaacatatgtccatgtgcttactaatgtctttgagtagttcccagtttatagaattcccgctggttcaggggatgggctttgtcacggctatttaccacgatttgggttttgaattaagaagcgccgttggtttcaggagcttagagcgcataagcgtgaatgaaagatatggtaaatataatatacaacttgagaataataggaattggatactttatttgacctcacctgattactcttttccacaagattttcaaatttcattactcgacagcaatacaataatatcatctcataaaatcaatggtcttatctgtcaattatctgcagactccgtccccagtattgacatggcagcgggctgttatccagtatactgtgacctatcagggcaaactgttgatgaacatttcacaaattacagatttaactatacggttgcaggctactcgcagtctggaactactctaatgtatgctttaccacatcataaagcggcattcacaccagaaatgcaggaacgtgaaattgcctcaagcctggattccacagttaaaggcttaatgactggttatctcacaaacagttttgatatgcaggttcaagtacctcaagaattgggctttgaacctgtcgcgttatctttgaataagaaggcagattacagtcaagaaaagctatctaaaattcgggaagctgctgttcaagaagttcaattgagtgaccctcaacaagaatcaaacatagattctatgtatttctctggtaagatacttgcaaagtatgcgtggattctttatgtgacacattacatccttcatgatgaaaatttaacaaaagaattattatctaaactgactattgcaatggagagattcatcagcaatcagcaagtcttacctttaaattacgacgttagttggaaaggcataatttcatcaggctcttctagccaagactttggtaactcttattataatgatcatcattttcattactcttatcatgtcataacggctgccattatctctttagtcgattctgatttaagtggagttactaacaactcctggttagaaaataatagagattgggttgagtgcttaattagagattactctggtgttgacaacgatgatccgtacttccctcaatttaggtcatttgattggtttaatggccattcatgggccaaaggactatttccaagtggtgacggtaaagatgaagaatctacttcagaagatgtcaattcttgctatgcgataaaattgtgggggttggtaactggaaattctaagttaactgacatagcgaacttacaactcggcatcatgagaaatgttttccagagctacttcctatacgaaagcaataatactgtccaaccgaaagaatttattggtaataaagttagtggtattttattcgaaaataaaattgatcacgccacgtattttggcatggagcctcaatacattcatatgattcacgccattcctataacatcagcatcttcatgggtcagaacaccaaattttgtcaaagaggagtgggaagaaaaaatgcagccgataattgatcaagtgaatgacggttggaaaggaataatcatgttaaatatggctctgcttgatccaaaattttcgtacgactttttcagccaacctgatttcaacagaaatttcctagacaatgggcaaagcttaacttggtctttagcttattcaggtgctttttcttag

SEQ ID NO: 191067 - DNA, 606 bp, Saccharomyces pastorianus
atggatgagatggataatgtgatacgatctctggagcaagaatatcggttaatattgctcttgaaccataggaacaaaaatcaacatagagcggctagctggtatggatcgttcaatgagatgaaaagaaattgtggacaaataataacgctttttagctcgagaagattacaagccaaacgccttaaagatgttgaatgggtcaagttgcacaggctattacagagagcactttttagacagttaaagagatggtactggcagttcaatggcgtaattgcgctgggacaatttgtaacgttgggttgtacactagtaacattgctggcaaatgtgagggcactgtatatgagattatgggagattaatgaaactgagtttataagatgtggatgcttaataaagaacttaccgagaacaaaagcaaaatcggttgtgaacgatgtcgaagaacttggagaaattatagatgaagatattggcaacaacgttcaagaaaacgaactagtgataacgtctataccaaagcctctgacagagaactgtaagaagaaaaagaaaaggaaaaagaagaacaaatcagccattgatggcatattcggataa

SEQ ID NO: 191068 - DNA, 150 bp, Saccharomyces pastorianus
atgtggagacgtcggcgcgagccctgggaggagttatcttttcttcttaacagcttatcaccccggaattggtttatccggagatggggtcttatggctggaagaggccagcacctttgctggctccggtgcgcttgtgacggcccgtga

SEQ ID NO: 191069 - DNA, 375 bp, Saccharomyces pastorianus
atgcgagattcccctacccacaaggagcagagggcacaaaacaccatgtctgatcaaatgcccttccctttcaacaatttcacgtactttttcactctcttttcaaagttcttttcatctttccatcactgtacttgttcgctatcggtctctcgccaatatttagctttagatggaatttaccacccacttagagctgcattcccaaacaactcgactcttcgaaggcactttacaaagaaccgcactcctcgccacacgggattctcaccctctatgacgtcctgttccaaggaacatagacaaggaacggccccaaagttgccctctccaaattacaactcgggcaccgaaggtaccagatttcaaatttga

SEQ ID NO: 191070 - DNA, 165 bp, Saccharomyces pastorianus
atgctcttactcaaatccatccgaagacatcaggatcggtcgattgtgcacctcttgcgaggccccaacctacgttcactttcattacgcgtatgggttttacacccaaacactcgcatagacgttagactccttggtccgtgtttcaagacgggcggcatataa

SEQ ID NO: 191071 - DNA, 186 bp, Saccharomyces pastorianus
atggtttgtattcacactgaaaatcaaaatcaagggggcttttacccttttgttctactggagatttctgttctccatgagccccccttaggacatctgcgttatcgtttaacagatgtgccgccccagccaaactccccacctgacaatgtcttcaacccggatcagccccgaatgggaccttga

SEQ ID NO: 191072 - DNA, 204 bp, Saccharomyces pastorianus
atgccccctggaataccaaggggcgcaatgtgcgttcaaagattcgatgattcacggaattctgcaattcacattacgtatcgcatttcgctgcgttcttcatcgatgcgagaaccaagagatccgttgttgaaagtttttaatattttaaaatttccagttacgaaaattcttgtttttgacaaaaatttaatgaatagataa

SEQ ID NO: 191073 - DNA, 141 bp, Saccharomyces pastorianus
atgctcttgccaaaacaaaaaaatccattttcaaaattattaaatttctttaatgatccttccgcaggttcacctacggaaaccttgttacgacttttagttcctctaaatgaccaagtttgtccaaattctccgctctga

SEQ ID NO: 191074 - DNA, 1089 bp, Saccharomyces pastorianus
atgagatctttaaatacccttttactttctctctttgtcgcaatgtccagtggtgctccactactaaaaattcgtgaagagaagaattcttctttgccatcaatcaaaatttttggtaccggcggtactatcgcttccaagggttcgacaagtgcaacaacggcgggttatagcgtgggattaaccgtaaatgatttaatagaagccgtcccatctttagctgagaaggcaaatctggactatcttcaagtgtctaacgttggttcaaattctttaaactatacgcatctgatcccattgtatcacggtatctccgaggcactagcctctgatgactacgctggtgcggttgtcactcatgggaccgacactatggaggagacagctttcttcttagatttgaccataaattcagagaagccagtatgtatcgcaggcgctatgcgtccagccactgccacgtctgctgatggcccaatgaatttatatcaagcagtgtctattgctgcttctgagaaatcactgggtcgtggcacgatgatcactctaaacgatcgtattgcctctgggttttggacaacgaaaatgaatgccaactctttagatacattcagagcggatgaacagggatatttaggttacttttcaaatgatgacgtggagttttactacccaccagtcaagccaaatggatggcaattttttgacatttccaacctcacagacccttcggaaattccagaagtcattattctgtactcctatcaaggcttgaatcctgagctaatagtaaaggccgtcaaggacctgggcgcaaaaggtatcgtgttggcgggttctggagctggttcctggactgctacgggtagtattgtaaacgaacaactttatgaagagtatggtataccaattgttcacagcagaagaacagcagatggtacagttcctccagatgatgccccagagtacgccattggatctggctacctaaaccctcaaaaatcgcgtattttgctacaattatgtttgtactccggctacggcatggatcagattaggtctgttttttctggcgtctacggtggttaa

SEQ ID NO: 191075 - DNA, 345 bp, Saccharomyces pastorianus
atgaagttccaatatgcgttggccaaggaacagctaggcagcaactcgcgcagtggcgtcaaaaaactaataagtaaacaccactggcttccggaatactatttctctgatctctcattttctgttgtacagcagtgggacagtagagccattgaaaaaactacaatcatatcttgtatgcggcccgcaaaccaagagatttatcctttgagacattgtgagaccctccgttcgcaaccgtgctctctgttttcatcactatatgcacgctctttccaaagctcctgcactttgcacgtggcggagccatcgcccggcttccatatgtacggctgccacacctaa

SEQ ID NO: 191076 - DNA, 5269 bp, Saccharomyces pastorianus
atggaatcccaacaattatctcaacattcacccatttctcatggtagcgcctgtgcttcggttacttctaaggaagtccacacaaatcaagatccgttagacgtttcagcttccaaaacagaagaatgtgagaaggcttccactaaggctaactctcaacagacaacaacacctgcttcatcagctgttccagagaacccccatcatgcctctcctcaacctgcttcagtaccacctccacagaatgggccgtacccacagcagtgcatgatgacccaaaaccaagccaatccatctggttggtcattttacggacacccatctatgattccgtatacaccttatcaaatgtcgcctatgtactttccacctgggccacaatcacagtttccgcagtatccatcatcagttggaacgcctctgagcactccatcacctgagtcaggtaatacatttactgattcatcctcagcggactctgatatgacatccactaaaaaatatgtcagaccaccaccaatgttaacctcacctaatgactttccaaattgggttaaaacatacatcaaatttttacaaaactcgaatctcggtggtattattccgacagtaaacggaaaacccgtacgtcagatcactgatgatgaactcaccttcttgtataacacttttcaaatatttgctccctctcaattcctacctacctgggtcaaagacatcctatccgttgattatacggatatcatgaaaattctttccaaaagtattgaaaaaatgcaatctgatacccaagaggcaaacgacattgtgaccctggcaaatttgcaatataatggcagtacacctgcagatgcatttgaaacaaaagtcacaaacattatcgacagactgaacaataatggcattcatatcaataacaaggtcgcatgccaattaattatgagaggtctatctggcgaatataaatttttacgctacacacgtcatcgacatctaaatatgacagtcgctgaactgttcttagatatccatgctatttatgaagaacaacagggatcgagaaacagcaaacctaattacaggagaaatctgagtgatgagaagaatgattctcgcagctatacgaatacaaccaaacccaaagttatagctcggaatcctcaaaaaacaaataattcgaaatcgaaaacagccagggctcacaatgtatccacatctaataactctcccagcacggacaacgattccatcagtaaatcaactactgaaccgattcaattgaacaataagcacgaccttcaccttaggccaggaacttactgaatctacggtaaatcacactaatcattctgatgatgaactccctggacacctccttctcgattcaggagcatcacgaacccttataagatctgctcatcacatacactcagcatcatctaatcctgacataaacgtagttgatgctcaaaaaagaaatataccaattaacgctattggtgacctacaatttcacttccaggacaacaccaaaacatcaataaaggtattgcacactcctaacatagcctatgacttactcagtttgaatgaattggctgcagtagatatcacagcatgctttaccaaaaacgtcttagaacgatctgacggcactgtacttgcacctatcgtaaaatatggagacttttactgggtatctaaaaagtacttgcttccatcaaatatctccgtacccaccatcaataatgtccatacaagtgaaagtacacgcaaatatccttatcctttcattcatcgaatgcttgcgcatgccaatgcaccgacaattcgatactcacttaaaaataacaccatcacgtattttaacgaatcagatgtcgactggtctagtgctattgactatcaatgtcctgattgtttaatcggcaaaagcaccaaacacagacatatcaaaggttcacgactaaaataccaaaattcatacgaaccctttcaatacctacatactgacatatttggtccagttcacaacctaccaaatagtgcaccatcctatttcatctcatttactgatgagacaacaaaattccgttgggtttatccattacacgaccgtcgcgaggactctatcctcgatgtttttactacgatactagcttttattaagaaccagtttcaggccagtgtcttggttatacaaatggaccgtggttctgagtatactaacagaactctccataaattccttgaaaaaaatggtataactccatgctatacaaccacagcggattcccgagcacatggagtcgctgaacggctcaaccgtaccttattagatgactgccgtactcaactgcaatgtagtggtttaccgaaccatttatggttctctgcaatcgaattttctactattgtgagaaattcactagcttcacctaaaagcaaaaaatctgcaagacaacatgctggcttggcaggacttgatatcagtactttgttacctttcggtcaacctgttatcgtcaatgatcacaaccctaactccaaaatacatcctcgtggcatcccaggctacgctctacatccgtctcgaaactcttatggatatatcatctatcttccatccttaaagaagacagtagatacaactaactatgttattcttcagggcaaggaatccagattagatcaattcaattacgacgcactcactttcgatgaagacttaaaccgtttaactgcttcatatcattcgttcattgcgtcaaatgagatccaagaatccaatgatcttaacatagaatctgaccatgacttccaatccgacattgaactacatcctgagcaaccgagaaatgtcctttcaaaagctgtgagtccaaccgattccacacctccgtcaactcatactgaagattcgaaacgtgtttctaaaaccaatattcgcgcacccagagaagttgaccccaacatatctgaatctaatattcttccatcaaagaagagatctagcaccccccaaatttccaatatcgagagtaccggttcgggtggtatgcataaattaaatgttcctttacttgctcccatgtcccaatctaacacacatgagtcgtcgcacgccagtaaatctaaagatttcagacactcagactcgtacagtgaaaatgagactaatcatacaaacgtaccaatatccagtacgggtggtaccaacaacaaaactgttccgcagataagtgaccaagagactgagaaaaggattatacaccgttcaccttcaatcgatgcttctccaccggaaaataattcatcgcacaatattgttcctatcaaaacgccaactactgtttctgaacagaataccgaggaatctatcatcgctgatctcccactccctgatctacctccagaatctcctaccgaattccctgacccatttaaagaactcccaccgataaattctcgtcaaactaattccagtttgggtggtattggtgactctaatgcctatactactatcaacagtaagaaaagatcattagaagataatgaaactgaaattaaggtatcacgagacacatggaatactaagaatatgcgtagtttagaacctccgagatcgaagaaacgaattcacctgattgcagctgtaaaagcagtaaaatcaatcaaaccaatacggacaaccttacgatacgatgaggcaatcacctataataaagatattaaagaaaaagaaaaatatatcgaggcataccacaaagaagtcaatcaactgttgaagatgaaaacttgggacactgacgaatattatgacagaaaagaaatagaccctaaaagagtaataaactcaatgtttatcttcaacaagaaacgtgacggtactcataaagctagatttgttgcaagaggtgatattcagcatcctgacacttacgactcaggcatgcaatccaataccgtacatcactatgcattaatgacatccctgtcacttgcattagacaataactactatattacacaattagacatatcttcggcatatttgtatgcagacatcaaagaagaattatacataagacctccaccacatttaggaatgaatgataagttgatacgtttgaagaaatcactttatggattgaaacaaagtggagcgaactggtacgaaactatcaaatcatacctgataaaacagtgtggtatggaagaagttcgtggatggtcatgcgtatttaagaatagtcaagtaacaatatgtttatttgttgacgacatgattttattcagcaaagacttaaatgcaaataagaaaatcataacaacactcaagaaacaatacgatacaaagataataaatctgggtgaaagtgataacgaaattcagtacgacatacttggcttagaaatcaaatatcaaagaggtaaatacatgaaattaggtatggaaaactcattaactgagaaaatacccaaattaaacgtacctttgaatccaaaaggaagaaaacttagcgctccaggtcaaccaggtctttatatagaccaggatgaactagaaatagatgaagatgaatacaaagagaaggtacatgaaatgcaaaagttgattggtctagcttcatatgttggatataaatttagatttgacttactatactacatcaacacacttgctcaacatatactattcccctctaggcaagttttagacatgacatatgagttgatacaattcatgtgggacactagagataaacaactgatatggcacaaaaacaaacctaccgagccagataataaactagtcgcaataagtgatgcttcgtatggcaaccaaccgtattataaatcacaaattggcaacatatatttacttaatggaaaggtaattggaggaaagtccaccaaggcttcattaacatgtacttcaactacggaagcagaaatacacgcgataagtgaatctgtcccattattaaataatctaagttacctgatacaagaacttaacaagaaaccaattattaaaggcttacttactgatagtagatcaacgatcagtataattaagtctacaaatgaagagaaatttagaaacagattttttggcacaaaggcaatgagacttagagatgaagtatcaggtaataatttatacgtatactacatcgagaccaagaagaacattgctgatgtgatgacaaaacctcttccgataaaaacatttaaactattaactaacaaatggattcattag

SEQ ID NO: 191077 - DNA, 165 bp, Saccharomyces pastorianus
atgatagttgatttctattccaacactttgagacattgtgagaccctccgttcgcaaccgtgctctctgttttcatcactatatgcacgctctttccaaagctcctgcactttgcacgtggcggagccatcgcccggcttccatatgtacggctgccacacctaa

SEQ ID NO: 191078 - DNA, 357 bp, Saccharomyces pastorianus
atgcagcacacgcttacccggaccgcctctctgccagaacgctcgagcagcgcccacagcgccgctactgcgttacccgcacttcgccgcccgccagacagctgcgagactctcgtcccgctactgtgtatcttttggttcgtcttcgttagtatgagcccgctcccgccggctcgtgccaacaaatcagacaacaaaggcttaatctcagcagatcgtaacaacaaggctactctactgcttacaataccccgttgtacatccaagtcgtatacaaatgatttatccccactcaaaatgacattgctatccgccggcaagcacccaaggcctttccgccaagagcaccgttgctag

SEQ ID NO: 191079 - DNA, 822 bp, Saccharomyces pastorianus
atgagacatggctttatatacagacagggtattctggcgtactattatgtgttcgatgccatcgagcaagagatagatcgcctactgaatgaccccgtaacggaggaggagctgcaaacttcgaccattctgaagcagttttggctcgaagattttagaagatctacgcagatctataaggacctgaagctgctatactcaaacacgtttaaaagcacagaatcattaaacgaattcctggctacgttccagaagccaccgctactacagcagtttatcaataacatccacgaaaacatacacaaggagccatgcaccattctttcttactgtcacgttctgtacttggcgcttttcgccggcggcaagctaatacgatcgaatttgtacagaagactggggctcttccccaacttcgagaagctatcacagaaggaactggtcaaaaagggcacaaacttcttcaccttcagcgatctgggtcccactgaagaaacacgcttgaaatgggaatacaagaagaactatgagctggccaccaggacggaattgaccgaagcacaaaagttgcagatcattagcgtcgcagaaggcatttttgattggaacttcaacatcgttgcagaaattggagagttgaatcgtcgcgagttaatgggcaagttcagcttcaagtgtattacgtacttgtacgaagaatggatgttcaacaaggattctgctactagaagagcactccacacggtcatgctgctggtgctttctattatcgcgatctgggttctttacttcttggtaaagagttttcttagcatagtataa

SEQ ID NO: 191080 - DNA, 2502 bp, Saccharomyces pastorianus
atgataacactcttattatacctgtgcgtaatatgtaacgcaatagtgttaataagggctgattcgatagcggacccttggcctgaagcgcgacatctactaaataccatagctaagtccagagacccaatgaaagaagctgctatggaacccaatgcagatgaatttgttggattctatgtaccgatggattattccccacgtaatgaggaaaaaaactaccagagcatttggcaaaacgaaatcacagattctcaacgtcatatttatgaattacttgtacaatcaagtgaacaattcaacaactcagaagcaacatatacacttagccagattcacctttggagtcaatataatttcccgcataatatgactttggcacacaaatacttagaaaaattcaatgatctaacccacttcaccaatcattcggccatcttcgacttagctgtgatgtatgccactgggggatgtgcttctggtaatgatcaaaccgtgatccctcaggattctgctaaagcactgctatattaccaaagggctgcccaactagggaatttaaaggctaagcaagtgctagcttataaatactattctggcttcaatgtcccacgaaattttcataaatctttagtattgtacagggacattgctgaacagctgagaaagtcgtactccagggacgaatgggatattgtcttcccctattgggaaagttacaacgtgagaatatcggattttgagagtggcctattaggtaaaggtttgaattccgttccatcttctacagtaaggaaaagaactacgagaccagatattggttcaccctttattgcgcaagttaacggtgtacagatgaccttgcaaatcgaaccgatgggtaggttcgctttcaacggtaacgatggcaacataaatggcgacgaagatgacgaggatgccagtgaaagacgaatcattcggatatattatgcagctttgaatgattataaaggaacatattcacaaagcagaaattgtgagcgcgccaaaaacttgttggaattaacgtacaaggaatttcagcctcatgtcgacaatttggatcctttgcaagtattttactacgtccgttgcttacaattattggggcacatgtatttcaccggcgaaggctcctcgaagcctaatattcatatggccgaagagatcctgaccacgtcgctagaaataagcagaagggcacagggacctataggtagagcgtgcatagatctgggcttaataaatcaatacatcacaaacaatatttctcaagcaatttcgtattatatgaaagctatgaaaacacaagctaacaatggaatcgtagaattccaattatccaaattggccacttcattccctgaagaaaaaatcggcgacccatttaacttaatggaaactgcctacttgaatggattcattccagccatatatgagtttgcagtaatgatcgaatctggaatgaacagtaagagtagtgtggaaaacactgcttacctgttcaaaacattcgttgacaaaaacgaagctattatggcacctaaactgaggacagcatttgccgcattaatcaacgatcgttcagaagtggctttatgggcttattcccaactagccgagcaaggctacgagactgctcaagtctctgccgcctacttaatgtaccagttgccatatgagtttgaggatcctccaagaaccacagatcagagaaaaactttggcaatttcctactatacaagagcgtttaaacagggaaatatagatgctggtgttgtcgcgggagatatctattttcagatgcagaattacagtaaagctatggctctttatcagggtgcagctttgaagtactctatacaggctatctggaacttagggtacatgcatgagcatgggctaggtgtaaacagagatttccatcttgctaaacgttactacgaccaagtttcagaacacgatcatagattttacttggcttccaaattgagtgttttaaaattacacctaaagtcatggttgacttggatcaccagagaaaaagtaaactactggaaaccttcctcgccacttaaccctaacgaagatactcagcactcgaagacttcatggtacaagcaattgacgaagattctacaaagaatgagacataaggaggatagtgacaaagctgcggaagattctcacaaacacagaactgtagtgcagaatggagctaaccataggggtgacgaccaagaggaggcttccgagattttgggcttccaaatggaggatcttgttacgatgggatgtatcttggggatattcctattaagtatattaatgagtacactggcggcccgtagaggctggaatgtccgtttcaatggagcacaattaaatgcaaatggtaaccggcagcaagagcaacaacaacaacaacaagcacaaggtcccccgggctgggacttcaatgttcagatattcgccatatga

SEQ ID NO: 191081 - DNA, 936 bp, Saccharomyces pastorianus
atgagtgatatcttgaacgtaagtcaacaacgtgaagcaattaccaaggccgctgcgtatatttctgctattttagaaccacatttcaaaaatacaacaaatttcgagcctccgagaactttgattatatgtggttcagggcttggtggaatatctaccaagctgtctagagacaatccacccccggtaacagtcccataccaagacatcccaggattcaagaaaagtacggttccaggtcattccggtacactaatgttcggatctatgaatggttcaccagtagtattaatgaatggtcgtcttcatggatatgaaggcaacacattgtttgagactacttttcctattagagtgcttaaccacatgggtcatgttcgtaatttaattgtcactaatgccgctggtggtataaacgcgaaatatcaagcctgcgatttgatgtgcatttatgatcatttaaatatccctggccttgctggccagcacccattgagaggtcctaacttggatgaagatggacctcgttttttagccttgagtgatgcatatgatctggagttgaggaagcttttatttaagaaatggaaagagctcaagattcaaaggccactgcatgaaggtacttatacttttgtatctggacccactttcgaaacaagagcagaatccaaaatgataaggatgttgggaggagatgctgtcggaatgagtactgttcccgaagtcattgttgcaagacattgcggatggagggttttggccttaagtttgattaccaatacttgcgtggtggatagccctgccagtgcgttggacgaatcacctgtacccttagaaaaaggcaaagcgactcacgctgaagtactggagaatggtaaaatcgcctctaatgacgtgcaaaacttaattgctgccgtaatgggggaattataa

SEQ ID NO: 191082 - DNA, 5269 bp, Saccharomyces pastorianus
atggaatcccaacaattatctcaacattcacatatttctcatggtagcgcctgtgcttcggttacttctaaggaagtccacacaaatcaagatccgttagacgtttcagcttccaaaacagaagaatgtgagaaggcttccactaaggctaactctcaacagacaacaacacctgcttcatcagctgttccagagaacccccatcatgcctctcctcaacctgcttcagtaccacctccacagaatgggccgtacccacagcagtgcatgatgacccaaaaccaagccaatccatctggttggtcattttacggacacccatctatgattccgtatacaccttatcaaatgtcgcctatgtactttccacctgggccacaatcacagtttccgcagtatccatcatcagttggaacgcctctgagcactccatcacctgagtcaggtaatacatttactgattcatcctcagcggactctgatatgacatccactaaaaaatatgtcagaccaccaccaatgttaacctcacctaatgactttccaaattgggttaaaacatacatcaaatttttacaaaactcgaatctcggtggtattattccgacagtaaacggaaaacccgtacgtcagatcactgatgatgaactcaccttcttgtataacacttttcaaatatttgctccctctcaattcctacctacctgggtcaaagacatcctatccgttgattatacggatatcatgaaaattctttccaaaagtattgaaaaaatgcaatctgatacccaagaggcaaacgacattgtgaccctggcaaatttgcaatataatggcagtacacctgcagatgcatttgaaacaaaagtcacaaacattatcgacagactgaacaataatggcattcatatcaataacaaggtcgcatgccaattaattatgagaggtctatctggcgaatataaatttttacgctacacacgtcatcgacatctaaatatgacagtcgctgaactgttcttagatatccatgctatttatgaagaacaacagggatcgagaaacagcaaacctaattacaggagaaatctgagtgatgagaagaatgattctcgcagctatacgaatacaaccaaacccaaagttatagctcggaatcctcaaaaaacaaataattcgaaatcgaaaacagccagggctcacaatgtatccacatctaataactctcccagcacggacaacgattccatcagtaaatcaactactgaaccgattcaattgaacaataagcacgaccttcaccttaggccaggaacttactgaatctacggtaaatcacactaatcattctgatgatgaactccctggacacctccttctcgattcaggagcatcacgaacccttataagatctgctcatcacatacactcagcatcatctaatcctgacataaacgtagttgatgctcaaaaaagaaatataccaattaacgctattggtgacctacaatttcacttccaggacaacaccaaaacatcaataaaggtattgcacactcctaacatagcctatgacttactcagtttgaatgaattggctgcagtagatatcacagcatgctttaccaaaaacgtcttagaacgatctgacggcactgtacttgcacctatcgtacaatatggagacttttactgggtatctaaaaggtacttgcttccatcaaatatctccgtacccaccatcaataatgtccatacaagtgaaagtacacgcaaatatccttatcctttcattcatcgaatgcttgcgcatgccaatgcacagacaattcgatactcacttaaaaataacaccatcacgtattttaacgaatcagatgtcgactggtctagtgctattgactatcaatgtcctgattgtttaatcggcaaaagcaccaaacacagacatatcaaaggttcacgactaaaataccaaaattcatacgaaccctttcaatacctacatactgacatatttggtccagttcacaacctaccaaaaagtgcaccatcctatttcatctcatttactgatgagacaacaaaattccgttgggtttatccattgcacgaccgtcgcgaggactctatcctcgatgtatttaccacgatactagctttcattaaaaaccaatttcaggccagtgtcttggttatacaaatggaccgtggttctgagtatactaacagaactctccataaattccttgaaaaaaatggtataactccatgctatacaaccacagcggattcccgagcacatggagtcgctgaacgactaaaccgtaccttattagatgactgccgtactcaactgcaatgtagtggtttaccgaaccatttatggttctctgcaatcgaattttctactattgtgagaaattcactagcttcacctaaaagcaaaaaatctgcaagccaacatgctggcttggcaggacttgatatcagtactttgttacctttcggtcaacctgttatcgtcaatgatcacaaccctaactccaaaatacatcctcgtggcatcccaggttacgctctacatccgtctcgaaactcttatggatatatcatctatcttccatccttaaagaagacagtagatacaactaactatgttattcttcagggcaaggaatccagattagatcaattcaattacgacgcactcactttcgatgaagacttaaaccgtttaactgcttcatatcattcgttcattgcgtcaaatgagatccaagaatccaatgatcttaacatagaatctgaccatgacttccaatctgacattgaactacatcctgagcaaccgagaaatgtcctttcaaaagctgtgagtccaaccgattccacacctccgtcaactcatactgaagattcaaaacctatatctgaaatcaatcttcgtgcacccagagaagttgaccccaacatatctgaatctaatattcttccatcaaagaagagatctagcaccccccaaatttccaatatcgagagtaccggttcgggtggtatgcataaattaaatgttcctttacttgctcccatgtcccaatctaacacacatgagtcgtcgcacgccagtaaatctaaagatttcagacactcagactcgtacagtaacaatgagactaatcatacaaacgtaccaatatccagtacgggtggtaccaacaacaaaactgttccgcagataagcgaccaggagactgagaaaaggattatacaccgttcaccttcaatcgatgcttctccaccggaaaataattcatcgcacaatattgttcctatcaaaacgccaactactgtttctgaacagaataccgaggaatctattatcgctgatctcccacttcccgatccgcctccagaacctcctaccgaattatcagactcctttaaagaacttccaccgatcaattctcgtcaaactaattccagtttgggtggtattggtgactctaatgcctatactactatcaacagtaagaaaagatcattagaagataatgaaactgaaattaaggtatcacgagacacatggaatactaagaatatgcgtagtttagaacctccgagatcgaagaaacgaattcacctgattgcagctgcaaaagcagtaaaatcaatcaaaccaatacgaacaaccttaagatacgatgaggcaatcacctataataaagatattaaagaaaaggaaaaatatatcgaagcataccacaaagaagtcaaccaactattgaaaatgaatacttgggacactgacaaatattatgacagaaaagaaatagaccctaaaagagtaataaactcaatgtttatcttcaacaagaaacgtgacggaactcataaagctagatttgttgcaagaggtgacattcagcatcctgatacgtacgatacaggtatgcaatccaacactgtacatcattatgcgttgatgacatccctgtcacttgcattagacaataactactatattacacaattagacatatcttcggcatatttgtatgcagacatcaaagaagaattatacataagacctccaccacatttaggaatgaatgataagttgatacgtttgaagaaatcacattatggattgaaacaaagtggagcgaactggtacgaaactatcaaatcatacctgataaaacagtgtggtatggaagaagttcgtggatggtcatgcgtatttaagaatagtcaagtaacaatttgcttattcgttgatgatatgatattgttcagcaaagacttaaatgcaaataagaaaatcataacaacactcaagaaacaatacgatacaaagataataaatctgggtgaaagtgataacgaaattcagtacgacatacttggcttagaaatcaaatatcaaagaggtaaatacatgaaattaggtatggaaaactcattaactgagaaaatacccaaattaaacgtacctttgaatccaaaaggaagaaaacttagcgctccaggtcaaccaggtctttatatagaccaggatgaactagaaatagatgaagatgaatacaaagagaaggtacatgaaatgcaaaagttgattggtctagcttcatatgttggatataaatttagatttgacttactatactacatcaacacacttgctcaacatatactattcccctctaggcaagttttagacatgacatatgagttaatacaattcatgtgggacactagagataaacaactgatatggcacaaaaacaaacctaccgagccagataataaactagtcgcaataagcgatgcttcatatggtaaccaaccatattacaagtcacaaattggtaacattttcctactcaacggaaaagtgattggaggaaagtcgacaaaggcttcgttaacatgcacttcaactacagaagcagaaatacacgcagtcagtgaagctattccgctattgaataacctcagtcaccttgtgcaagaacttaacaagaaaccaattattaaaggcttacttactgatagtagatcaacgatcagtataattaagtctacaaatgaagagaaatttagaaacagattttttggcacaaaggcaatgagacttagagatgaagtatcaggtaataatctatacgtatactacatcgagaccaagaagaacattgctgatgtgatgacaaaacctcttccgataaaaacatttaaactattaactaacaaatggattcattag

SEQ ID NO: 191083 - DNA, 324 bp, Saccharomyces pastorianus
atgcatactatttgccttagaagcccgatcgatgaatcctctcctcttccatataaatcaataaggcaacctctagaaaacgcccattcctgccaagcgctttgcagccttatggccgtactctgtgcatccgctgctcatcggctctctgaaaccttccctatgcgtttggtagtcgcgcgtgaatatgctaattggggcgccttccaacatgcgtttacgcggcgcgctggagcttctgtggcggcgacttctgcatggtttgatgcagttgcggctggtactgaaaatgcacatatgcagtcagctgaatcatgcaattaa

SEQ ID NO: 191084 - DNA, 1797 bp, Saccharomyces pastorianus
atgagtttcggtagtaaagtctccagggctttgagatttttggaaattcctgtcaaagacagggcatctgtgagtttcttgaagaacccggatttgcaacctattaagtcggctaaccaaacatgggggttctggtctaattttgcatattggggtgttatgtccttttcagtgggtacatggatgagtgcctcttctgcactaggtgttggattaagttacccagaaaccattggtacatttatcgtcggtgatgtgttgaccattattttcacattggcaaactcgtgtcctggttacgactggaaggtcggtttcactttggcccaaagattcgtctttggtatttacggttctgccttcggtatcatcatcagaattttgatgagtattgtcaactacgggtccaacgcttgggtgggaggtctttgtatcaatatgatcttggattcatggtctcaccattatttgcacctgccaaacaccttatcttcgaaagttgccatgaccactaaagaattaattggttttatcatcttccacgtccttactgcattctgttacttaatgaaaccctaccacatgaactacattttaatttggtcgtgtgttgctacatttttctctatgttgggtatggtgatctatttagctaaacaggctcacggtgttggagaattgtttacctccactaaatccactgccactggctccaccaaagcttgggcttgggtttatatgatctcgtactggttcggttccgtttctccaggttccaccaaccaaagtgattactcgagatttggttcctccaattgggctatctgggccggtaccatctgtgcattgttaattccaaccactttaatcccagtttttggtgttattggtgcctccacctgtgacaaactatacggtgaacaatattggatgcctatggatatcttcaaccattggttgacaactaactattctgcaggtgctcgtgccggtgcgttcttctgtggtctttcatttgtcctatctcaaatgtcctacaccatctccaactgtgggtttgccagtggtatggatttggccggtttattacccaagtatgtcgacatcaagaggggtgccctttttgccgcatgtgtctcctgggcttgtttgccatggaacttctacaactcttcttctactttcttgactgtcatgagttctttcggtgttgtcatgactcctatcatttctgtcatgatttgcgataacttcttgatcagaaaaagacaatactccatcactaatgcctttattctcaagggtgaatactatttcactaagggtgttaactggagagctattgttgcctgggtttgtggtatgacccccggtctacctggtattgcttgggaagtcaataatgactatttccacaacactggtattgtcaatttcttttacggtgactccttcttctcgtttttgatctcctttttcgtctattggggactatgcctcctcttcccattcaaaattactgtcaaacatgatgacaaagattattatggtgcctttactgacgaagaagcaagaaagaagggcatggttccatacagtgaaatttctgaagaagaaatccgcgcttacacattaggcgaaggttacactaccggccacgagtacagacctgaaggctccgacgatgaaatacctgagttggtcaaaactagctctgaaaacaccaatgagtttgaaatagttcatcataagaataatgaaaagcaatcctccaccgccagtgaaaaagctgcttag

SEQ ID NO: 191085 - DNA, 1437 bp, Saccharomyces pastorianus
atgactggtcctggacctgaaataaataaggaggagcaccccagttctccgggcaagaaacagataacatataatagtatacccaagaatgcaaatctaattgatggatctacgaattcatcgaagaggccaattgaaaagtatgacaagagaatagccgacccaacaaaaagctattttccacatagcatatcaagaacaccaaggagaaaatatacttacattctagtcctcacatcactaaatggaacttttgagagcaaacatgtggtgataccatttaaaccagatggtttgaaattgggaaggcctgttgctaatagtaatagcagctccagttcatcgctcaggggcggtaaaagagtggattcacacactttttcccaagtaaggtccgataatggtaatttcgattcaagagtactctccaggaatcatgcattgttaagttgcgacccgctcacgggtaaggtatatatacgagacttaaaatccagtaatggtacgttcattaacggtcaaagaattggctcaaatgacgtagaaatcaaagttggcgatgtgatagacttgggaacagatatagatacgaaaattgagcatcgaaaaataagtgccacagttgaagaactatttgtacaacctttattagaatcaccgatttttgaaaatgaagatagtgatgattgccatacaattacagaaaaagaggaggctgctgccataacaagtcacatatatggtgattccaacaacctagaattggaagaagttatcctgggctctgatacagaaatactgagtggaatttttattaataattgtattggtacgagcccgactttatctaatatcatcaaaaccctggcaatggaaattccattttccaaatgcgataattttaaattacagtcgatggagaatttcttaattaattatacgacacatctagaatacacgaacaaacttttagtggaaaaaaatgatcagcaactggtaaagctgcaaaatggattaagaaggaaactgtcggggaaatacgaaaagattatcgaacaaaacagaaatcaagtaaaacagttggaaagggaccatatgtttttcaaaaagtcatttgaagtgaagaaaagaagaaataatgaaaagcaaaaaagcatggaaagggaaatagaagacttgaaaactaggttagaagtggaacgatataagaattcacaaatgatgaagaagaacaaacagaaagaacaagaactctcaactgcatctaaaaaaaagactaccgaacatgacactagaggcgtcccgggcatgaatcctaagggtactgacaaatttagcatcaagaacacgctatgtaatcatttcacactattaacatttggaactatttccatcgggattatagctattgtcttcaagatcctttcccccaactag

SEQ ID NO: 191086 - DNA, 429 bp, Saccharomyces pastorianus
atgaaagtaggtggcatagaagacagacaactggaagccttaaaaagggcggcactgaaggcgtgtgaactctcctatagcccctattctcacttccgtgtcggttgttccatattaacaaataacgatgttatcttcactggtgctaatgtcgagaatgcaagctacagtaattgtatatgtgcagaacgatctgctatgatacaagttctaatggcaggccatcgctcaggatggaaatgcatggtcatttgtggcgattctgaggaccagtgtgtttccccttgcggcgtttgcaggcagtttatcaatgaatttgtggtcaaggactttccaatagtcatgcttaattccacaggttctcgttctaaagtcatgacaatgggagaactgctgcccatggcttttggtccatctcatttaaactag

SEQ ID NO: 191087 - DNA, 594 bp, Saccharomyces pastorianus
atgaagttattgcatttatatgaagcgagcttgaagagaaggcccaaaactacgaatgcgataatgacaggtgcgctatttggaattggtgatgtttctgctcaattgttgtttccaacatccaaagtaaacaagggttatgattataaaaggacagctagggctgtcatctatggttctttaattttctcctttataggtgacaagtggtacaagatcttgaacaacaagatttatatgcgtaacagacctcagtaccactggtctaatatggttttacgggtagctgtcgatcaattggcgtttgcgccgctaggtttgccattttatttcacctgtatgtccatcatggaaggtagatcatttgacgtagctaagttgaaaataaaagagcaatggtggcctacacttttgactaattgggcagtttggccacttttccaagcgattaacttttctgttgttcctttacaacataggttactagctgttaatgtcgttgcaatattttggaacacttacttatcttataaaaactcaaaggttatggagaaagacaaggtacctgttcattatccacccgtggtcgaataa

SEQ ID NO: 191088 - DNA, 825 bp, Saccharomyces pastorianus
atggaggagagtaagacaaaaagaaaagaggatcgcatagatttgaagaatacaccgcctcagaagaagtcaaaaagagattcaacaaatgacgaaactgcacgcacatcactacgttcaatcatgcccaggggttataaaatgatggaaaacatgggttacaaagaaggagaaacattaggtagtaatgaaagtgccctaaaagagcctattaaggtagaaatcaatacaaaaaggaggggaattcgtgcagaaaagcccgacccatcaacaatgaatgacatgcagatgagtgaacaacgatttataaaaagagaaagtgaaatgaaaaataataagcggttaaaaaaaatttggtataggatccaaaaagttgcttttgaaatgatgggtgattccgatttatacaatccaggcgaagatccgagagactttaacgtactttggagatcttacgttatgcaactaaatgaggaagtagcaaaaaatgacctaaataatcacagtaacaatgataatgaagataagaataatatgataccaatggtaaatgaaagtttggaggcttcgcctgcaataaaaggtgaaaagtttggacgtccttctacattaatagattgtgatacttcaattatcggtagtcgcattacaaaagacacagaacttgctgaattagaagaattgagcattgaaaaaagaataacaaaattgaatatattcctgaggtccgagaagtactactgttttttttgcggaatcaagtataaggatgaaggtgatctctacgagcattgcccaggagtgaatgaagacgaccacaaatga

SEQ ID NO: 191089 - DNA, 4026 bp, Saccharomyces pastorianus
atgggccgtccaaggaagaatgttagccaggagaaaatacaacagttgaagagagaactggagctggccggtaacaggacagacgtcttgttgcaagacaaaaagggccgttccaggtcttgtcttctttgtagaagaagaaagcaacgatgcgaccataaattacccagttgtaccgcctgtttgaaagcaggaataaagtgcgtgcagccctccaagtactcttcttccacttcgaacagtaacaccaacaacaacacccctacagctggcactgtacctcctacacctcatcctgtaataaaacgtgagctgcaagatagcagtattggcgctggcgctggcgctgccacttctctgaatgacatgacgataataaaacccatttccactagcaatagtaatgttgatgctggcgacgcgaatgaattcaggaaaacgataaagtccgtcacgacaaattccaatccaaacctgatgaggcaagacaaagatcagtatacgattttcttggagaaaaaactaaaaagtttggagactttgctcgatttatcgccgggatgcaaccagtacaactacgaattatcccagtacaagaaggtttctcatttgttcagtaacaacacttctgattactctagaccgaacagcagcaatatggtcatactgccgctgccatctccttccaacaaacccctggagaacacaaacaataacggcagcaacgttaatgcggccactaacgatacatcggccagtacgaacaacataaacaacaataatgctatctgccaatccgcgagccttttgaatgaccctttagagacgctggacttcactaagtgtatttttgccaaatacaatttgaaaaaagagtttttgatgtatgaccctatttttgaactgaatgagaagctgtcacgttccttcttggacacttttttcacaagattacaattcaagtaccctatcttagacgaacaagaaatctatactttttatgaccactacctccacaacaagattcttatcccaccatcttctcccgccacgtcttccgcagcaccaccgtcgaattcacattcgtattctgaaatagaatttcattttctatccggcagaatgtggcttgtcttcagcatcagcgcctacttactgatgaccacaggtaagtacaaggggtttccacctcaccgatatttctccaccgctatccgtcacatcactaagtgtggtctacatttgaattatgttcagcaaatagaactgttgacattgcttgtcctttacattattaggactgatagagattctctgatactatatgacataatcaaggatgtcatgggcatatccaagaagaaacttcatctaaatcaatggtatcctaatgatccatttgcaaataagaaactgcgactattttggtgtgtttacctgttggaaagaatgatttgtgttgctgtggggaaaccttatacaatcaaggagtcggaaataaatttacctcttttcaataacgactctttttatacaaaaggtgtgcatgcggcggctccatcaaccaatgaccatggtgtgcaattcatcaatcagtctctaaagctgcgaagaattgaatctcaatttgtagagactttacagctattgaaaaacgattccaggtcagtgaagcaatccattgatcaattgcccctagtacgaaaattttttgaagatttggaagtttggagaaaaagttattccactcttgacgtgaaaaatttcgaaaacgagacactaaaactttattactatagatcagtgcgattgcttatacaaccatatttggaatttttcgccccggaggatagactatttagagaatgtcaagctgctgcgggtcaaatttgtcagttatacaagatattccatcaaaaaacgcttaatggtcattctacaccagcagtgcatacggtttttgtagctggcgtaactttaatctactgtatgtggttagccaggaattttgacgatcaaaggaggaagaaattaggcgatgcttcgaagcatactagacctttaatcagtgcaagtctcttttcgacgatggatgatttgagagcttgctccgtttgtttatatgttatgacagaaaggtctaattttgcaagaacctttagagatactttcgatcagttaatgaatgccacggtaggtaatttgattgaaagatgtggtccagactcttctgagttaattttcatggctagtagtgtcgccaagcgtactgaacccaagaacatcaatgatgaggccaataaggcaatttcatctggggatactcttcatgattctaactccgcaaatgcagctaatctatccaattcaaacgataaaaatatatctcataatggcggtatgccgcctgctgtggctagaatatttggtaaaggacaagctgaagagcacgccggttttgtggaaaattcacaagtggatttggctgaacaagagaaattcaagaagaagcaaggtgttttagaaaagacctctgtacccaaaagtttagctcacctattaaccaaaatggatgacaggtcacgtatttcaaattcttcaatgtcttatacaacatcttcttcgtcatcatcttcttcttcgtcatcatcgtcgacattatcgtttccttcttcccaagaaaaaaacctgaaaatcaatgtaaacaatgataacaatggtatgaccatcagcagcgtcaacagagaacacaacaataatcacaacaataataatgataataataataataataacaataataataataatagtaataataataataatgttaataataatgataatgaaagtaatagcagaagcactaccaacaacagctgcaataatggcaacaacagccagtatgttcgtaacaacaacgtaactatggaaaatgatgtagaaaggcctattcaagaccaatatatcgtcaagaaaccaaccaaccaaacagagtttgattggcaagtatttcaacagcaggcctttctacaacagcaactagctcagcacaatttacaagcgtatctatcgtccctgaacaccgatactatgaccaatagaagtccttcaaaatcttctagcatatctacagcctcttcgcattcggatccgattccaatagcgatgacgcaaagcccaactccatatcctcaaacttccaatatgctaccgcaacagcatgtatcacgaccactgccgcaacaacagcgggagcagccacaacaacatattacttctccacaaagattctcagaaagcaattttacgaatcaattaaacaatggtatgatcaacagtaatcctctacaatctgcaatattctctaaccatacaagtgaaaataagcaattaagagatgtcgaagaatcaaatttcagtacatcacccctaagagcagattatggcaataatattatctcctcgataccagcgtcatttactagcaattcaattccggtcagtgtcaaacaagctcgaaatggctcttcttcgggcgatatacttttcagcaacggtgctcatgacatgatcaacaatatttccacctggaccaataactccgttctagatgctttgaatagcaagtccatactacaaacaatatttccccagagtcaagagccttcatctctgtccatggacaaacagcagcaacaacatcaacaacaaaatatgtgttctgaaaacaatgtaaccgctaataattttcaacagacgcagaatgacccttcgtataacagaaatttgttcatgatgtccaatcaggaaggtgtacaatataatcttgacgaaacagagaagaatggacctaaaacacaggtggaagcaaacactagcgcaaatctgcatttcgacaatgttattcctacagtaactaacgcagacatcaggaaaaagcgttctaactgggataacatgatgacatctggtccggtagaagacttttggacgattaatgatgactacggctttttaacgtga

SEQ ID NO: 191090 - DNA, 622 bp, Saccharomyces pastorianus
atggtacgtaatgcctcattaggattttaaaatatgaaaaaaatggacgtttcagcgaggaatgaataacaagaaatagctaatttgaatatattactggtgtttcatatctatatataccgcagaaaaagaaataaaacgcaatatatctttaaactggctccaccctgagaatatgataggaaactttttaaatttgagttctgttacatcaaaaacgtaattgcttgacacagatttttcgagggcaacagcgtggacttaacataatgtcgagtttaataacaacattttttgacggagagttaaaaaggctttgagaaaatagcagagtgaagtttatttttagcatccttgctgatacgccaaataattcaaaaattcactatactaacatggtcattaatttttaatattaatattatttatttaggctaaagttcatggttctctagctcgtgctggtaaagtcaagtctcaaacaccaaaggttgaaaaaaccgaaaagccaaagaagcctaagggtcgtgcttacaaaagattattgtacaccagaagattcgttaacgttaccttggttaacggtaagagaagaatgaacccaggtccatccgtccaataa

SEQ ID NO: 191091 - DNA, 93 bp, Saccharomyces pastorianus
atgccattctcccctgacattgcgtatagcattaactacgctcttgggaaatacttctttcatcgtatatcccatttccttgagagtgcttag

SEQ ID NO: 191092 - DNA, 5703 bp, Saccharomyces pastorianus
atgagatttaccagaggattgaaagcctcttcatctttaagagcgaaagctattggaagactaactaaactttcgacgggtgcaccaaatgatcaaaacagtaatggtacaacattagatttgataactcatacattgcctattttttattccacaaatacgtcaaagatatatactataccacttacattgagtgaatgggaagtactaacttcgctttgtgttgcaatccctaccacgctcgatctggtagagacaatgcttaaagaaataattgcgccttattttctggaaactccaagacaaagaatttcagatgttctgtcctcgaaattcaagttggaacagatgagaaatccgattgaattgctaactttccagctgactaagtttatgattcaagcttgtgaacagtatcccgttctttatgaaaatataggcggcatcatttcaacttattttgagcgtgtattaaagatttttactattaaacaatctggtctactatcattagtgggctttattaatgcatttatccagtttcccaactctacagagcttactaaattcacctggaaaaagttagcgaaacttgtgcttcgtggatcatttctaaacgaagttgataagattttgaattcctcagcaacgtttaccaatgattcaatcgtccagtattacgatgctggaaatgagctatccagtgcctacttattggaattaatatctcgcttgcaagtttcgctaatatctcatctgttaaacacttcacatgtcggcgccaacttgagtgagttcttactaaatcaacaataccaattttacaaatttgatcaagaagtagccgatgaaaacgatgatacgaagtgtattgatgacttttttttcaacgtaagaagcaataaacagttttttacagacatgtgtaaaatttccctgcaattttgttctgagtcacatattctcgacctatctacagacaaccgtgcaagattttcttttgatactcgagcccactacctacaaacgctatgtttaattccgtttatagaagatacagaaagcgagctttttgaaagttttacaaacgttgtttctgaatctattgataaatttttcttatctgatgtcgttacaccatctttgataaaagcaattgtagcttctgcctcattactgaattttttcacggaaaaattgtcattaactctgattcgtatgtttcctttattggtagcgtctccacatatcacgactgaaacagttaatgatgttgcaaaaatattcaccacagggttataccctctaaatgaagatgcaattgtgagtacaatttattccatgaacaacttattagctgtttccgaggacggatcgcccgtcccggtgctccgtgagcgccaattaacaataacatctggaaaaaatattgagaaagactactttcccttgcgaaattcatctgccagtttggatggcactggtgctctgctcggaaatacaactgtgggccaactttcctcccatgatgtcaatagtggagctactatgacataccatgcctctttgatatctaattgtgtggctgcaacgactacaatcgcctcatactataacacccaaagcataacagctttgactatctctattcttacgcaaaaagttaattctatgtcaaaggaattagacggtgttattttgaattctttggcaagactggctccgaatacttcactgacagaattttcgcttttactaaagttcttcaaatcgagaactgttattgcaacaaaaattgatgatagcgcactattgaaaaatattattaaagcgaaatgtgtgatatcaaaagaattgttggccaggcatttttcaagtgacttatatttcatgtatcttcatgatctattggactcaatcattgccagtggggaagtagaacgattggaacatcacagacctcaaacggagatttcccgtgttgctgatcaaatcgctacctacttagagcccctcgccgctctactacctgttccaggcgatacgccattggacatcaataaggatgaagtcactacaaacaagtttaggaacgcctggtttaattttgtcatccatgggtaccacttgggcgggcctattgtcaaacgaaatttttctttcttattaactattgcctataattcaccaccgctggcttctgaatttcctgctaataacaaggagctttcattggaaatgaatacaattttgcgccgcggttcatctaacgaaaatatcaaacaacaaaaacagcagataaccgaatatttcaataccaatattgttcagtacagaacaacttcatcgtctaaaatcatgtttttagcggctgccgttcttctagaaacgataagatgcgaggcaggtgattgttcgaagactctactgtacttctcagacccctccattctttccggttcaattgagaagtgtattgcagttttgtcggtttccatgattagaaaatatgctaggttgattcaaaagggtaacgatgccatattcaactccaaaatgattgctcaacaacttaataacttgctactttgcctttctcatagggaaccaactttgcaggatgccgcttttcatgcctgtgaaatatttatcagatctattccatcatcgttatgtcatcatttgtctctctacaccttattagatatgttaacagccctatttgatagtatcttggactcagaggcgcataaatttgaaccacggtatgaatttaaattaaaacattctaagacaacaatattggttccaagctcatcgtcctggcgcgctacgacactatcaagattgcacaagtcagctaaagaatgggtaagaattctattgaatagaagcaaccaggatactaagattttgttgcaatcatacatatcagatctcggtgagtacagcaggctaaattctgttgaatttggtgtctcatttgccatggatatggctggtttgattttacctgcagataaggaattatcaaggcttacttattatggtccagagaaacctaacacgatttctggatttatatctttacattcttggaggtcaaaatatcttttcgataccgctattacatcatcaccagaggatatcaaaaggcaaataggtatttccactcaaaacataagaaaaaatttgaccttaggaaataagattataactaaagacgtaactgattttcttgatatggctaccgcgttgttaattcttggcaatggtgcaccagcgtcattgatatatgatattgtgcacatcccgttcgaagtcttcacctctgcatctttaaagattgctacaaacgtatggttaacaatcataactgagaagcccgaagttgcacatttgcttttagttgaagtatgctattgctggatgcgctccattgatgacaatattggtctctattctcgcgatcatgacttaaagggcgaagaataccaaaaaatggaatattccccttacgacaaagcaggtatcaacagagatgcaaaaaatgcatcccaagctatgcaaccacatcttcatgttattaaattttttgcttcccatttcgagggcacactatttcaaagtgactttttattgaaaattttcacgaaatgtgcgctttatggtatcaagaatctgtataaggcttcactacacccgttcgctagaatgattcgccacgaattattgttattcgcgactctcgtactaaacgcaagttataagcagggatccaagtatatgggccgtttgtcgcaagaaatcacaaacggtgccctaagttggtttaaaagaccagtagcgtggccattcggctcaaatgagctgaaaatcaaagcagatttatctgttactagggaccttttccttcagctcaacaaattaagctcgctaatgtcacgtcattgcgggaaagattacaagatcctgaactatttcttggcaagcgaaatccagcagattcaaacctggcttactccgactgagaagattgaaggagccgacagcaacgagcttacaagcgatatcgttgaagctacctttgctaaagatccaacattagcaataaatctcttacaacgatgttatagcaagaaagctgaggatgttttagtgggcttagttgcaaaacatgctttaatgtgtgtggggtccccaagtgctcttgacctgttcataaaaggaagccacctgagcagtaagaaagacctacacgcaaccttatactgggcgccagtgagcccgttaaaatctatcaaccttttccttcccgaatggcaaggtaattcttttatcttacaattcagcatatattcgttggaatcacaagatgtgaacttggcattcttctatgttcctcaaatcgtacaatgtttgagatacgataaaaccggatatgtcgaaagattgattttggatactgcgaaaattagtgtgttattttctcatcaaataatctggaatatgcttgcaaactgctacaaggatgatgaaggtatacaagaagatgaaatcaaaccaactctagatcgtattagggagcgtatggtttcaagtttcagccaatctcatcgcgatttttacgaacgtgaatttgaattcttcgacgaagtaactggcatatctggtaagttgaaaccatacataaaaaaaagtaaggctgaaaagaaacataagatcgatgaagaaatgagcaaaattgaggtgaaacctgatgtttatttaccttctaatcctgacggtgtagttattgatattgatcggaagagtggtaagccacttcaatctcacgcaaaggcgccttttatggcgacctttaaaataaagaaagacgtaaaagatcctttgacaggtaaaaacaaggaagttgaaaaatggcaagctgctatcttcaaagtcggtgatgactgtaggcaagatgttctagcgttacaattgatctcgctatttagaaccatttggtctagtattggcttggatgtctacgtttttccctacagagttactgcgacggcaccgggttgtggtgtcatcgatgtgctacccaattcggtatcccgtgatatgttaggacgtgaagctgttaatggattatatgaatatttcactagtaaatttggtaatgaatctactatcgaatttcaaaacgcacgaaacaactttgttaaatccttagcgggatatagcgtaatttcgtatttgttgcaattcaaggatagacataatggtaacattatgtacgatgatcaaggacattgtctacatatcgattttgggtttatttttgatattgtcccaggtggtatcaagtttgaagcagtaccattcaagctgacgaaagaaatggttaaagtgatgggaggttcgccccagaccccagcgtatctggactttgaagaactttgtatcaaggcatatctagccgcccgtccgcacgtggaggccataattgagtgtgtaaatcctatgttaggaagcggtctcccctgctttaagggtcacaagacaattaggaatctaagagcaagatttcaacctcaaaaaaccgatcacgaagctgcactatatatgaaggcgctaatccgtaaaagttatgaaagtatattcactaaaggttatgatgaattccaaaggctcacaaatggcattccgtactga

SEQ ID NO: 191093 - DNA, 701 bp, Saccharomyces pastorianus
atggtacgtagatgcaactatatctttccgtttctcattggcggtttttagcgatcgaaaatactaacataatctttttggggggtgagaatgtatatgtgtactggatatgtatattcttggctttattcaaatagttgaaattacgccaattacaaaagaaaaagcaaaaagaaaatgaaaacagcagttctattcagcctaatttatcggcagcaagaattcgtttgaaaagggaccttgattcgctggacctcccaccaacagtgactttgaatgtaataacatcaccagatagtgcggatagatcacaatcgccgaaattggaggtaattgttaggcctgatgaaggatattataattatggatctattaatttcaatttggattttaacgaagtttatccgattgaaccaccaaaagttgtatgtttgaagaagatctttcatccaaatatcgatttaaaggggaacgtttgcctaaatattcttcgagaagactggtcgccagctctagatttgcagagtattataaccgggcttcttttcttgttcttggagcctaatcccaatgacccgttaaacaaggatgcagcaaagttactgtgtgagggtgagaaagaatttgctgaagctgtgagattgaccatgtctggaggttcaattgaacatgtcaaatatgataacatagtttctccttga

SEQ ID NO: 191094 - DNA, 348 bp, Saccharomyces pastorianus
atgaaattaacaaaagaaaaaaaaaacgactgcttagtaggagtgtcatatatccctcctttaaatttttttacacttactttcctttttttattgagaatagaaaaggtgcatctctctctctctctctctctatctctatctctaaggttttattactttcataacgtatgctatccatctcttttcctttttttttgttttgttattccctttttttactcagttagattcatactactatatttacatattcttcgaagcttttatgagttaaatattttgttgctttatggggcagaaaatagtcgacgtcagtcacctccaggttattatgtaattcgctaa

SEQ ID NO: 191095 - DNA, 435 bp, Saccharomyces pastorianus
atgggtcaacaaagacgctcaccattggaaactgttttcctgccgttgccatcttcacagacaacgtcgacgcacgcgatagctcatttcgtacttcctgcatgtctattttatagtcgttcaatatttgatcattggggttgccgttccaaatcaacggccagtacttcacagaccaggcattgttcagttcctttgtgctgggcgcaaactcaggcacttcgatatcatcactcagttcatactttttcgttccaacccaaatactcttcaatttattgtttatttcaccttcgtcgcaaatatactctttcgaacacaacaccacttccaaggtggaggtctcgatgtccttgcggatccttttcaaatgtctcaatgaaacagggtcatttttctgaaaatcgtttcgaattagcctactttactagttag

SEQ ID NO: 191096 - DNA, 858 bp, Saccharomyces pastorianus
atgttttttgagtccaggccaattgttggagttgggggagggggtggagcttgtggagggttgctaacatgtgttggcagagacgctgaaggcaaagggggtgctgacacactaggaagagaaatattagagctttttctttggtggcttctgtgtgctggccttactgaaggcatatgcggtctattttgcggtacctttggagcagaggcacctgataatggaagcggtggtgctggagatgatggtacaatgggaataggaggggccgcagaagatggaatatcaggaattggaggtgcagaagacgagggaatactaggaacagcgggtgctggtgataatggtgcattaggaatggggggagccgcaacagatggcaccgcgcccggaattggcggtgcgctcgccgatggagagggtttagtgcttgcattgttattgatatgttttaacttcggtatacctccagctaaaatatcgcccaactgcggagcgcccatcccagggattggaggagctgacatagagggtcctttactactgacggtaccagaacttcctgaggccgatgaaacgacaccacctcccacgattggggcacttctatcattggtctcagctttctttagtttcattccctttctaatgtcacctaacagggcgtcacggccctgcatcacagattttgccggtttaggagcactaccacctaatgctggtggaggcggtggaggaggaggagctggagcacctgccatttcaacaattcgttatatatatggtaggcttcttcaacaaacggttgtgcgctttttagtcgtatgctttgtctcatatcaaaaactttcttcataa

SEQ ID NO: 191097 - DNA, 831 bp, Saccharomyces pastorianus
atggctaaacaatcattaggtatgtgcacaaatgctaaatcactgaaaccctgtagagctggaattgaaaatatagtttgtaccttttgcctgagggcagaatgactcaatgttatcttaattcgattagaaaaagaaggtgcgttatccaaggttgaaacttgtaaactatttaggtgatgtctcataactgcaaccactggaaaatgacgcaaatatcaaaataatagggagataaagtctcacgacatgaaaaaatcatagaattattgttcaatttatctagccgtatcttaccttatggaaaaagtgtgaatatgtttttctaaatcgagcttcccggaaattacactatattatgcatccgtgatacatctgaaattcaatactttctccaaggtcctgcttactaagagggtaagatttgttgaaactcgaaatactaacattattttcattattttagacgtttcctccgacagaagaaaggctagaaaggcttatttcaccgccccatcctcccaacgtcgtgttttgctatctgctccattatctaaggagttgagagctcaatacggtatcaaggccttgccaatcagaagagatgatgaagttttggttgttcgtggttccaagaagggtcaagaaggtaagatttcatctgtttacagattgaaatttgccgttcaagttgacaaggttaccaaggaaaaggtcaacggtgcttccgttccaattaacttgcacccatccaagcttgtcattactaaattacatttggacaaggacagaaaagctttgatccaaagaaagggcggtaagttggaataa

SEQ ID NO: 191098 - DNA, 1530 bp, Saccharomyces pastorianus
atgccaaatgtgctttctgatgatgaagagctccttaatggactaggaagtgagattatgaaaccctctagacaaggtaaccatatggcaaggaccgtcaaaaggtgggtaaataaagaacgtgctaccacagccgatctgaaaaatgttaatattgatggagttcatggaccggtaaataccgaaagttatatatcaccaggacagctttactccactgactcgggcaatttatttcatgctggaagaatccttgtcgttctagtcggtcttccagcaacatcaaagacactattgtcagtagcgattacaagatatacaagatggttaggagttaggacgaaatcgttccatttttcagaatataaagaatcagctaaaaatataccctcagactatttttgcgtagtgccaacgtcaaaagaaggtgtagcgtttgttgaaaagcttcgcatgcagatgttgaatgatatactggcatttttcaacgacttgtcaggtcagctggccatttatgatgccctaaacatccgtaaaattgacagaaagaatttggagacaacgttttctgaaattggagttaaagtactcttcatagaatcaatcgtgtctgatcaagaaatcatgaatagaaacatagctcttgcactggagtcgaacgattacaagggactttcaactgatgaagccattgacgaatatatgagacgtttatcagtgaacgaaccatactatgaaatgatgacacatgacgaagaattatcgtacattaaatatataaatttgggaaagcagataattgtgaaagataacatacatggttatttggtcaacaaaatagtatttttcttaatgaatttgaggcagaaaaaggggtgtgtatattttgctcgctgtggcaccagcgataaagacaactacatacatgatgaggaactaaacgaggagggaatccattactctcaagttctcaaggattttgtcctccaacgaattaaacagaagagacaggccaaaaaaaattcggattccttagtcgaagtaatagatggaagtcatgatgaagatttgaagacttccttgatagtttggacaggtcccaggaaaagaacccacgatactgcactctttttttcaaaagaaggtattaaagttcagcaacggtcagagttgagacagttgaacccaggaagtattgctgatcttactgatcaacagataatggacaaatttccatcagaatataaagaatcattaaaagacccatatcattttcgattccctagggcggaatcttaccatgacttagccgttcgtatggaacctttactattagaaatggagcatacgagcaaggacattctcatcattgcacatgagtcaacattaagagtattatatggctatttaatggcttgcacctgcgtagagttaccaaatctaaatttcacaagagacaaattagttgaaatttcattcagccctttctgtaatactgtagagttactgaacattcctttaactagctaa

SEQ ID NO: 191099 - DNA, 1008 bp, Saccharomyces pastorianus
atgtctgaaccagctcaaaagaaacaaaaggttgctaacaactctctagaacaattgaaagcctccggcactgtcgttgttgccgacactggtgatttcggctctattgccaagtttcaacctcaagactccacaactaacccatcattgatcttggctgctgccaagcaaccaacttacgccaagttgatcgatgttgccgtggaatacggtaagaagcatggtaagaccaccgaagaacaagtcgaaaatgctgtggacagattgttagtcgaattcggtaaggagatcttaaagattgttccaggcagagtctccaccgaagttgatgctagattgtcttttgacactcaagctaccattgaaaaggctagacatatcattaaattgtttgaacaagaaggtgtctccaaggaaagagtccttattaaaattgcttccacttgggaaggtattcaagctgccaaagaattggaagaaaaggacggtatccactgtaatttgactctattattctccttcgttcaagcagttgcctgtgccgaggcccaagttactttgatttccccatttgttggtagaattctagactggtacaaatccagcactggtaaagattacaagggtgaagccgacccaggtgttatttccgtcaagaaaatctacaactactacaagaagtacggttacaagactattgttatgggtgcttctttcagaagcactgacgaaatcaaaaacttggctggtgttgactatctaacaatttctccagctttattggacaagttgatgaacagtactgaacctttcccaagagttttggaccctgtctccgctaagaaggaagccggcgacaagatttcttacatcagcgacgaatctaaattcagattcgacttgaatgaagacgctatggccactgaaaaattgtccgaaggtatcagaaaattctctgccgatattgttactctattcgacttgattgaaaagaaagttaccgcttaa

SEQ ID NO: 191100 - DNA, 330 bp, Saccharomyces pastorianus
atgtctgcctttgttactaaagctgaagagatgatcaaatctcatccatatttccagttatccgccagctggtgccccgactgcgtctatgctaattccatttggaataagttgaatgtacaggacaaagttttcgtttttgatattggttcacttccaagaaacgaacaggaaaaatggagaattgcgttccaaaaagttgttggtagcagaaacttaccaacgatagttgtcaatggtaaattctggggtactgagagtcaattgcatagatttgaagcaaaaggcactcttgaggaggaattgactaaaatcgggcttctgccttga

SEQ ID NO: 191101 - DNA, 1227 bp, Saccharomyces pastorianus
atgtcctttgatagacagttgaccgaagaccaggaggtcgtccttaagcaaatttggacacaccttttccatctgtggcaagttcccgtggatggaactcatattttccctaataactccctccactcctcgtccacccctgctaagaagaagaaatcatcctggtttagcaagcttcagtcctcagaccatacacaggactccagcgaagccgctgaagcggcacacctctatgaaaagggcaagatacacaaggcactagccaatctagacccgcaaacgaccaagaagcagttctggcacgatatcaagaatgaaactccagacgccaccattttgaagtttatcagagccagaaagtggaacgcagacaagaccatcgccatgttgggtcacgatttgtactggcgcaaggacactattaacaagatcataaacggtggcgaaagagctgtgtatgagaataacgagaccggtgtcattaagaacctggaattgcaaaaggccaccatccagggttacgacaatgacatgaggccagtcatccttgtgagacctagattacatcattcttccgaccaaactgaacaggagctggaaaaattctccctgttggtcatcgagcaatcaaagcttttcttcaaagaaaactaccccgcatccaccaccatcttgttcgatctgaacgggttctccatgtccaatatggactatgcccccgtcaagtttctaatcacttgttttgaggctcactacccggaatctttgggccatctacttatccataaggccccttggatctttaacccgatttggaacatcatcaagaattggctggatccggtcgtcgcgtccaagattgttttcactaagaatatcgacgaattgcacaagtttatccaaccccaatacatccctaggtatctgggcggagaaaatgacaatgatttggatcattacactccaccagatggctctttggacgtccatctgaaagacaccgagactcgcgctatgatcgaaaaggagagagaagaattggtcgaacaattcttgactgtcactgcccaatggattgaacaccagccattgaacgatccagcatacattcaactgcaggagaaaagagtacaactttccaccgctctttgtgaaaactactccaagttagatccgtacatcagatcaagatccgtttatgactacaatggttctctaaaagtttga

SEQ ID NO: 191102 - DNA, 1830 bp, Saccharomyces pastorianus
atggagcaaaacgctgaaaaacgctctattgttggcgacgacaactcaaccgtgaagagacaagacacttccccgtccaaaggtattgcacatatcaaaccagaatatattgtaccattgaagcagaatgaaaaccagaaggtcgccatctatgatgaagagatgtcttccgacagaatgacaaacgagtttgcaggtgggactaataagaaaaataagaacggaagaggtaagaagcgtgggcaaaacaagaatagagataacaggcaggtcaaggaacagaatgtcttgtgcccacgcttgatccatggcgatatatctaaatgctcctttggtgataactgtaggtttgttcacgatatcaatctgtacctttcaacaaaaaagcctgaagttgaaagtaatatatttccttcctgtccggtcttcaactcgttgggattttgccccatgggattcaaatgcagatttttatcgtctcatctgaataaagaagataatatcctaatatcgaagaaggagattgatccagatgcgcaaacaatatggtccgttaaaggtgaggtaaaccatatctcaccggaaagaaaactcgatcttataaaaagaagatttcctttcacaaaaagtaatgaaatattggaaatcatcgactctttccaacaagaatgtagagattccatgaagccagaagaagaagttgagtcaacgccacagctgaagaaacaagacccagatgtggaacaaccagttgccccccaagtcgaacagaggaacaaagaattgtcagaacatagaatgaaacagcgtgaagtatacttgaagtacaaggacactcgttattttgctcaagaaaaaaagccactggatttgtaccacaaaaaaatcgtgtcgccattgacaaccgtaggcaatttaccataccgtcgtctaatgagaaagttaggtgcagatgtgacatattcggaaatggccttggcagttcccttaattcaaggaactaattctgagtgggcgttacctaaagctcacacatcagagttccccgggttcggggttcaagtggcctgttctaaagcctggcaggcggcaaaggctgcagaagcactcgcaaactccgtcagtgaaataagtgaaatcaacttaaactctggctgccccatcgatttgctatacagacaaggttctggtagcgccctgctggataaccctgcaagaatgattcgttgtttaaacgcgatgaactacgtatcgaaagatattcctatcacggtgaagatcagaacaggtacaaaggaaggtcatcctatcgcggaagggttagtcaaaagactggttaacgaaactgatgtggctgcgattaccttacacggtaggtctaggcaacaaaggtacactaagtctgcggattgggactacgtgagtcaagtggctgacaccttgagatccgccgaagcggatttcatcgaaaccgaacaaggcaaagaaggcagggattccaagaacagaattcaatttgtcggaaatggtgatgtcaacaattttgaagactggtaccgctatttgaacggaaatgaaaatattgatagtgttatggttgctcgaggggccctgatcaaaccatggatttttgaagaggttgagtcgcagcagtatctagacaagacaagtacggaaagattagacattttaagggattatgcgcagttctctatggaacactggggcaccgacgaatacggcatttctcaatgtcgtagattcttctgcgagttcatgtccttttttcataggtatgtcccatgggtatttgtgaaagataccctgtga

SEQ ID NO: 191103 - DNA, 516 bp, Saccharomyces pastorianus
atgaaacttttcaaaaatggtgcacgggctttctgtatattgaactttccgtcgcttttcggagctacaattcccctacccggcttgtcggcattaagtctcttcatcccgtgtactattacccgacagtttctgcggcatgttctgtggaacgacggtacgggcggtgactgggtgccaaacagtgcggcgttcccgtgcgcaaggtggtctgcggtaggaaaaagaaacaaaacgcgcctacgtcgtgcaaggggacaggattttgtcagttacataataaggagcaatttcgaatcaattgaaatttggaacaaatgggcgatgcattcgttaaaaggcgattttgtatcaaataacgtcactatcagccattgtcacttgccactgtcgcctgccaccgctattgccattatcatttgctttcgcatcgtcaccgatttaaagctctctaggctaacgtacgcattttacctcccaggccctatctcttttctacctgtcatccctatataa

SEQ ID NO: 191104 - DNA, 5314 bp, Saccharomyces pastorianus
atggaatcccaacaattacatcaaaatccacattctcttcatggtagcgcctatgcttcggttacttctaaggaagtcccatcaaatcaagatccgttagccgtttcagcttccaatttaccggaatttgatagagattccactaaggttaattctcaacaagagacaacacctgggacatcagctgttccagagaaccatcatcatgtctctcctcaacctgcttcagtaccacctccacagaatggacagtaccaacagcacggcatgatgaccccaaacaaagctatggcctctaactgggcacattaccaacaaccatctatgatgacgtgttcacattatcaaacgtcacctgcgtattatcaaccggacccacactatccgttgccacagtatatcccaccactgagtacttcctcacctgatccaatcgatttaaaaaatcaacactctgaaatacctcaagctaagacaaaggtgggaaataacgtcttaccaccacacactttaacatcagaagaaaacttttctacatgggttaaattttacatcagatttttgaagaactctaatctcggtgacatcattccaaatgaccagggtgaaatcaaaagacaaatgacttatgaagaacatgcgtatatatacaataccttccaagcatttgccccatttcatttattgccaacatgggtaaaacaaattttagaaattaattatgctgacatccttacagtcctttgtaaaagtgtgtccaaaatgcaaactaacaatcaagaattaaaggattggatagctcttgccaaccttgagtacgacggaagtacatctgctgatacatttgaaattacagtcagtacgatcattcagaggctaaaagaaaacaatatcaatgttagcgacagattggcctgtcaactaatacttaaaggtctatccggtgacttcaaatacctacgtaatcaatatcgtaccaaaacgaacatgaaactttcccaattattcgctgaaattcaattaatatatgacgaaaataaaatcatgaatctaaataaaccgtcccaatacaaacaacacagcgaatacaaaaatgtttctcgcacatctccaaacacgactaacacaaaggttacaactcgtaattatcatagaacaaatagttcaaaaccaagagcagcaaaagctcacaatattgctacatctagtaaattctcaagggtgaacaatgatcacattaatgaatcaaccgtttcatcacaatacttaagcgatgacaacgaacttagtcttaggccagcaacagaaagaatctaagccaacacacacaatagactcgaatgacgaactacctgatcaccttcttattgattcaggagcttcgcaaacgcttgtcagatcagcccattatttacaccatgcaacacccaattctgaaataaacatagtcgatgctcaaaaacaagacattcctataaatgccattggtaatcttcacttcaactttcagaacggcaccaaaacatcaataaaagcactacacacaccaaacatagcctatgatctattaagtttgagtgagctggctaaccaaaatattactgcctgctttaccagaaacactttagaaagatcggatggtacagtactagctcccatagtcaaacatggagacttttactggttatctaaaaaatacctaattccttcgcacatttcaaagctaacaataaacaacgtcaacaaaagcaaaagcgtaaataaatatccatatccgttaatacatcgaatgcttggacatgctaacttccgaagtattcagaagtctcttaagaagaatgcagttacatatttgaaggaatcggatattgaatggtctaacgctagcacatatcaatgtcctgactgtctaatcggcaaaagcacgaaacatagacatgtcaaaggatcacgactaaagtaccaagaatcatatgagccttttcagtacttgcataccgatatatttggtcctgtacatcacttaccgaaaagtgcaccttcttactttatatcgtttacagatgagaaaaccagattccaatgggtgtacccattacacgaccgtcgtgaagaatctatcctcaatgtttttacatcgatattagcatttattaagaaccaattcaatgctcgcgttctagttatccagatggatcgtggctccgagtacactaacaaaactcttcataagttctttacgaacagaggtattactgcatgctatacaaccacggcagattctagagcacacggtgtcgctgaacgattaaatcgtactttattaaacgattgtcgcacactgcttcattgcagtggtctaccaaatcatctatggttctcagcagtcgaattttctactataatcagaaattcattagtctcaccaaaaaacgataaatctgcaagacaacatgcaggtttagctggactggacattactactatactacctttcggtcaaccggttatagttaacaaccataatcccgactcgaaaatacatcctcgtggcattccaggttacgccttacatccgtcacgaaactcttatggctatattatctatcttccatcattaaaaaagacagtagatactaccaattacgttatattacaagacaaccaatccaaattggaccaattcaattatgatacactcacctttgatgatgatctcaatcgtttaacagcccataaccaatcttttattgaacaaaatgaaacagagcagtcatatgatcaaaatacagaatctgatcatgactatcaatcggagattgaaataaactctgatcctctagtgaacgacttctcgtcccaatcaatgaaccccttacaattagaccacgaaccagtccaaaaagtacgtgcaccaaaagaagttgatgccgacatatctgaatacaatattcttccatctcctgtacgatctcgtacaccccatatcattaataaagagagtaccgaaatgggtggtaccattgaatcagatactacttcacctagacactcgtctaccttcactgcacgaaaccaaaagcgacctggtagtcccaatgatatgattgatttgacctcacaggatagagttaattatggacttgaaaacatcaaaactacacgtttgggtggtacggaggaaccatatattcaacgaaatagtgatacaaatatcaaatacaggactacaaatagtacgccctcaatagatgaccgttcgtccaacagtgaatccactactcccatcatctccatagaaacaaaggctgtatgtgataatacaccctccattgatacggatccgccagaatatcgatcttctgaccatgcgactcctaatataatgcctgacaaatcctcaaaaaatgttacggctgattctattcttgacgacctcccacttcctgacttaacccataaatctcctacggacacttctgatgtttcaaaagatattccacacatacactctcgtcagactaattccagtttgggtggtatggatgattctaatgttctgactactaccaaaagtaagaaaagatcattagaagataatgaaactgaaattgaggtatcccgagacacatggaataataagaatatgagaagtctggaaccaccaagatcgaagaaacgcataaatttaattgcagcaataaaaggagtgaaatcgatcaaaccagttcgaacgaccttaagatatgatgaagcaattacatataataaagacaacaaagaaaaagacagatatgttgaagcttatcataaagaaattagccaactattgaaaatgaacacttgggatacaaacaaatattatgatagaaatgacatagatcctaaaaaagtaataaactcaatgtttatatttaacaagaaacgtgatggtacacacaaagctagatttgttgcaagaggcgacattcaacaccccgatacatatgattctgatatgcaatccaataccgtacatcactatgcactgatgacgtcactgtcaatcgcattagacaacgactattatatcacacagctggacatatcctctgcttacttatatgctgatatcaaagaagaattatacataagacctccaccacatttaggtttgaatgataaattactacgtttgagaaaatcactctatggtttgaaacaaagtggtgcaaactggtatgaaaccattaaatcatatttaataaattgttgcgacatgcaagaagttcgcggatggtcatgcgtatttaagaatagtcaagtaacaatttgcttattcgttgatgatatgatattattcagcaaagacttaaatgcaaataagaaaatcataacaacactcaagaaacaatacgatacaaagataataaatctgggtgaaagagataacgaaattcagtacgacatacttggattagagatcaaatatcaaagaagcaagtacatgaaattaggtatggaaaaatccttgacagaaaaattacccaaactaaacgtacctttgaacccaaaaggaaagaaacttagagctccaggtcaaccaggtcattatatagaccaggatgaactagaaatagatgaagatgaatacaaagagaaggtacatgaaatgcaaaagttgattggtctagcttcatatgttggatataaatttagatttgacttactatactacatcaacacacttgctcaacatatactattcccctctagacaagttttagacatgacatatgagttaatacaattcatgtgggacactagagataaacaattaatatggcacaaaaacaaacctaccaagccagataataaactagtcgcaataagcgatgcttcatatggtaaccaaccatattacaagtcacaaattggtaacattttcctactcaacggaaaagtgattggaggaaagtcgacaaaggcttcgttaacatgcacttcaactacagaagcagaaatacacgcagtcagtgaagctataccgctattgaataacctcagtcaccttgtgcaagaacttaacaagaaaccaattattaaaggcttacttactgatagtagatcaacgatcagtataattaagtctacaaatgaagagaaatttagaaacagattttttggcacaaaggcaatgagacttagagatgaagtatcaggtaataatttatacgtatactacatcgagaccaagaagaacattgctgatgtgatgacaaaacctcttccgataaaaacatttaaactattaacaaacaaatggattcattag

SEQ ID NO: 191105 - DNA, 726 bp, Saccharomyces pastorianus
atgaatatgggaggcagtagcagcactgctgccaaaaaagcgacttgtaaaatatcgatgttatggaattggtataccattgacacctgcttcattgccagatcttggagaaatgacaccaaaggaaaatttgctggttcttgcatcggctgttttgcgcttgtggtggtagctcaatggcttactcgtttttcaaggcaatttgacgtagagctattaaaaagacagaaaataaagcatttagctagttactcgccagaggagtacgttgtcaaatgtggagaagaggatgctaaatctgatatagaagaactacaaggcttttacaacgaaccaagctggaaaacaactttaatttccttacaaaaaagtttcatttatagtttttacgtttggggtccaaggagattgaacgagccagaagacgacctgttaaagaaggtcctatcatgctgtacattaataacgccagtggatttgtacccaacttttttggatcacatgataagagttactattttcgtattacagtgggggttatcttatatcatcatgctgctgttcatgtactataacggctatatcattattagttgtttaataggtgctatcgttggtcgtttcatattttgctatgaacctctaggctcattgggtgctaatggatcagcccagggtacagtgagttatgataaagagagtgatgatcgcaaatgctgcttgtag

SEQ ID NO: 191106 - DNA, 207 bp, Saccharomyces pastorianus
atgcatttgtgccagaatggacactattacaaaccccaccgtgcctcagctgagaaggtcccttacctaaagaaaaagaaaaagaattctcgaaacgaaggcaaggcaaaaaaaaagaatgaaaagaaaaaaataggaactgttgaattttttcaacaaaaaaaaaaagaaaaaaaacgggtcctaaatgcggtgtgtgggttataa

SEQ ID NO: 191107 - DNA, 825 bp, Saccharomyces pastorianus
atggattttaaagcaagtgggacaaagtttaagaaaactggcaagaaggtagtgcctgctaaagcgtttgaagaaattgttcagacaaatagagatgttctgaaaaaatcagcattcctctcagatttacttgaaaatttacaaccgcacctcaataacattaagaaaatacgatgtgttgcaattggaaatttcaaggaggattttcctgcgacgtaccaattcgctcttctcctagagattactgattatataaaaagtgaggatgaaagggatgtcgttgtttccctgtatgatccaatatttactaaagaagagatacagtacttgaaaagtttaggaagcaaatggctgatagaggaagaattttcagagaacgatgcaattgattatgaatcggtattatatttccttccccatgctcctttggatttaactgagaacatactatcgtcacagcgaccacacttatggctggcaaataatatgatatcacacaccgatagatacaccaaagcaaaactttgtgaaaactatcctaatttaagcaagctagttcattacttgcagactaacgctccgccagaagttaaaaaagcacatgatgtagatggttttgcaacattcattccaaagagaaaaagaaaaaacagaaacaactcctctaaactcaaggtcacaccatctgatatagactatgattcaatagcaccgaagtttaagtcctgccaaatactcaccgattttgatgaaggaaagtatttgaaggaaaaaccctggatcaattccttctctgacttgacgttacatgctatagagtactaa

SEQ ID NO: 191108 - DNA, 2028 bp, Saccharomyces pastorianus
atgaattttaaaatactcctcccgatttgtgctttattgacacttacaacatttctgttgaccattattgcaactgcgggttctacctcaaattataagccaataacgaacatttatatcggtgatgctgatatatcaaaaatcaacgttacaaaagttatgccacaagttggcccaattttgactgtgttaggttctgctctaaccgctccaaatacaacggtggataccatcttcggcgctcttaaggcaatcgcttctaccgaagccttgtctcctttactgcacttgttgtctaatgctgctaacacttcagccacattatcatctttgacacagttggctccaatggctttgctaggaaccaataccgctactaccacgaccttctccgctcttgatgagttattgactacctctaaaaacacaaccgaactcttggatgggtttagcacattgatgtcatctatgtcaaccaacacttcttctacttcggcttccttagaaaatactgttctaaccctattagtggattcgaccaatcctataggcactactgagtctttgatcactttaaataatatgaccacagaagaaaagacaaaattgtcgcctgtattcgagttattcgcaagttccaagaacattactgccacatgcgatgcgttagaaaccataatgaactctaccattccaacttcaacggtctcctcattgttttctagtctaaaaaccagtcttgcggaaggtggcaatgctactgaaactattatgcaattaggctccctcgttccttcgagtttaaaaccagctgtccaagctgttgttactctgtttgatgaaactacatctcaaaatgtaacattatccgtattgagcactatgattgccgaaaacattacccaatcatcttccgctaaagctgccatgggtgctttgactgacttgttgaattacactacaaaccaaacagagctgctaacatctgtcgaaagtttggccctctctaaagaagccgcttcctctactaaccaattggtggcacttgatgaaatcctttctgcaagtgctaacgcatccacagttgtttccataatccctactttggaatcccaattggccaataacaccgtattacttaagtacgttccatacttgttcagcctattagctgcgtcaagcgaccccgtgtcaagtttctcttctctggttaatatcaccaaatgggcagaaactaatgccgctacatttatgcccatgttgaaaattttaaactctgctgtaaacatgacaactatcacaccagaacaactcaaggaaatgactccttctatccttgaatatctacacatccctgtcatataccgtttgtccattttcacaatgtgtcgtgctcacttaaacagaacaatgtactcgtgtagcaagtcacacgctgttcaaaacatggatttccggtcgattgtttacaacaacattgaaggctcggactttaaaccttatatggatgccctgaacatcggtaaggacgatttgcatttagatggtgaattacaagacagacaacacatgtatgtcccagcagtgaaagcagctttagctatgaacttaatgtgcataatcacatccttcttcttaatggtattcttgttgctactaagtagacgttccgtggtgagtcaaaaattatggttggcattgggctttatttcctgttggatatgtattttcagcgggttgggaagcacaatctttagcgtcatccttaatatgatgaaatccggctccaagaaggacaattacgatgtcattatttctggctcttctccattttatggcctaatgtggtctggatttgtatttgccgtccttgtatttctctgcattgcatactgctggtggagcagcagaaagggagctgccatcgtggaagctgagaaagctgttcaagaaagtgactctactacctcaagaatcattgaagaacacgaaagccccattgatgctgaaaaaaactttgcaaggtaa

SEQ ID NO: 191109 - DNA, 915 bp, Saccharomyces pastorianus
atgactgcccaacaagtatgtgtaaagatgagtaaattgaaggatgtgatggttatggagatggcacacgtgcctagaggaaaatagttacccaagaacaaaagcaggaagggagctaaccttttaaatatgaactggacaaaactggacaaaatgaaaataacgattttagtaaaaatgaaaatatagcatcaaatgactgagaaacatagtaacaataactcatattatagctaatctgagtaaacttcttcctacgctaagaatttttttgaggatagtaccaaaccttgtgctgaatcagcacacgccatgcccaccatcaattgtgcaagaaaaaagtaaacgagtagtatactaactatatatgtgatttacatcacgatatgtcaattataggccccaaagtggtatccttccgaagacgttgctgccccaaagaaaaccagaaaggctgttcgcccacaaaagttgcgtgcctctctagttccaggcactgttttgatcttgctagctggccgtttcagaggtaagagagttgtctacttgaaacatctagaagacaacactctattggtcactggtccattcaaggtcaatggtgttccattgagaagagtcaacgctcgttatgtcattgctacctctaccaaagtctccgtggaaggtgtcaacgttgaaaaattcaacgttgaatactttgccaaggaaaaattgaccaagaaggaaaagaaggaagctaacttgttcccagaacaacaaactaaggaaatcaagactgaacgtgttgaagatcaaaaggttgttgacaaggctttgttggctgaaatcaagaagaccccattgttgaagcaatatttgtccgcttctttctctttgaagaacggtgacaagccacacctattgaaattctaa

SEQ ID NO: 191110 - DNA, 1131 bp, Saccharomyces pastorianus
atgcaagttgcaattccagaaaccatgaaggctgtcgtcattgaagacggtaaagcggttgttaaagagggcattcccattcctgaattggaagaaggattcgtattgattaagacactcgctgttgctggtaaccccactgattgggcacacattgactacaagatcgggcctcaaggatctattctgggatgtgatgctgctggccaaattgtcaaattgggcccagctgtcaatcctaaagacttttctatcggtgattatatttatgggttcattcacggatcttccgtaaggtttccttccaatggtgcttttgctgaatattctgctatttcaactgtggttgcctacaaatcacccaatgaactcaaatttttgggtgaggatgttctacctgccggccctgtcaggtctttggaaggtgtagccactatcccagtgtcactgaccacagccggcttggtgttgacctataacttgggcttggacctgaagtgggagccatcaaccccacaaagaaaaggccccatcttattatggggcggtgcaactgcagtaggtcagtcgctcatccaattagccaataaattgaatggcttcaccaagatcattgttgtggcttctcggaagcacgaaaaacttttgaaagaatatggtgctgatgaattatttgattatcatgatattgacgtggtagaacaaattaaacacaagtacaacaatatctcgtatttagtcgactgtgtcgcgaatcaagatacgcttcaacaagtgtacaaatgtgcggccgataaacaggatgctacaattgttgaattaaaaaatttgacagaagaaaacgtcaaaaaagagaacaggagacaaaacgttactattgacataataaggctatattcaataggtggccatgaagtaccatttggaaacattactttaccagccgactcagaagctaggaaagctgcaataaaatttatcaaattcatcaatccaaagattaatgatggacaaattcgccatattccagtaagggtctataagaacgggctttgtgatgttcctcatatcctaaaagacatcaaatatggtaagaactctggtgaaaaactcgttgccgtattaaactag

SEQ ID NO: 191111 - DNA, 363 bp, Saccharomyces pastorianus
atggtcaaattaacttcaatcgccgctggtgtcgctgccatcgctgctactgcttccgcaaccaccactatagctcaatctgacgaaagagtcaacttggttgaattgggtgtctacgtctctgatatcagagctcacttggcccaatactacatgttccaagccgcccacccaactgaaacctacccagttgaagttgctgaagccgttttcaactacggtgacttcaccaccatgttgactggtattgccccagaccaagtgaccagaatgatcaccggtgttccatggtactccagcagattaaagccagctatctccaaggctctatccaaagatggtatctacactatcgcaaactag

SEQ ID NO: 191112 - DNA, 552 bp, Saccharomyces pastorianus
atgggttcttcattcgtaatagatcgatcctcttcgtcaccagcgccaccacggggacccgccccgaaattgagtgcacatgctcgcaagataatatgcaaaatatcacccaatcggtcctttttgttcatcatatcgttacatatctgtgaaaagtactttatctcaatgggtttacgtgggcatagatcacgcttcagccgctctgtgtcgactttcttttcgccaggtaaacttgcttgcatagctcatctacgtgtaggctgccaaattgtacccatatttccttatggtgcttttctgaagactccttacaataggtgcgccggaaacaaagtcagtgaaagtacgcatcgtagagctgtcgttcggcctagcactcgctatttcgtgacaacgttccaggacacggaaactcaactcattatagtatcctctgttgaggtaaaaaagagaaagggtatcgtaatcctttctattgaatttcaaagtatgcacttgaaacaacgtgtagaccatcaagttgattttcttgggaacaagatactttga

SEQ ID NO: 191113 - DNA, 309 bp, Saccharomyces pastorianus
atggatcatccacataagtggcaccgtaagctcgtcaattgcaacagcgactttatttttaagagccgcggtcattttgttagtatctcttctcaacttgggcagcacaatttcacgatatttaacaggtatcatttgaaaaaaagaatcgttttccagatactcgtcaattcctcgcttcggttctctgaacaaaacttctcgattacgcaaaatgaggctggcatatggaagcagttgttcaactctccccaaagttttccacatactgatataccatcagaagaaggtaccaaagttattctataa

SEQ ID NO: 191114 - DNA, 873 bp, Saccharomyces pastorianus
atgtcagtttaccatttaccaacgctgttgaacccgctggttaatgctatatttaactgtcccgaaccagaaagatccccattgaaaaagcttttcgctaatttaaaaacccgtaggtttatcctcctagcacctccttcagaataccttttgaattaccacgatgtcaagagcaaactgccgttacatgacctctgttataatgcagagtttattaactcttacatattgttaatgactgaaaactcttacataaatacgaattcaagggacagtcattatgaaacgttagatggtaagaccgttgttattcaatggaagaataatgtgatccatgccttaaatggatttcatataaggcgaagactaaagattctagagacaaaaatattacccaattttaatgactactttgaaggggcggctgattttatcatactattcatagatcaacctttaaattgcgaatttgtacctaacgactacttacagtgttttcacaattatgagaaaataccaaaaaatgcacatgctatgccaaatctgtcgatagattcttttcagcaagaaagatcgtcattcgagaatatattgcacattcatcctgctcgattaacacagcttggccaattgttttcgagttacagaacgctcgctcctggtgatgatccatctagaagtatttttgaaagcatcgtgcaacaagcatttgatggaatgaaatcggattcacttttcaagaacttttctaatctttacgatcttatacacgactattttgaactaaatctttacgatgatatatggtctaggcttactacacatttcaaaggccacgaagtagacactgaaaaaataaatatttttcagtga

SEQ ID NO: 191115 - DNA, 5269 bp, Saccharomyces pastorianus
atggaatcccaacaattatctcaacattcacatatttctcatggtagcgcctgtgcttcggttacttctaaggaagtccacacaaatcaagatccgttagacgtttcagcttccaaaacagaagaatgtgagaaggcttccactaaggctaactctcaacagacaacaacacctgcttcatcagctgttccagagaacccccatcatgcctctcctcaacctgcttcagtaccacctccacagaatgggccgtacccacagcagtgcatgatgacccaaaaccaagccaatccatctggttggtcattttacggacacccatctatgattccgtatacaccttatcaaatgtcgcctatgtactttccacctgggccacaatcacagtttccgcagtatccatcatcagttggaacgcctctgagcactccatcacctgagtcaggtaatacatttactgattcatcctcagcggactctgatatgacatccactaaaaaatatgtcagaccaccaccaatgttaacctcacctaatgactttccaaattgggttaaaacatacatcaaatttttacaaaactcgaatctcggtggtattattccgacagtaaacggaaaacccgtacgtcagatcactgatgatgaactcaccttcttgtataacacttttcaaatatttgctccctctcaattcctacctacctgggtcaaagacatcctatccgttgattatacggatatcatgaaaattctttccaaaagtattgaaaaaatgcaatctgatacccaagaggcaaacgacattgtgaccctggcaaatttgcaatataatggcagtacacctgcagatgcatttgaaacaaaagtcacaaacattatcgacagactgaacaataatggcattcatatcaataacaaggtcgcatgccaattaattatgagaggtctatctggcgaatataaatttttacgctacacacgtcatcgacatctaaatatgacagtcgctgaactgttcttagatatccatgctatttatgaagaacaacagggatcgagaaacagcaaacctaattacaggagaaatctgagtgatgagaagaatgattctcgcagctatacgaatacaaccaaacccaaagttatagctcggaatcctcaaaaaacaaataattcgaaatcgaaaacagccagggctcacaatgtatccacatctaataactctcccagcacggacaacgattccatcagtaaatcaactactgaaccgattcaattgaacaataagcacgaccttcaccttaggccaggaacttactgaatctacggtaaatcacactaatcattctgatgatgaactccctggacacctccttctcgattcaggagcatcacgaacccttataagatctgctcatcacatacactcagcatcatctaatcctgacataaacgtagttgatgctcaaaaaagaaatataccaattaacgctattggtgacctacaatttcacttccaggacaacaccaaaacatcaataaaggtattgcacactcctaacatagcctatgacttactcagtttgaatgaattggctgcagtagatatcacagcatgctttaccaaaaacgtcttagaacgatctgacggcactgtacttgcacctatcgtaaaatatggagacttttactgggtatctaaaaagtacttgcttccatcaaatatctccgtacccaccatcaataatgtccatacaagtgaaagtacacgcaaatatccttatcctttcattcatcgaatgcttgcacatgccaatgcacagacaattcgatactcacttaaaaataacaccatcacgtattttaacgaatcagatgtcgacaggtctagtgctattgactatcaatgtcctgattgtttaatcggcaaaagcaccaaacacagacatatcaaaggttcacgactaaaataccaaaattcatacgaaccctttcaatacctacatactgacatatttggtccagttcacaacctaccaaaaagtgcaccatcctatttcatctcatttactgatgagacaacaaaattccgttgggtttatccattacacgaccgtcgcgaggactctatcctcgatgtttttactacgatactagcttttattaagaaccagtttcaggccagtgtcttggttatacaaatggaccgtggttctgagtatactaacagaactctccataaattccttgaaaaaaatggtataactccatgctatacaaccacagcggattcccgagcacatggagtcgctgaacggctcaaccgtaccttattagatgactgccgtactcaactgcaatgtagtggtttaccgaaccatttatggttctctgcaatcgaattttctactattgtgagaaattcactagcttcacctaaaagcaaaaaatctgcaagacaacatgctggcttggcaggacttgatatcagtactttgttacctttcggtcaacctgttatcgtcaatgatcacaaccctaactccaaaatacatcctcgtggcatcccaggctacgctctacatccgtctcgaaactcttatggatatatcatctatcttccatccttaaagaagacagtagatacaactaactatgttattcttcagggcaaggaatccagattagatcaattcaattacgacgcactcactttcgatgaagacttaaaccgtttaactgcttcatatcaatcgttcattgcgtcaaatgagatccaacaatccgatgatcttaacatagaatctgaccatgacttccaatctgacatcgaactacatcctgagcaaccgagaaatgtcctttcaaaagctgtgagtccaaccgattccacacctccgtcaactcatactgaagattcgaaacgtgtttctaaaaccaatattcgcgcacccagagaagttgaccccaacatatctgaatctaatattcttccatcaaagaagagatctagcaccccccaaatttccaatatcgagagtaccggttcgggtggtatgcataaattaaatgttcctttacttgctcccatgtcccaatctaacacacatgagtcgtcgcacgccagtaaatctaaagatttcagacactcagactcgtacagtgaaaatgagactaatcatacaaacgtaccaatatccagtacgggtggtaccaacaacaaaactgttccgcagataagtgaccaagagactgagaaaaggattatacaccgttcaccttcaatcgatgcttctccaccggaaaataattcatcgcacaatattgttcctatcaaaacgccaactactgtttctgaacagaataccgaggaatctatcatcgctgatctcccactccctgatctacctccagaatctcctaccgaattccctgacccatttaaagaactcccaccgataaattctcatcaaactaattccagtttgggtggtattggtgactctaatgcctatactactatcaacagtaagaaaagatcattagaagataatgaaactgaaattaaggtatcacgagacacatggaatactaagaatatgcgtagtttagaacctccgagatcgaagaaacgaattcacctgattgcagctgtaaaagcagtaaaatcaatcaaaccaatacggacaaccttacgatacgatgaggcaatcacctataataaagatattaaagaaaaagaaaaatatatcgaggcataccacaaagaagtcaatcaactgttgaagatgaaaacttgggacactgacgaatattatgacagaaaagaaatagaccctaaaagagtaataaactcaatgtttatcttcaacaagaaacgtgacggtactcataaagctagatttgttgcaagaggtgatattcagcatcctgacacttacgactcaggcatgcaatccaataccgtacatcactatgcattaatgacatccctgtcacttgcattagacaataactactatattacacaattagacatatcttcggcatatttgtatgcagacatcaaagaagaattatacataagacctccaccacatttaggaatgaatgataagttgatacgtttgaagaaatcactttatggattgaaacaaagtggagcgaactggtacgaaactatcaaatcatacctgataaaacagtgtggtatggaagaagttcgtggatggtcatgcgtatttaagaatagtcaagtaacaatatgtttatttgttgacgacatgattttattcagcaaagacttaaatgcaaataagaaaatcataacaacactcaagaaacaatacgatacaaagataataaatctgggtgaaagtgataacgaaattcagtacgacatacttggcttagaaatcaaatatcaaagaggtaaatacatgaaattaggtatggaaaactcattaactgagaaaatacccaaattaaacgtacctttgaatccaaaaggaagaaaacttagcgctccaggtcaaccaggtctttatatagaccaggatgaactagaaatagatgaagatgaatacaaagagaaggtacatgaaatgcaaaagttgattggtctagcttcatatgttggatataaatttagatttgacttactatactacatcaacacacttgctcaacatatactattcccctctaggcaagttttagacatgacatatgagttgatacaattcatgtgggacactagagataaacaactgatatggcacaaaaacaaacctaccgagccagataataaactagtcgcaataagtgatgcttcgtatggcaaccaaccgtattataaatcacaaattggcaacatatatttacttaatggaaaggtaattggaggaaagtccaccaaggcttcattaacatgtacttcaactacggaagcagaaatacacgcgataagtgaatctgtcccattattaaataatctaagttacctgatacaagaacttaacaagaaaccaattattaaaggcttacttactgatagtagatcaacgatcagtataattaagtctacaaatgaagagaaatttagaaacagattttttggcacaaaggcaatgagacttagagatgaagtatcaggtaataatttatacgtatactacatcgagaccaagaagaacattgctgatgtgatgacaaaacctcttccgataaaaacatttaaactattaactaacaaatggattcattag

SEQ ID NO: 191116 - DNA, 946 bp, Saccharomyces pastorianus
atgagtgcccaaaaagtatgttcctacatgttaatttcgagggggagatgtcaatttacattcacgaaggcataagttttgaaatttgatatgatgccatcaatctcagacatatccatacaagaaacaataagatcaggacgtcgaacaaaataatacaatgaaaactgataaatgacgttatacagtgtacagtgaggataaatgattaaggcagtatacctttcaacacaatgttaatactatgagtgagaaggtgagcaaagcaataaggtatatcgaccctagctcatgattatttagtttccaaacaaaggcccacgttacagtttcaaatcgctaggcataatctctccctataaaaatttatcaccattcgcaaatcaagaatactaacattagtcgtttgatatttcttttttccatttaggctccaaagtggtatccatccgaagacgtcgctgctctaaagaagaccagaaaggctgctcgcccacaaaagttgcgtgcctctctagttccaggtaccgtcttgatcttactagctggtcgtttcagaggtaagagagttgtttacttgaagcatctagaagacaacactttgttgatttctggtccattcaaggtcaatggtgttcctttgagaagagtcaatgctcgttacgtcattgctacctctactaaggtttctgtcgaaggtgtcaacgttgaaaaattcaatgtcgaatactttgctaaggaaaaattgactaagaaggaaaagaaggaagctaacttgttcccagaacaacaaaacaaggaaatcaaggctgaacgtgttgaagaccaaaaggttgtcgacaaggctttgattgctgaaatcaagaagactccattattgaagcaatacttgtctgcttctttctctttgaagaacggtgacaagccacacatgttgaaattttaa

SEQ ID NO: 191117 - DNA, 855 bp, Saccharomyces pastorianus
atgacaggatctttaaacagacactcacttttgaacggggtaaaaaaaatgagaataatattatgcgatacaaacgaagtagttaccaatctctggcaggaatctataccccatgcatatattcaaaatgataagtatctttgtattcatcatgggcaccttcaatctcttatggattcaatgcgtaaaggtgatgcaatccatcatggccactcttacgcaattgtttcacctggtaactcgtatggctatcttggaggagggttcgataaagctttgtataattatttcgggggaaagccctttgaaacatggttcaggaatcagcttggaggaagatatcacacggtcggatctgctacagtggttgacctacagcgatgtcttgaagagaaaacaattgaatgtagagatggtattaggtatattattcatgttccgaccgttgtagccccatcagctcctatatttaatccgcagaatcccctcaagacagggtttgaaccggttttcaacgccatgtggaatgccttgatgcattctccaaaagacattgatggtcttattattcctggattatgtactgggtatgcaggtgtaccacccattatcagttgcaagagtatggcctttgcgttaagactatatatggcgggagatcacataagcaaagaattgaaaaatgtgctgatcatgtattatttgcaatatccgtttgaaccttttttcccggaaagttgcaaaatagagtgccaaaaactaggaatagatatcgaaatgctgaaatcctttaatgtagaaaaagatgcaatagaattgctcattcctagaaggattttgaccttggatttataa

SEQ ID NO: 191118 - DNA, 976 bp, Saccharomyces pastorianus
atgtcagctgtcccaagtgttcaagtatgttttcagttctgcagaatgatgtttgatagtatcgataatggagtgagatcaagagaaaaaaaatgaatatgtcagccaaccaagttctgagtaggcagtaaatgagtacgcatagtgtatttatccaaaggaaagaattgttatttttacaagccgaattgagatccaattaggcaatgttttggggagagtattttgacaagattggttaaactactacggtcagttccgtaaccagtacgattgtacacataaggaaacaactgtaaagataaacaataagggcttccaatgccattgtaagatatcatattcctaaacaaaaatgtacagcgaatataaagccagcgtcagtgtcttcctggaaggttgcgcaactaaagaagttgaaattaaaatggcaagcgctacattttcatccattttcactcatcagatgtccaagattttcgaaaaataaatattctcatttttctctcaatgaaataattgttactaacattgaatttcctcgtaactaattgcattacttctttagacttttggtaagaagaaatcagctactgctgttgcccatgtcaaggccggtaagggtttgatcaaggttaatggttctccaatcactttggttgaaccagaaatcttaagattcaaggtttacgaaccattattgttagttggtttggacaaattctccaacatcgatattagagttagagttactggtggtggtcatgtttcccaagtttacgccatcagacaagctattgctaaaggtttagttgcttaccatcaaaaatatgtcgatgaacaatccaagaacgaattgaagaaggctttcacttcttacgacagaaccttgttgattgctgattctagaagaccagaaccaaagaaattcggtggtaagggtgctcgttccagattccaaaaatcttaccgttaa

SEQ ID NO: 191119 - DNA, 195 bp, Saccharomyces pastorianus
atgaattgtttatgtttatgttctttatactcaaaatcaataagtgcttattttagcgaattttcttctacgaatatatataagtcatatctaagacttccatccgtgctttattacgtttgtatgatgcatacaatgatgccaaatcagcttgatgctgttggtattcagtcgtccgaaagcctgttgatgtga

SEQ ID NO: 191120 - DNA, 728 bp, Saccharomyces pastorianus
atgttgatgccaaagcaagaaagaaacaaaattcaccaatacttgtttcaaggtatgtttgcattttttaggtgaaatatgcagtgatatgctccgaaatggatagcaaagatgataaatgaaaatacaattaaattgaacttgaatatcattaaaagtggtagaaaaccgattgtttcaaaaagatctttgtggacaagtacggcagtgcatgaatccgaaagaaaagtgcaacctaagcagaattccattatttcacgcgtccatttttataatgtttgaacttttgagtccttatagaaatgctaatattatgatcaaagcgattatatcatttactttacagtttccggagtttccgtattattgcaaaaggaccacaaacaattgaaatcatgatatcgtaagaaatattattactaacaaggaagatcattgaattacgatcgcatatcgaaatagaaggtgttgtcgtcgctaagaaggatttcaaccaagctaagcacgaagaaattgataccaagaacttgtatgttatcaaggctttgcaatccttgacttctaagggttacgttaagactcaattctcatggcaatactactattacactttgactgaagaaggtgttgaatacttgagagaatacttgaacttgcctgaacacattgtcccaggtacctacattcaagaaagaaacccatcccaaagacctcaaagaagatactaa

SEQ ID NO: 191121 - DNA, 144 bp, Saccharomyces pastorianus
atggcacacaaatgtgcaagtgccaagctattgagtggaataatggccttgttatttaatggtaagagccttctgaggccaatctgccttcacgtacacaaccaccttgttagtaacagtgataccaacatagtttggccgtga

SEQ ID NO: 191122 - DNA, 237 bp, Saccharomyces pastorianus
atggatagcaaagaatatctgatatcatatggttggaaagaaggagaagcgtttagagaaggtggtttgaaaagacccatactggtaaagcacaagagagataagaagggattgggtaatgctcctggcgggaatgatggcgaagcatggtgggaaaggctatttgatggacatctgaagaacctggatgtaagcactgattcgaataatggcagtattaaatttactccaaaatga

SEQ ID NO: 191123 - DNA, 243 bp, Saccharomyces pastorianus
atgatcactatgaagatgttcttgtttttaaacgaggcatgcatctttatagattctgtatgcgaaggtattgttttctggggcctttgtctattcgtatgcgccgaatgtgagaatgccagttataggggtgccgaggtgccttataaaacccttttccgttcctgtgatacttccatttttggtgtagcagaatgtctgaatttagttgctatagatcctcgttcagaagcgtattgctaa

SEQ ID NO: 191124 - DNA, 375 bp, Saccharomyces pastorianus
atggtcaaattaacttcaatcgctgccggtgttgccgccatcgctgccggtgttgccgctgctccagccactaccactctatctccatctgacgaaagagtcaacttggtcgaattgggtgtttacgtctccgatatcagagctcatttggctcaatactacttgtttcaagcagctcatccaactgagacctacccagttgagattgctgaagctgttttcaactatggtgacttcaccaccatgttgactggtattccagctgaacaagtcaccagagtcatcactggtgtcccatggtactccactagattgagaccagctatttccagtgctctatctaaggacggtatctacactgctattccaaaatag

SEQ ID NO: 191125 - DNA, 1917 bp, Saccharomyces pastorianus
atgaatcaacctcaaattggcacttacaatgtaggtacacagttaacagttgggtcacatcaggttgagatcattaaatatctaacaagcggtgggttcgctcaagtatattccgcgttaatcaacccacctgacccacattctaattcaagcgttgcatgcttaaaaagagtcattgttccagacaaacctagtctaaacactttaagagctgaagtagatgctatgaggttgctgaaaaacaataggtatgttgtatcttacattgattctcatgcagctaaggcaatgttacataatggttcgtatgaagtattcgtcttaatggaatattgtgaaagaggtggtctcattgattttatgaacacaaggctacaaaacaggcttcatgaatttgaaattttgcaaataatgagccaagttactcaaggagttgccgctatgcatgctttgcaacctccgttaattcaccgtgatataaagatagaaaatgttcttatctcagccaataatgagtacaagctttgtgactttggttctgtatgcggtattataaggcctcctaggaattcacaagagctatcatatgttcagcaagacattttgaaaaacacaactgcacagtaccggtcgccagagatgattgatacatttcgcggtctgccgatagatgaaaagtcggatatatgggcgctgggtatttttctatataagctttgctattacacaacaccgtttgaaaagggcggtgatcttgccatattaagcggaaagtttgaatttccattgtatccgaactacagtgaacagttgaaaggcttaatacgtgatatattggttcaagatccgcgccataggcctaacgtttatcaactactgaagaggatatcaattatgcaaaatgttccgtgtccaataaatgacatacaagtggttcaggcgcccagtagccatttgaatttgaccgaacttcatcagctttcggcaacacaaaatattctaagcttgaactctcccacaaccatggaaaatacgatgccgaacgctacatttcaaatcagcatggctgataatactacaacagcacaaatgcatcctaatagaaaaccatcacaaatagcatatgacgctagcttcagtaattccgccaaaggttctcaaccactttttgacaaatcacagaatatgtaccacgcattggatcctccacttgttgaaccgctagcgagtagtgtttcaaataatgacaacgaactcaaggcaaattccgcaaccaagttaaagcaggcaattgtctctgaagcacatacttttaggcagaataattcaatagactttccactacaaaacataataccccagtacgaagattcttcttcctcttcagatgaatcttattctggagacgtagatgaattaaagaaaactcgatctctaggttcttattccacacgcggtaacataaaaaaaaaccaatccgtaaaggaatctcttacttcatcaagcctaccaggcactagcttcaccccaacgtctacaaaggtaaatttgaaacacgaaaattcaccttttaagtcgacattcgttaatacgattgataattccaaagacgatcttaacaaaccatcttatgaagatttggacgtatctaagcagaatttgaagaactccattcaacagcgtatgatcgataaactcaactcttctgaggagtcattcaacgctaggaaaatgtccaaggtcaagctgcatgagaaaggggagatagataagccaacaatgctgaaatcaagtggcccgatttcaaaagacaaaaaaacaaaacctaccccaccacctaagccttcacatttaaagcctaaacctcctccaaaaccactgctcctcgcgggacgaaagttatccttggataagtga

SEQ ID NO: 191126 - DNA, 1170 bp, Saccharomyces pastorianus
atggctagttattctttagttgaatcgaattctttcgggtcagaaaattggtgtcttaagttacagcctagttataaacatggtcttttaactggattaagtaatggcgaaatacgtttgctagactggagtactggtaaatcagtacaaaagattaaggcgagcgaaactgcaatcaatgatatgaaggtcatcggtagcgacttctctgctggtcatctagttagtagcgcctctatcgacgcggtgaaagttttcgatataaggacgaatgaccgcattgctcaaattcaaaacgaggccaactccccctttatttccttagattctcgtcatggtctattggcctgtggtaccgaattgcagggaattgacgctgctgtatacatatatgatattcgcaaatgggacactccattgagatcattaattgactctcaccatgatgacgttacctgtattaaatttcatccttctgacgtcaatattttgctcagtggttcaactgatggttacacgaacatttatgacttgaaacaagatgaggaggaggacgctttacaccaagttattaattatgcgtcaatacattcctgtggatggttgtccccaaagaggatatttacactatcacatatggaaacatttgcaattcacgaattgaacgacaaatctgacgaattgaaagagccacaacccttggactttggtgatgtaagagaaatatggaactgtgactacgtggtagatatttaccctggactcattgcaaccggtaaaacccaagaaaattgtggagagttgtgcctcctaccatttaaagatgagaaggtggatactgaaaacggtattgttatcccacacgcccatggagacgaggtcgtcagagatatttttataccagcacaacatagcaacatgttatactcctgtggtgaagatggttgcgttaaaatttgggaaaacaaacaggggccgttagatattccagaaaatttttgggattactctaaaaaaatgaacgtcttaggagatgacgacagagaaggttccattaatttagacgaacctcttattattcaaaaagaatcggtttccacgaggccaaggaaggagaaacacaagaaagccaagaaacattccatgaaaagtcgtttcaaaccatactag

SEQ ID NO: 191127 - DNA, 5251 bp, Saccharomyces pastorianus
atggaatcccaacaattatctcaacattcacccatttctcatggtagcgcctgtgcttcggttacttctaaggaagtccacacaaatcaagatccgttagacgtttcagcttccaaaattcaagaatatgataaggcttccactaaggctaactctcaacagacaacaacacctgcttcatcagctgttccagagaacccccatcatgcctctcctcaaactgctcagtcacattcaccacagaatgggccgtacccacagcagtgcatgatgacccaaaaccaagccaatccatctgattggtcattttacggacgcccatctatgattccgtatacaccttatcaaatgtcgcctatgtactttccacctgggccacattcacagtttccgcagtatccatcatcagttggaacgcctctgagcactccatcacctgagtcaggtaatacatttactgattcatcctcagcggactctgatatgacatccactaaaaaatatgtcagaccaccaccaatgttaacctcacctaatgactttctaaattgggttaaaacatacatcaaatttttacaaaactcgaatctcggtggtattattccgacagtaaacggaaaacccgtacgtcagatcactgatgatgaactcaccttcttgtataacacttttcaaatatttgctccatctcaattcctacctacctgggtcaaagacatcctatccgttgattatacggatatcatgaaaattctttccaaaagtattgaaaaaatgcaatctgatacccaagaggcaaacgacattgtgaccctggcaaatttgcaatataatggcagtacacctgcagatgcatttgaaacaaaagtcacaaacattatcgacagactgaacaataatggcattcatatcaataacaaggtcgcatgccaattaattatgagaggtctatctggcgaatataaatttttacgctacacacgtcatcgacatctaaatatgacagtcgctgaactgttcttagatatccatgctatttatgaagaacaacagggatcgagaaacagcaaacctaattacaggagaaatccgagtgatgagaagaatgattctcgcagctatacaaatacaaccaaacccaaagttatagctcggaatcctcaaaaaacaaataattcgaaatcgaaaacagccagggctcacaatgtatccacatctaataactctcccagcacggacaacgattccatcagtaaatcaactactgaaccgattcaattgaacaataagcacgaccttcatcttaggccagaaacttactgaatctacagtaaatcatactaatcattctgatgatgaactccctggacacctccttctcgattcaggagcatcacgaacccttataagatctgctcatcacatacactcagcatcatctaatcctgacataaacgtagttgatgctcaaaaaagaaatataccaattaacgctattggtgacctacaatttcacttccaggacaacaccaaaacatcaataaaggtattgcacactcctaacatagcctatgacttactcagtttgaatgaattggctgcagtagatatcacagcatgctttaccaaaaacgtcttagaacgatctgacggcactgtacttgcacctatcgtaaaatatggagacttttactgggtatctaaaaagtacttgcttccatcaaatatctccgtacccaccatcaataatgtccatacaagtgaaagtacacgcaaatatccttatcctttcattcatcgaatgcttgcgcatgccaatgcacagacaattcgatactcacttaaaaataacaccatcacgtattttaacgaatcagatgtcgactggtctagtgctattgactatcaatgtcctgattgtttaatcggcaaaagcaccaaacacagacatatcaaaggttcacgactaaaataccaaaattcatacgaaccctttcaatacctacatactgacatatttggtccagttcacaacctaccaaagagtgcaccatcctatttcatctcatttactgatgagacaacaaaattccgttgggtttatccattacacgaccgtcgcgaggactctatcctcgatgtttttactacgatactagcttttattaagaaccagtttcaggccagtgtcttggttatacaaatggaccgtggttctgagtatactaacagaactctccataaattccttgaaaaaaatggtataactccatgctatacaaccacagcggattcccgagcacatggagtcgctgaacggctcaaccgtaccttattagatgactgccgtactcaactgcaatgtagtggtttaccgaaccatttatggttctctgcaatcgaattttctactattgtgagaaattcactagcttcacctaaaagcaaaaaatctgcaagacaacatgctggcttggcaggacttgatatcagtactttgttacctttcggtcaacctgttatcgtcaatgatcacaaccctaactccaaaatacatcctcgtggcatcccaggctacgctctacatccgtctcgaaactcttatggatatatcatctatcttccatccttaaagaagacagtagatacaactaactatgttattcttcagggcaaggaatccagattagatcaattcaattacgacgcactcactttcgatgaagacttaaaccgtttaactgcttcatatcaatcgttcattgcgtcaaatgagatccaacaatccgatgatcttaacttccaatctgacatcgaactacatcctgagcaaccgagaaatgtcctttcaaaagctgtgagtccaaccgattccacacctccgtcaactcatactgaagattcgaaacgtgtttctaaaaccaatattcgcgcacccagagaagttgatcccaacatatctaaatctgatatccttccatcaaagaagagatctagcaccccccaaatttccgatatcgagagtactggttcgggtggtatgcatagattagatgttcctttacttgctcccatgtcccaatctaacacacatgaatcgtcgcacaccagtaaatctaaagatttcagacactcagactcgtacagtgacaatgagactaatcatacaaacgtaccaatatccagtacgggtggtaccaataataaaactgttccgcagacaagcgaacaggagactgagaaaaggattatacaccgttcaccttcgatcgatacttcctcatcagaaagtaattcactacaccacgtcgttcctatcaaaacgtcagatacctgtcctaaggagaatacagaggaatctataattgctgatcttccacttcccgatctgcctccagaacctcctaccaaattatcagactcctttaaagaacttccaccgatcaattctcgtcaaactaattccagtttgggtggtattggtgactctaatgcctatactactatcaacagtaagaaaagatcattagaagataatgaaactgaaattaaggtatcacgagacacatggaatactaagaatatgcgtagtttagaacctccgagatcgaagaaacgaattcacctgattgcagctgtaaaagcagtaaaatcaatcaaaccaatacggacaaccttacgatacgatgaggcaatcacctataataaagatattaaagaaaaagaaaaatatatcgaggcataccacaaagaagtcaatcaactgttgaagatgaaaacttgggacactgacaaatattatgacagaaaagaaatagaccctaaaagagtaataaattcaatgtttatcttcaacaggaaacgtgacggtactcataaagctagatttgttgcaagaggtgatattcagcatcctgacacttacgactcaggcatgcaatccaataccgtacatcactatgcattgatgacatccctgtcacttgcattagacaataactactatattacacaattagacatatcttcggcatatttgtatgcagacatcaaagaagaattatacataagacctccaccacatttaggaatgaatgataagttgatacgtttgaagaaatcactttatggtttgaaacaaagtggtgcaaactggtatgaaacgatcaaatcatatctgattgaacaatgtgatatggaagaagttcgcggatggtcatgcgtatttaagaatagtcaagtaacaatttgcttattcgttgatgatatgatattgttcagcaaagacttaaatgcaaataagaaaatcataacaacactcaagaaacaatacgatacaaagataataaatctgggtgaaagtgataacgaaattcagtacgacatacttggattagagatcaaatatcaaagaagcaagtacatgaaattaggtatggaaaaatctttgacagaaaaattacccaaactaaacgttcatttaaatccaaaaggaaaaaaacttagcgctccaggtcaaccaggtctttatatagaccaggatgaactagaaatagatgaagatgaatacaaagagaaggtacatgaaatgcaaaagttgattggtctagcttcatatgttggatataaatttagatttgacttactatactacatcaacacacttgctcaacatatactattcccctctaggcaagttttagacatgacatatgagttaatacaattcatgtgggacactagagataaacaactgatatggcacaaaaacaaacctaccaagccagataataaactagtcgcaataagcgatgcttcatatggtaaccaaccatattacaagtcacaaattggtaacattttcctactcaacggaaaagtgattggaggaaagtcgacaaaggcttcgttaacatgcacttcaactacagaagcagaaatacacgcagtcagtgaagctattccgctattgaataacctcagtcaccttgtgcaagaacttaacaagaaaccaattattaaaggcttacttactgatagtagatcaacgatcagtataattaagtctacaaatgaagagaaatttagaaacagattttttggcacaaaggcaatgagacttagagatgaagtatcaggtaataatttatacgtatactacatcgagaccaagaagaacattgctgatgtgatgacaaaacctcttccgataaaaacatttaaactattaactaacaaatggattcattag

SEQ ID NO: 191128 - DNA, 2907 bp, Saccharomyces pastorianus
atgtccagaatagattcagatctgcagaaagcgcttaaaaaggcgtgttccgttgaggagaccgcacctaagagaaagcacgtacgcgcatgcatagtgtacacatgggaccatcagtcttccaaagctgtttttacaacccttaagacgctgcctctggccaatgacgaagtgcaactgttcaagatgcttattgtactgcataagatcatacaagagggacatccgtcagcgctagctgaggccatccgggatagggactggatcagatctctgggtagggtacattctggcggttcgtcgtacagcaaactgattcgggagtatgtgcggtacctggttttgaagctggactttcatgcgcaccatagagggtttaacaacgggacgtttgagtacgaggagtatgtgtcactggtttcagtttccgacccggacgaagggtacgagacgatcttagatttgatgtcgttacaggattctcttgacgagttctcgcagatcatctttgcgtcgattcagtccgagaggagaaatactgagtgcaaaatttcggcgctgatcccgttgattgcggagtcatatggtatttataaattcatcacctcgatgctgagagctatgcacaggcaattgaatgatgcggagggtgacgctgctctgcagcccttgaaagaacggtacgagttgcaacatgcaaggctgtttgagttttacgcggactgctcttctgtgaagtacttgaccacgttagtaaccattccaaaactacccgtggacgctccagacgtatttttaatcaacgatgtggacgagtcaaaagagattaagttcaaaaaaagagagccctctgtaactccagcgcggacgccggcacggactccaacaccaacaccacctgttgttgctgagccggctatttccccacgtccggtatctcaaaggactacttcgacgcctacgggttacttgcaaactatgccgacgggtgccaccactgggatgatgatccccactgccactggtgcacgtaacgccatttttccacaggcgacggcacaaatgcagccggacttctgggccaatcaacaagcccagtttgcgaacgagcaaaaccgtctcgagcaagagcgtgtgcaacagttgcaacaacagcaggcacagcaggaactgtttcaacagcagttacaaaaagcacaacaggatatgatgaatatgcagcttcaacaacaaaaccaacatcaaaacgatttaattgccctcaccaatcaatatgaaaaggaccaggctttattgcagcaatatgaccaaagagtgcagcagctggaaagtgaaatcacaacgatggattctacagcttccaaacaattggctaataaggacgagcaactaactgcattgcaggatcaattggatgtttgggaaagaaaatatgagtctttagccaagctatactcccagttgcgtcaagagcatctaaatcttttacctcgttttaaaaaactgcagttaaaggtgaatagtgcgcaggaatccattcagaaaaaggaacagttagaacacaaattgaagcaaaaggatttgcaaatggccgagttggttaaggaccgtgacagggcaaggttagaattagaaagatccattaataatgcagaggcggacagtgcagcggcgacagcagcagcagaaacaatgactcaggataaaatgaaccctattctggatgccatattggaaagcggtatcaacaccatccaggaatcggtctataatctcgattctcctttgagttggtcgggtccgctgactccacccactttccttttgtccttattggaaagtacttctgaaaacgccactgagtttgccaccagtttcaataatttgatagtagacggccttgcacacggcgaccaaacagaggtcatacactgcgttagtgatttcagtacttcgatggctacactggtgaccaattcaaaggcgtacgccgttactacattacctcaagaacagtctgatcaaattttgaccctggtgaagagatgtgccagagaggcccaatatttcttcgaggatttgatgtctgaaaatcttaaccaggtcggtgatgaggagaaaactgatatcgtcatcaatgccaacgtggacatgcaagagaagttgcaagagctatctttggctatcgaaccgttattgaacatacaatctgtcaaatcaaataaagaaacgaacccacattctgaattggttgccactgctgacaaaattgtcaaatcctcagaacacttacgtgttgacgttcctaaaccattgttgtcattggcattaatgattattgatgctgttgtggctttggtaaaggctgctattcagtgccaaaatgaaattgccaccacgacaagtattcctctgaaccaattctacttgaaaaacagcagatggacagaaggtttgatctccgcggcaaaggctgtggcaggtgcaaccaatgttttaatcactactgctagtaagttaatcacttctgaagacaatgaaaacacatcacctgaacaatttatcgtcgcctccaaagaagtggccgcatccacaatacaattggtagcagcatcgagagtgaaaacttccatccactcgaaggcccaagataaattggaacactgttccaaagatgttaccgatgcatgcagaagtttgggtaaccacgtcatgggtatgattgaagatgatcattcgacttcgcaacagcagcaaccattggacttcacatccgaacacacattgaagactgccgaaatggaacagcaagtggaaattttgaagttagaacaatccttgagcaatgccaggaagagattgggcgagataagaaggcatgcctactataaccaggatgatgattga

SEQ ID NO: 191129 - DNA, 297 bp, Saccharomyces pastorianus
atgaagtcaagtattccaatcaccgaagtattgccaagagcagtgggttcgctaacattcgatgaaaattacaatttactggatacatcaggtgtcgcaaaagtcatcgaaaagtcaccaatcgcagaaataatcaggaaatcaaatgccgagttaggtaggctgggctactccgtctacgaagatgctcaatatataggtcatgccttcaagaaagctggccattttattgtgtacttcactccaaagaacaagaacagagagggcgttgttcctcctgtaggaataaccaattag

SEQ ID NO: 191130 - DNA, 1509 bp, Saccharomyces pastorianus
atgacaaaatcagacgaaacaacagctaccagcttgaatgccaaaactctaaagagttttgaatccactcttccaataccaacttatccaagagaaggtgttaaacaaggtattgttcatctgggagtcggtgcattccaccgttcccatttagctgttttcatgcaccgtctgatgcaggagcaccacttaaaggattggtccatatgtggtgttggtttaatgaaagcagatgcacttatgcgcgatgccatgaaggcccaagattgcctatacacccttgtggagcgtggtatcaaggacactaacgcttatatcgtcggttctattactgcttacatgtacgctcccgatgatccaagagctgttattgaaaagatggccaatccagacacacacattgtttctttgacggtcacagaaaacggttactaccacagtgaagcaacaaactccttaatgacagatgctcccgagattatcaatgatttgaaccacccagaaaagccagatactctgtatgggtatctatatgaggccctgttgttgcgttacaagagaggtcttaccccattcactattatgtcatgtgacaacatgccccaaaatggtgtcacagtaaagaccatgcttgttgcatttgccaagttaaagaaggatgagaaattcgccgcctggattgaagacaaggttacttctcctaacagcatggtggaccgtgtgaccccacgttgtaccgataaagagcgtaaatacgttgctgacacctggggaatcaaggatcaatgtcccgttgtcgcagaacctttcatccaatgggttcttgaagacaacttctccgatggccgtcctccatgggaacttgttggtgttcaggtcgtcaaggatgtcgattcctacgaattgatgaagttgcgtctacttaacggtggacattctgctatgggatatttgggatacttggcaggctacacctatatacatgaggttgtcaacgacccaactatcaacaagtatatccgtgttttgatgcgtgaggaagttatcccattattgcctaaagtgccaggtgttgatttcgaagagtacactgcatcagtgttggaaagattctccaatccagctattcaggacactgtcgcacgtatttgtttgatgggctctggtaagatgcctaagtatgttttgccatcaatttacgagcaattgcgtaaaccagatggtaagtacaagttattggcagtatgtgttgctggctggttccgttacctgactggtgtagacatgaatgggaagccattcgaaatcgaggatcctatggcaccaaccttgaaggcagccgcagttaagggtggtaaagatcctcacgaactgctcaacattgaggtgcttttcagtcctgagattcgtgacaacaaagaattcgttgcacagttgacccactccctagaaacagtttatgataaagggccaattgccgctattaaggaaattttagaccaagtgtga

SEQ ID NO: 191131 - DNA, 93 bp, Saccharomyces pastorianus
atgccaattataggggtgccgaggtgccttgaaaaccccttttgcgcgcctgcgaagtttccgctttcggtcaaaaagaaaatccgaatttag

SEQ ID NO: 191132 - DNA, 255 bp, Saccharomyces pastorianus
atgcacggcacttgcctcagcggtctataccctgagccatttacccataactcccacgattatccacattttaatatctatatctcattcggcggccccaaatattgtataactgctcttaatacatacgttataccacttttgcaccatatactaaccactcaatttatacacacttatttcaatatacccacaaaatcaccaccaaaatcacctaaacataaaaattatttatctttcaactttacgaaataa

SEQ ID NO: 191133 - DNA, 96 bp, Saccharomyces pastorianus
atgaaatacatggggtccttcctgaggaaagcggctacaacaaatttattcaatagcataaaaaaaaggaaggtacaaaacagagccatgtcatag

SEQ ID NO: 191134 - DNA, 1188 bp, Saccharomyces pastorianus
atgtgggggttatgcaagaagcattttccgagcaataaaattcaagtgcaggagagaaacaaagcattaaaaccaaagaagagtggcagcgaacataagacaaagcaactgtttcctgtattcaattgcaagaagaaggaaaaaggggtaatgatacggtttgcgattctacgtaatgctaacacatctctactgtccgcgagaagtatatgcttatttacccaggcgcctacctattgtcatgtaaggttgaataccttgaataaaagcattacaactaaaagaaattcattgacagagtcgaaaaggcatgtccatgatggcaagcatttttttacgacgccacatcaacagcaacagacgaagttgggggaaattgaagagggacacagtcctaacataaaaggagaggacttgagaagcattggtcaagcaataacacatcagcgaaacaagcgccgaaagcaaatatggtccgccatatttggtggtatattcggtgtgatattaggatactcactaatctatagagtgatatatttaaaggaacaaagtttcttaccattgtttccatcatccaagatacgtaaactgagtaccagagatttgaaaaaggttgacgtaaaccaagtacagaagctttctaaattaagggttttagagatattatccggtcatgacatgatcaaggaacaatacggagtaccattgcttgataaagatggcaattcacccacgttaaatgaattcagcatgtggtgcgaagatcaagatccatgtgtaactggtattgtaatggagccagacgataaaagggatagttcgcacacttggtatagaataccctttgtttgcaaatggaggataacgcatcggccaataagtatacggggaaccatcgacgatttactgaaccgcattggtttggaaacagccgatttatttgagattatatcgccggagagggtatacgggtcgttcaagtacgaatacccactgcagggggactcacatgcattacacctttggtttcatggcgaaatcgaactggacgatgattctttgattgtatataatggaaaataccacgttgatgttaaattgcaagaaatcgacctcttcagacgtgaaaagaacggacaactaatacagtacgttctatacaaaaacgaagcgggcgacaagtaa

SEQ ID NO: 191135 - DNA, 939 bp, Saccharomyces pastorianus
atggtttcattgactacaatagagcaaagcccagtcaaatgcgagacaaccactgagaaagagagcaatgatactagggggacagattcgaacgagaatgcagagacaaaagaaacaaagaagggttttccattccatgacttggcaaaattgcagaaacagtacaaaaataaatccagtaggaacgagtcactagtagcactaatatatctcttgggttcgatgctgtcattttgtctcctaatatttttcacggacttttatttgatacctttgttccccaccaccactacaatgacagactacattgtattcaatttttatttattgaacgtttttgtattttgtatggtgcatttcatttatcacttcgtcaaaaatatttctctacaacaacatctcgaacattggcagaagttttcgtatttatcgaatatcaacttattgatatcatcacaaatcacaattctttattatctattctatgattacgtgtttttcttcaaaatttttacccttttaatgaacttcataggattagtggcatacttttttatattgacggacaaactcatttcctcgaaaagattcaataaaacagttttcttcatttcggtatcagtagtgtgttgttccttgccactattaaccgcaataatcacctttgatggtttagaaaacctgaaagagaggataaaagtgaacgcaattacgtgggaacttgtggctttggtagcggcatctataatttacgttaccaggttccctgaatcattgttcagacgaaataaaaaggaagaaggttggaatcattccgagtaccttttccatctcttgatttctggtacggctttttaccattttttcattttgattcaatcttatattttgatgcattcaagtttgaatcagcccgaattaattaatttcaagtcttag

SEQ ID NO: 191136 - DNA, 5269 bp, Saccharomyces pastorianus
atggaatcccaacaattatctaattacccacaaatttctcatggtagcgcctgtgcttcggttacttctaaggaagtccacacaaatcaagatccgttagacgtttcagcttccaaaacagaagaatgtgagaaggcttccactaaggctaactctcaacagacaacaacacctgcttcatcagctgttccagagaacccccatcatgcctctcctcaacctgcttcagtaccacctccacagaatgggccgtacccacagcagtgcatgatgacccaaaaccaagccaatccatctggttggtcattttacggacacccatctatgattccgtatacaccttatcaaatgtcgcctatgtactttccacctgggccacaatcacagtttccgcagtatccatcatcagttggaacgcctctgagcactccatcacctgagtcaggtaatacatttactgattcatcctcagcggactctgatatgacatccactaaaaaatatgtcagaccaccaccaatgttaacctcacctaatgactttccaaattgggttaaaacatacatcaaatttttacaaaactcgaatctcggtggtattattccgacagtaaacggaaaacccgtacgtcagatcactgatgatgaactcaccttcttgtataacacttttcaaatatttgctccctctcaattcctacctacctgggtcaaagacatcctatccgttgattatacggatatcatgaaaattctttccaaaagtattgaaaaaatgcaatctgatacccaagaggcaaacgacattgtgaccctggcaaatttgcaatataatggcagtacacctgcagatgcatttgaaacaaaagtcacaaacattatcaacagactgaacaataatggcattcatatcaataacaaggtcgcatgccaattaattatgagaggtctatctggcgaatataaatttttacgctacacacgtcatcgacatctaaatatgacagtcgctgaactgttcttagatatccatgctatttatgaagaacaacagggatcgagaaacagcaaacctaattacaggagaaatctgagtgatgagaagaatgattctcgcagctatacgaatacaaccaaacccaaagttatagctcggaatcctcaaaaaacaaataattcgaaatcgaaaacagccagggctcacaatgtatccacatctaataactctcccagcacggacaacgattccatcagtaaatcaactactgaaccgattcaattgaacaataagcacgaccttcaccttaggccaggaacttactgaatctacggtaaatcacactaatcattctgatgatgaactccctggacacctccttctcgattcaggagcatcacgaacccttataagatctgctcatcacatacactcagcatcatctaatcctgacataaacgtagttgatgctcaaaaaagaaatataccaattaacgctattggtgacctacaatttcacttccaggacaacaccaaaacatcaataaaggtattgcacactcctaacatagcctatgacttactcagtttgaatgaattggctgcagtagatatcacagcatgctttaccaaaaacgtcttagaacgatctgacggcactgtacttgcacctatcgtaaaatatggagacttttactgggtatctaaaaagtacttgcttccatcaaatatctccgtacccaccatcaataatgtccatacaagtgaaagtacacgcaaatatccttatcctttcattcatcgaatgcttgcacatgccaatgcacagacaattcgatactcacttaaaaataacaccatcacgtattttaacgaatcagatgtcgactggtctagtgctattgactatcaatgtcctgattgtttaatcggcaaaagcaccaaacacagacatatcaaaggttcacgactaaaataccaaaattcatacgaaccctttcaatacctacatactgacatatttggtccagttcacaacctaccaaaaagtgcaccatcctatttcatctcatttactgatgagacaacaaaattccgttgggtttatccattacacgaccgtcgcgaggactctatcctcgatgtttttactacgatactagcttttattaagaaccagtttcaggccagtgtcttggttatacaaatggaccgtggttctgagtatactaacagaactctccataaattccttgaaaaaaatggtataactccatgctatacaaccacagcggattcccgagcacatggagtcgctgaacggctcaaccgtaccttattagatgactgccgtactcaactgcaatgtagtggtttaccgaaccatttatggttctctgcaatcgaattttctactattgtgagaaattcactagcttcacctaaaagcaaaaaatctgcaagacaacatgctggcttggcaggacttgatatcagtactttgttacctttcggtcaacctgttatcgtcaatgatcacaaccctaactccaaaatacatcctcgtggcatcccaggctacgctctacatccgtctcgaaactcttatggatatatcatctatcttccatccttaaagaagacagtagatacaactaactatgttattcttcagggcaaggaatccagattagatcaattcaattacgacgcactcactttcgatgaagacttaaaccgtttaactgcttcatatcaatcgttcattgcgtcaaatgagatccaacaatccgatgatcttaacatagaatctgaccatgacttccaatctgacatcgaactacatcctgagcaaccgagaaatgtcctttcaaaagctgtgagtccaaccgattccacacctccgtcaactcatactgaagattcgaaacgtgtttctaaaaccaatattcgcgcacccagagaagttgaccccaacatatctgaatctaatattcttccatcaaagaagagatctagcaccccccaaatttccaatatcgagagtaccggttcgggtggtatgcataaattaaatgttcctttacttgctcccatgtcccaatctaacacacatgagtcgtcgcacgccagtaaatctaaagatttcagacactcagactcgtacagtgaaaatgagactaatcatacaaacgtaccaatatccagtacgggtggtaccaacaacaaaactgttccgcagataagtgaccaagagactgagaaaaggattatacaccgttcaccttcaatcgatgcttctccaccggaaaataattcatcgcacaatattgttcctatcaaaacgccaactactgtttctgaacagaataccgaggaatctatcatcgctgatctcccactccctgatctacctccagaatctcctaccgaattccctgacccatttaaagaactcccaccgataaattctcatcaaactaattccagtttgggtggtattggtgactctaatgcctatactactatcaacagtaagaaaagatcattagaagataatgaaactgaaattaaggtatcacgagacacatggaatactaagaatatgcgtagtttagaacctccgagatcgaagaaacgaattcacctgattgcagctgtaaaagcagtaaaatcaatcaaaccaatacggacaaccttacgatacgatgaggcaatcacctataataaagatattaaagaaaaagaaaaatatatcgaggcataccacaaagaagtcaatcaactgttgaagatgaaaacttgggacactgacgaatattatgacagaaaagaaatagaccctaaaagagtaataaactcaatgtttatcttcaacaagaaacgtgacggtactcataaagctagatttgttgcaagaggtgatattcagcatcctgacacttacgactcaggcatgcaatccaataccgtacatcactatgcattaatgacatccctgtcacttgcattagacaataactactatattacacaattagacatatcttcggcatatttgtatgcagacatcaaagaagaattatacataagacctccaccacatttaggaatgaatgataagttgatacgtttgaagaaatcactttatggattgaaacaaagtggagcgaactggtacgaaactatcaaatcatacctgataaaacagtgtggtatggaagaagttcgtggatggtcatgcgtatttaagaatagtcaagtaacaatatgtttatttgttgacgacatgattttattcagcaaagacttaaatgcaaataagaaaatcataacaacactcaagaaacaatacgatacaaagataataaatctgggtgaaagtgataacgaaattcagtacgacatacttggcttagaaatcaaatatcaaagaggtaaatacatgaaattaggtatggaaaactcattaactgagaaaatacccaaattaaacgtacctttgaatccaaaaggaagaaaacttagcgctccaggtcaaccaggtctttatatagaccaggatgaactagaaatagatgaagatgaatacaaagagaaggtacatgaaatgcaaaagttgattggtctagcttcatatgttggatataaatttagatttgacttactatactacatcaacacacttgctcaacatatactattcccctctaggcaagttttagacatgacatatgagttgatacaattcatgtgggacactagagataaacaactgatatggcacaaaaacaaacctaccgagccagataataaactagtcgcaataagtgatgcttcgtatggcaaccaaccgtattataaatcacaaattggcaacatatatttacttaatggaaaggtaattggaggaaagtccaccaaggcttcattaacatgtacttcaactacggaagcagaaatacacgcgataagtgaatctgtcccattattaaataatctaagttacctgatacaagaacttaacaagaaaccaattattaaaggcttacttactgatagtagatcaacgatcagtataattaagtctacaaatgaagagaaatttagaaacagattttttggcacaaaggcaatgagacttagagatgaagtatcaggtaataatttatacgtatactacatcgagaccaagaagaacattgctgatgtgatgacaaaacctcttccgataaaaacattcaaactattaacaaacaaatggattcattag

SEQ ID NO: 191137 - DNA, 648 bp, Saccharomyces pastorianus
atgggccttttggcttatatccctacgaacgttttggccacatacctgactttggtattgagaagtatcggtttcacaacctttcaagccaacctgctagctattcctaactttgttcttcatattctcctgctgtttggtttaacatggtcgacagaaaaatgtaataacaggctaggtttgagtctgttacaaccgttgtacactgttcctcttcttgcagttcttcgcttttggaaaggtacaatgtttaataaatggggaacttatgcaattattaccttaatattagataatccgtatatccatgcaatttgtgtatccttgtgttctagaaactcccaatcagttaaaacaagaacagtatctacttgcttgtacaatatgttcgtgcaagcaggtctcatcatatcctcaaacatttatgcgaaaagcgatgccccactctatcgtaagggaaatggagttctttttggtttggcactttttatgtttccaatattaattggtagcaaattgatttatgtctatatcaacaagcagagggataagaggtggaatgcaatgtcagaagaggaaaaagaccactatctaagtactactagtgatgctggttcacgtagactcgattttagattctatcactga

SEQ ID NO: 191138 - DNA, 510 bp, Saccharomyces pastorianus
atgatagcgtggtccctagtggctacgttgcaatgcaaaatgacagggaagagttctttctatacatgtagagcacttatgggcctatttgaaggtggttttgtggctgatttggttctctggatgtcgtacttctacagctcttcagaattgtcaataagactgtcgttcttctgggtgacactatctctaacacaaatcatcacttcaattgtggccttcggggtttttcacatgagagggataggtggcatggcagggtggcaatggctttttttgatagaaagaattttcactttagtcatcggtatcagtgcatacttcttgatggtaccctccgtagttcaaacgaagaaaccttggagcaagaaaggatggttcactgagagggaagaaaaaatcatcgtaaacaagattctgagagatgatccgacaaaaggggatatgaacaataggcaaggtatgtcacttaaaatgttatggcaggggataacagattactatatatag

SEQ ID NO: 191139 - DNA, 1941 bp, Saccharomyces pastorianus
atgattggtgcctttaagaggaaccgtggaagttctcagtcttttgcgaaggaatgtcaaccttctacgttaaaagccaaccttgaagtggcaaaagaacttccattctcagatcgtcgcgatttcgaggatgccactcaaggttacatcggctccttatctgatgagcaaataatcggccctgacggcggtgtagtatggtgtatgaaatcttatggctttttggagcctgagacgcccgcaaatactgttaaccctagcttgtggagacaagcgcagctgaatgccattcatggcctatttaaaatcactgacaacgtttaccaggttagaggactagatatctctaatatgactataatcgaaggtaatacttctttgataatcattgatacgctttttaccacagagactgcccaagagtcgcttaaactttactatagacatcgtcctcagaaacctgtgcgtaccgtaatatatacgcatagccattcggaccactatggaggagttaaaggaattgtcaaggaagcagatgtgaaatccggagaggtgcaaataatagccccagttggcttcatggaaagtgttgtagcagaaaacattctggcagggaatgcgatgcatcgacgttcccaatatcagtttggtatgttactttctcccagtgttaagggtcatgttgattgtgggatagggaaagctgcctctcacggaacagttacactgattgcaccaactattattatagaagagcccgtcgaagaacggacaattgatggtgtagattttgtttttcagcttgcacctggatcggaagcgccttcggaaatgctcatttatatgccacaacagcgtgtgctcaacatggcagaagatgtgacacatcatatgcataacttgtatgctcttcgaggtgttgaagtacgcgacggcaaccaatgggctaaatacatcgatgcagctcgagttgctttcggtagcaaaacggacgttttaattgcccagcatcactggcccactacagggcaaatgcggatcaatgaattgctgaagaagcagcgggatatgtataaattcattcatgaccaaacacttcgattgcttaatcagggatataccagtagagatatcgccgaaactcttcgtatgccatccagtcttgagcaagaatggtcaacacgaggttactacggcactttgagtcacaatgtaaaggctgtgtatcaaaaatacctggggtggtatgatgcaaatccggctaacctaaaccctttgccacccgtagcctatgcaaagaaagcagtcgagtatatgggcggcgctgatgctgtattggcacgggcttataaagatttccagaaaggagagtttcgttgggttgcaagcgttgttaatcaattggttttcgctgacccaaataaccatcaagctcgtgagctctgtgctgacgcattggaacagctggggtatcaagcagaagccagcacgtggcgcaacgcttaccttgtaggcgccatggagttgcgccaaggtgtaccaaaaagacgaagtactggtaagcgcaacaatattgccgttttgaataacgaaatgttttttgactttcttgctgtgagattgaacgctacgaaagcagaaggtaaaattatcgttagtaattggtgtttcattaattcaaatgaacggttcgtgatcactctcgaaaactgtgccctgacctacattcagggctggcagacagatgcagatgcaacaattactctcaaaagaactacatttgaagctttattggccaatgaaattactatggttgattttttaagatcaaaagaagtcgaaatagagggtaatcgactcagaattgaagagctgttgaagttgtttgacgacttcgaccagtcctttcccgtcgttgagcctatggggggaagcacttga

SEQ ID NO: 191140 - DNA, 183 bp, Saccharomyces pastorianus
atgtttgctaagctttatcgcggtcttacttacgttaccaacaaaattctatctacattgctatcacatcattccatacattattgcataaattcctttaagccgactacattggcaattataattcttctacacccctgttgccgttgtaatgtttacattattagatgcatccaccattaa

SEQ ID NO: 191141 - DNA, 432 bp, Saccharomyces pastorianus
atggctaggcatttcggtatggccctcgccccatgggatgtcatgggaggtggaagatttcagagtaaaaaagcaatggaggaacggaggaagaatggagagtgtattcgttctttcgttggcgcctccgaacaaacagatgcagaaatcaagattagtgaagcattagccaaggttgctgaggaacatggcactgagtctgttactgctattgctattgcctatgttcgctctaaggcgaaaaatgtttttccgtcggttgaaggaggaaaaattgaggatctcaaagagaacattaaggctctcagtatcgatctaacgccggacaatataaaatacttggaaaatgtagttccttttgacatcggatttcctaacacttttatcgtgttaaattccttgactcaaaaatatggtacgaataatgtttag

SEQ ID NO: 191142 - DNA, 339 bp, Saccharomyces pastorianus
atgcatgttctgtatagtacatccgcgcatattcttcctagcggaaggcatattaacgtagcccgcacgccctggttaagacttgatatagtttcaataattggaatattactgcatagtggcccaattgcaggatttagcataaacatgataatatttagagatgctttcatccctttgacgaaggtgatagagaacaagaaaatgaataacattatatcatattcctatatatatatatatatatatatatgtcatataacggtggaaaatcccggcgatattacagataaacattacacccgcatgaatgtgagccactactatattataacttag

SEQ ID NO: 191143 - DNA, 156 bp, Saccharomyces pastorianus
atgcacggcgcttgcctcagcggtctataccctttgccatttacccataaattccatgattatctacattttaatatctatatctcatttggcggcccaaaatattgtataactgcccttaatacatacgttatactattttacaccgtatactaa

SEQ ID NO: 191144 - DNA, 348 bp, Saccharomyces pastorianus
atggcttcagtgaaacaaaccaacaaaactctccgagagggcaatccagagcatagcacaatcttttacatccgcggaagcattcttgctccgtcatatttccttccggacttcgctcggactctttttccgcggaaagatatggtctccgtcggtcctctgtttcctattatatttgcgcacagtgacagtgcggcaattgatatgtcagggaccactggaaaacgacgttgcctagtagttgtggcagctccgatagttgacattctcattagtaaccgaacttcttgcaccaagtcctgtgcgagtgctgcacggccatgccttgagggttctgtcgccccctag

SEQ ID NO: 191145 - DNA, 974 bp, Saccharomyces pastorianus
atgtctgctccacaagccaagattttgtctcaagctccaactgaattggaattacaagttgctcaagctttcgttgaattggaaaattcttctccagaattgaaagctgagttgagacctttgcaattcaagtccatcagagaagtatgttattaatttgaatctaaacttaagaataatggagagtaacaaaggaaaaaagtgtgaacgggacgataccagaatgtttcaatctagaaaagtataaaagataaggactaggactcaaatgtatttggctgactatcgcctgaaccttgatgctaagcaaataccatatcttcaagaaaaagcctactccagtgtttaagaagaagggaacgatttactagatcatgctatacgcagtaaggttctgatagttaattacaatcggtccaagttctaagcggtgtcgtccatgcatatatcatttacaagttactggcgtcaactcttcaaatattcaaaatatcacctaatcaaacttactaacattttccttttttgttttccttcttttatagatcgacgttgctggtggtaagaaggctttggccatttttgttccagtcccatctttggctggtttccacaaggttcaaactaagttgacccgtgaattggaaaagaaattccaagaccgtcatgtcatcttcttggctgaaagaagaatcttgccaaagccatctagaacatctagacaagtccaaaagagaccaagatccagaaccttgactgctgttcatgacaagatcttggaagacttagtcttcccaactgaaatcgttggtaagagagttagatatttggttggtggtaacaagatccaaaaggttttgttagactcaaaggatgtccaacaaatcgactacaaattggaatctttccaagctgtttacaacaaattgactggtaagcaaattgttttcgaaattccaagtgaaactcattag

SEQ ID NO: 191146 - DNA, 930 bp, Saccharomyces pastorianus
atgcagggaaataaatcaactataagagagtataagatagtagttgtcggtggaggtggcgttggtaaatctgctttaacaattcaattcattcaatcatactttgtggacgaatatgaccctactatcgaagattcttacagaaaacaagttgtcatcgatgacaaagtatccattttggacattctagatactgctggacaagaagagtattctgcgatgagagaacagtacatgaggactggggaaggtttcctactggtctattccgtcacctctagaaattcctttgatgagttactgtcttattatcagcaaattcaaagagtaaaagattctgactacattcctgtagtcgtggtaggtaacaaattggaccttgaaaatgaaagacaagtctcttatgaagacgggttacgcctggccaagcagttgaatgcaccctttctagaaacgtctgcgaaacaagccatcaacgtagacgaggccttttatagccttattcgtttggtaagggacgacggtgggaaatacaatagcatgaatcgtcaactggataatacgaatgaaataagagattcggagctaacctcatctgcaacagcggatagagaaaaaaagaacaacgggtcttatgtactcgataattctttgaccaatgctggcactggctccagttcaaagtcagccgttaaccataacggtgaaactactaaacgaactgatgaaaagaattacgttaatcaaaacaataacaatgaaggaaataccaagtactccagtaacggcaacggaaatcgaagtgatattagtcgtggtaatcaaaataatgccttaaattcgagaagtaaacagtctgctgagccacaaaaaaattcaagcgccaacgctagaaaagaatctagtggtggttgttgtataatttgttga

SEQ ID NO: 191147 - DNA, 5314 bp, Saccharomyces pastorianus
atggaatcccaacaattatctcaaaattcacccacttttcatggtagcgcctatgcttcggttacttctaaggaagtcccatcaaatcaagatccgttagccgtttcagcttccaatttaccggaatttgatagagattccactaaggttaattctcaacaagagacaacacctgggacatcagctgttccagagaaccatcatcatgtctctcctcaacctgcttcagtaccacctccacagaatggacagtaccaacagcacggcatgatgaccccaaacaaagctatggcttctaactgggcacattaccaacaaccatctatgatgacgtgttcacattatcaaacgtcacctgcgtattatcaaccggacccacactatccgctgccacagtatatcccaccgctgagtacttcctcacctgatccaatcggttcacaggatcaacactctgaagtacctcaagctaagacaaaggtgagaaataatgtcttaccaccacacactttaacatcagaagaaaacttttctacatgggttaaattttacatcagatttttgaagaactctaatctcggtgacattattccaaatgaccagggtgaaatcaaaagacaaatgacttatgaagaacatgcgtatatatacaataccttccaagcatttgccccatttcatttattgccaacatgggtaaaacaaattttagaaattaattattctgacatccttacagtcctttgtaaaagtgtgtccaaaatgcaaactaacaatcaagaattaaaagattggatagctcttgccaaccttgagtacaacggaagtacatctgctgatacatttgaaattacagtcagcacgatcattcaaaggctaaaagaaaacaatatcaatgttagcgacagattggcctgtcaactaatacttaaaggtctatccggtgacttcaaatacctacgtaatcaatatcgtaccaaaacgaacatgaaactttcccaattattcgctgaaattcaattaatatatgacgaaaataaaatcatgaatctaaataaaccgtcccaatacaaacaacacagcgaatacaaaaatgtttctcgcacatctccaaacacgactaacacgaaggttacaactcgtaattatcatagaacaaatagttcaaaaccaagagcagcaaaagctcacaatattgctacatccagtaaattctcaagggtgaacaatgatcacattaatgaatcaaccgtttcatcacaatacttaagcgatgacaacgaacttagtcttaggccagcaacagaaagaatctaagccaacacgcacaatagactcgaatgacgaactacctgatcaccttcttattgattcaggagcttcgcaaacgcttgtcagatcagcccattatttacaccatgcaacacccaattctgaaataaacatagtcgatgctcaaaaacaagacattcctataaatgccattggtaatcttcacttcaactttcagaacggcaccaaaacatcaataaaagcactacacacaccaaacatagcctatgatctattaagtttgagtgagctggctaaccaaaatattactgcctgctttaccagaaacactttagaaagatcggatggtacagtactagctcccatagtcaaacatggagacttttactggttatctaaaaaatacctaattccttcgcacatttcaaagctaacaataaacaacgtcaacaaaagcaaaagcgtaaataaatatccatatccgttaatacatcgaatgcttggacatgctaacttccgaagtattcagaagtctcttaagaagaatgcagttacatatttgaaagaatcggatattgaatggtctaacgctagcacatatcaatgtcctgactgtctaatcggcaaaagcacgaaacataggcatgtcaaaggatcacgactaaagtaccaagaatcatatgagccttttcagtacttgcataccgatatatttggtcctgtacatcacttaccgaaaagtgcaccttcttactttatatcgtttacagatgagaaaaccagattccaatgggtgtacccattacacgaccgtcgtgaagaatctatcctcaatgtttttacatcgatattagcatttattaagaaccaattcaatgctcgcgttctagttatccagatggatcgtggctccgagtacactaacaaaactcttcataagttctttacgaacagaggtattactgcatgctatacaaccacggcagattctagagcacacggtgtcgctgaacgattaaatcgtactttattaaacgattgtcgcacactgcttcattgcagtggtctaccaaatcatctatggttctcagcagtcgaattttctactataatcagaaattcattagtctcaccaaaaaacgataaatctgcaagacaacatgcaggtttagctggactggacattactactatactacctttcggtcaaccggttatagttaacaaccataatcccgactcgaaaatacatcctcgtggcattccaggttacgccttacatccatcacgaaactcttatggctatattatctatcttccatccttaaaaaagacagtagatactaccaattacgttatattacaaaacaagcaaacgaaattggaccagttcgactacgatacactcacttttgatgatgatctcaatcgtttaacagcccataaccaatcttttattgaacaaaatgaaacggagcagtcatatgatcaaaatacagaatctgatcatgactatcaatcggagattgaaataaactctgatcctctagtgaacgatttctcgtcccaatcattgaaccctttacaattagacaaggaaccagtccaaaaggtacgtgcaccaaaagaagttgatgccgacatatctgaatacaatattcttccatctactatacgatctcgtacaccccatatcattaataaagagagtaccgaaatgggtggtaccattgaatcagatactacttcacctagacactcgtctaccttcactgcacgaaaccaaaagcgacctggtagtcccaacgatatgattgatttgacctcacaggatagagttaattatggacttgaaaacatcaaaactacacgtttgggtggtacggaggaaccatatattcaacgaaatagtgatacaaatatcaaatacaggactacaaatagtacgccctcaatagatgaccgttcgtccaacagtgaatccactactcccatcatctccatagaaacaaaggctgcatgtgataatacaccctccattgatacggatccgccagaatatcgatcttctgaccatgcgactcctaatataatgcctgacaaatcctcaaaaaatgttacggctgattctattcttgacgacctcccacttcctgacttaacccatcaatctcctacggacacttctgatgtttcaaaagatattccacacatacactctcgtcagactaattccagtttgggtggtatggatgattctaatgttctgactactaccaaaagtaagaaaagatcattagaagataatgaaactgaaattgaggtatcccgagacacatggaataataagaatatgagaagtctggaaccaccaagatcgaagaaacgcataaatttaattgcagcaataaaaggagtgaaatcgatcaaaccagttcgaacgaccttaagatatgatgaagcaattacttataataaagacaacaaagaaaaagacagatatgttgaagcttatcataaagaaattagccaactattgaaaatgaacacttgggatacaaacaaatattatgatagaaatgacatagatcctaaaaaagtaataaactcaatgtttatatttaacaagaaacgtgatggtacacacaaagctagatttgttgcaagaggcgacattcaacaccccgatacatatgattctgatatgcaatccaataccgtacatcactatgcactgatgacgtcactgtcaatcgcattagacaacgactattatatcacacagctggacatatcctctgcttacttatatgctgatatcaaagaagaattatacataagacctccaccacatttaggtttgaatgataaattactacgtttgagaaaatcactctatggtttgaaacaaagtggtgcaaactggtatgaaaccattaaatcatatttaataaattgttgcgacatgcaagaagttcgcggatggtcatgcgtatttaagaatagtcaagtaacaatttgcttattcgttgacgacatgattttatttagcaaagacttaaatgcaaataagaaaatcataacaacactcaagaaacaatacgatacaaagataataaatctgggtgaaggtgataacgaaattcagtacgacatacttggattagagatcaaatatcaaagaagcaagtacatgaaattaggtatggaaaaatccttgacagaaaaattacccaaactaaacgtacctttgaacccaaaaggaaagaaacttagagctccaggtcaaccaggtcattatatagaccaggatgaactagaaatagatgaagatgaatacaaagagaaagtgcatgaaatgcaaaagttgattggtctagcttcatatgttggatataaatttagatttgacttactatactacatcaacacacttgctcaacatatactattcccctctaggcaagttttagacatgacatatgagttaatacaattcatgtgggacactagagataaacaattaatatggcacaaaaacaaacctaccaagccagataataaactagtcgcaataagcgatgcttcatatggtaaccaaccatattacaagtcacaaattggtaacattttcctactcaacggaaaagtgattggaggaaagtcgacaaaggcttcgttaacatgcacttcaactacagaagcagaaatacacgcagtcagtgaagctataccgctattgaataacctcagtcaccttgtgcaagaacttaacaagaaaccaattattaaaggcttacttactgatagtagatcaacgatcagtataattaagtctacaaatgaagagaaatttagaaacagattttttggcacgaaggcaatgagacttagagatgaagtatcaggtaataatttatacgtatactacatcgagaccaataagaacattgctgatgtgatgacaaaacctcttccgataaaaacatttaaactattaactaacaaatggattcattag

SEQ ID NO: 191148 - DNA, 237 bp, Saccharomyces pastorianus
atgatgataataatatttatagaattgtgtagaattgcagattccctttcatggattcctaaatccttgaggagaacttctagtacattctacatacctaatattattgccttattaaaaatggaatcccaacaattatctcaaaattcacccacttttcaaaaacacacgccgattggtcatattaatcatgaccaatataatagtgattccggtagttactatacattgatgtga

SEQ ID NO: 191149 - DNA, 330 bp, Saccharomyces pastorianus
atgaaaataagacctggagaaaacctatcacgtctgacgaacatgaaaaaactaagtcaaaatttgatacataatgtcactagtattatgactgtttctgatattaattacttattattatacctaattattcttttaaccctttctataaaacaaccagaaaaaaaaaaccggaaagagaggacctcttgtattttatcatattatcgtatcgcctctctttcaatgcaaaacggaggggttcctctttgttttgtagtccttgattgccgccttgatagcgtcttctgcaagcatggaacaatgcagttttactggaggaagacttag

SEQ ID NO: 191150 - DNA, 315 bp, Saccharomyces pastorianus
atgggtttatacaggccgtcaaaattttttcacccccccataccccacataccttttactattaaccctgattttttttcttttcacatacagcgccttaaggcgaaggcaaatcctgaaaattttctcatttgctttcccccaccagacatatataaaggctttgtattctgctgtcaattagatttagtacatcttttctcttatgttttcttcttgtttctacttaaaatctgtgtcgacgtacttcagtatgtaatataccccaaacattttacccacaaaaaaccaggatttgaaaactatagcatctaa

SEQ ID NO: 191151 - DNA, 5314 bp, Saccharomyces pastorianus
atggaatcccaacaattacatcaaaatccacattgtccacatggtagcgcctatgcttcggttacttctaaggaagtcccatcaaatcaagatccgttagccgtttcagcttccaatttaccggaatttgatagagattccactaaggttaattctcaagaagagacaacacctgggacatcagctgttccagagaaccatcatcatgtctctcctcaacctgcttcagtaccacctccacagaatggacagtaccaacagcacggcatgatgaccccaaacaaagctatggcttctaactgggcacattaccaacaaccatctatgatgacgtgttcacattatcaaacgtcacctgcgtattatcaaccggacccacactatccgctgccacagtatatcccaccgctgagtacttcctcacctgatccaatcgattcacaggatcaacactctgaagtacctcaagctaagacaaaggtgagaaataatgtcttaccaccacacccacacacatcagaagaaaacttttctacatgggttaaattttacatcagatttttgaagaactctaatctcggtgacattattccaaatgaccagggtgaaatcaaaagacaaatgacttatgaagaacatgcgtatatatacaataccttccaagcatttgccccatttcatttattgccaacatgggtaaaacaaattttagaaattaattattctgacatccttacagtcctttgtaaaagtgtgtccaaaatgcaaactaacaatcaagaattaaaagattggatagctcttgccaaccttgagtacaacggaagtacatctgctgatacatttgaaattacagtcagcacgatcattcaaaggctaaaagaaaacaatatcaatgttagcgacagattggcctgtcaactaatacttaaaggtctatccggtgatttcaaatacctacgtaatcaatatcgtaccaaaacgaacatgaaactttcccaattattcgctgaaattcaattaatatatgacgaaaataaaatcatgaatctaaataaaccgtcccaatacaaacaacacagcgaatacaaaaatgtttctcgcacatctccaaacacgactaacacgaaggttacaactcgtaattatcatagaacaaatagttcaaaaccaagagcagcaaaagctcacaatattgctacatccagtaaattctcaagggtgaacaatgatcacattaatgaatcaaccgtttcatcacaatacttaagcgatgacaacgaacttagtcttaggccagcaacagaaagaatctaagccaacacgcacaatagactcgaatgacgaactacctgatcaccttcttattgattcaggagcttcgcaaacgcttgtcagatcagcccattatttacaccatgcaacacccaattctgaaataaacatagtcgatgctcaaaaacaagacattcctataaatgccattggtaatcttcacttcaactttcagaacggcaccaaaacatcaataaaagcactacacacaccaaacatagcctatgatctattaagtttgagtgagctgactaaccaaaatattactgcctgctttaccagaaacactttagaaagatcggatggtacagtactagctcccatagtcaaacatggagacttttactggttatctaaaaaatacctaattccttcgcacatttcaaagctaacaataaacaacgtcaacaaaagcaaaagcgtaaataaatatccatatccgttaatacatcgaatgcttggacatgctaacttccgaagtattcagaagtctcttaagaagaatgcagttacatatttgaaagaatcggatattgaatggtctaacgctagcacatatcaatgtcctgactgtctaatcggcaaaagcacgaaacataggcatgtcaaaggatcacgactaaagtaccaagaatcatatgagccttttcagtacttgcataccgatatatttggtcctgtacatcacttaccgaaaagtgcaccttcttactttatatcgtttacagatgagaaaaccagattccaatgggtgtacccattacacgaccgtcgtgaagaatctatcctcaatgtttttacatcgatattagcatttattaagaaccaattcaatgctcgcgttctagttatccagatggatcgtggctccgagtacactaacaaaactcttcataagttctttacgaacagaggtattactgcatgctatacaaccacggcagattctagagcacacggtgtcgctgaacgattaaatcgtactttattaaacgattgtcgcacactgcttcattgcagtggtctaccaaatcatctatggttctcagcagtcgaattttctactataatcagaaattcattagtctcaccaaaaaacgataaatctgcaagacaacatgcaggtttagctggactggacattactactatactacctttcggtcaaccggttatagttaacaaccataatcctgactcgaaaatacatcctcgtggcattccaggttacgccttacatccatcacgaaactcttatggctatattatctatcttccatccttaaaaaagacagtagatactaccaattacgttatattacaaaacaatcaaacgaaattggaccagttcgactacgatacactcacttttgatgatgatctcaatcgtttaacagcccataaccaatcttttattgaacaaaatgaaacggagcagtcatatgatcaaaatacagaatctgatcatgactatcaatcggagattgaaataaactctgatcctctagtgaacgatttctcgtcccaatcattgaaccctttacaattagacaaggaaccagtccaaaaggtacgtgcaccaaaagaagttgatgccgacatatctgaatacaatattcttccatctactatacgatctcgtacaccccatatcattaataaagagagtaccgaaatgggtggtaccattgaatcagatactacttcacctagacactcgtctaccttcactgcacgaaaccaaaagcgacctggtagtcccaacgatatgattgatttgacctcacaggatagagttaattatggacttgaaaacatcaaaactacacgtttgggtggtacggaggaaccatatattcaacgaaatagtgatacaaatatcaaatacaggactacaaacagtacgccctcaatagatgaccgttcgtccaacagtgactccactactcccatcatctccatagaaacaaaggctgcatgtgataatacaccctccattgatacggatccgccagaatatcgctcttctgaccatgcgactcctaatataatgcctgacaaatcctcaaaaaatgttacggctgattctattcttgacgacctcccacttcctgacttaacccataaatctcctacggacacttctgatgtttcaaaagatatcccacacatacactctcgtcagactaattccagtttgggtggtatggatgattctaatgttctgactactaccaaaagtaagaaaagatcattagaagataatgaaactgaaattgaggtatcccgagacacatggaataataagaatatgagaagtctggaaccaccaagatcgaagaaacgcataaatttaattgcagcaataaaaggagtgaaatcgatcaaaccagttcgaacgaccttaagatatgatgaagcaattacatataataaagacaacaaagaaaaagacagatatgttgaagcttatcataaagaaattagccaactattgaaaatgaacacttgggatacaaacaaatattatgatagaaatgacatagatcctaaaaaagtaataaactcaatgtttatatttaacaagaaacgtgatggtacacacaaagctagatttgttgcaagaggcgacattcaacaccccgatacatatgattctgatatgcaatccaataccgtacatcactatgcactgatgacgtcattgtcaatcgcattagacaatgactattatatcacacagctggacatatcctctgcttacttatatgctgatatcaaagaagaattatacataagacctccaccacatttaggtttgaatgataagttactacgtttgagaaaatcactctatggtttgaaacaaagtggtgcaaactggtatgaaaccattaaatcatatttaataaattgttgcgacatgcaagaagttcgcggatggtcatgcgtatttaagaatagtcaagtaacaatttgcttattcgttgatgatatgatattattcagcaaagacttaaatgcaaataagaaaatcataacaacactcaagaaacaatacgatacaaagataataaatctgggtgaaggtgataacgaaattcagtacgacatacttggattagagatcaaatatcaaagaagcaagtacatgaaattaggtatggaaaaatccttgacagaaaaattacccaaactaaacgtacctttgaacccaaaaggaaagaaacttagagctccaggtcaaccaggtcattatatagaccaggatgaactagaaatagatgaagatgaatacaaagagaaagtgcatgaaatgcaaaagttgattggtctagcttcatatgttggatataaatttagatttgacttactatactacatcaacacacttgctcaacatatactattcccctctaggcaagttttagacatgacatatgagttaatacaattcatgtgggacactagagataaacaattaatatggcacaaaaacaaacctaccaagccagataataaactagtcgcaataagcgatgcttcatatggtaaccaaccatattacaagtcacaaattggtaacattttcctactcaacggaaaagtgattggaggaaagtcgacaaaggcttcgttaacatgcacttcaactacagaagcagaaatacacgcagtcagtgaagctataccgctattgaataacctcagtcaccttgtgcaagaacttaacaagaaaccaattattaaaggcttacttactgatagtagatcaacgatcagtataattaagtctacaaatgaagagaaatttagaaacagattttttggcacaaaggcaatgagacttagagatgaagtatcaggtaataatttatacgtatactacatcgagaccaagaagaacattgctgatgtgatgacaaaacctcttccgataaaaacatttaaactattaacaaacaaatggattcattag

SEQ ID NO: 191152 - DNA, 354 bp, Saccharomyces pastorianus
atggttatgttttcgctcataattgtttgtgcttcaacattaaagaatagagtattatttctcgggaaaaaagcagcttcgaaatacgatgcagaaaactgtgagtctttagcacaagtcaacagagccgaagtccttagatattctttagtatatgcatcaaatggtactgggaatagagtcgatgcgttgttcagtagtgtaaaagagttagaaacctggaaagtagagctgttaatggaaatagcgtgtatttgtcggaagattgctagcaaaacaaaaatccgagataaagagaagactttaatgggaagcatacttattctctttacatctataaatcagagaggttaa

SEQ ID NO: 191153 - DNA, 168 bp, Saccharomyces pastorianus
atgttcaatgtagcattaccatcacaagacaaaaaatcagaattttacaagcaaaagcgcttatctttaaggaccaacatattagatgaattcttaagggttgccaaaacgcaagacaacaggcaaaataatttcgtttctcagtaccgaaatgacgaaatatactga

SEQ ID NO: 191154 - DNA, 462 bp, Saccharomyces pastorianus
atgaaattctcaactattttcggagctactacagttatgactgccgtctcggcagcagctgtgtcgagtgtaatgaccactaagactattactgctactaacggtaataacgtttacactaaggtcgttaccgacaccgctgaccctatcattagttacagtaccactagaactgtcgttgtcagtaatagtgatgctacttacacaaaggttgtcaccgaaggaccagataccacctctgaaaagagtacaacaaagacacttactttgacaaacggttcaggttcatcaaccaacctttacaccaagaccgtcactcaagccgtcgaatcatctacatcctcctcatcctcctcatcctcctcctcctcttctgcctcttcttctggtgctgctcctgctgcattccaaggagcaagtgtcggtgcattggcccttggtttgatttcttacctattataa

SEQ ID NO: 191155 - DNA, 615 bp, Saccharomyces pastorianus
atgaaattctcttccgctttggttctatctgctgttgccgctactgctcttgctgagagtatcaccaccaccatcactgccaccaagaacggtcatgtctacactaagactgtcacccaagatgctacttttgtttggggtggtgaagactcttacgccagcagcacttctgccgctgaatcttctgccgccgaaacttctgccgccgaaacctctgctgccgctaccacttctgctgccgctaccacttctgctgctgagacttcttctgctgctgagacttcttctgctgatgaaggttctggttctagtatcactaccactatcactgccaccaagaacggtcacgtctacactaagactgtcacccaagatgctacttttgtctggactggtgaaggcagcagcaacacctggtctccaagtagtacttctaccagctcagaagctgctacctcttctgcttcaaccactgcaaccaccactgctgaaacttcttcctctgctacatcctctagcaccgctgaattatctagttacaccggtgctgctgatgccatcaccgctggtactggtttgatgggtgctgcccttgctgccgtcatgttattgtaa

SEQ ID NO: 191156 - DNA, 2085 bp, Saccharomyces pastorianus
atgcttttcgctagattagtgctgctgttggtgtatttggcaccaggttctttagcaaaaccagcatcaactaagaaaagaacgcaatgggaccagatagcaattgatgcttgtgctaaagaattggaatcacacaaatttgacacggatgtgaagggtcggcacgctactctttgcacttatgaaccagcactagggtcttggttacattgcgcgaaggatgttctcgacagtaggaagaaaagtaaaaaaatattcgaaaaaacgtttagcaaaattaatcagtattgccacgattatcacaaagatgaggtcgtcagcaatgaggagtattatcgaatttttgccaatgcatcccttttcatccggcctcttgatgaggtaaaggaaaacatacgatatcccgtcactcccaataaagcctctctagataggtgggtatgggcttattttgggcccctggataatatagacaaaggaaatgtttatggagtgacgatttgcttatactggataggagttctgtttattgcagctgtatatcacttcttgaacttttctcgacttaaacaaacggtgttcaaaaacaaggtgtctgctttcttaagaggccactatgttcttccagcgcttgttcataaccatgctatgtcagtgggaaggtggtttttcatcggtctggtccctaccaggttagagacccttgtcctattcggttacgttttgttgcacgggttcttgttgagtagttacaattttgaccataatgagttgctcagtgatcgcagaagccaagtgcttatcttcctttccgacagggcagggatcctggcattcgcacattttcctttgatagttctctttggcggtaaaaacagcacaatgacttggctcacaggtataagatataccgcattcattacttaccacaaatggttaggaagattcatgttagtagactgtacgatccatgcaataggatacacctaccatgcatacatagaaaattactggaaatacgtgaagtatagtgatctatggacatccggaagacatgccatgatcattgttggaatacttgtgtttttttcgttcttcttctttagacgacattattacgaattgtttgttattacgcacattatcttagcaataggatttttccatgcgtgctggaaacattgctataaacttggatggggtgaatggataatggcgtgtgcactgttttggattgctgaccgtattctgcggctaataaagattgcaatttttggaatgccatgggctaaattgaaactgtgtggcgagtccatgatagaagtgagaatctcaaaaagctccaaatggtggaaagcagaacctggccaatatatatatctgtacttcttaagaccaaaaatattctggcaatcacatccattcacggtcatggattctttggttgaggatggtgagttggtagttgtgataacagtgaaaaatgggctaaccaaaaaattacaggaataccttttagagagcgaagggtacacggaaatgcgagtactagcagaaggaccttatggacaaagcacgcgaacacatttgttcgaaagcctcctgtttattgccggaggggcgggtgttcctggacctctgtcgatggcaataaaggcaggtcgccaggtcaaaagcaacgattctcatcaaatgatcaaatttgtgtggagtgtacgtaaccttgatctcttagaagtgtatcgcaaagagataatggtgctaaaagagttgaacatagacacaaaaatttacttcacaggagagcgaaaagatgaatcgaacacggaggagggagcaattgctaatatgagcacggaaggcagactgctgacgacatcgaaatcagcggaaatgattactgattttggacgaccaaatatcgatgagataattgaagaagcagtaagtggtgcaaaatctttgttggtcacttgttgcgggtcagagggctttgtagacaagacacgagagttgacggcaaaaagagttcttgaacacggtgacaaatggatagaatacgtggaggaattccagaattggtag

SEQ ID NO: 191157 - DNA, 873 bp, Saccharomyces pastorianus
atgcgtggtttcagtggtcaaccattgagtgatgatgataattatagaattgaaaagactcaaaggaacacaattcctgaacgtctccattttagcagagagagaaatatgcccattgcaagtatattcgggactagaggatattttgtattctcaagtgagcaatcctatgacaaattcaaacagacaaactttaatatcagtactctagatgcggatggtgtaggtgttcctctttttcatattgtccaaagttataacgttattggcaaaattactcggagctcgccggatttctatatctacaagtacgttttacaaggggtgcaagatccgcctttatactctgattgtaaagttatttgtcaagataaagtttttcgtttatgcaaaattttatattgtgaaatttatgctcatcaaggattttttgaaactaaatacgatttcttctatccttctaaaacgcagccggtcaaaaaataccaaataatcaaacaaagtaatatgcgagatctatattccactttggacggtatgcgttttcgttggcatgtgaaattctacagcgatcattttcgattgatgttcctagatgaggacaggctcaattactcaaatagtaaccaaaaggaaaggcaaaaaccagatcaaggaaaaagtaaggctccagatttcgtaattggccattatacaagaactttttccgatatactccctagatccacgtcaaaatgctccaatcttattattggagaacactcaaagccagactctcttggtatcacgaccgttcctgatttgactcaggaatttgcctgtcagggagctttaatccattatctgctgcatatagaacgagaaagaaaataa

SEQ ID NO: 191158 - DNA, 1698 bp, Saccharomyces pastorianus
atgaaaagaacggtaatatcttcctcgaacgcatatgctagtaagagatctcggctggatatagaacatgattttgaacaataccactcgttgaacaaaaaatattatccaaggccaattactaggacaggcgcaaatcaattcaataataagtctcgggctaaaccaatggagattgtggaaaaactgcaaaagaagcaaaaaacgtcgtttgagaatgttagcactgtcatgcactggtttcgaaatgatctacgtttatatgataatgtgggactgtacaaaagtgttgcgctcttccagcaattgaggcaaaaaaacgcaaaagccaaattatatgctgtttatgtcatcaatgaagatgattggagagcccatatggatagcggatggaaattgatgtttataatgggggcgttaaaaaatttgcagcagtccttagccgaattacacatacctcttcttctgtgggaattccacactccaaaaagtaccttatctaattcaaaagagttcgtggagtttttcaaagaaaaatgtatgaatgtaagttcaggaacaggtacgataatcactgctaatatagaataccaaacagatgaactgtaccgtgatattaggctgttagaaaatgaagaccatagattgcaattgaaatactaccacgactcttgcattgttgctcctggattgatcactactgacagaggcaccaactattctgtgtttactccatggtacaaaaaatgggtgctatatgtaaataattacaaaaagagtacctctgaaatttgtcatttgcatataatcgaaccattaaagtacaacgaaacttttgaactgaagccattccaatattcattaccggatgaattccttcaatatatacctaaatcaaaatggtgcttgccagacgtttctgaagaagcagctttatccagattaaaagatttcctcggtacaaaaagttctaagtacaacaatgaaaaagacatgctatatttgggtggaacctctgggctaagtgtatatataactactggtaggataagcacaagacttatagtcaaccaggcatttcaatcatgcaacggacaaataatgtcaaaagcactgaaagataattcgtccacccaaaatttcatcaaagaagttgcatggagagatttttacagacattgtatgtgcaactggccatatacctcaatgggaatgccttatcgattggacactttagatataaaatgggagaataaccctgtagcatttgaaaagtggtgtactggtaatacaggcattcccatagtcgatgccataatgagaaaattactgtacacaggctatattaataacagatctagaatgatcacagcttcttttctttctaaaaacttattaatagattggagatggggggaacgctggtttatgaaacacttgatagacggtgattcgtcttcaaatgttggtggctggggtttttgttctagtacaggaattgatgcccaaccatattttagagtttttaatatggatatacaagcaaaaaaatatgacccacaaatgatattcgtcaaacaatgggttcccgaattgatttcttccgaaaataagcgtccagaaaactatccaaaacctttagttgatttaaagcatagtagggagcgtgctttgaaagtttataaagacgcaatgtga

SEQ ID NO: 191159 - DNA, 621 bp, Saccharomyces pastorianus
atgagtttcctaaacatttttacttttttcagcgtccttgtgtctgttgcaacagccgtcagatttgatttgactaacgtcacttgtaataacctacatggacctcactgtggtacctacgttatggaagtcgttggccaaaatggtacatttttgggtcaatctacgtttgctggtgccgacgttttaactgaaagcgctggtgacgcttgggcaagatatttgggccaggaaacaagattcctcccaaagttgactactattgctagcaatgatacgaagaacttttctccactaatcttcaccaccaatatctacacttgtaaccctcaatccattggtgatgctatggttccttttgctaacactgttactggtgaaattgaatacaactcttgggcagacaccgctgataatgcttccttcataaccggtttagctaaccaattgtttaactctactcagtatggcgttcaagttgcttcctgttacccaaactttgcttctgttattttgagcaccccaactgtgaacattttcgctgcgaatgagacattaccagattattgtaccgccatccagttgaaggccgtttgtccaccagacgctggttttgcttga

SEQ ID NO: 191160 - DNA, 1875 bp, Saccharomyces pastorianus
atgagattccaccgtcaaggtaccgcagccaccgtaggcgtactgctcattgtgctgcttggtttctgttggaaattatctgaatcttatggcatagtgtcaactgccctaccacacaagcaacctgcaaccaaaatcacagacacaccttctatacgatgggataattaccatgagtttgtcagagacattgattttgataacagcacggctatctttaattccattcgagctgctttaagacagtctccatcggatatacatcctgtcggagtatcttattttcccgctgtaattcccaaaggaactttaatgtaccatgccggatcaaaagtgccaactaccttcgaatggctggctatggaccacgaattcagctactctttcggcttgaggtcaccatcctatgggagaaaatctttggaaagaaggcatgggaggttcggcaatggcacccatggtgatcatccaaaagggccaccaccaccaccaccaccagacgaaaaagatcgaggttcacaaaaaatgcttacctatagagcagcacgggacctcaacaaatttctctatcttgatggggcttctgctgcaaaaactgactcaggagagatggacacgcagctaatgttgtcaaatgttattaaagagaaattgaaccttacagatgatggtgaaaacgaacgaatggccgaacgactctacgctgctagaatatgcaaatgggggaagccattcgggcttgacggaattatcagggtagaggttggctttgaggtcgttttgtgtgatttttcggctgataacgtcgaacttgtttcaatgttagaaatggtccagcctaaccagtacctaggcttaccagcacctaccgttatatcgaaagaggaaggttggcctctggatgaaaatggaaacctagttgaagatcagctaacagatgaccaaaaggcgattctggaaagagaagatggttgggagaagactttttctaatttcaacgcagttaagagcttcaatcagttgagagcgggtacagcgcatgacaacggggagcatcgaatccatatcgactataggtacctagtgagcgggataaacaggacttacattgctcctgatcctaacaacagaagattactcgatgaaggaatgacatgggaaaagcaattggacatggtagatgacttagaaaaggctctggaagtcggatttgatgccacgcaaagtatggattggcagttagcatttgatgagcttgtccttaaatttgctccattactaaaatctgttagtaacatactgaacagcaatggtgatattaatgagtcaattgccatcaatgcaacagcactcacattgaacttttgtttaaggtttgagcctgcaagcaacaacagtgatgaattcggtagcgggaaagactttgctgtctaccaatatgtgagcccataccaggccttaaaaacggatgcagactttttgatttggtcatctgctgtcagcgtggtcggagaaattgttgatgccatttataaagtgaatgatttattgatacccgaagtctactcttttatgacagataacacaacttccagcgacttaataaagaatgtcgaaacggctcgctccactatcgatggtttaattgaatctctagggtggattgaactaaattaccgttgtgagagacaatgcaattgggatgaagtttgttacactccttcctggggcccatctccaatgggtatgactgaaccaggttcccacaatgagggatttggaacccactttgatgaatctcgacaaaggttggttattaacagtaaactacagtgtatcaatataaatgatttgatggttaatcgtaatcattag

SEQ ID NO: 191161 - DNA, 1389 bp, Saccharomyces pastorianus
atggaaagatatgatagacagctgagactatggggagcattgggccaagatagtttgaaccggtcccgtgtgtgcgtggtaggacctgctacacctttgctgcaggaagtttttaagaatctggtgcttgccggaatatcatctcttacttggctcaaagtagagtgtgcagttcaatcgggttctctgtttttagcagagcttaaaaaagatcttgagccattggcttctaaacagctagaatatgaggaaaatgaccttagaaagacgttacagcaacctcagtatgattggacccgcttctcggtggtgatcttgacttgtattggtgagcaaactgcgatgctcgatttaaatgagattaggcggcagagaggaacaaagtttccgcctgttctaaacactttcgtctctggattttatggatatatatatctggtactctcagaaacacattttgttttgcaagcacacccagatagtaagaagtatgatttacggttacagaacccttggcctgaactaataaattacgtagatacatttgacctaagtaaaatggatacagccacgttttctggtattccatatactgttttgctcatgaagtgtattgcaaaacttgaaagggatggtaataatgggaggataacgattgatcagatgaagaaagttttagaccaaatttgccttcctttagggaatgatgttatctacgaacccaattatgtggaagctaaacgctatgcttacttggcctgctctcaaaatgattgttgtaaagaactggaagatctgctccgaaatttggaaatatcagattatgggaacgattggcatgatacttataactacgagattctcacactattattgactttgaaaaatattgctaaagagaatggggagctcagctttcaacctttaacgggcactctcccagatatggagtcaacaacggaaaattatatcagactcaagaaactgtatgaagtaaaagcaaagcttgacaagtctcgtgtggaggaaagtttggctcgcagtaaaaaaatagtttcacaggatgtcttggagacattttgttctcattacggggaggtcaggaaaatattgccgccaaaaagtgacttgttaggtatttttagcacctcgaatgcccttttagatgcattagttatggtccaattctgggagcaaccggcagtaactgcagaggataaagatgagtttattggtttacgagtcgacgataactattccgtaatggccttttttggaggtgcagtggttcaagaggctataaagcttatcacacaccattacgttcctattgataacctatttttatataatggcattaataattcatccgcaacatataaaatataa

SEQ ID NO: 191162 - DNA, 2508 bp, Saccharomyces pastorianus
atgctatttggtattaaactggctaacgacgtatatcctccctggaaggattcatatatcgactatgaaaggttgaagaaattactaaaggaaagcgtcatacatgatggccgtagttccgtggatagttggtccgaaaggaatgaatctgattttgtggaggccttggataaagaactagaaaaggtttacacatttcaaatttccaaatataatgctgtcttgcgaaaattagatgatttagaggaaaacactaaatcagctgaaaaaatccaaaaaataaattctgagcagttcaaaaacaccttagaagaatgtctagatgaggctcaaagattggataactttgacaggttaaattttactgggtttatcaagattgtgaagaaacacgataaattacatccaaactatccttctgtaaagtctcttttacaagtcagattgaaagaacttcctttcaacaattcagaagagtattctcccttgttgtataggatctcatatctgtacgagttcttgagatcaaattatgatcatccaaatacggtgtctaaatcattagcaagtacttctaaattatcacatttttctaaccttgaagacgcaagttttaaaagctacaagttttgggttcatgatgataatataatggaggttaaggctagaatcttaaggcatctacctgctttggtttatgcgtcggttccaaatgaaaatgacgatttcgtcgataatctagaatcagatgtccgcgtacaacctgaagcgcgcttgaatattggttcaaagagtaacagcctttctagtgatggtaatagcaaccaagatgttgaaattggaaaatcaaagagcgttattttcccacagtcatatgatccaacaatcactacattatatttcgacaacgatttttttgatttgtacaataacagattgttgaaaatcagcggtgcacctacgctgagattaagatggatcggtaaactgctagacaaacctgacatatttttggaaaagagaacttttacagaaaataccgaaactggtaattcaagttttgaagaaatcagattgcaaatgaaagccaaattcatcaacaattttatttttaaaaatgatcccagttacaaaaactatttaattaatcaactaagagaaaggggtactcaaaaggaggaactggaaaaactttctagagactttgataacatccaaaactttattgttgaggagaagttgcagccagttttgagagctacctataatagaactgctttccaaattcctggagatcaaagtattagagtcactatcgattccaatatcatgtacattagagaggattctttggacaaaaataggcccattaggaaccctgagaattggcaccgtgacgatattgattccaatattcccaacccattgaggtttttaagagcaggagaatattcgaagttcccctattctgtaatggagattaaggttataaaccaagataattctcaaatgcctaattatgagtggattaaagatttaactaattcacatttagttaacgaagttccaaaattttctttgtacttgcaaggtgtggcttcactgtttggtgaagacgataaatatgtcaacattttgccattctggttgcccgatttagaaaccgacatcagaaagaaccctcaggaggcttacgaagaagagaagaaaactttacaaaaacaaaagagcattcatgataaacttgataatatgagaaggttatccaaaatctctgtaccagatggaaagaccactgaaagacaagggcaaaaagatcagaatactcgccacgttattgcagatttagaagatcacgaatcatcagatgaagaaggtactgcattgcccaagaaatctgcagtcaaaaaagggaagaaattcaaaacgaatgcagctttcttgaaaattcttgctggaaaaaatatttcagaaaatggaaatgatccatactccgacgatacagacagtgcctcttctttccaattacctccgggagttaaaaaaccagttcaccttttgaaaaatgccggtcctgtcaaagttgaggcaaaagtttggctcgccaatgaacgtacattcaatagatggttaagtgtaaccacattgctgagtgtattgaccttttctatctataattcagtgcaaaaagccgaatttccacaactagctgatctgttggcctatgtatatttctttttgactttgttttgcggagtatgggcttatagaacctacttaaaaagattaactcttattaaaggtagaagtggtaagcatttggatgcacctgtgggacctattttggttgcagttgtattaatcgttaccttggttgttaactttagtgtggcttttaaagaggccgctaggagggaaagaggattagtaaacgtttcctcccagccttcgttaccccgtacactaaaaccaattcaagattttatcttcaatttggttggggaataa

SEQ ID NO: 191163 - DNA, 1974 bp, Saccharomyces pastorianus
atgtccatcagagatttatatcatgcgagggcttccccttttatatcgttagaattcttccctccaaagactgaattagggacgagaaatttgatggaacgtatgcatcgtatgactgctttagatccactgtttatcacggttacttggggagcaggtggtactactgcggaaaagactctgacattagcttccttggcacagcagacactaaatataccagtttgtatgcatttgacctgtacaaacacagaaaaagccatcattgatgatgcgctggatagatgttataatgcaggaatcaggaatattttggctcttcgaggtgacccacctattggggaagattggctagattctcaatcgaacgaatcaccttttaaatatgcggttgatttagttcgttatatcaagcaaagctacggagacaagttctgcgtcggtgttgcagcatatccagaaggtcattgtgaaggtgaagcagaaggtcacgagcaagacccattgaaggatttggtatatttaaaagaaaaagttgaagctggggccgattttgtgataacacaactgttttacgacgttgaaaaattcttaacttttgaaatgctatttcgggaacggatttcgcaagatttgccccttttccctgggttgatgcctattaactcctatctgcttttccacagagcagcaaagttatcacatgcatctattccacctgcaatactgagtaggttccccccagaaatccaatcggatgataatgccgtgaagtccattggtgtggacattcttatcgaattgattcaggaaatatatcaaagaacatctggtagaattaaagggtttcatttctatacattaaatttggaaaaggctattgctcaaattgtctcgcaatctcccgtcttatcccatatcgtaaatgaatctagcgaagaagagggagaagatgaaaccagtggcgaaataggaagcatagaaaatgtgccaatagaagatgctgacggggatattgtgttggatgattcgaatgaagaaactgtagcaaaccggaaaaggagaaggcattcaagtcttgattcggccaagttgattttcaatagggctatcgtcactgaaaaaggcttacgctataataatgagaatggttccatgccatctaaaaaggctttaatatctatttctaaaggtcacggaactttgggtcgtgatgccacttgggatgagttccccaatggtagatttggtgactccaggtctcccgcatatggtgaaatagacggttatgggccatccatcaaggtaagcaaaagcaaagcgcttgaactatggggtataccaaagacaattggcgatttaaaagatatttttataaaatatttggaaggttcaacggatgcgattccctggtctgacctgggtttatcagctgaaacggcgttaatacaagaagaactaatccaactaaactatcgcggatatttgactttggcatcgcaacctgccacaaatgctacattgagtagtgataaaatattcggctgggggcccgcgaaagggaggttgtatcagaaggcattcgtagaaatgtttattcatagacagcaatgggaaacaactttgaaacccaagctagaccattacgggcgtcggaaattcagttattacgcgggcgattcatctggttcatttgaaacgaacctagacccgcacagctctagcgttgtaacatggggtgtttttcccaacagtccggtcaaacagactacaatcattgaagaagagtcattcaaggcatggagagatgaagcgtttagtatctggtccgagtgggccaagttatttccaaggaacaccccagccaatattcttctaagactagtgcataaagactactgtcttgtctcaattgttcatcacgacttcaaagaaaccgacgagctatgggaaatgttactcgaccaagcctaa

SEQ ID NO: 191164 - DNA, 2844 bp, Saccharomyces pastorianus
atgtcttccactgaagcaaagcaatacaaggagaaaccctcgaaagagtacctccatgccagtgatggcgatgaccctgcaaataattctgccgcttcttcgtcatcttcgtcttctacatcaacttccgcctcgtcatcggctgcagccgttccacggaaggccgcagccgcttctgccgctgatgattctgactcagatgaagatatagaccaattgattgatgaactacaatctaactacggtgagggtgatgaatctggtgaagaagaagtacgtactgatggggtgcacgctggccaaagggttgttcctgaaaaggacctttctacggaccctgcgtatggtttgacttcggatgaagtcgccaggagaagaaagaaatatgggttaaatcaaatggctgaggagaatgaatcgttgattgtgaagtttttgatgttcttcgtagggcctattcaattcgttatggaggctgctgctattttggctgccggtttgtctgattgggttgatgtcggtgtcatctgtgctttactgctattaaacgcatctgtcggatttattcaagaattccaggcaggttccatcgtagacgagctgaaaaagacgttggccaatactgcaacagttattagagatggccaattgatcgaaattccggctaatgaggtagttcctggtgagattttgcaattggaaagtggcacaattgctcccgcagatggtcgtattgtcactgaagactgttttttgcagatcgatcaatcggccatcactggtgaatccttagccgctgaaaagcattacggtgatgaggtgttctcctcatccactgtgaaaaccggcgaggcttttatggttgttactgccactggtgacaataccttcgtcggtagggctgccgccttagtggggcaggcttccggtgtagagggccatttcactgaagtattgaatggaattggtattatcttacttgttctagttatcgctactttgttgttggtctggaccgcatgtttctatagaacggtcggtattgtaagcattttgagatatactttgggtataaccatcattggtgtcccagtcggtttgccagcagttgttaccacgaccatggctgtcggtgcagcttacttggctaagaagcaagccattgttcaaaagttatctgctattgaatcccttgctggtgttgagattttatgttctgacaagactggtactttaaccaaaaacaagttatctttacacgaaccctacactgtcgaaggcgtttctccggacgacttgatgttgaccgcttgtttagctgcctctagaaagaagaaaggtttggatgctattgataaggcttttttgaagtcattgattgagtatccaaaagctaaagacgccctgaccaagtacaaagttttggaattccatccgttcgaccctgtctcaaaaaaggttaccgctgttgtagaatccccagaaggtgaaagaattgtttgtgtcaagggagccccattgtttgtcttgaagactgttgaagaagatcacccaattccggaagatgtgcatgaaaactacgaaaataaggttgctgaactagcttctagaggtttccgtgctttaggtgttgctagaaagagaggggaaggtcactgggaaatcttgggtgttatgccatgtatggacccccctagagatgacaccgctcaaacaatcaatgaggccagaaaccttggtttgagaatcaagatgttaaccggtgacgctgttggtatcgcgaaagaaacgtgtaggcaattaggacttggtacaaacatttataacgcagaaaggttaggtctgggaggtggaggtgatatgcctggttcagagttggctgattttgttgaaaatgccgatggtttcgcagaagttttcccacagcataaatacagagtcgttgaaatcttgcaaaacagaggttacttggttgctatgactggtgatggtgttaacgatgccccatctttgaagaaggctgatactggtattgctgtcgaaggtgctaccgatgctgccagatcagccgctgatattgttttcttggcccctggtctctctgctattattgatgccttaaagacttctagacagattttccacagaatgtactcctatgttgtttatcgtattgccctatccttacatttggagattttcctgggtttatggattgctattttaaacaactctttggatatcaatttgatcgtttttattgctattttcgcagacgttgccactttaactattgcttatgacaatgctccttatgctcctgaacctgtgaaatggaacctaccaagattatggggtatgtctattattttgggcatagttttagctataggttcttggattactttaaccaccatgttcttgcctaatggtggtattatccaaaattttggtgccatgaatggtgtcatgttcctgcagatttcactaactgaaaattggttaatttttgtcactagagctgctggcccattctggtcttccattccatcgtggcagttagccggtgccgttttcgccgttgatattattgctaccatgtttaccttatttggctggtggtctgaaaactggactgatattgtgtcagtcgttcgtgtctggatttggtccattggtattttttgtgtattgggaggattttactatattatgtccacgtctcaagcctttgataggttgatgaatggtaagtcattaaaggaaaagaagtctacaagaagtgtcgaagatttcatggctgctatgcaaagagtttctactcaacacgaaaaaagcagttag

SEQ ID NO: 191165 - DNA, 1248 bp, Saccharomyces pastorianus
atgtctcaaggtactttatatgctaacttcagaattagaacttgggtcccaagaggtcttgtcaaggctttgaagctggacgttaaggttgttacgccagatgccgccgctgaacagttcgcaagggactttcccttgaagaaggttccggctttcgtgggtccaaagggttacaagctaaccgaggcaatggcgattaactattatttagtaaagctttcacaggacgacaagatgaagactcaacttttaggtgccgacgatgacttaaatgcccaagcgcaaatcatcagatggcaatctttggccaacagtgatctgtgcatccagattgccaacaccatcgttcccttgaagggcggcgccccctacaacaagaagagcgttgattctgcgatggacgctgttgacaagatcgtcgacatcttcgagaacagattgaaaaactacacctatttggctacggaaaacatctccttggccgacttggtggctgcctcgattttcaccagatactttgaaagcctgttcggtactgaatggagagctcaacatccagccatcgtgagatggttcaacaccgttagagcctcacccttcttgaaggatgaatacaaggatttcaagttcgctgacaagccattgagtccccctcaaaagaagaaggaaaagaaggccccagccgccgctcccgccgcttcgaagaagaaggaggaagccaagccagctgctaccgaaactgaaacttcttccaagaaaccaaagcacccattagaattattgggcaagtcaactttcgttttggatgactggaagagaaagtactccaatgaagacaccagaccagttgctttaccttggttttgggagcactacaacccagaagagtattccctgtggaaagtcacctacaagtacaacgatgaattgactttgactttcatgtccaacaacttggtcggtggtttcttcaacagattgtccgcctctaccaagtacatgttcggttgtctggtagtctacggtgaaaacaacaacaacggtattgttggtgcagttatggttaggggccaagattacgttccagctttcgatgtcgcaccagattgggaatcttacgactatgcaaagttggatccaactaacgacgacgacaaagaattcatcaataacatgtgggcctgggataagccagtttccgtcaatggcgaaccaaaggaaattgttgacggtaaggtcttaaaataa

SEQ ID NO: 191166 - DNA, 999 bp, Saccharomyces pastorianus
atgagcggatacacgggaaataattatagcagatactcatccactcctccgagacaaagggggggttatcaccatgcgagacgaagtagaggtggagcaggcggatcgtattacagaggcggtaatgcgtcttatggcgcgagatacaacagtgactatgagcagccgccccaagagggagacttgagacaaaccggagcatactatcgaaacggatacacagatacaaggccgtactattcagctaatagcaggcattaccaagcacaaccatcccccaggtacaacaatggtacaaattcgtaccacctaccgcaacgtggcaatagtcaagatacgaacggcaggaccacgagcgcctcgcaagaagataatgacgaaaaaagagtcaagtccagataccggaacatgcaggcagatcatccacgccaacaaccgatgagcgttggcagcaccagcagcagaaatggtagtagtgggaacagcagcactagcagcaccagcaacgggcttccgccaccaccttcagtatcgtctataaccaacaatagatcatatcacagcagtgcttatccatattccagcagccatacttacaataattaccaccaccgtgagacaccaccgcctcccccatcgaatggctattatgcaaagggttacccagtacacgtaccagaaaatagaagtaacagcgacggctctagcagcagcgtcgtcaagaagaaaagaatactagatatgaaagattccccctttatttacttgacagattttgataaaaatgtgaaaaagacaaacaacaccgaaagtgaatgtgaaaaggcgagggaagttttcaaagagagcgattccatcgattccgctttggaagaactaaacctaaaaatcaattctaatgagctagaattgcggctcctaaataaccagtgcgacaagcatgcattaaatattcaactgacccaagaaaagctggactcattgttattaatgcagtag

SEQ ID NO: 191167 - DNA, 3315 bp, Saccharomyces pastorianus
atggcgaccccagtgagggatgaaacaagaaatgttattgacgacaacatttctgcgcggattcaatcgaaagtcaaaacaaatgatactgtcagacagacgccatcatcattaagaaaagtttctattaaagatgaacaggtgaaacaatatcaaagaaacttaaataggtttaaaaccatactaaatggtttaaaggcagaagaggaaaaactttctgagactgatgatattcagatgctagctgaaaaattattaaaactcggagaaaccattgacaaggttgagaataggattgtggatctagttgaaaagatacaattattggaaacaaacgagaacaataatatattacatgaacatatagatgctacagggacttactatttattcgatacgttaacttcaaccaacaaaagattctaccctaaggattgtgtttttgattataggactaataatgtcgagaacattcctattctcttaaacaattttaaaaaattcatcaagaaatatcaatttgatgatgtctttgaaaatgatatcatagaaatcgatcctcgtgaaaatgaaatcttgtgcaagataatcaaagaaggactcggtgaaagtttagatatcatgaacacaaatacaactgacatttttaggataatcgatggtttaaaaaacaaatatagaagtttacatggtagagatgtcagaattagagcctgggaaaaggttttggttgatacaacatgtagaaattccgcattgttaatgaataaacttcaaaagttggtactaatggaaaaatggattttttctaaatgctgccaagattgtcctaatctaaaggattacctacaagaagctatcatgggaaccttacatgaatccttaagaaattctgtgaaacaacgtttgtacaacattccacataacgtaggaattaatcacgaagaatttctaatcaatactgttattgaaacagtaattgatttgagcccaattgcagacgatcaaatagaaaatagctgcatgtattgcaaatctgttttccattgctcaattaactgcaaaaagaaaccaaatagggaacttaggcctgactcgaccaatttctcaaaaacctattatctacaaggtgcacagagacaacaacaacttaagtccagtgcaaaagaacaaaagtcttggaacaagacacaaaaaaagtcaaacaaagtgtacaacagcaaaaaactggtaattattgataccggttccggcgtaaacattaccaatgacaaaaccttactgcataattacgaagacagtaatcgcagtacacgattttttggtattgggaaaaacagttcagtgtctgttaaagggtatggctatataaaaatcaagaatggtcacaacaatactgacaataagtgtttattgacttactatgtaccggaagaagaatccactataatcagctgttatgacttagccaagaaaaccaaaatggttttaagtcgaaaatataccagattgggaaacaaaatcataaaaattaaaaccaagatagttaatggtgtcattcacgtaaaaatgaacgagttaattgaacgtccttccgatgattcaaaaataaatgcaataaaacctacttcttctcctggatttaaactaaataaaaggtctattaccttggaagatgctcataaaagaatgggccatacaggaattcaacaaattgaaaattccataaaacataatcattatgaagaatcccttgacttaatcaaagaaccaaatgaattttggtgtcaaacctgtaaaatctctaaagccacgaaaagaaatcattataccgggtctatgaataatcatagtactgatcatgaaccaggatcatcatggtgcatggatatatttggccctgtatcaagttcaaacgcggacactaaaaggtacatgcttattatggtggataacaacacgagatattgcatgacctccacacacttcaataagaatgctgaaactattttagctcaaatcagaaagaatattcagtacgtggaaacacaatttgacaggaaagtcagagaaattaattcagacagaggtactgaattcacaaatgatcagatagaagaatattttatttcaaaaggaatacatcacatacttacttctacacaagatcatgctgctaatggaagagcagaaagatacatcagaacaatagtaactgatgcaacaacactcctaagacaaagtaacttaagagtaaaattttgggaatacgcagtaacttctgctaccaatataagaaattgcctggaacacaaaagtacaggtaaactaccattgaaggcaatctcacgtcaacctgttacagtgagattaatgtcattcttaccatttggcgaaaaaggaataatttggaatcataatcacaaaaaattgaaaccatctggacttccttctataattctatgcaaagatccaaatagttatggatacaaattctttataccatccaaaaataaaattgtcacatctgataattatacaattcccaactatacgatggacggtagagtaagaaatactcagaatatttacaagagtcatcaattcagttcacataatgataatgaagaagatcaaatcgaaacggtcacaaacttatgtgaagctttggaaaactacgaagatgataataaaccaattactcgcctggaagatttgttcacagaggaagagttatctcaaatagactcaaacgcaaaatacccatctcctagtaataacctagaaggggacttggattacgtattttctgatgttgaggaatctggagattatgacgttgaatctgaactttcaacgacaaatacttcaatctcaactgataaaaacaaaattttgtcaaacaaggattttaattcagaacttgcatcgactgaaatatccatcagtgaaatcgataagaaaggattaataaatacaagtcatattgatgaagataagtatgatgaaaaagtccacagaattccatcgattatacaagagaaactggtaggaagtaaaaatactattaaaatcaatgacgaaaacagaatctccgacagaattcgtagtaaaaatattgggagtatcttaaacactggactcagtagatgtgtagatatcaccgatgaatctattactaacaaagatgagtcaatgcacaacgcaaaacccgaactaattcaggagcagttcaataaaacaaatcatgaaacttcgtttcctaaagaagggagcattggaacaaaatgtaaaattccgaaatacagacaatga

SEQ ID NO: 191168 - DNA, 1459 bp, Saccharomyces pastorianus
atgggcttcaatatagcgtatgtctagctcacagcatgtgttccaaatacattaaagaagatctcttttgttgttgatactaaccagtaaagttgagagttataacaatgaaaataggatgctgtgcgactttttttatccacagttaggtggagtcgaattccatatatatcatttatcgcagaaactaatcgatttgggccattctgtcgtcattataactcacgcttacaaagatcgagtcggcgtacgacatcttaccaacggtctaaaggtctatcacgtaccattttttgtgattttcagagaaaccactttccccactgttttttcaacatttccaataataaggaatattcttctcagagagcagatccaaattgttcattctcatggtagcgcttccacgttcgctcacgagggaattcttcatgctaatactatgggattgagaactgtgttcacggaccattcactctacggttttaataacttaacgtcgatttgggtgaataagttgctaacatttaccttgacaaacatagatcgggttatatgtgtttctaatacatgcaaagaaaatatgattgttagaacagaattaagtcctgatataatctcagtaattcccaacgcagtggtgagcgaagatttcaaaccaagggatcctactggtggcaccaagagaaaacaaagtagggataagatagtgatcgtggtcatcggaaggctctttccaaacaaagggtccgatttacttactcgcataattccgaaagtttgttcctcacatgaagatgtcgaatttatagtagcgggcgatggtccaaagttcatagattttcaacaaatgattgaaagtcatagactacaaaaacgtgtgcaactcttaggctctgttccacatgagaaagtcagggatgtattatgtcaaggtgacatatatttacacgctagtttaacagaagcatttggtacaattctagttgaggccgcatcttgtaatttgctaattgtaacgacacaagtcggaggaattcccgaagtgttaccaaatgagatgactgtttatgcagaacagacatccgtttctgaccttgttcaagcaacaaataaagctatcaatatcataagaagtaaagctttggacacttcctcttttcatgatagcgtgtctaaaatgtacgactggatggacgtagccaaaaggacagtagagatatatactaatatatcttctacttcttccgctgatgataaagattggatgaaaatggtagcaaatctttacaaaagagatggaatctgggctaaacatctttatctgttatgtggaattgtagagtacatgctttttttcctcttagagtggctataccccagggatgaaatcgatctagctccaaaatggcccaagaaaacagtgtctaacgagacgaaggaagcaagagaaacttaa

SEQ ID NO: 191169 - DNA, 1839 bp, Saccharomyces pastorianus
atgtcatttaaggcaactatcaccgagtcggggaagcagaatatctggtttcgtgcgatatatgtgttatctacaattcaggatgatatcaagattacagtgacaacaaatgagttaattgcttggtcaatgaacgagacagatactactctttgtcaggttaggtttcagaaaagcttttttgaggagtatgagtttaaaccacatgagattgtatttggagaaaatggggttcaagttatagaagatacgtacggcaatagtcataagttatactccttccgtgttaatggaagacacctaacaactatatcaagaaagccggatggtgatggcatcaaatcattcacaattgcggtaaacaacacttctacctgtcctgaatcacttgcaaatagattgattgtggtgattgaaatggattcgttaatagtcaaagaatactgtccccaattccagccaataaaatacgatcccataataatcaaccttaagtacaaaaggaggtttttggatgtttttggaactgctgcctccgatcggaatccacaggagcccttggaccctaagctattggacgtttttacaaatacagagcgtgagctaacatcagccttatttaacgaagaagtggaatcagacatacgtaaaaggaatcagttaacggctgctgatgagattaattacatttgttgtaattcaactttattgaagaattttttagacaactgcaatgttaatgtaaccgatgaagtaaaattggaaattaacgtacataggctaagcataactgcattcaccaaggccgtctacggcaaaaataacgaccttttaagaaatgcgttaagcatgagtaacactatcagtacgctcgatcttgagcattattgcttatttacaacaatcgaagatgaaaaacaagataagcgatcacatagtaagcgtagagagcatatgaaaagtataatattcaaattgaaggacttcaaaaacttcataacgataggtccatcctggaagactacccaggacggaaatgataatataagtttatggttttgccacccaggggaccctattcttatgcaaatgcaaaaaccgggcgtaaaattagaattggttgaagttactgacagtaacattaacgatgatattttagaaggaaaattcataaaaacagcaatctctggctccaaagaagaggccggactgaaagacaacaaagaaagctgcgaaagtccattaaaaagcaaaactgctttaaagagagaaaacctgccacactctgtggctggaactcgaaacagtcctttgaaagtgtcgtatctgacccctgataatggaagcacagttgctaagacctatagaaataacacggcaagaaaattattcgtggaagaacaaagccaaagtacgaattacgaacaagataagcggttccggcaggctagttcagttcatatgaacatgaatcgggaacaaagttttgacattggtacgactcatgaagtggcctgtccacgtaatgagagcaattctttaaaaagatccatagcagatatttgtaatgaaactgaagaccccacccaacaatctacatttgcaaaaagggcagacaccactgtgacatggggaaaagcgttaccagctgcagatgatgaggtttcatgcagcaatatcgatagaaaaggaatgctcaagaaagaaaaattgaagcatatgcaaggtctgttgaattcccagaatgacacaagtaatcacaagaaacaggacaataaagagatggaagatgggctgggtctaacacaagtagaaaagccaaggggtatatttgactaa

SEQ ID NO: 191170 - DNA, 414 bp, Saccharomyces pastorianus
atgaagagaaatattatttattatacattgagattattgccacacggaataatgttagttcatagccttaaccaatttattgatgaattcttcacggttaccgaaagaaccaccttggatgaaatgcttgaactttcttgggacaccccaaccaccagatgggttggacaacttgaatggccacaaaaagttgttagcttgcttgaagtgtggaccaacagtgatgatttcgtgaatcaaatcgtcaatggacaagataccatacttacccaagttggcttcgatgatagcattgtcggacaatggaactctttgcttgttgatcttaccgaaacctctcttgtagaccaattgtctaatagtagagtaggatgggtaaccgtaagcaacgtatggttcaatcaacttcaatag

SEQ ID NO: 191171 - DNA, 5269 bp, Saccharomyces pastorianus
atggaatcccaacaattatctcaacattcacccatttctcatggtagcgcctgtgcttcggttacttctaaggaagtccacacaaatcaagatccgttagacgtttcagcttccaaaacagaagaatgtgagaaggcttccactaaggctaactctcaacagacaacaacacctgcttcatcagctgttccagagaacccccatcatgcctctcctcaacctgcttcagtaccacctccacagaatgggccgtacccacagcagtgcatgatgacccaaaaccaagccaatccatctggttggtcattttacggacacccatctatgattccgtatacaccttatcaaatgtcgcctatgtactttccacctgggccacaatcacagtttccgcagtatccatcatcagttggaacgcctctgagcactccatcacctgagtcaggtaatacatttactgattcatcctcagcggactctgatatgacatccactaaaaaatatgtcagaccaccaccaatgttaacctcacctaatgactttccaaattgggttaaaacatacatcaaatttttacaaaactcgaatctcggtggtattattccgacagtaaacggaaaacccgtacgtcagatcactgatgatgaactcaccttcttgtataacacttttcaaatatttgctccctctcaattcctacctacctgggtcaaagacatcctatccgttgattatacggatatcatgaaaattctttccaaaagtattgaaaaaatgcaatctgatacccaagaggcaaacgacattgtgaccctggcaaatttgcaatataatggcagtacacctgcagatgcatttgaaacaaaagtcacaaacattatcgacagactgaacaataatggcattcatatcaataacaaggtcgcatgccaattaattatgagaggtctatctggcgaatataaatttttacgctacacacgtcatcgacatctaaatatgacagtcgctgaactgttcttagatatccatgctatttatgaagaacaacagggatcgagaaacagcaaacctaattacaggagaaatctgagtgatgagaagaatgattctcgcagctatacgaatacaaccaaacccaaagttatagctcggaatcctcaaaaaacaaataattcgaaatcgaaaacagccagggctcacaatgtatccacatctaataactctcccagcacggacaacgattccatcagtaaatcaactactgaaccgattcaattgaacaataagcacgaccttcaccttaggccaggaacttactgaatctacggtaaatcacactaatcattctgatgatgaactccctggacacctccttctcgattcaggagcatcacgaacccttataagatctgctcatcacatacactcagcatcatctaatcctgacataaacgtagttgatgctcaaaaaagaaatataccaattaacgctattggtgacctacaatttcacttccaggacaacaccaaaacatcaataaaggtattgcacactcctaacatagcctatgacttactcagtttgaatgaattggctgcagtagatatcacagcatgctttaccaaaaacgtcttagaacgatctgacggcactgtacttgcacctatcgtaaaatatggagacttttactgggtatctaaaaagtacttgcttccatcaaatatctccgtacccaccatcaataatgtccatacaagtgaaagtacacgcaaatatccttatcctttcattcatcgaatgcttgcgcatgccaatgcacagacaattcgatactcacttaaaaataacaccatcacgtattttaacgaatcagatgtcgactggtctagtgctattgactatcaatgtcctgattgtttaatcggcaaaagcaccaaacacagacatatcaaaggttcacgactaaaataccaaaattcatacgaaccctttcaatacctacatactgacatatttggtccagttcacaacctaccaaatagtgcaccatcctatttcatctcatttactgatgagacaacaaaattccgttgggtttatccattacacgaccgtcgcgaggactctatcctcgatgtttttactacgatactagcttttattaagaaccagtttcaggccagtgtcttggttatacaaatggaccgtggttctgagtatactaacagaactctccataaattccttgaaaaaaatggtataactccatgctatacaaccacagcggattcccgagcacatggagtcgctgaacggctcaaccgtaccttattagatgactgccgtactcaactgcaatgtagtggtttaccgaaccatttatggttctctgcaatcgaattttctactattgtgagaaattcactagcttcacctaaaagcaaaaaatctgcaagacaacatgctggcttggcaggacttgatatcagtactttgttacctttcggtcaacctgttatcgtcaatgatcacaaccctaactccaaaatacatcctcgtggcatcccaggctacgctctacatccgtctcgaaactcttatggatatatcatctatcttccatccttaaagaagacagtagatacaactaactatgttattcttcagggcaaggaatccagattagatcaattcaattacgacgcactcactttcgatgaagacttaaaccgtttaactgcttcatatcattcgttcattgcgtcaaatgagatccaagaatccaatgatcttaacatagaatctgaccatgacttccaatccgacattgaactacatcctgagcaaccgagaaatgtcctttcaaaagctgtgagtccaaccgattccacacctccgtcaactcatactgaagattcgaaacgtgtttctaaaaccaatattcgcgcacccagagaagttgaccccaacatatctgaatctaatattcttccatcaaagaagagatctagcaccccccaaatttccaatatcgagagtaccggttcgggtggtatgcataaattaaatgttcctttacttgctcccatgtcccaatctaacacacatgagtcgtcgcacgccagtaaatctaaagatttcagacactcagactcgtacagtgaaaatgagactaatcatacaaacgtaccaatatccagtacgggtggtaccaacaacaaaactgttccgcagataagtgaccaagagactgagaaaaggattatacaccgttcaccttcaatcgatgcttctccaccggaaaataattcatcgcacaatattgttcctatcaaaacgccaactactgtttctgaacagaataccgaggaatctatcatcgctgatctcccactccctgatctacctccagaatctcctaccgaattccctgacccatttaaagaactcccaccgataaattctcgtcaaactaattccagtttgggtggtattggtgactctaatgcctatactactatcaacagtaagaaaagatcattagaagataatgaaactgaaattaaggtatcacgagacacatggaatactaagaatatgcgtagtttagaacctccgagatcgaagaaacgaattcacctgattgcagctgtaaaagcagtaaaatcaatcaaaccaatacggacaaccttacgatacgatgaggcaatcacctataataaagatattaaagaaaaagaaaaatatatcgaggcataccacaaagaagtcaatcaactgttgaagatgaaaacttgggacactgacgaatattatgacagaaaagaaatagaccctaaaagagtaataaactcaatgtttatcttcaacaagaaacgtgacggtactcataaagctagatttgttgcaagaggtgatattcagcatcctgacacttacgactcaggcatgcaatccaataccgtacatcactatgcattaatgacatccctgtcacttgcattagacaataactactatattacacaattagacatatcttcggcatatttgtatgcagacatcaaagaagaattatacataagacctccaccacatttaggaatgaatgataagttgatacgtttgaagaaatcactttatggattgaaacaaagtggagcgaactggtacgaaactatcaaatcatacctgataaaacagtgtggtatggaagaagttcgtggatggtcatgcgtatttaagaatagtcaagtaacaatatgtttatttgttgacgacatgattttattcagcaaagacttaaatgcaaataagaaaatcataacaacactcaagaaacaatacgatacaaagataataaatctgggtgaaagtgataacgaaattcagtacgacatacttggcttagaaatcaaatatcaaagaggtaaatacatgaaattaggtatggaaaactcattaactgagaaaatacccaaattaaacgtacctttgaatccaaaaggaagaaaacttagcgctccaggtcaaccaggtctttatatagaccaggatgaactagaaatagatgaagatgaatacaaagagaaggtacatgaaatgcaaaagttgattggtctagcttcatatgttggatataaatttagatttgacttactatactacatcaacacacttgctcaacatatactattcccctctaggcaagttttagacatgacatatgagttgatacaattcatgtgggacactagagataaacaactgatatggcacaaaaacaaacctaccgagccagataataaactagtcgcaataagtgatgcttcgtatggcaaccaaccgtattataaatcacaaattggcaacatatatttacttaatggaaaggtaattggaggaaagtccaccaaggcttcattaacatgtacttcaactacggaagcagaaatacacgcgataagtgaatctgtcccattattaaataatctaagttacctgatacaagaacttaacaagaaaccaattattaaaggcttacttactgatagtagatcaacgatcagtataattaagtctacaaatgaagagaaatttagaaacagattttttggcacaaaggcaatgagacttagagatgaagtatcaggtaataatttatacgtatactacatcgagaccaagaagaacattgctgatgtgatgacaaaacctcttccgataaaaacatttaaactattaactaacaaatggattcattag

SEQ ID NO: 191172 - DNA, 198 bp, Saccharomyces pastorianus
atgaaggctataatattaggtatacagaatatactagaagttctcctcgaggatataggaatcctcaaaatggaatctatatttctacatactaatattacgaatattcctcattccgttttatatgtttcattatcctattacattatcaatccttgcacttcagcttcctctaacctcgatgacagcttctcataa

SEQ ID NO: 191173 - DNA, 2085 bp, Saccharomyces pastorianus
atggtcttgataaatggcataaagtatgcctgtgagaggtgcataagaggccatagagtaacaacatgcaatcatacagatcaaccgcttatgatgatcaaacccaaaggtagaccttccactacatgcgactattgtaaacaacttcgaaaaaacaagaatgcaaatcctgaaggtgtttgcacgtgtggccggctagagaagaaaaaactggcacagaaagccaaagaagaagcaagagctaaagccaaagaaaaacaaagaaaacagtgtacctgcgggactgatgaggtttgcaaatatcatgctcaaaagagacatctaagaaagtccccttcaagttctcaaaagaaaggaagatccatttctcgttctcaaccaatgtttgaaagggtattgtcttctacttcacttgacagcaatatgttatccggccacggagcactatcagatacctctagcatactgacgagcacatttttagacagtgagccgggtgttggtaaaatttcaaaagattaccatcatgtcccttcattggcctccatttcatccttacaatcctcgcaatcgttagatcaaaatttcagtataccacaaagcccgccgttatcttcaatgtcatttaattttctcacgggaaatatcaatgaaaccaaccaaaatcacagtaatcatcagcattcaaaatcaggcaataactggcaagatagttcggtaagcttgccagcgaaagctgattcacgtcttaacatgatggataaaaacaactctgtgggtcttgacctattaggccattcaaaacgaatatcgccgatatcaaactctcgtgtgggcgaagttagcgttccgctagaagaatatattccttctgacattgatggggttggaagagttactgataaaagctctttggtctacgattggccatttgatgaaagtattgagagaaatttcagtacaaccgcaaccgctgcaactggtgaaagtaagttcgacattaacgacaactgtaatagaattaatagcaaaagttatagtaagactaatagtatgaatggaaacggtatgaacaatagcaataataataatatcaacagtaatggcaacgacaagaacaataacaactcttctagacaagaacatcaaggaaatggactatttgacatgtttacagattcatcgtcgatttcaacgctttcccgtgcaaacttattattgcaagaaaaaattggttcgcaagaaaactctgtcaaacaagaaaactattcgaaaaatcctcaacttcgtcatcaattaacttccagaagtagatcatttattcatcatccggcaaacgagtatttgaagaatacttttggaaattcacatagtaatgacatcggaaagggagttgaagtgctatctttgacaccgagttttatggatattcccgaaaaagaaagagaaacggaaagatcgccatcatccaattacattactgacagacctttcactcgaaaacctagatcttctagcattgacgtaaaccataggtatccacctatggcaccaacaaccgtagcgacatctcccggtgcattgaacaatgccgtagcaagcaatctcgacgatcaactgagtttaacatcactaaactctcagccatcatcgatagcaaatatgatgatggacccttcaaacctagctgagcaaagttctattcattcagttcctcagtcaataaactctccgagaatgcctaaaactggaagtcgccaagacaagaacattcacactaagaaggaagaaagaaatccgctaaataacatacacgatctgtcacaattggaaaatgtaccagacgagatgaaccaaatgttctccccaccattaaaaagtatgaatagaccggatgccataagggaaaattcatctagtagtaatttcataatccaaggaaatagcatgatctctacgccttccggaaggaatgaccttccagatacctctccaatgagtagtattcaaacagcgtcaccaccaagtcaattactgaccgatcaaggatttgcggatttggataatttcatgtcttcgttatga

SEQ ID NO: 191174 - DNA, 330 bp, Saccharomyces pastorianus
atgtcttgcattttttccgctgacttgggagtagagtacagctgcgcggagtcgcgtattacaaatcttgtactttgcattctgtgcatacgtgaggaaaaagcagcacctgttgtgaaaaaagataaatttctttttttcatttttctatcctcaaaggaaaatcttttctgcgaaatttctagccgctcttcagtttccgaagtaaagtcgctgagggcgaaaaacaactttatttgcccacacgctgttataggcttccagggagcaaaagcgcaattgggaataaggtttcctcaattgaatggtttgcttcgcctacagcattaa

SEQ ID NO: 191175 - DNA, 676 bp, Saccharomyces pastorianus
atgtccgaatatgcatctagtattcactctcaaatgaaacaattcgataccgtatgtaagatggttttattggttccatcgtcatcatggttcaaacagccaaatgacccgacacacgtaaccgaagcagttatactaacaagaaagctaattttcaccctccttgctacatttttttctacagaagtactctggtaatagaattttacagcaattagaaaataaaactaatttgcctaaatcttatttagttgctggtttaggtttcgcttatctccttttgatttttattaacgtcggaggtgtaggtgaaattctttccaattttgctgggtttgtgttgccagcatatttatcgttggttgctttgaagacaccaacgtccaccgatgacacacaactcttgacctactggattgtcttttcatttttgagtgtcattgaattctggtccaaggcaattctatatttgattccattctactggtttttgaaaaccgttttcttaatctacattgccttgcctcaaactggtggcgctagaatgatctatcaaaagatcgtagccccattgaccgacagatatatcctaagagatgttagcaagacagaaaaggatgaaattagagcttccgtcaatgaggcttctaaggctacaggtgcttctgttcattaa

SEQ ID NO: 191176 - DNA, 682 bp, Saccharomyces pastorianus
atgtatgatatattacgcacacgatttaccgtttgcttggaggagtagtgtttcgtgatgaaatagactgatatagacagaattccacagacttttacgatataaagggaaaaacatgaagttgaacaccatatctcaaatgaataggatcactgtaattcgatagggtacaattatgtgaaatgtctgctttatgggaactttcattcatatacctgaaggtggcaaactagtcttacgaaactgttcagtgcagagatagaattttgtggagatgcatatagggaaacaaagtggaatttatgcttgtataatcaccaattcgaaacactaaacctcgacctatttagaatttccttcaagatttactaacatattttgatattttttcttttttgaatacagggctaaaagaactaagaaggttggtatcactggtaagtacggtgtccgttatggttcctctttgagaagacaagtcaagaagttggaaatccaacaacacgctagatacgattgttctttctgtggtaagaagaccgtcaagagaggtgctgctggtatttggacttgttcctgttgtaagaagaccgtcgctggtggtgcttacactgtctccactgctgctgccgccaccgttagatctaccatcagaagattgagagaaatggttgaagcttga

SEQ ID NO: 191177 - DNA, 1872 bp, Saccharomyces pastorianus
atgtcatcgagcaagaaaatcgtcatcctctatggatcggagacaggtaacgcgcatgattttgctacaatcttatcccatcgactacatcgctggcatttctcccatacattttgctccattggtgattatgacccacaggatatcttgaaatgcaggtacctttttattatatgctccacaacaggccaaggtgaattaccaaggaatgtcaatgcattaaaaggtgaaagacccgtcacgttctggtcgtttttaaagagaaagaatcttccgtcgaatttgctcaaccatattcaaactgccatgcttggacttggtgattcatcttatcctaagtttaactacggcattagaaagctacatcagcgcattgtcacacaattgggtgctaatgaattattcgatagattggaggctgacgaccaggctatggctggtagcaataagggtacaggtctcggaattgaatcagtatattttgaatatgaaaagaaagtcctaagctttcttttaagtaagtaccccaacagaaaggtcaatggccaaataattaagagggaagaattggaccctgaggtttacctagagccagcatcctacctacagctttcagacgaacatgccaatgaaaagttcactagcaccaaggttatattcgaaggtgatgaatcgttaaaggttggcagagttaatataaacaaaaggattacatctgaaggtcatttccaagacgtgaggcagttcaagtttagtaatgtggacaagattcaagaaaactatgaacccggtgatacagtaaccatatatccttgcaatacagatgaggatgtttcaagattcctagcaaatcaaagccattggttagaaattgcggacaaaccattgaatttcaccagtggagttcctaatgatcttaaggatggtggattagttcgcccgatgactttaaggaacttgttgaaatatcactgtgatttcatgagcattcctagaacaagttttttcttgaagatttggacctttgcaactgatgtaactaagatggaacgtggccaagaacaactgaatgatcaaagagaaaaattgcgccaatttgctactgatcaagatatgcaggacttatatgactactgtaatagacccagaaggtcaattcttgaagtactggaagattttatctccgtaaagttgccctggaaatatgtgctagattacttgcccatcattaaaccaaggtactactctatatctagcggccctggggatcctaatattgaattaacagttgcgatagtaaaatataaaactatcttaaggaaaattcgaagaggaatttgcactaactacattgcacgattgcaagagggggaacagataaggtataagttacaaaataatcacataatcaaaaaggaatttttgaataaacctatgattcttgtcggaccgggtgtcggtctagcaccattattatcagtggttaaagcggagatatctaaagatatcaaactcctcttcggttgtagatataaagataaagattatatttataaagatatgctggaagattggttccgtaagggcaaaattgccttacattcatccttttccagagatgaggaaaattcaccaggtgttaaatatgtccaagactacttatggagattaggtgaggaaataactaatttggtagttaataaagacgccgtttttttcttatgtggctcatcaggtaaaatgcctatccaagtcagattaacattcattgaaatgttaaaaaaatggggcaattttagtgatgaagaaactgccaaaaaatacctgaaagaaatggaaaaatctgatagatatatccaggaaacttggtag

SEQ ID NO: 191178 - DNA, 321 bp, Saccharomyces pastorianus
atgcatacatacatatatatatatactgtgtatattcaaatggtggcctttagcccataccgaattgttttgccatttgttgcatttgtggatcttgcatcattttcatcatttcgttcatatcaggcattcctccgcccattcctccgcccattccgccaccaaacatgttcatcatattttgcattagacctggattttgcttcagcttttgttgtgcctgctgcatcatttgtggagtcacttttggcataccaggcatattcggcataccaggcatgtttggcatacccggcatgtttggcatgccaggcatcctag

SEQ ID NO: 191179 - DNA, 324 bp, Saccharomyces pastorianus
atgtcccgccatcagtttgatctaataatgtgcctaaagcagcctggtgtacagacaggtcttctttgtgaaaaatgtgatggcaaatgtcctatctgcgactcttatgtaaggcccaaaaggaaagttagagtatgtgaaaactgttcgtttggtaaacaagctaaaaattgtataatttgtaatctaaatgttggagtcaatgacgcattctattgttgggagtgctgccgcttaggtaaagataaagatggctgtcctaggatcttaaaccttggcagcaatagactggatagacatttcgagaaaaagaaaaaggtataa

SEQ ID NO: 191180 - DNA, 1290 bp, Saccharomyces pastorianus
atggtagacgtggaagagaaaagtcaagaagttgaatatgttgatccaacggtgaatagggtgcccaattatgaggtatctgaaaaggcgtttcttttgacacaatcaaaggttagtattgaacagcgtaaggaagcggcagagttcgttttagccaaaattaaagaggaagaaatggccccttattataaatatctttgcgaggaataccttgttaataatggccaatctgacttggaacacgatgaaaagtcagattctttaaacgaatggatcaaatttgaccaggagctatacaatgaattgtgcaaaaaaaatgaaagtaagattaaagagttaaatgaaaagatccaaaaattggaagaagatgatgaaggtgaactagaacaagctcaagcctggattaatctgggtgaatattatgcacaaatcggtgacaaagataatgctgaaaagacgctagggaaatcattatcgaaggctatttccacaggcgccaaaattgatgttatgctaacaattgcaaggctggggttcttttataacgaccaactttatgttaaggagaagttggaagcagtcaattctatgattgaaaaaggtggtgactgggagagaagaaatagatataaaacatactatggtatccactgcttggccgtaagaaactttaaggaagcggcaaagttattggtcgattctctagcaactttcacctctattgaattaacttcctatgaaagcattgccacatatgcatcggtcacaggtttattcactctggaaagaacagacctaaaatccaaagtcatcgattcacctgaattgttatctttaatctcaacaactgccgcactacaatctatctcgtcgttaacaatttccctttacgcgtccgattatgccagttactttccatatcttttggaaacatatgcaaatgttttgattccatgtaaatatttgaatagacatgcagatttctttgttagagaaatgagaagaaaagtctacgcacaattgttggaatcatataagactttgtcgctgaaatctatggcaagcgcatttggtgtttcggttgcgttcttggataacgacctgggtaagtttattccaaataagcaactaaattgtgtcattgatagagttaatgggatcgtagagaccaacaggccagacaacaaaaatgctcaataccatctgctagttaagcaaggtgacggtttgctaacaaaattacaaaaatacggtgcagcagtgagattgacagggtcagatcgtgtttga

SEQ ID NO: 191181 - DNA, 5269 bp, Saccharomyces pastorianus
atggaatcccaacaattatctcaacattcacccatttctcatggtagcgcctgtgcttcggttacttctaaggaagtccacacaaatcaagatccgttagacgtttcagcttccaaaacagaagaatgtgagaaggcttccactaaggctaactctcaacagacaacaacacctgcttcatcagctgttccagagaacccccatcatgcctctcctcaaactgctcagtcacattcaccacagaatgggccgtacccacagcagtgcatgatgacccaaaaccaagccaatccatctggttggtcattttacggacacccatctatgattccgtatacaccttatcaaatgtcgcctatgtactttccacctgggccacaatcacagtttccgcagtatccatcatcagttggaacgcctctgagcactccatcacctgagtcaggtaatacatttactgattcatcctcagcggactctgatatgacatccactaaaaaatatgtcagaccaccaccaatgttaacctcacctaatgactttccaaattgggttaaaacatacatcaaatttttacaaaactcgaatctcggtggtattattccgacagtaaacggaaaacccgtacgtcagatcactgatgatgaactcaccttcttgtataacacttttcaaatatttgctccctctcaattcctacctacctgggtcaaagacatcctatccgttgattatacggatatcatgaaaattctttccaaaagtattgaaaaaatgcaatctgatacccaagaggcaaacgacattgtgaccctggcaaatttgcaatataatggcagtacacctgcagatgcatttgaaacaaaagtcacaaacattatcgacagactgaacaataatggcattcatatcaataacaaggtcgcatgccaattaattatgagaggtctatctggcgaatataaatttttacgctacacacgtcatcgacatctaaatatgacagtcgctgaactgttcttagatatccatgctatttatgaagaacaacagggatcgagaaacagtaaacctaattacaggagaaatccgagtgatgagaagaatgattctcgcagctatacgaatacaaccaaacccaaagttatagctcggaatcctcaaaaaacaaataattcgaaatcgaaaacagccagggctcacaatgtatccacatctaataactctcccagcacggacaacgattccatcagtaaatcaactactgaaccgattcaattgaacaataagcacgaccttcatcttaggccagaaacttactgaatctacagtaaatcatactaatcattctgatgatgaactccctggacacctccttctcgattcaggagcatcacgaacccttataagatctgctcatcacatacactcagcatcatctaatcctgacataaacgtagttgatgctcaaaaaagaaatataccaattaacgctattggtgacctacaatttcacttccaggacaacaccaaaacatcaataaaggtattgcacactcctaacatagcctatgacttactcagtttgaatgaattggctgcagtagatatcacagcatgctttaccaaaaacgtcttagaacggtctgacggcactgtacttgcacctatcgtaaaatatggagacttttactgggtatctaaaaagtacttgcttccatcaaatatctccgtacccaccatcaataatgtccatacaagtgaaagtacacgcaaatatccttatcctttcattcatcgaatgcttgcgcatgccaatgcacagacaattcgatactcacttaaaaataacaccatcacgtattttaacgaatcagatgtcgactggtctagtgctattgactatcaatgtcctgattgtttaatcggcaaaagcaccaaacacagacatatcaaaggttcacgactaaaataccaaaattcatacgaaccctttcaatacctacatactgacatatttggtccagttcacaacctaccaaaaagtgcaccatcctatttcatctcatttactgatgagacaacaaaattccgttgggtttatccattacacgaccgtcgcgaggactctatcctcgatgtttttactacgatactagcttttattaaaaaccagtttcaggccagtgtcttggttatacaaatggaccgtggttctgagtatactaacagaactctccataaattccttgaaaaaaatggtataactccatgctatacaaccacagcggattcccgagcacatggagtcgctgaacggctaaaccgtaccttattagatgactgccgtactcaactgcaatgtagtggtttaccgaaccatttatggttctctgcaatcgaattttctactattgtgagaaattcactagcttcacctaaaagcaaaaaatctgcaagacaacatgctggcttggcaggacttgatatcagtactttgttacctttcggtcaacctgttatcgtcaatgatcacaaccctaactccaaaatacatcctcgtggcatcccaggctacgctctacatccgtctcgaaactcttatggatatatcatctatcttccatccttaaagaagacagtagatacaactaactatgttattcttcagggcaaggaatccagattagatcaattcaattacgacgcactcactttcgatgaagacttaaaccgtttaactgcttcatatcattcgttcattgcgtcaaatgagatccaagaatccaatgatcttaacatagaatctgaccatgacttccaatccgacattgaactacatcctgagcaaccgagaaatgtcctttcaaaagctgtgagtccaaccgattccacacctccgtcaactcatactgaagattcgaaacgtgtttctaaaaccaatattcgcgcacccagagaagttgaccccaacatatctgaatctaatattcttccatcaaagaagagatctagcaccccccaaatttccaatatcgagagtaccggttcgggtggtatgcataaattaaatgttcctttacttgctcccatgtcccaatctaacacacatgagtcgtcgcacgccagtaaatctaaagatttcagacactcagactcgtacagtgaaaatgagactaatcatacaaacgtaccaatatccagtacgggtggtaccaacaacaaaactgttccgcagataagtgaccaagagactgagaaaaggattatacaccgttcaccttcaatcgatgcttctccaccggaaaataattcatcgcacaatattgttcctatcaaaacgccaactactgtttctgaacagaataccgaggaatctatcatcgctgatctcccactccctgatctacctccagaatctcctaccgaattccctgacccatttaaagaactcccaccgataaattctcatcaaactaattccagtttgggtggtattggtgactctaatgcctatactactatcaacagtaagaaaagatcattagaagataatgaaactgaaattaaggtatcacgagacacatggaatactaagaatatgcgtagtttagaacctccgagatcgaagaaacgaattcacctgattgcagctgtaaaagcagtaaaatcaatcaaaccaatacggacaaccttacgatacgatgaggcaatcacctataataaagatattaaagaaaaagaaaaatatatcgaggcataccacaaagaagtcaaccaactattgaaaatgaatacttgggacactgacaaatattatgacagaaaagaaatagaccctaaaagagtaataaactcaatgtttatcttcaacaagaaacgtgacggaactcataaagctagatttgttgcaagaggtgacattcagcatcctgatacgtacgatacaggtatgcaatccaacactgtacatcattatgcgttgatgacatccctgtcacttgcattagacaataactactatattacacaattagacatatcttcggcatatttgtatgcagacatcaaagaagaattatacataagacctccaccacatttaggaatgaatgataagttgatacgtttgaagaaatcacattatggattgaaacaaagtggagcgaactggtacgaaactatcaaatcatacctgataaaacagtgtggtatggaagaagttcgtggatggtcatgcgtatttaagaatagtcaagtaacaatttgcttattcgttgatgatatgatattgttcagcaaagacttaaatgcaaataagaaaatcataacaacactcaagaaacaatacgatacaaagataataaatctgggtgaaagtgataacgaaattcagtacgacatacttggcttagaaatcaaatatcaaagaggtaaatacatgaaattaggtatggaaaactcattaactgagaaaatacccaaattaaacgtacctttgaatccaaaaggaagaaaacttagcgctccaggtcaaccaggtctttatatagaccaggatgaactagaaatagatgaagatgaatacaaagagaaggtacatgaaatgcaaaagttgattggtctagcttcatatgttggatataaatttagatttgacttactatactacatcaacacacttgctcaacatatactattcccctctaggcaagttttagacatgacatatgagttaatacaattcatgtgggacactagagataaacaactgatatggcacaaaaacaaacctaccgagccagataataaactagtcgcaataagcgatgcttcatatggtaaccaaccatattacaagtcacaaattggtaacattttcctactcaacggaaaagtgattggaggaaagtcgacaaaggcttcgttaacatgcacttcaactacagaagcagaaatacacgcagtcagtgaagctattccgctattgaataacctcagtcaccttgtgcaagaacttaacaagaaaccaattattaaaggcttacttactgatagtagatcaacgatcagtataattaagtctacaaatgaagagaaatttagaaacagattttttggcacaaaggcaatgagacttagagatgaagtatcaggtaataatctatacgtatactacatcgagaccaagaagaacattgctgatgtgatgacaaaacctcttccgataaaaacatttaaactattaactaacaaatggattcattag

SEQ ID NO: 191182 - DNA, 1974 bp, Saccharomyces pastorianus
atgagtgataatggttcccccgcggttcttccaaaaaccgaatttaataaatacaaaatcggcaaagtgaagagtacaccagccatccagcgagatgcgaagactaacttaacatacatcaaactaagaaaaagaagtagtgagaaagtttacgggtgtacagttttccagaatcattatcgtgaggatgaaaaattaggacaaggaacatttggtgaggtttataagggaattcatttagagactcaaagacaagtggcaatgaaaaaaattatagttagcgttgaaaaagatctgtttcctataactgcacaacgagaaattactattttaaagcgtttaaaccacaaaaatattattaaactaatcgaaatggtgtatgaccattcaccggatattacaaatgcggcatccagcaacctacataagtcattctacatgatcctgccgtatatggtagcagatctgtcgggcgttttgcataatccgagaatcaacttagagatgtgcgatataaagaatatgatgctacaaatattagaaggcctaaattatattcattgtgcaaaattcatgcatagggatataaagacagcaaatattttgattgaccacaacggtgttttaaagcttgctgattttggtttagcaagattatattatggctgtcctccaaacttaaagtatcctggtggtgcaggttccggcgccaaatatacatcagtagtcgtaacgagatggtatagagcacctgagttggtgcttggtgataaacagtatacaacagctgttgatatatggggtgtcggatgcgttttcgcagaattttttgagaaaaaacctattttacagggaaaaacggatattgatcagggacatgttattttcaaactacttggtacaccgacagaagaagattgggccgtggctagatatttgccaggtgctgaactaacaacaactaattacaagccaacgttgagggaaagatttggtaaatatctaagtgaaacaggtctagattttttaggacagttgttagcgttagatccttacaagaggttgaccgctatgtctgctaaacaccatccttggtttaaagaggaccctttaccatcagagaagataacattaccgacggaagaaagtcatgaagctgatattaagaggtacaaggaagaaatgcaccaatcattgtcccaaagagtacctactgcgccaagaggtcatatagttgaaaagggtgaatcacctgtcgtgaaaaatcttggggcgatcccaagaggccccaagaaagatgacgcaagttttttgcctccatcaaagaacgtattggctaagccgcctccttcgaaaataagagaactacatcaaaatcctagaccgtatcatgtgaacagcggatatgctaaaactgcgattccaccgccagcagcccctgcaggagttaatagatacggacccaacaatagttccagaaataatcgcttcagcggcaacagcactgcacccaacaacagcaggaatcccgtaaatcgatttcatcctgagacaaatgtcagctctaaatataataaagtacctttgccattggggcctcagtcaagataccagggtaattcaaatgagtcccggtacaaaaactcgccaaatgactctagatatcataaccctaggtacgtgaacaagccggaaaccaacttcaataggcaaccacagaaatatagtcgccaagaatccaatgcgccaatcaataaaaattataatccttcaaacggttctcgcaatatggctggtgatcatcatcaaggctcgagaccttctcatccacaattcccaatctcgccctcacaggggcagcatcagcttacgagtaaaccaatagagaaaaaaaatggaagctttaaggatgaaagagcgaaaccagatgagtctaaggagttccaaaatagtgatattgcagatctatattag

SEQ ID NO: 191183 - DNA, 1590 bp, Saccharomyces pastorianus
atgactataagcgaagctcgtctatcaccgcaagtcaatcttctcccaataaagaggcactcaaacgaagaggtagaggagactgcagcgattctaaaaaagcgtactatagataatgaaaagtgtaaagacagcgaccctggttttggttcccttcaaagaaggttactgcagcaactttatggcacacttcctacggacgaaaagataatcttcacatatttacaagattgtcaacaagagatcgatagaatcattaaacaatccattattcagaaagagagtcattcagtaattctcgtggggcccagacaaagttacaaaacatacttattagactatgaactgtctttgttgcaacaatcttataaagagcagtttataactatcaggttgaatgggtttattcactccgaacaaacagctattaacggtatagcaactcaattggaacagcagttgcagaaaattcatggcagtgaagaaaaaattgacgatacttcattagagactattagcagtggttctttgacagaagtgtttgagaaaattcttttactcttagattcgaccacgaagacaagaaatgaagatagtggtgaggttgacagagagagtataacaaagataacagttgtttttatattcgatgaaattgatacatttgctgggcctgtgaggcaaactttattatacaatctttttgacatggtagaacattctcgggtacctgtttgcatttttggctgcacaacgaaattaaatatcttggaatatttagaaaagagggtaaagagtagattttctcaaagagtgatttatatgccgcaaatacagaatctagacgatatggttgacgccgtcagaaatttacttacagttcgctctgaaatctccccctgggtttcacaatggaatgaaacgttggaaaaagaactatccgaccctcgatcgaatttgaatagacatattaggatgaatttcgaaacctttaggtcattacctacattgaaaaatagcataattccattagtagcgacatccaaaaattttggttcactctgcactgccataaaatcgtgttcttttcttgacatatacaataagaaccaactatctaataatttaacaggaaggctccaatctttatccgatttagagttagccattttgatctcagccgctagggttgccttaagggcgaaagacggatcttttaattttaatttagcttatgcagagtatgaaaagatgattaaagctatcaactccagaattcccaccgtggctcctactacaaatgtgggaacaggtcaaagtactttttctatcgacaatactatcaaactatggttgaaaaaggacgtcaagaacgtttgggaaaatttagtgcaactggatttttttaccgagaaatcagccgttggtttgagagataatgcgaccgcagcattttacgctagcaattatcaatttcagggcaccatgatcccgtttgacttgagaagttaccagatgcagatcattcttcaggaattaagaagaattatccccaaatctaatatgtactactcctggacacaactgtga

SEQ ID NO: 191184 - DNA, 1311 bp, Saccharomyces pastorianus
atggctccaccaaagaaaaccgtaaagaagatggaccttacgtcatttttaaatgatgacacctttggttcatcttgggctgaagaagatgtcgatttgaataagatcacaattcctattgaaaccgctaatgcaaacactattccattgtccgaattggctcatgctaaaaacaacagcaataacacgcgttcaggcggctttggtggcagttttggaggtagatctagattagaccctgctttggggggcggttcttccgatagaagagaggaataccctgttccagatgctccaccatatagggctgtcataaacaacattccatgggatattaccccagagggtgttcaagcctgggttgaagatggtttagttaagcctgaagcggttgaagaagttgttttgccaaagaatctaagagacccaacaagattaaagggtaatgctttcgttactttgaaagaaagagcagatttggtcgccgttctgaagttcaacggtactaaattgaatgagagaactgtttacgtttctgttgcggctccaagaagagggggaggtgcagatgttgattggagtagtgctagaggctccaatttccaaggtgatggaagagaagatgcaccagatcttgattggggtgccgctagaggttctaacttcagaggtccaagaagagaaagagaagaagttgatattgactggactgctgcaagaggttccaatttccaaggctcttccagaccaccaagaagagaaagagaagaagttgatatcgactggagcgctgcaagaggctccaatttccaaggctcttccagaccaccaagaagagaaagagaagagccagatattgactggagtgcagctagaggctctaactttcaaagctcctcgaggccaccaagaagagaaagagaagagccagatattgactggagtgcagccagaggttccaacttccaaagctcctcaagaccaccaagaagagaaagagaaaaggaagaaccagctttggattggggtgctgccagaggtgctcagtttggtaagcctcaacaaaccaaaaatacctacaaggataggtctctaactaacaaaaagactactgatgagcaaccaaaaatccagaagtctgtttatgatgttttacgtactgaagatgatgatgaagatgaagaggctgaaaagcaaaatggagacgcaaaagaaaacaaagttgatgcggcagttgaaaagctacaggataaaactgctcaattgactgttgaagatggtgacaattgggaagttgttggtaagaaatag

SEQ ID NO: 191185 - DNA, 4224 bp, Saccharomyces pastorianus
atgctaggtttgcgaactcatggtttagacaggtatgaacattatattcgtcgcccgtcggattttggcaaacttgagctgcaagattggttgaatcataagtcattccgagtttcccccaatttattaattgattcaagcaccacacgtgagtggaatgaacctgagcttttttatcaaaataccgaggatgaaacttgggtgagaccttgtgtagggccaaagctagaaccatcaatgatgatgctcagatatcacgattcgaatattggtcaaatgcctcaattttgttatccaatctcaagtccgataaattttaaaccagtattaaaatacattttgcaagaacgttctgaactgtcagacggcttccctcaaaagtataacacactaataggtagtctttttgacattgataaaaacccagaaaccttagatgattcagatatagaagcattggatgacatagaaatgagcagtgacagcggtaatgttaaagaaccaaaaattgaattgcaggcgctggaagaaatccaacaaaagcatttcagtttaatagtatccaacaatggaatctttcaaacaggtagcacttcaataacatacatacagtctggcatatctggcagcatagctataaaacccaacaacgttgcaattttaatattactcactcaaccaagtggtcacttattgtctattttaccgcttgatgacggtaaagagacatatttgctacaatattggaacctgggacaaaaaggtcagtggaacataatcaagcaccaaaacgagaagcagtttgttcttatacataaggaactaggcatttgcaaattttttgaattccatttaccatttacttttcaattagtaaacaatttaacattgaccgattccgtgattatgaacggatcctttttcccaacaaattacactgatttagatccctatttcattatatttataacagccataagatatgaaaggatagtctactttgtcatagaatggaacaacaacgaaataaagaaaaaagaggtatatcaattgacagtatttgatggtgagaagactaatatgacaatacccattggactaaatgcatgtttagtcgaaacacccctaaagttctctttagtttctgcaaatcaaattatgtcaggagagactgaattccactcattccaattgaaggctctcaagggaatcaagtcattttttccagctcctttattgttattaaaattacaagaactacacccacatacatttaaaaaattccaatattgtaccataatatcctcctcgacaggaaatatttgtttttgcgtcaccgaacgatcgacaatagtaaatggtaatttaaaattttacgagctaactaggttcaaaggattgaaatccatttcaccactaccttcaaatccgataaatttagactccagatcctcaagttatgtactggtggtcataagttttagtagaacattagagctaacattatctctagaagatttgagatgtttagataaaaaagacgttattaagcctttgaaaaatatcaccttcaagcacacaattgatagttccacagaggagaactctcaaattttagcatttacgtcttctaaattttataacacacacacaggctctaacatcaatgacacgagaaattctcaagtttggcttacctcaccaaatgcaataactcaaccttgcattgattataaactcaggaaaactcatcaacttatccacttaaagcaatttcaaatttttagacatcttaggatatggaaatgtaagaaccttgatattgctctgttacagagacttggaataaaccagtcaaataccgaaagttcgttaatttttgcgaccgacgctgtttctaacaacagaatatttttattagatttaactatgacaacgacaatcgataatgatgatcccgttcaaggactgataaatatagaagatttactatgtgatactgaaaacgaaactatccttctaaattttacgaaaaataacttgattcaagtaactagggatacgatatacatcgatcccattggtggggacaaagagttgcgtaagatttctccaggttgggaattcgaaaacgttacatacaatgatggtattttaatagtttggaatgctgggcttggctgtgtctcttatattgaaaatatagacgctgttgatgagtctggcgccttagtttcaaacttaagcagcagcaaaggcatgagcaagttcttcaagcagttaggaactgtcacgagtgtcaattttcaaatcaaagagtctacagatgatccaaccaagtatgacatttggatccttttaccagactgtgtcattcgtacacccttttctgactggattagtgattcacttgatttttctgatgtgtatattttgagtgttcagcaggcgttaataaacggcccttatttttgctctctcgattatgaatcatattttgaggtgcacactttacagaacaactgcttcaaaaaaggatccagatgtacaagcagagttaattttcaagggaaagatattaaatttagaagctttggtgtgaatcaatgtttggcatttagtgcatttgaaatttttgtcatcaatttaacgccaattcacgacagtagagaattggatttttacaagctaaaattaccgcacctaggtaataacaattcaattcttgaagtctgtccggacatagaaaacaaccaattattcatactctactctgatggcttaagaatcctcgaactatcatacctaacatcaaataatggaaatttcttattaaaatctacaagaagcaaaaataagaaatttttatatctagacaaaataaatcgaatgctggtattgaatcaggacttgagggaatgggagtgtattagactatcagatggtaaggcagttggtttagattctcaacttcttaaggatgattctgaagaaatcctagaaataaaggaattaccaatagcaacagaggacaatcctttagaaaagaaaactgtattattgatctcttttactagctcattaaaactagttttattaactgctgcaaaaaacaaaatttccaatcaaataatagattcgtataaacttgacaattcaagactcctcaatcatttggtcattactcccagaggtgaaatattctttctggattataaagttatgggcaccgataacgaaatgtcctttaacaagttgaaagtcacaaaacattgcattgaccaggaggagagaaataatacgactttgcggctcactttggaaacccggtttacatttaagagttggagtacagttaagacgtttactgtagtaggcgataatatcattgctaccacaaatatgggcgaaaagctctacttgattaaggatttctcttcatcatctgacgaatcgagaagggtgtatcccttggaaatgtatcctgattcaaaagttcaaaagataataccattaaatgaatgctgctttgttgttgccgcttactgtggaaataggaacgatttagattcaagattaattttttactctttacccaccatcaaagttgggcttaataacgaaacaggcagcctaccagatgaatatgggaatgggagagtcgacgacatattcgaggttgactttcctgaaggatttcaatttggcactatggctttgtatgatgttttacatggtgagaggcacgtaaatcgttacagcgaaggcatacggtcggagaatgacgaagcagaggttgccctaaggcagcgtagaaatttactactcttttggcgaaaccactcttctacaccaaaaccttcactacgccgagccgccactatagtatatgaggatcatgtatcatcccgttattttgaggatataagttctatattaggaagcactgcaatgagaactaaaagactatctccctataatgcggtagcattggacaagcctattcaagatattagttacgatcccgcagtacaaactttatatgtgctaatggcagatcaaacaattcacaaattcggcaaggacaggttgccttgccaggacgaatacgaaccaagatggaattctggctatttggtttcaagaaggtcaatagttaaatctgacctcatctgtgaggttgggttatggaaccttagcgataactgcaagaacacagtataa

SEQ ID NO: 191186 - DNA, 630 bp, Saccharomyces pastorianus
atgtcacaacaagttggtaacagtatcagaagaaagctggtaatcgttggtgatggtgcctgtggtaagacatgtttattaatcgtcttttccaagggccaatttccagaagtctacgtaccaactgtctttgaaaactatgtagcagatgttgaagttgatgggcgtcgtgtagagctagcgctatgggataccgctggtcaagaagattatgatagactaagaccattgtcatacccagactccaatgtcgtattaatttgtttctctatcgatcttccagattctttagagaatgtacaagaaaaatggattgccgaagtattacatttctgtcaaggtgtgccaattattcttgttggttgtaaagtggatttgagaaacgacccacaaaccattgaacaattaagacaagaaggtcaacaacccgttacatcacaggagggacaatctgtagcagaccagattggcgcaaccggatactacgaatgttcggccaagactggttatggtgtcagagaagtgtttgaggccgccactagagcttcattgatgggtaaatctaaaacgaatggtaaagctaagaagaacactactgaaaagaagaagaagaagtgtgtcttgttatag

SEQ ID NO: 191187 - DNA, 348 bp, Saccharomyces pastorianus
atgggtaatttcagatttcctataaaaaccaagctaccaccagggtttatcaatgctcgcatacttagggataacttcaaaagacaacaatttaaagagaatgaaatccttgttaaatctttgaaattcatcgctagaaatatgaaccttccaacaaaactgaggttggaggctcagttaaaactaaatgcattgccaaactacatgagatctacgcagatcaaaaataggtgcgtggactctggacatgcaagatttgttctaagtgattttaggttgtgtaggtatcaatttagagaaaacgctctgaagggtaatttgccaggtgttaagaagggtatttggtaa

SEQ ID NO: 191188 - DNA, 786 bp, Saccharomyces pastorianus
atgaagacctatcatttgaataatgatataattgtcacacaagaacagttggatcattggaatgaacaactaatcaagctggaaacgccacaggagattattgcatggtctatcgtaacgtttcctcaccttttccaaaccactgcatttggtttgactggcttggttactatcgatatgttgtcaaagctatctgaaaaatactacatgccagaactattatttatagacactttgcaccatttcccacaaactttaacactaaaaaacgagattgagaaaaaatactaccagcctaaaaatcaaaccattcacgtatataagccggatggatgtgaatcggaggcagattttgcctcgaaatacggggatttcttatgggagaaagatgatgacaagtacgattatctggccaaagtggaacctgcacatcgtgcctacaaagagctacatataagtgctgtgtttactggtagaagaaaatcacaaggttctgcccgctcccaactgtcgattattgaaatagacgaacttaatggaatcttaaaaataaatccattgatcaattggacgttcgagcaggttaaacagtatatagatgcaaacaatgtaccatacaacgaacttttggaccttggatatagatccattggtgattaccattccacacaacccgtcaaggaaggtgaagatgagagagcaggaagatggaagggcaaggccaagaccgagtgtggaattcatgaagccagccgattcgcgcaatttttaaagcaagatgcctag

SEQ ID NO: 191189 - DNA, 474 bp, Saccharomyces pastorianus
atgaatggaaacagcactaacaatgaacaattgcagcaagaactggccactactcaagaccaagtggcttcgattattgagtccttcgttgaattaggtgtctcgatatatgattttcctggtactccagaagccaccaagggaatgatcaccaacttgcaaagaaatgtggatcgcttgtacaagctgaacgtgagaagcaacgatcctcaatccagcttgtctaaggtggacattcccttggaagttgttcaatacattgaggacggtagaaatccagatatttacacaagagagttcgtggaagccataagaagatccaaccaatatcaaagaggcaagatgcatggattgaagcaattaagagattcacttgctgacaagattgtggatgaatttccagagttgaaagaacctgttgaagatattataaagagaacatctcccattgacaatgtctccaatactcactaa

SEQ ID NO: 191190 - DNA, 1545 bp, Saccharomyces pastorianus
atggcatcatcgccacaattggaagaggaagcagctgggaaattagaaacaatccacgcatcagctatggcaaagagcaaaaaaaaaacagatgttgtcgattcaacaaacctgcccattctagaattactatcattaaaagctcccattttccagtctcttttacatcctgaactgcccattataataactggctttggtacaggacatattgtgtgccatcgttatgaccccgctaagttgcaatcgcacctagatcgtagacgtagaattgacactgcaactacaggcaaggatgcaaagaaaggtgtatgcccttggattagattagatatagacctagaaactggagatttgaaatttgttgatattgaagaacaacagcaacaaaagcaaacaggaaaagatgaagacttgggcgtaaaaacactttggaagactaaaagacataaaggtagtgtccgtgccatgtgctttgattctaaaggtgacaatattttttctgttggatcggataatgttttaaaaaaggccaatactatgaccggcaaagtcgtcaaaaaggtaaacttaagctcactgtttaattctgaagagaaaaaaaatgataaatttacgaaattatgcgcctctcaaactcacccattcattttaataggcgatgaatccggtaatatacacgtaataaactcggaaaacttggcattatcaaattccattcgttcgatacattttggcgactctatcaacgatattttccactttgataaaagatctgcatataaattcatttctttgggccagacaacgttagcttattttgacgttcgcgacaaagatgccaaaccgaacgtagctggaaacgaggatggtaaaattttgatcagcgatgatcaggaggacgaagttctttgtggttgtttcgtcgatcccgaagtagcagatacccttttgtgtgggatgggcgagggtattgttaccgtctggaaaccgaataagaatgatttggaagatcaaatgagccgtattaaaattagcaaagatgaaagtatcgattgcattgttcctactttacaagatgataactgtgtatggtgtggttgttccaatggtaacatttataaagtaaatgccaaattgggaaaagtcgtcgagataagaaaccacagtgaattggatgaagtcagttttgttgatctagattttgaataccgtgttgtttctggtggtttggaaaacatcaagatatgggaattatcgagtgatgatgtagaggaaaatgcatcggtagagtccgatagcgacgaacccctctcccactctgatgaggatctaagtgatgacactagttctgatgatgaaacgacgcttgtcgggctctcaaaggaagagctattagacgaattagataaggacctcaaggaagatcatcaagaggaaaaagaatccaactcaaaatctgtcaaaaaaagaaaaataatgaaggagaacaacaaaaaaaaggacctgtatgagcatgggatcaagaagtttgatgatttatag

SEQ ID NO: 191191 - DNA, 219 bp, Saccharomyces pastorianus
atgagacccgttgtatccactggtaaggcatggtgttgtaccgtcctatcggcatttggtgtagtaattctttccgtcattgctcatctcttcaacacaaaccatgaatcctttgtaggatcaataaacgatcctgaagatggacctgcgtatgttatattttcttatttatttcgccgttacccatttaccatctcttatatctctcctccttactaa

SEQ ID NO: 191192 - DNA, 336 bp, Saccharomyces pastorianus
atgacggaaagaattactacaccaaatgccgataggacggtacaacaccatgccttaccagtggatacaacgggtctcattttttttgcggtgtttgcttctagctttgtcctttatcgtagaggttcttgctttgaaagctacctattcttttcttttcccttaagctatttttcaaataatagaaaaaagagtcgcgtgcaaagcgataagcaatttttttcagtctttaaaaaaaatgatcctgaacagcagcatctttattatgcagcgttgatgcagtttctaactcaattagttgaatcacctacgctcttctgtgtttgcactcagtag

SEQ ID NO: 191193 - DNA, 186 bp, Saccharomyces pastorianus
atggacctgcgtatgttatattttcttatttatttcgccgttacccatttaccatctcttatatctctcctccttactaacaattatattttaaccctattgtttatagtgttgcacatactgtttatttggctgccttggtatacctcgtgtttttcgtattctgtgggttccaagtttacctag

SEQ ID NO: 191194 - DNA, 1731 bp, Saccharomyces pastorianus
atgacaaaatatgagcgtgaccctgaattggtgaactttctatcgaaagtggaggatttgaactctaagagatacagtaatattcctagttcaaaaccagcgggggaagcgctttcaccagttagaagtcacaactctggggaatacagaagggctgatatgatgacagggaaaaatgtggaaggttgcgacaatttggcctaccgatctgcgtacaattatgaaatgacgttttctccaaagaagactcattactcattaagtgagctgaatctcgaacgaataacgccaaggccggatttggagggaagtgcctctcaaaaagaaaaaaaatttttaatttctgaagaagattatttattattgcagaaattgaaagcctctcaaacatataatgattccaatgctgacaaaaatttgccttcctttgaaaaaggtcctcgtatgcccagtcggggtcgacccagaccgagagagaaggaaataatcaccatccaatatgattttgaattaccaggaagagccgatataccctcctcctcctcttcttcatcaccaccgcctttgcccacaaggcgtgatcatatcaaaatcacagatgggaatgaagagaaaccgcttcttccaacaaggcctaacaaagcagaagttacagaaagtccgtcatcaaggtcaataaaaccggatgctgtggtacctgagcgcgttaagcctgctccacctgtctcacgctctacaaaaccggcgagctttttaagttctttggaagataacaaattgacaaaggcgaagagttataattcggaaatggaaactcccaaaacaactgtaaaaagttctcatatcgattacttggattccatacaactaaaaccaaccaccttatctcctacaatgaaaaataaacctaaaccaacccctccttctccacctgcgaaaagaattccaagatctgaaagttttatcaagtctatgctaaactcgaatctcacgacaacttccaagccttctttgcctgaaaaacctcaaaagctacggaatgcaaatttggccgcccataagaccaaaccaagcataccgccaaagaaagtggagttgaatatagtattacctgagctacgtcccgtagaaacttctccaacaaagcagaacttcgaaaactcaatcgatttgcccaagttacgatccagcaaccgtaacattaaaaaagaagaggaggacagtattccagaagcaataaaaggtatacaaaatctgaagaaaaccaaacagcagaagcctgcaatccctcagaaaaaatcatttctaacaaataattcgaaaaatactacactcaaaaatggtgatgatattaacaagttaaatgacgaaattgaagctctatcattgcggaataacctgaagaaacggccaccaacggcgccacaacgtaaaatttctttgccagaggcattgcgaaaagtcgaattgatgaaaaaatctaaaaccgagcctgttttagagtcctcaaacgaactgagcataaacgcaaaattagacgcaataattgcctctagaaacttaagagcatctaatactctaccagaacttagcggtgttaacactaatattgcaacttctgacaagtatactacttctagagatgaaacagtgaaggaaactaaaccattagttcacccgaataaaaataggactcgtggtcccagaagaaaacttccaacacgcgtgtaa

SEQ ID NO: 191195 - DNA, 603 bp, Saccharomyces pastorianus
atggcttggactagtacattaccagcgcatctactgaacctgatcaaaaactccaaatatgttcacgtggccacctgttctaaagactgcatcccttcagtggcattgatgaactatatctatgtgccaggtgaaaaactgttcggtcaaacagataataagaatgactacattatatttgtttctcctcaggacacacaaaagttttacaacatcaaggagaaccctaaggtcgccctgttgtttcacgattggatcatcgcgaataatttgtcagtgggcaaggaaagcatctctgggactccgacgccgacttctattcctcatgaagagcaacgtcaaagcgagcttttaaatttgttacaggagttaaatcaagccgaattgaaccaaatgagcgcatctattggtggcgaaaccgaaattgtcaatcctgaaagtgaagaatccaagtactataaagatttaatactaaaggctaatcctgatgcgaaagcttttatatttgaaaagaacaccgccgttgttaaagttagaattgataatgctagggtatccaataatgagaacagaacaatgtttctaagtaaagggaagagttaa

SEQ ID NO: 191196 - DNA, 1314 bp, Saccharomyces pastorianus
atgagcacgggagattttttaactaagggaatagaactggttcaaaaggccattgacctggacacagccacgcagtatgaggaggcgtatacagcatactataacggattagattatttgatgttggctttgaaatacgagaaaaaccctaagtcgaaggatttgataagagcgaagtttacagagtatctaaaccgtgcagagcagttgaaaaagcacttggaaagtgaagaggcaaacgcggcaaagaaatctcctagcgctggtagtggttccaacggtggtaataagaaaatctctcaggaagagggtgaggataatggtggagaagacaacaaaaagctaagaggtgccttatcgagtgctattttgtctgagaagcccaatgttaagtgggaagacgtggctggactggaaggagccaaagaggcccttaaagaagccgttattttacctgtcaagttcccacatttgttcaaaggtaaccgtaagcccacttcgggaatcttattgtacggaccaccaggtacaggtaaatcatatttggcaaaagcagtggccaccgaggccaattctacctttttcagtgttagttccagtgatttggtttctaagtggatgggtgaatctgaaaaacttgtcaaacagttatttgcgatggcaagagaaaataaaccttctattatttttatagatgaagtggatgcgctaacaggtaccagaggagaaggagagagcgaagcaagtagaagaattaaaacagaattattggtacaaatgaatggtgttgggaatgactcccaaggtgttttggtccttggcgcaacaaatatcccatggcaactggacagtgccatcaggagaagatttgaaagaagaatatatataccattaccagatttggcggcaagaaccaccatgttcgagattaacgtcggcgacactccatgcgtattgaccaaggaagattatagaactttaggtgcaatgactgaaggttattccgggagtgatattgctgtagtggtgaaagatgcgctaatgcaaccgataagaaaaattcaaagcgcgacacatttcaaagatgtctctacggaggacgacgaaacaagaaaactaacaccatgctctccaggtgatgatggcgccatcgagatgagttggacggatattgaagctgatgaattaaaagaaccagatctcaccataaaggatttcttaaaggctatcaaatcgacgagacctaccgtgaatgaggatgacttgctgaagcaagaacagttcactagagattttggtcaagaaggtaactag

SEQ ID NO: 191197 - DNA, 666 bp, Saccharomyces pastorianus
atgggaattcaggaaaagacattggggatacgaaaagagcgcaaattggtggttgtgcctcgcgaaagaaatcatgttagacacgcttcacaaaggacacgttctaaaaactacaagaatatctccaaaaagagggctcaacaacacgcgtttggattcaatattgctaagactcttgccaagatccaagcgtttgtatgggggtctcccgcagatgaggaagaagaaagcgttgtcccattgtctaaaaattctcaggattgtgtgcctctacaatggcaagcaaagtttgcgcaattgcggcagcagctgcactctacacaaaaggaactacaatttgtcaaggaaaagtgtcatctgttgcagtcggtgttggacgacgcaaacatcgatcaaagatacctggagtctcgtcgagacatgaaaaatattgagcgagacaacctcaaaccgacagaaaatttaccaccttcgccagtaagagcagtaaacccgttagtgacttcaagtccgattcacatgtcgccactccagtcgcgccaacgaccagtttcttccctacagcccccaaagggccccaacttctacgccaagtatcctaagcttcctcaaacgaacattctcagagaatctccgactgaggattcggttccgcacgctgaatag

SEQ ID NO: 191198 - DNA, 2079 bp, Saccharomyces pastorianus
atgtgtgaaatgtttggctctgggaatgttctgcctgttaaaattcagcctccgctgcttaggccactggcgtatagagttttatcaagaaaatatggtttatcaattaaatctgatggactgtctgctcttgcagaattcgttggcactaatataggtgctaactggagacaagggcctgctacaataaaatttctcgagcaatttgctgcagtatggaaacaacaagaaagaggccttttcatcgaccagagcggggttaaagaagttatacaggagatgaaagaacgtgagaaagtcgaatggagtcatgaacaccctattcaacatgaggagaatatcttgggacggacagatgacgatgagaacaacagtgacgatgaaatgccgatcgctgctgattcatccttacaaaatgtttcattatcttcacccatgcgacagcccaccgaaagagatgaatataaacagcctttcaagccagaaagctccaaggcgttggactggagggactacttcaaagttatcaatgcttctcagcaacaaagattctcatacaatccgcacaaaatgcaatttattttcgtccccaataaaaagcagaatgggctaggaggcattgcgggttttctaccagatatagaggacaaagttcaaatgttcttgacaagatattacctcacgaacgacagagtcatgagaaatgaaaacttccaaaacagtgacatgtttaatccattatcatctatggtgtctttacaaaatgaactgtccaatactaaccgacagcagcaatccagcagtatgagtatcaccccaataaaaaacctactaggtagggatgctcaaaactttctactattggggctcttaaataagaactttaagggcaattggtcactggaagatccgtctggatctgtcgaaattgacatttcccaaactatccctacacaaggccattactacgtgccaggttgcatggttcttgtggaaggaatatactattctgtaggaaataaattccatgttacctccatgactttaccccctggtgagagaagagaaattacattagaaacgataggtaatctcgatctcttaggaatacatggcatttctaataacaatttcattgctcgtttggataaagatttgaagattagattacaccttttggagaaagaattaacagatcataaatttgtaattctcggcgcaaatttgttcctagatgatttgaaaattatgactgcactcagcaaaattttgcaaaaattaaatgatgacccaccgaccctattaatttggcaaggttctttcacttcagttcccgttttcgcatcaatgagtagccggaatataagtagttccactcaatttaagaataatttcgatgccttggcgacgcttctgtcaagatttgacaatttgaccgaaaataccacaatgatatttattccaggtcctaacgatttatgggggtcgatggtgtcattgggggcaagtgggacattaccgcaagatccaattcctagtgcgtttaccaaaaaaatcaacaaggtctgtaaaaacgttgtatggagctcaaatccaactagaatagcatacttatcccaagaaatagtcattttcagggacgatttatccggaagattcaaaagacaccgtttggaattcccattcaacgagagcgaagatgtttatactgaaaacgataacatgatgtctaaagacaccgatattgtaccaatcgatgaattagttaaagaaccagaccagttaccacaaaaggttcaagaaacaagaaaactcgttaaaacaatactagaccagggtcatttatcgccatttcttgattccttgcgcccaatttcatgggatttggaccacactttgacactttgcccaataccatcgacaatggttctttgcgacactacttctgcacaatttgatttgacatacaacggttgtaaagtaattaaccctggaagtttcattcataatagacgtgctaggtatatggagtacgttccatcctcaaagaaaactatacaagaagagatatatatctaa

SEQ ID NO: 191199 - DNA, 978 bp, Saccharomyces pastorianus
atgtcaggatctcttacgctacttaaggaaaagcatatacgttatattgaatcattggatacaaagaagcataattttgaatactggcttaccgagcatcttcgtttgaatgggatatattggggacttactgccttgtgtgtgcttgattctccagagacatttgtgaaagaagaggttatatcatttgttctgagctgttgggacgacaaatacggcgctttcgcaccatttccaagacatgatgcacatttattaactacattgtccgccgtacagatcttggccacttatgatgctttggatgttcttggaaaagatcgtaaggttcgcttgatttccttcatccgtgggaatcaattggaagatggttcgttccagggtgacaggtttggggaggtagatacaaggtttgtttatacagccttgagtgcactatcaattttgggtgaattaacgtctgaagttgttgaccctgctgtagactttgtactcaagtgttataattttgatggtggctttggattatgtcctaatgctgaatcccatgcagctcaagcttttacctgtcttggcgctttggcaattgctaacaaattggatatgcttagtgacgaccaactagaagaaattgggtggtggctttgcgaacgacaattaccagaaggtggactaaacggtaggccaagtaaactgcccgatgtttgctatagttggtgggttttatcttcattagctattattggtagactagattggataaattatgagaagctaactgagtttatactcaaatgtcaagatgagaagaagggtggaataagcgacaggcctgaaaatgaagtggatgtcttccatacagtttttggtgttgctggtttaagtttaatgggatacgacaatttagtccccatagatcccatatattgtatgccgaaatccgttacatcaaaattcaaaaagtatccatacaaatag

SEQ ID NO: 191200 - DNA, 372 bp, Saccharomyces pastorianus
atgagctcagatgttgctggagtgaagaagtcctcatcgtcctcttcgtctacttcttccccatttatgttttccatgttattaatgttctcaagatcaatttcatcaaccattaaaatttcagccaaccgtattcttctttgttgtacatcttcattctccactacttccggcttctttaaaattgaaagcaatcgtctcacctcaagatcttcttctggtatcttctccaggacagcttgtaatcgttcatgtggcaactgtttcagtatatcagcggtgctttcattttgtgtagctcctttatgttgcaaatctaccggaagattttcaagtgcaatatatttactcatattccgttcaacaaggtaa

SEQ ID NO: 191201 - DNA, 1398 bp, Saccharomyces pastorianus
atgagtaaatatattgcacttgaaaatcttccggtagatttgcaacataaaggagctacacaaaatgaaagcaccgctgatatactgaaacagttgccacatgaacgattacaagctgtcctggagaagataccagaagaagatcttgaggtgagacgattgctttcaattttaaagaagccggaagtagtggagaatgaagatgtacaacaaagaagaatacggttggctgaaattttaatggttgatgaaattgatcttgagaacattaataacatggaaaacataaatggggaagaagtagacgaagaggacgatgaggacttcttcactccagcaacatctgagctcatttttgcgagaagatttttgataaattattcacttgaaagatctcgaaagaggctacagaaagagatggaaagacatcaaaagttcaatacaagacaggaattactcagtcggcgtacagaattacagcgtatggctaatttagagcttgctggctctcaattagtatctacgaagcctatttccgcagtttctttatctaccgatgacatggttgtcgcaacgggaagctgggcaggtgatcttcaggtattaaattctcaaacactgcagccattgacacaaaaactcgactctcatgtagggaaaatcggagctatagattggcatcctgattcaaacaatcaaatgatttcatgcgcagaagacgggctcatcaaaaactttcaatactcaaacgaagagggcggccttcgattattgggagatcttgtgggacatgaaagacgtatttctgatgtgaaataccaccctagtggcaaatttataggtagtgcctctcatgatatgacttggagactttgggatgcgtcaacacatcaagaactgctgctacaagaaggccatgataagggagtgtttagtctgtcttttcaatgcgatggatctcttgtttgtagcggtggcatggactcgctttcaatgctatgggatataagatccggaagtaaggtgatgacactcgcaggacactcaaagcctatttacaccgtagcttggtcaccaaacgggtatcaagtagccactggtggtggtgatggaatcattaatgtttgggacatcagaaaacgggatgaaggccaactaaatcaaatattggcgcatcgtaacatcgttacgcaggtaaggttttcaaaggaagacggcggaaagaaacttgtctcttgtggctatgataatttgatcaatgtgtatagtagtgatacgtggttaaaaatgggaagtttagcaggccacactgataaaattattagcttggatatttcgaataattctcattttttagtgagcggcggatgggataggtctatcaagctctggaattga

SEQ ID NO: 191202 - DNA, 1968 bp, Saccharomyces pastorianus
atggatttactacgcattttagacacgaaaccaatacctacaattgttgatgctactactctgggaatctcaggaaatacttccggtgattattggctgccaactacaatgtcgctttatcaaaaagaactcacggatcaaatagtatcattacactactcagatatcttgagatacttcgaaacgtcacactacaaagaggacgtcattctcgaatctatgaagaccatgtgtttaaatggttcactggtagcaacccatccatacctactaatagatcattatatgcctaaatcgttaataactcgtgatgttcctgcacatttagcggaaaatagtggaaagttcagcgttttgagagatctcataaatcttgttcaagaatatgaaactgaaacggccattgtttgtagacctgggagaacaatggacttactggaagccttactattgggaaataaggtgcatatcaaaagatatgacggtcattctatcaagtcaaaacaaaaggcaaatgacttctcgtgtacagttcatttgttttcttctgaaggaattaatttcacaaaatatccgataaaatccaaggctcgattcgacatgctgatctgcttagatactacagtggatacaagtcaaaaagatattcaatatttgttgcaatataagagggagaggaagggtttagaaagatatgctccaattgttaggctagtggccattaattcaattgatcattgtaggttattctttggtaaaaaatttgacaagaacagtagagaatacttggagaacgttaccgcagctatggtaattttaagagatcgactgggcacacttccacctgatttgaggcccatttattcacaaaagctgcattatttagtagaatggttggaaaacccaacagtaccgtggccattaccagatatttaccctttaaaacaatatacttccatggatgtagaaaggtctttgttaacggaagtacatttcaaaaagtcagatgatcaactagaggatgctttttccaactgttccaaaaaaagaggacgccatggtgctaataaggcagcatcttcaactgttgccggaattgaggataatattactccaagtttttactctaccaaaagattaaagaacgattattatacaaatcctttaaaacaagacatgacacaactaacaggtattactacagctgacaactcctcgaatgtaaattaccacttatcaagtggaatcataacacacaaactgattcaatcaatgggagaagtgtatatggatatttgcgttcagaaacaggagctggatgattattcttgccttgatgatttgcaaaatgatcatctgaaatttttctcaaatgaagatgagaaaattataaaagaatatgaaaccgtattgcgaaccaataatgaaaacttaaataggtcgcatgaactagaagttgaaaacaatttgaagttttcccaaatcgaaacactggaaaaagacattgaaactttaaagggaagtttgatggcccaaggtgaaacattatcaaagttaaaagacgctttcgttaaaacagacaatgtacaagacgagatcgagaaagaagaaagggtaagtgtatcaagggatactgagaagaaatatatggaacaagaaatcaaaagagccgttgatgctataagggaaaatgaggaggagacacacaaacttaatgagaaacaaaatggattagaaagtgagttgaaattgaaattcgaaaagtctgaaatctctacaaaagaattgaatgagaaaattggctttttgaaaaaggaattaaagcttgagaatgatctaaacgaggagttagtgggacagttatcgaagacgatggacaacttggaaaacttaacaattccacgagttcgtactcaaaatggtaacacaaaaaaaaaatccagggcaaaaaaaccaggaaatgtataa

SEQ ID NO: 191203 - DNA, 1044 bp, Saccharomyces pastorianus
atggatatgaaagtagaaaaattaagtgaagatgaaattgcactgtatgatagacagattcgtctatggggaatgacagcacaggccaatatgagatcagcaaaagtattgctgatcaatcttggagcaattggttctgaaattaccaaaagtatcgtccttagtggtatagggcatttaaccatattggatggacacatggtgactgaagaagatttaggatcccagttcttcataggctctgaagatgttggccaatggaagattgatgcaacaaaagagagaattcaagacttgaacccccgtatagagttgaactttgataagcaggatttgcaagaaaaggacgaagagttctttcagcagtttgatttagtcgtggctacagaaatgcagattgatgaagcaatcaaaattaacacattaactcgaaaactaaacattccattatatgttgctggttctaatggattgttcgcttatgtttttattgatttgattgaattcatttcagaggatgaaaaattgcaaagtgtaagacctaccaccgttggtcccatttcaagcaataggagcattatagaagttactactagaaaagatgaagaagatgaaaaaaaaacatatgaacgaatcaagaccaagaactgctataggccactgaacgaagttttaagcacagcaacattaaaggaaaaaatgacgcaaagacagttaaaaagagtcactagtatcttgccgttaaccctgtccttattgcaatatggtctcaaccaaaagggcaaggccataagctttgaacaaatgaaaagagatgcggccgtatggtgtgaaaatctgggtgtaccagcaacagtggtaaaggacgattacatacaacagtttatcaaacagaaaggtatcgagtttgctcctgtcgcggccattatagggggtgctgtagcgcaggatgtcattaacattctaggtaaaaggctatctccattaaataatttcattgtttttgatggtattacattagacatgccactttttgagttttag

SEQ ID NO: 191204 - DNA, 2307 bp, Saccharomyces pastorianus
atggacttcgagactaatgaagacatcaacggggtccgtttcacctggaacgtgtttccctctactagaagcgacgctaacagcaacgtcgtccctgtgggctgtttgtacacacctttgaaggagtatgacgaattgaacgttgccccatacaatccagttgtgtgttccggtccacactgtaagtcgattctaaatccttactgtgtgattgatccgcgcaattcgtcctggagttgtcccatctgtaactccaggaaccatttacctccacagtacaccaacttgtcacaggagaatatgccgctagagttacagtccaccaccattgagtacatcaccaataagcccgttaccgttcctcccattttcttctttgttgtggatttgacttcggaaaccgagaacctcgattcgctaaaggagtctatcatcacttctttgtctctattacctcccaacgcgctgattgggttgatcacttacggaaacgttgttcaattgcacgatctgtccagcgaaactattgacaggtgcaacgtgttcagaggagacagggagtaccagctcgaagcgttgacggaaatgttgaccggccaaaagcctaccggccccggcggtgctgcatctcatctaccgaacgccatgaacaaagttacgcccttctctttgaataggttcttcctgcccttggaacaggtcgagttcaaactgaatcaattactggaaaatctgtctccagaccaatggtctgttccagcgggtcataggccattaagggccacaggttccgctttgaacattgcatctttgcttttacagggctgctataagaacatcccagcaagaatcattcttttcgcctccggtccaggcaccgtggccccaggtttgattgttaactcagagttaaaagatcccttaagatcccaccacgacatcgattctgatcacgcgcaacattacaagaaggcctgtaagttttacaaccagattgcacaaagagttgccgccaatggacacactgttgatatttttgccggttgttacgatcaaatcggtatgtctgaaatgaaacagttgaccgactctactggaggtgtgttgttgctaaccgatgccttctctaccgcgatttttaagcaatcatacttgagattgtttgccaaggatgaagaagggtatttgaagatggctttcaatggtaatatggcagtcaagacaagtaaagacttgaaggtacaaggtttgattgggcatgcttctgctgtaaagaagacagacgctaacaacatcagtgaatctgaaatcggtataggtgcaacgtccacctggaagatggcttccttatcgccttatcactcgtatgcgattttctttgaaattgcaaacactgcggctaattctaacccaatgatgtctgcccctggttcagcagatagacctcatctagcatatactcaattcatcactacttatcaacactcctctggtaccaaccgtatcagagtcaccacggtcgcaaaccagcttttgcccttcggtactcctgccattgcagcttctttcgatcaagaagctgctgccgttttgatggctcgtattgctgttcacaaggctgaaaccgatgatggtgcagatgttattagatggttagacagaactttgattaagctatgtcaaaagtacgccgactataataaagatgatcctcaatctttcaggttggctccaaatttctcactgtatcctcaatttacctattatttaagaagatcccaattcttaagtgtctttaacaattctccggatgaaactgcattttatagacatattttcacaagagaggatacgactaattctttaatcatgattcaaccaactctaacttctttctcaatggaggacgatccacaaccggtattattagactctatctccgtcaaacccaataccattctattattagatacatttttcttcatcttaatataccacggtgagcaaatcgctcaatggagaaaagccggttaccaagacgatccacagtacgcagatttcaaagctcttcttgaagagccaaaattagaagccgcagaattgttagtagataggttcccgctaccaagattcattgatactgaagccggtggttctcaagccagattcttgttatctaaattgaatccttccgataactatcaagacatggcgcgcggaggatctacaattgtcttaacagatgatgtttccttacaaaatttcatgactcacttacaacaagtagccgtctctggtcaggcatag

SEQ ID NO: 191205 - DNA, 261 bp, Saccharomyces pastorianus
atgagcgagagcagtgatatcagcgcgatgcagccggtgaacccgaagccgttcctcaaaggcctggtcaaccatcgtgtaggcgtcaagcttaagttcaacagcaccgaatatagaggtacgctcgtgtccacggacaactactttaacctgcagctgaacgaagcagaagagtttgttgcgggtgtctcgcacggcaccctgggcgagatattcatccgctgcaataacgtgctgtacatcagggagctgccgaactaa

SEQ ID NO: 191206 - DNA, 804 bp, Saccharomyces pastorianus
atgagcatcgaatactctgttatcgttcccgcttaccatgaaaagctgaacatcaaacccttaacaaccagattgtttgccggcatgagccctgaaatggccaagaagaccgagttgatctttgtcgatgacaactcacaggatggctccgttgaggaggtggacgccctagctcaccaaggctacaacgtccgcatcatcgtcaggacaaatgaacgtggtctatcctccgccgtgcttaagggtttctacgaggccaagggtcagtacctggtatgcatggacgcagacctacaacaccctccagagaccgtgcccaagttgttcgagtctttgcacgatcacgcctttactctgggcaccagatatgccccaggtgtcggcattgacaaggactggcctatgtacagacgcgtcatttcctccactgctagaatgatggccagacctttgaccatcgcctccgaccccatgagcgggttcttcggtctacaaaagaagtacctcgaaaactgcaaccctagggacatcaactcgcaaggtttcaagattgccctcgagcttctcgccaagcttcctcttccaagagaccctagagtggcgatcggcgaagtgccattcactttcggcgtgagaacggaaggtgaatccaaactgtcaggtaaagtcattatccaatacttgcaacaacttaaggagctctacgtcttcaagtttggcgccaataaccttatccttttcattactttctggtccattctgttcttctacgtttgctaccagctataccatttggtcttttaa

SEQ ID NO: 191207 - DNA, 4611 bp, Saccharomyces pastorianus
atgaatagatcattactgctacgtttgtcggataccggtgaacccattacaagctgctcttacggaaaaggtgtcttgacgctaccaccaattccgctccctaaggacgccccaaaggaccaaccgctctatacggtcaagctactggtatctgcaggttcccctgtcgctagggatgggctagtttggactaattgcccaccagatcacaacacgcccttcaagagggacaaattttacaaaaaaatcattcattccagctttcacgaggatgactgcattgacctgaatgtctacgctccaggctcgtactgcttttatctatctttcaggaacgataacgaaaaacttgagacaacaaggaaatactactttgttgccttgcccatgctttatataaacgatcagttcctacctttgaattccatcgctttacaaagtgttgtatcgaaatggctgggctctgactgggagcccatcctatcgaaaattgccgctaaaaactacaatatggtacatttcacccctctacaggaaagaggcgagtctaactcgccttactctatatacgaccaattgcagttcgaccaggaacactttaagtctcctgaagacgtgaaaaatttagttgagcatatacatcgcgatttaaacatgctttcattaacagatattgtttttaaccacacagctaataattctccttggttagttgagcacccggaggctgggtataaccacatcactgcgccacatctaatcagcgccatagagctcgaccaagaattgctcaattttagtaggaatttgaaatcctggggctatcctaccgaactgaaaaatatagaagatctcttcaagatcatggacggtattaaagtgcatgttttagggtcgttgaaactgtgggaatattatgcggtaaacgtgcaaacagctcttcgggatatcaaagcccattggaatgacgaatctaacgaaagttacagttttcccgagaatattaaagacatctcgtccgatttcgtaaaactagcttcctttgtgaaggacaacgtcactgagcctaacttcggcactcttggtgaaagaaactcaaacaggattaacgtgccaaaatttattcaactactgaagctcattaacgatggtggtagtgatgacagtgaatcttcgttggccacggctcaaaacatcttgaacgaggtcaacttacccttatatagagaatacgacgatgatgtcagtgagatactcgagcaactgttcaatcgtatcaaatatttgagattagatgacggtgggcccaagcaaggtccagtgaccgttgacgtgcccttaacagagccttattttacgaggttcaaaggaaaagatggtactgattatgccctcgccaacaatggctggatatggaatggtaacccactagtggattttgcatcgcagaattcaagagcttatttacgtagagaagttatcgtgtggggggactgtgtcaagttaagatacggtaaaagccctgaagactctccgtatctgtgggaaagaatgtccaagtatatagaaatgaacgccaagatatttgacgggttcagaattgacaactgccattctactccaatacatgttggcgaatatttcctagatttggcaagaaaatacaacccgaacctatatgtcgttgcagagctgttttctggttccgaaacactagattgtctgtttgttgaacggttgggtatctcctctttaatcagagaggcaatgcaagcctggtccgaagaagagttgtctagattagtccataagcatggcgggaggcccattggctcctataagtttgttcctatggatgacttctcatatcctgcggatattaatttaaacgaggagcattgtttcaacgactccaacgataactccataagatgtgtatcagagatcatgattccaaagattttaaccgccactccgccacacgctttattcatggactgtacccatgataatgaaactccctttgaaaaaagaacagtggaggatactttgcccaatgctgcattggtggctctttgctcgtccgccattggatctgtttatggctacgacgaaatttttccacatttactgaatttggtcactgaaaaaagacattatgacatttctacgcctactggtagcccctcgataggaataaccaaagtcaaggccactttgaattcgattagaacgagtataggagaaaaggcgtatgacattgaagactcagaaatgcatgtgcatcaccagggccagtacattacttttcatcgtatggatgttaaatccggaaaaggttggtacttgatagcaaggatgaaattttctgacaatgatgaccctaacgagactttaccaccagtggtgttaaaccaatccacctgttctctcaggttttcgtatgctttggaaagagttggcgatgaaattcccaacgacgataaattcattaaaggtattcccacgaaattaaaggagcttgaagggtttgacatttcttatgatgattctaagaagatttcaacgataaaactgcccaatgaattccctcaaggatctattgccatttttgagacccaacagaatggtgtggacgaatccttagatcattttataaggtcaggtgctttaaaggccacttcaagtttgactctagagtcaataaattccgtcttgtatcgtagtgagccggaagaatacgatgttagcgccggcgaaggtggtgcttatattattcctaattttggaaagcctgtgtattgtggtctgcaaggttgggtttccgtattaagaaaaattgtgttttacaatgatttagcacatcccctcagtgcaaatttaagaaatggacattgggctttagactacactatcagtagacttaattactatagcgatgaagcaggaatcaatgaagtgcagaactggctgcgttcaaggtttgatagagtgaaaaagttaccgagctacttagtgcccagttatttcgccttaattatcggcatcctctatggttgttgtcgcttaaaagcaatacagctaatgtcccgtaatattggtaaatctacattgtttgtacaaagcttatctatgacatcaatccagatggtttccagaatgaagtcaacctctattttaccaggcgaaaatgttccatctatggctgcagggttgccacactttagcgtaaactacatgagatgttgggggagagatgtattcatatcgctaagaggtatgctattaacaacaggtagatttgatgaagctaaagctcatatactagcctttgcaaagactttgaagcatggtttaattccaaacttgctggatgccggtagaaacccgagatataatgctcgtgatgctgcctggttcttcttgcaagctgtacaggattatgtttatattgttcctgatggcgaaaaaatattacaagagcaagtaacaaggagattcccactggatgatacttacattcctgtagatgatccaagggcatttagttactctagtaccttggaggagatcatttatgaaattttgagtaggcatgccaagggaattaaattcagagaggctaatgcaggtccaaatttagatcgtgttatgactgataaagggtttaatgttgaaattcatgtcgattggtcgactggcttaattcatggtggatctcagtataactgtggtacttggatggataagatgggtgaaagtgaaaaagcagggtctgttggtattcctggaacacccagagatggagccgcaatagaaatcaatgggcttttaaaaagtgctttaaggtttgttattgaactaaaaaacaagggattgtttaagttttccgatgtggagacgcaggacggcgggaggatcgatttcactgaatggaatcaattacttcaagacaatttcgaaaaaagatattatgttccggaggatccatcacaggatgcagattatgacgtgagcgctaaattgggtgttaatagacgggggatatacagagatttgtacaaatcaggaaagccttatgaagattatcagttaagaccaaattttgctattgccatgactgtggcaccagagttatttgtgcctgagcatgccataaaagcaatcaccattgcagatgaagtcttaagaggtccagtaggtatgcgtactttagacccaagcgattacaattaccgtccgtactacaacaacggagaagattcggatgattttgccacctcaaagggtagaaactatcaccaaggccctgagtgggtctggctttacggctactttttaagagcgttccatcatttccactttaaaaccagtccacgttgtcagaatgctgccaaagagaaaccatcctcttatttgtatcaacaattatactacagattaaaaggccatagaaaatggatttttgaaagtgtgtgggcaggattgacagagctaaccaataaagatggtgaagtatgcaatgactcaagccccacgcaagcctggagttctgcttgtttgttagatctattttatgatttatgggatgcctacgaagatgattcctga

SEQ ID NO: 191208 - DNA, 2217 bp, Saccharomyces pastorianus
atggttgccgaagaggacatcgagaagcaagtccttcaattgatagacagcttttttctgaagactacactactaatatgctccaccgaatcaagtcgataccagtcttctacagaaaatatattcctatttgacgacacatggtttgaagatcactcagaattagtgagtgagctacccgagataatatcaaaatggtctcactacgatggtcgaaaagagttgccacccttagtggtagagacatatttggatttaagacagttaaactcgtctcatttagttagattaaaggaccacgaaggccatttgtggaacgtttgcaaaggaactaagaagcaggaaatcgtgatggaacgttggcttatcgaattagataattcatccccaactttcaaatcatacagtgaagatgagactgatgttaatgaactttctaaacagctagtccttctcttccgttatttgttgactttaatacagttactacccacaacagaattataccaattattaataaagtcttataacggcccgcaaaatgaaggaagttccaatccaataacttccacgggcccactagtaagtatccggacgtgtgtccttgacggatctaaaccaattttatcgaaggggagaatagggttgagcaaaccgattattaatacatattccaatgcgcttaacgaatcaaacctgccagcccatttagatcaaaagaagatcacacctgtatggacaaagtttggactcttaagagtctcggtatcatacagacgtgattggaagtttgaaattaacaatacaaacgacgaattattttcagctcgacatgcatctgtctcacataactcacaaggaccccagaatcagccagaacaagaaggacaaagtgatcaagacatagggaaacgccaaccacaatttcaacagcagcagcagccccaacagcagcagcagcagcagcaacagcaacagagacaacaccaggtccagacacaacaacaaagacagatacctgataggagatctctttcactttctccttgtacaagagccaattcttttgaaccacaatcttggcagaagaaagtctatccaatatcgagacctgttcaaccatttaaagttggttcaattggaagtcaaagtgcgagcagaaatccctctaattcatcgtttttcaaccaaccacctgttcataggccaagtatgagctccaactacgggccacaaatgaatattgaaggtaccagtgttggaagcacctcaaagtattcctcctcctttgggaacattcgtcgtcactcaagtgtaaagacgacagagaatgctgaaaaagtatcaaaagctgtaaagagcccactacaacctcaagaatcacaagaagatttaatggattttgttaaattactcgaagaaaaacccgatctaactataaagaagacaagtggaaataatccacccaatatcaatatttctgattctctaatcagatatcagaatttgaagccaagtaatgacttattaagtgaagatttatccgtaagtttatccatggatccaaatcatacatatcacagaggcagatcagattcccactcaccattgccttcaatatccccttcgatgcattatggatcgttgaactcgagaatgtctcaaggcgccaatgcaagccatttgattgcaagaggcggtgggaattcatctactagtgccttgaatagtagaaggaattctttagataagagctcaaacaagcagggtatgtcaggcttacctcctatttttggtggagagagtacttcatatcaccacgacaacaaaatacaaaagtacaaccaattaggagtagaagaagatgatgatgacgagaatgaccgtttgctcaaccaaatgggaaacagtgctacaaaattcaaaagttcaatatctccaagatcaattgatagcatttcaagttctttcataaaaagtaggatacctatcagacaaccataccattactctcaaccaactactgcgccctttcaagctcaggcgaaatttcataaacctgcaaataagttaatcgataatggtaataggagtaatagtaacaataacaatcataatgggaatgatgcagttggtgtgatgcataatgacgaggatgatcaagatgatgatctagtatttttcatgagtgatatgaacctttctaaagaaggttaa

SEQ ID NO: 191209 - DNA, 1290 bp, Saccharomyces pastorianus
atgggaggagaggttctaaataatgaaggaatgccactggccgaacttaaacaggagaccattcccatatcacgatcagagagttcagaatcattgaacagtttaacatcaactagaagctcatcgagcaataggccaaagacatatttctgtgactatgatggctgtgataaggcatttacaagaccttcaattttgactgaacaccaattaagcgtacatcagggtttaagagcatttcagtgtgataagtgtgcaaaatccttcgttaaaaagagtcacttagagagacacttgtatacgcattctgatacgaaaccattccaatgttcttattgtggaaaaggagtgacgactcgccagcaactgaagcgacacgaagtaacgcataccaaatctttcatttgtccagaggaaggatgcaacctccgattctacaagcatccacaattaagggcacatattttatctgttcatttacataaactaacctgtccacactgcaataaaagctttcagaggccatataggctaagaaatcacatttctaaacatcacgatcctgaggtagaaaatccttaccaatgtacttttgctggttgttgcaaagagtttcggatatggtcacaattgcaatcgcatataaaaaatgatcatcctaaattaaaatgtcctatttgtagcaaaccatgtgtgggggaaaatggtttacaaatgcacatgattattcatgacgactcactagtaaccaaaaattggaagtgtcatatatgtcctgatatgtctttttctagaaaacatgatcttctcacgcattatgggtctattcatacggaagaagatatcccactggaactaaaatataaaatttctgatattcaacaacttgtccaagaccacggagttcaactggggaatagcaaacactcgaatgagcaggatgaagagaagatttccaataggttgaggaaaaggagaaaacttaccgaaaacaataatgtagagtttttacagaatgaagtggatttagaaaagcgacttgagtctggtgaaaatgggctaaaccttttattgaataccgttggaagaaaatacagatgcttttacaataattgttctaggactttcaagacaaaggaaaaatacgagaaacatatagacaagcacaaagtacatgagctaaagttaaaaatattacaggaaaaggaagaaaataaaacgctagtggaccagaaccataaggaaccttttataattcaaaaggaaacgcagtcagcgggtgacaaataa

SEQ ID NO: 191210 - DNA, 544 bp, Saccharomyces pastorianus
atgtcagactacgaggaggcgtatgtgcattcatattggagaaattgcgtgctttagttttaattatatttactaacttctatcattgtgatacaggtttaacgacggtaatgagaacttcgaagattttgatgtagagcatttttctgatgaggagacttatgaggaaaaacctcaattcaaggatggtgaaacaaccgatgccaacggtaagaccatcgttactggtggtaatggcccagaagattttcaacagcatgagcaaataagaagaaagacacttaaggaaaaggccatcccaaaagaccaaagagcaactactccatacatgaccaaatatgaaagggcaagaattttaggtacaagagccctacaaatttccatgaatgcgccagtttttgtagatttagaaggtgaaactgatccattgcgtattgccatgaaggagttggctgaaaagaaaattcctttggttattagaagatatttaccagatggttcctttgaggactggagtgtggaggaactcattgtggatttgtga

SEQ ID NO: 191211 - DNA, 492 bp, Saccharomyces pastorianus
atggaccatagtgaatcgctaacgtttaaccaacttacgcaggactacataaataaactcaaagatgctttccaaatgctggatgaggatgaggatggtctgattagtaggggagatcttaccaagatatatgcaacattggggaagacattgacagatgaggaatggtccaaaatggtacctgacaatgacaccagtaccgcggaagttggagaagaaggtgtaagctttcccatattcttatctatcatggggaagaacttatcgcagtttcccgagcgtgaagaattggaagaaagtttaaaagccattggaagaggacacgatttaaacgttcccttgaatgaggtcattgattctttaaaggaagccggttttgaaaatcctgaggaagaatttgctaaacttttcaaattgtttactacaaatcagcaagcgaccgaagagagaactttcagaggtaagcttttcttagattcaatcaccgattaa

SEQ ID NO: 191212 - DNA, 4299 bp, Saccharomyces pastorianus
atgtcggatattaaacagctattgaaggaagccaaacaagaattgacaaatcgtgactatgaagagaccatcgaaatatcggaaaaggttcttaaactagatcccgataattatttcgcacatatttttctagggaaagcactttcgagtcttccagctagtaataatgtcagttcaaatcggaacctggagagagctactaatcattacgtgtccgctgccaaattagttcctgataaccttttagcgtggaaaggactttttctcttatttagaaccactgaggttgtcccagacatactttcgtatgatgaatattttgacctgtgtggccaatatgcagacgcacttttaaagcaggaacagtctcaagtagaactaataaatgacataaaattactaaagaaaacgcatccagattgtcaaaaagccttttatcagcatttgaaacctgggtcgctaatggcggaaactattggtcgtcatctatctacaccccaggacgctttattaaatcttataaagatactgtctaatattgaaacaacggaaataggtaagacccttagtcagaacaggttaaaactaaaagctagtgatcctgattatcaaattaaactaaattcattctcctgggaaataattaaaaattcagaaattgatcagttatacaaccagttggtaaatattctcgctgacgatcaaaagagaagtgaaattgagaaccagtggttagaatatagaatcaaagtgctaaaatcaatgccgctggatgtaaaaaaagattttttcacgaaagttaaggaaatggtcgaggatatggttcttgtgaatcatcaatctttgcttgcatggcaaaagtatttcgaatggacagattacgaagatctggacaacatggatgccccattgataataaagtactttaagaaatttcctaaagatccattggccatgatcctctattcctggctttcctcaaaactatcgaaatatgatattaaaagtttggaatcggctaataaaccacctgaaggccataaaaagacggagaaggaaacagatattaaggatgtagatgagacaaatgaagatgaagttaaagatcgcgttgaagatgaagttaaagatcgtgttgaagatgaagtcaaagatcaagatgaggaggcaaaggaagatgaagaagaagaccttgatgatatagaaattggtttattagaggaagaggttgtcactgtattgacggagaatatcgtaaaatgtaaaaataatatcttagcgcatcgcattctttgtcaatattacctactgaccaaggagtatgaggcagctttaccatacatcaaaaatggtatttctttaattgcctataatataaaggacctgggggtacatttgccattaacaaaaagagaattttctctggatttggctaccgtttatacatatgtcgatgccccaaaggaccacaatgctgcattaaagttatatgataacattttatccggtgattttagtaatatacaagcaaaaatgggcaaaggtataatttttattgaaaggaaaaattggaaggatgctatgacattactaacacaggtgcatgaacaatcgcctaataatctggaagttttatctgaactgtcatggagtaaagcccatatgggttatatggacgaggcattagctggcttagatactgtcatcaagggtatcaaaggtatggatttacgttcgatagatttcagagcattaaacttatggaggcaagccaaagtttacattatgaagcatgcttccattaacgatgctaaacaggaaaacgtcaagtgcgcattcaaattactcattcagagtattaaaatattggacacttttgctcccggattttcgacactgggcgatatttattgccactattataaagaccatttgagggccttcaaatgttatttcaaagctttcgatctggatgcgggggattacacagcagcgaagtatattaccgaaacttatgcaagcaagcccaattggcaagctgcttcttccatcgcttcaagattaattaaaggtgaaaaagcaaaggcagaactgcgctcaaataactggccctttagggtcgtagggattgctcatttggaaaagcaagaagaaagtgattctattgagtggtttcaatctgctttacgtgttgatccaaatgatgtagagtcatgggtgggcctgggacaagcataccacgcgtgtggtcgtatagaagcatctatcaaagtttttgacaaggcaattcaattaaggccctctcatacttttgcccaatactttaaagctatttctctatgtgacgtaggtgaatatcttgaaagtttagacattctggaaaaggtatgtcaagaagccgctacagaagagtcattccaaattggtttagtggaagtgcttatgagatgttccttggatttatattcgcaagggttcttgctcaaatcagtttcaattgcaaaggacactattgaacggatcaagataattatcagtgaattaaaatgtgagaaccaacaggtttggatctacctttcacaagtactgagattatttatttggatagagtcaaaggttgatactttacctgttgaatcactagtatcaatttttgaaaattctcaattttctggtagtgaagaaattgattctgtcgacaatatcaaaatcgatactttactcgatagcactactgatgataatgtgtccattgcgtgcaagtttttgatcttagcttcaaaatatagtgtttcggatcaaaaatttacagatatagcaggaacggtcagggcctcatactggtataatataggtatctcagagcttactgctttcataacattgaaagaaccgcagtatagagatgctgctatttttgcttttaagaaatccattcaattacagtctaatacaagtgaaacttggattggtctagggatagccactatggacatcaactttcgtgtctctcaacattgctttattaaagcaactgctttggaaccgaaggcgacaaatacatggttcaacttggctatgctaggtttaaagaaaaaggatactgaatttgctcaacaggttctgaataaattacaaagccttgccccacaagattcgtcaccttggctaggtatggccttgattcttgaggaacaaggagacattatcggaagttctaaactttttgcacactccttcatattatctaatggaaggtcaaaggctgcgcaatttatgtatgctaaaaatgtccttgagaatcacattaataatggtgacgatgaaagagatattgagacagtggaaaaactaaccactgcttcaatagctttagagcagtttttcaaaaaaagtcctgatagtcaatttgctcttcaatgtgctcttctaactcttgaaaggttacatcactatgaaaatgcaaacgaactggctaatcggttgataggcattttggaaaaaaagtttgagaaaactcaagatgaaagagaactgtttaattttgcgataattaaaggacaattcgctcgtattcacttaggtttaggaaatttcgaactctctattgaaaacgctgatctttctcaaggtattatatctgaatcgagcgacgaaaaatcaatgaaaaccaaaatatccaatcacatttgcttaggattaagttatttcttcttaaacgactttgatcagactttgaaccaattccaagaactgctaagcatttcaaaggattctaagcacctagttgttttaattgcgaaggtgctttatgatgtaggtgaatctgacacaaaggaaattgctttacaggaactaacagaatatatagccacaagcggcgcagacttgttagtaacactaacgattgcagctatgtcaattctagacgataagcgtgaagatttaagcattattttagaagaattgaaagctttgccattatccaaacaaataatagataagcacaaagacgcaccatatctgatagaagaaattactaagagactttatcgtaacgataccggtaaacaagtatggcaaaggagtgcgtactttttccctaataacctcaaggtttgggagagattagataagaatattcaacgaagaatagcttctaatggacaaaataaagttactgcggaggagatgagtaaactatattgtgagagtaagaatttgagaagcatacaaagaggtatgtttttgtgcccttggaacgttactgcagtgaaggcgctaaacgaatgtttctaa

SEQ ID NO: 191213 - DNA, 1965 bp, Saccharomyces pastorianus
atggacgagttactgggagaagcgcttagtgcagagaaccaaacaggtgagagcactgtcgaatctgagaagttggtcacccccgaagatgttatgaccatatcatccttggaacagagaaccttgaatcccgatttgtttctttacaaagagttggtgaaggcacatctgggtgaaagagcagcttctgtaattgggatgttggttgcgctgggcagattgagtgtgcgcgagttagtggagaaaatagatggtatggatgtagacagcgtcaagacgacactagtctcattaactcaattaaggtgtgttaagtacctgcaagaaacagcaatatccgggaaaaaaacgacttattattactataacgaggaagggatacacattttactctactcagggttgattattgacgaaattattacgcaaatgcgtgtaaacgacgaagaggagcataaacagctggtggctgaaattgtacaaaacgttatatcattagggtccttaacagtggaagattatctaagtagtgtcacgtcagattccatgaagtacaccatttcatcactattcgtgcaactgtgtgaaatgggatatcttattcaaatatcaaaattgcattataccccaatcgaagatctctggcaatttttatatgaaaaacattacaaaaatattcccagaaactccccgttgtccgatttgaagaaaagatcccaagccaagatgaatgcgaaaactgattttgccaaaatcataaataaaccaaatgagctttcacaaatcttaacggttgatccaaagacctcattgaggattgttaaacctacagtctctctgacgattaatttggatagatttatgaaaggtagaagatctaaacaattgattaacttggccaagacaagagtcggctccgtcacagctcaagtttacaaaattgcattaagactcacagagcaaaagtctcctaaaattagagatccactaactcaaactgggcttttacaagatttggaggaagcaaaatcgtttcaagacgaagccgaacttgttgaggagaagacaccagggcttacctttaatgctattgacttggcaagacatctccccgcagaattggacttgcgtggaagcttattatctagaaagccctctgacaataaaaagcgttctggctcaaacgctgctgcatcattacccagtaaaaaattaaaaaccgaagatggatttgtgatcccggcgctacctgctgctgtttccaaatctcttcaagaaagtggagatacacaagaagaagacgaagaggaggaggatttggatgcagacactgaggatcctcactcagcttctttgataaatagtcatttaaaaatcctagcatcatcaaatttcccctttttgaacgaaaccaaaccaggtgtttactatgttccatatagcaaactaatgccagtattaaagtcatctgtttatgagtatgttatcgcgtctacgttgggaccctcagcaatgcgtttaagccgttgtattcgtgataacaagctggtgtctgagaaaattatcaactcaactgcgttaatgaaggaaaaggatataagatctacattagcatctttaattagatacaattctgtggaaatccaggaagttccaagaacagccgatagatcagcatcaagggcagtttttttgtttagatgcaaagaaacgcattcctataatttcatgagacaaaacttggaatggaatatggcaaatttactttttaaaaaggagaaattaaagcaagaaaactctacattattaaaaaaggcaaatagagatgatgttaaaggaagagagaacgaactactattaccaagcgaattgaatcaattaaagatggtcaatgaaagagagctaaatgttttcgctcgtttatcgaggttgctatcgctttgggaagttttccaaatggcatga

SEQ ID NO: 191214 - DNA, 25 bp, Saccharomyces pastorianus
gagacactacgttggtgtagcacca

SEQ ID NO: 191215 - DNA, 25 bp, Saccharomyces pastorianus
gaatacgttgcagatgatggcgaag

SEQ ID NO: 191216 - DNA, 25 bp, Saccharomyces pastorianus
attaagggaggaggagagacactac

SEQ ID NO: 191217 - DNA, 25 bp, Saccharomyces pastorianus
atggcgaaggtgaatacgttgacgt

SEQ ID NO: 191218 - DNA, 25 bp, Saccharomyces pastorianus
gtagctgccaagattgaaaaagcca

SEQ ID NO: 191219 - DNA, 25 bp, Saccharomyces pastorianus
aaagtggttagctgactctgacaga

SEQ ID NO: 191220 - DNA, 25 bp, Saccharomyces pastorianus
agaggagaattctcaggacgaggaa

SEQ ID NO: 191221 - DNA, 25 bp, Saccharomyces pastorianus
cagagagacgtttagcattaaggga

SEQ ID NO: 191222 - DNA, 25 bp, Saccharomyces pastorianus
atacgttgacgtggatgacttagaa

SEQ ID NO: 191223 - DNA, 25 bp, Saccharomyces pastorianus
tgacagagaagcttccagcgccagt

SEQ ID NO: 191224 - DNA, 25 bp, Saccharomyces pastorianus
ggtgcttacggtgataaaccattaa

SEQ ID NO: 191225 - DNA, 25 bp, Saccharomyces pastorianus
tcaatctcgtttccaaaaatgcaac

SEQ ID NO: 191226 - DNA, 25 bp, Saccharomyces pastorianus
tcatcgttatgacgacaattggaga

SEQ ID NO: 191227 - DNA, 25 bp, Saccharomyces pastorianus
cgttatgacgacaattggagacaaa

SEQ ID NO: 191228 - DNA, 25 bp, Saccharomyces pastorianus
atgtcaatctcgtttccaaaaatgc

SEQ ID NO: 191229 - DNA, 25 bp, Saccharomyces pastorianus
tcgttatgacgacaattggagacaa

SEQ ID NO: 191230 - DNA, 25 bp, Saccharomyces pastorianus
ctcatcgttatgacgacaattggag

SEQ ID NO: 191231 - DNA, 25 bp, Saccharomyces pastorianus
cctcatcgttatgacgacaattgga

SEQ ID NO: 191232 - DNA, 25 bp, Saccharomyces pastorianus
catcgttatgacgacaattggagac

SEQ ID NO: 191233 - DNA, 25 bp, Saccharomyces pastorianus
gtcaatctcgtttccaaaaatgcaa

SEQ ID NO: 191234 - DNA, 25 bp, Saccharomyces pastorianus
atcgttatgacgacaattggagaca

SEQ ID NO: 191235 - DNA, 25 bp, Saccharomyces pastorianus
tgtcaatctcgtttccaaaaatgca

SEQ ID NO: 191236 - DNA, 25 bp, Saccharomyces pastorianus
taacacagtcagcaccatccaagat

SEQ ID NO: 191237 - DNA, 25 bp, Saccharomyces pastorianus
ggcggtttcaccagacaacataaca

SEQ ID NO: 191238 - DNA, 25 bp, Saccharomyces pastorianus
agtcagcaccatccaagatagcgtt

SEQ ID NO: 191239 - DNA, 25 bp, Saccharomyces pastorianus
gaaacttcagctctggttggtcttg

SEQ ID NO: 191240 - DNA, 25 bp, Saccharomyces pastorianus
gttgtaagtcatggattccaacatt

SEQ ID NO: 191241 - DNA, 25 bp, Saccharomyces pastorianus
tcttgggttgtaagtcatggattcc

SEQ ID NO: 191242 - DNA, 25 bp, Saccharomyces pastorianus
accatccaagatagcgttaccgaca

SEQ ID NO: 191243 - DNA, 25 bp, Saccharomyces pastorianus
gacatcggaaacttcagctctggtt

SEQ ID NO: 191244 - DNA, 25 bp, Saccharomyces pastorianus
acaacataacacagtcagcaccatc

SEQ ID NO: 191245 - DNA, 25 bp, Saccharomyces pastorianus
caagatagcgttaccgacatcggaa

SEQ ID NO: 191246 - DNA, 25 bp, Saccharomyces pastorianus
agctctggttggtcttgggttgtaa

SEQ ID NO: 191247 - DNA, 25 bp, Saccharomyces pastorianus
aaagaaggccgcaattgatttgtat

SEQ ID NO: 191248 - DNA, 25 bp, Saccharomyces pastorianus
aatctttgctcaccaactacagcag

SEQ ID NO: 191249 - DNA, 25 bp, Saccharomyces pastorianus
ttccagggtgatgacctactatcca

SEQ ID NO: 191250 - DNA, 25 bp, Saccharomyces pastorianus
tacaatactactacagaaattcgtt

SEQ ID NO: 191251 - DNA, 25 bp, Saccharomyces pastorianus
agtagcaacaaagaaggccgcaatt

SEQ ID NO: 191252 - DNA, 25 bp, Saccharomyces pastorianus
tatacccagtatttcaggaactcta

SEQ ID NO: 191253 - DNA, 25 bp, Saccharomyces pastorianus
cttatttccagggtgatgacctact

SEQ ID NO: 191254 - DNA, 25 bp, Saccharomyces pastorianus
gtagtcgtgaatctttgctcaccaa

SEQ ID NO: 191255 - DNA, 25 bp, Saccharomyces pastorianus
aactctaattcggtagtcgtgaatc

SEQ ID NO: 191256 - DNA, 25 bp, Saccharomyces pastorianus
gttggacagtacttgcagatgggca

SEQ ID NO: 191257 - DNA, 25 bp, Saccharomyces pastorianus
gaaattcgttggacagtacttgcag

SEQ ID NO: 191258 - DNA, 25 bp, Saccharomyces pastorianus
aaaatttggcgaatgctttgataac

SEQ ID NO: 191259 - DNA, 25 bp, Saccharomyces pastorianus
ttcagattagattccggccatattt

SEQ ID NO: 191260 - DNA, 25 bp, Saccharomyces pastorianus
gattccggccatatttctgacattt

SEQ ID NO: 191261 - DNA, 25 bp, Saccharomyces pastorianus
aaaagggaaattcatatctctatgt

SEQ ID NO: 191262 - DNA, 25 bp, Saccharomyces pastorianus
gctcatcataaacattaatcattgg

SEQ ID NO: 191263 - DNA, 25 bp, Saccharomyces pastorianus
ggcgaatgctttgataactgctgat

SEQ ID NO: 191264 - DNA, 25 bp, Saccharomyces pastorianus
atgctttgataactgctgatatttc

SEQ ID NO: 191265 - DNA, 25 bp, Saccharomyces pastorianus
cctcgcacagttttgctcatcataa

SEQ ID NO: 191266 - DNA, 25 bp, Saccharomyces pastorianus
ggccatatttctgacatttgtttta

SEQ ID NO: 191267 - DNA, 25 bp, Saccharomyces pastorianus
atgtgccctcgcacagttttgctca

SEQ ID NO: 191268 - DNA, 25 bp, Saccharomyces pastorianus
taactttcagattagattccggcca

SEQ ID NO: 191269 - DNA, 25 bp, Saccharomyces pastorianus
atacactgccagttagcgtggaatt

SEQ ID NO: 191270 - DNA, 25 bp, Saccharomyces pastorianus
ttttgcagggcacgtttactctttt

SEQ ID NO: 191271 - DNA, 25 bp, Saccharomyces pastorianus
ttagcgatgattttgcagggcacgt

SEQ ID NO: 191272 - DNA, 25 bp, Saccharomyces pastorianus
ctatcagtcggtggcgacgttgcat

SEQ ID NO: 191273 - DNA, 25 bp, Saccharomyces pastorianus
acgttgcattcggatgctgtgcaca

SEQ ID NO: 191274 - DNA, 25 bp, Saccharomyces pastorianus
gatgttactactgttagcgatgatt

SEQ ID NO: 191275 - DNA, 25 bp, Saccharomyces pastorianus
gaagattgtctactcaaacgctgtt

SEQ ID NO: 191276 - DNA, 25 bp, Saccharomyces pastorianus
cctccaattacatccacaaacttta

SEQ ID NO: 191277 - DNA, 25 bp, Saccharomyces pastorianus
gatgctgtgcacaagagcaacctcc

SEQ ID NO: 191278 - DNA, 25 bp, Saccharomyces pastorianus
gaagattgcccgataacattgcagg

SEQ ID NO: 191279 - DNA, 25 bp, Saccharomyces pastorianus
aaacgctgtttcttggcatacactg

SEQ ID NO: 191280 - DNA, 25 bp, Saccharomyces pastorianus
catgttaccaagtcgagacgcttaa

SEQ ID NO: 191281 - DNA, 25 bp, Saccharomyces pastorianus
tccggttccccatattcagattgga

SEQ ID NO: 191282 - DNA, 25 bp, Saccharomyces pastorianus
tgtaatcttttaacgctgctcttca

SEQ ID NO: 191283 - DNA, 25 bp, Saccharomyces pastorianus
gatatactgcaacttttcggccttt

SEQ ID NO: 191284 - DNA, 25 bp, Saccharomyces pastorianus
gtcaaagacagattccggttcccca

SEQ ID NO: 191285 - DNA, 25 bp, Saccharomyces pastorianus
atgaatccttttgcatcgctagaag

SEQ ID NO: 191286 - DNA, 25 bp, Saccharomyces pastorianus
gctgctcttcaaatcacggacgcaa

SEQ ID NO: 191287 - DNA, 25 bp, Saccharomyces pastorianus
tgtcggccaagacacgcaaaatctt

SEQ ID NO: 191288 - DNA, 25 bp, Saccharomyces pastorianus
aaacttttggcaactcatgttacca

SEQ ID NO: 191289 - DNA, 25 bp, Saccharomyces pastorianus
ttcggcctttgcaacgatttgtaat

SEQ ID NO: 191290 - DNA, 25 bp, Saccharomyces pastorianus
cggacgcaatcagtacttgtaccta

SEQ ID NO: 191291 - DNA, 25 bp, Saccharomyces pastorianus
gaaaacagtagtcacctcttcaatt

SEQ ID NO: 191292 - DNA, 25 bp, Saccharomyces pastorianus
cataataggatctagtactgcctct

SEQ ID NO: 191293 - DNA, 25 bp, Saccharomyces pastorianus
ccagtactggagctgctgagacgaa

SEQ ID NO: 191294 - DNA, 25 bp, Saccharomyces pastorianus
gtactggagctgctgagacgaaaac

SEQ ID NO: 191295 - DNA, 25 bp, Saccharomyces pastorianus
taccagtactggagctgctgagacg

SEQ ID NO: 191296 - DNA, 25 bp, Saccharomyces pastorianus
agctgctgagacaactaccagtact

SEQ ID NO: 191297 - DNA, 25 bp, Saccharomyces pastorianus
acgaaaacagtagtcacctcttcaa

SEQ ID NO: 191298 - DNA, 25 bp, Saccharomyces pastorianus
atactggagctgctgagacaactac

SEQ ID NO: 191299 - DNA, 25 bp, Saccharomyces pastorianus
ggagctgctgagacaactaccagta

SEQ ID NO: 191300 - DNA, 25 bp, Saccharomyces pastorianus
tggagctgctgagacgaaaacagta

SEQ ID NO: 191301 - DNA, 25 bp, Saccharomyces pastorianus
tggagctgctgagacaactaccagt

SEQ ID NO: 191302 - DNA, 25 bp, Saccharomyces pastorianus
tacagaaaaatccccacaaaaatca

SEQ ID NO: 191303 - DNA, 25 bp, Saccharomyces pastorianus
taccactccatttatatacacttat

SEQ ID NO: 191304 - DNA, 25 bp, Saccharomyces pastorianus
tacttaccactccatttatatacac

SEQ ID NO: 191305 - DNA, 25 bp, Saccharomyces pastorianus
ataccacttttgcaccatatactta

SEQ ID NO: 191306 - DNA, 25 bp, Saccharomyces pastorianus
catatacttaccactccatttatat

SEQ ID NO: 191307 - DNA, 25 bp, Saccharomyces pastorianus
atacttaccactccatttatataca

SEQ ID NO: 191308 - DNA, 25 bp, Saccharomyces pastorianus
ttaccactccatttatatacactta

SEQ ID NO: 191309 - DNA, 25 bp, Saccharomyces pastorianus
cttaccactccatttatatacactt

SEQ ID NO: 191310 - DNA, 25 bp, Saccharomyces pastorianus
atatacttaccactccatttatata

SEQ ID NO: 191311 - DNA, 25 bp, Saccharomyces pastorianus
tatacttaccactccatttatatac

SEQ ID NO: 191312 - DNA, 25 bp, Saccharomyces pastorianus
acttaccactccatttatatacact

SEQ ID NO: 191313 - DNA, 25 bp, Saccharomyces pastorianus
aaataacacacacgtgcttacccta

SEQ ID NO: 191314 - DNA, 25 bp, Saccharomyces pastorianus
tatactgattttacgtacgcacacg

SEQ ID NO: 191315 - DNA, 25 bp, Saccharomyces pastorianus
gtgcttaccctaccactttatacca

SEQ ID NO: 191316 - DNA, 25 bp, Saccharomyces pastorianus
tactgattttacgtacgcacacgga

SEQ ID NO: 191317 - DNA, 25 bp, Saccharomyces pastorianus
acttgtatactgattttacgtacgc

SEQ ID NO: 191318 - DNA, 25 bp, Saccharomyces pastorianus
taccactttataccaccaccacatg

SEQ ID NO: 191319 - DNA, 25 bp, Saccharomyces pastorianus
actgattttacgtacgcacacggat

SEQ ID NO: 191320 - DNA, 25 bp, Saccharomyces pastorianus
tgattttacgtacgcacacggatgc

SEQ ID NO: 191321 - DNA, 25 bp, Saccharomyces pastorianus
tctcagattccacttcactccatgg

SEQ ID NO: 191322 - DNA, 25 bp, Saccharomyces pastorianus
gtatactgattttacgtacgcacac

SEQ ID NO: 191323 - DNA, 25 bp, Saccharomyces pastorianus
cacgtgcttaccctaccactttata

SEQ ID NO: 191324 - DNA, 25 bp, Saccharomyces pastorianus
aaataatctaagttacctgatacaa

SEQ ID NO: 191325 - DNA, 25 bp, Saccharomyces pastorianus
atctaagttacctgatacaagaact

SEQ ID NO: 191326 - DNA, 25 bp, Saccharomyces pastorianus
ttattaaataatctaagttacctga

SEQ ID NO: 191327 - DNA, 25 bp, Saccharomyces pastorianus
taatctaagttacctgatacaagaa

SEQ ID NO: 191328 - DNA, 25 bp, Saccharomyces pastorianus
ataatctaagttacctgatacaaga

SEQ ID NO: 191329 - DNA, 25 bp, Saccharomyces pastorianus
tattaaataatctaagttacctgat

SEQ ID NO: 191330 - DNA, 25 bp, Saccharomyces pastorianus
aataatctaagttacctgatacaag

SEQ ID NO: 191331 - DNA, 25 bp, Saccharomyces pastorianus
ttaaataatctaagttacctgatac

SEQ ID NO: 191332 - DNA, 25 bp, Saccharomyces pastorianus
attaaataatctaagttacctgata

SEQ ID NO: 191333 - DNA, 25 bp, Saccharomyces pastorianus
taaataatctaagttacctgataca

SEQ ID NO: 191334 - DNA, 25 bp, Saccharomyces pastorianus
aatctaagttacctgatacaagaac

SEQ ID NO: 191335 - DNA, 25 bp, Saccharomyces pastorianus
cgaaatcgaaaacagccagggctca

SEQ ID NO: 191336 - DNA, 25 bp, Saccharomyces pastorianus
cattgtgaccctggcaaatttgcaa

SEQ ID NO: 191337 - DNA, 25 bp, Saccharomyces pastorianus
gaactgttcttagatatccatgcta

SEQ ID NO: 191338 - DNA, 25 bp, Saccharomyces pastorianus
tgggtcaaagacatcctatccgttg

SEQ ID NO: 191339 - DNA, 25 bp, Saccharomyces pastorianus
ttcctacctacctgggtcaaagaca

SEQ ID NO: 191340 - DNA, 25 bp, Saccharomyces pastorianus
atgacagtcgctgaactgttcttag

SEQ ID NO: 191341 - DNA, 25 bp, Saccharomyces pastorianus
ggcaaacgacattgtgaccctggca

SEQ ID NO: 191342 - DNA, 25 bp, Saccharomyces pastorianus
taactctcccagcacggacaacgat

SEQ ID NO: 191343 - DNA, 25 bp, Saccharomyces pastorianus
gctacacacgtcatcgacatctaaa

SEQ ID NO: 191344 - DNA, 25 bp, Saccharomyces pastorianus
caaagttatagctcggaatcctcaa

SEQ ID NO: 191345 - DNA, 25 bp, Saccharomyces pastorianus
agaagaatgattctcgcagctatac

SEQ ID NO: 191346 - DNA, 25 bp, Saccharomyces pastorianus
gcagcaaccactacattatctcaat

SEQ ID NO: 191347 - DNA, 25 bp, Saccharomyces pastorianus
cagcaaccactacattatctcaatc

SEQ ID NO: 191348 - DNA, 25 bp, Saccharomyces pastorianus
actacattatctcaatctgacgaaa

SEQ ID NO: 191349 - DNA, 25 bp, Saccharomyces pastorianus
agcaaccactacattatctcaatct

SEQ ID NO: 191350 - DNA, 25 bp, Saccharomyces pastorianus
gcaaccactacattatctcaatctg

SEQ ID NO: 191351 - DNA, 25 bp, Saccharomyces pastorianus
attaggtgtttatgtttccgatatc

SEQ ID NO: 191352 - DNA, 25 bp, Saccharomyces pastorianus
aaccactacattatctcaatctgac

SEQ ID NO: 191353 - DNA, 25 bp, Saccharomyces pastorianus
attgctgctggtgcctccgccgcag

SEQ ID NO: 191354 - DNA, 25 bp, Saccharomyces pastorianus
gctgctggtgcctccgccgcagcaa

SEQ ID NO: 191355 - DNA, 25 bp, Saccharomyces pastorianus
gaattaggtgtttatgtttccgata

SEQ ID NO: 191356 - DNA, 25 bp, Saccharomyces pastorianus
taggtgtttatgtttccgatatcag

SEQ ID NO: 191357 - DNA, 25 bp, Saccharomyces pastorianus
gggtctcaactacaaacaccacttt

SEQ ID NO: 191358 - DNA, 25 bp, Saccharomyces pastorianus
agtcccgcggtgatatcgtagcctt

SEQ ID NO: 191359 - DNA, 25 bp, Saccharomyces pastorianus
gaaatcgtccatcattgggtctcaa

SEQ ID NO: 191360 - DNA, 25 bp, Saccharomyces pastorianus
gagaccgcccaggaattcagaacag

SEQ ID NO: 191361 - DNA, 25 bp, Saccharomyces pastorianus
tatggacccggagactggcgatacc

SEQ ID NO: 191362 - DNA, 25 bp, Saccharomyces pastorianus
gataccgttctgcacgaattcgtca

SEQ ID NO: 191363 - DNA, 25 bp, Saccharomyces pastorianus
aactgcccatcgagctcgttaggaa

SEQ ID NO: 191364 - DNA, 25 bp, Saccharomyces pastorianus
atcaacgactgcgtgctcaacaact

SEQ ID NO: 191365 - DNA, 25 bp, Saccharomyces pastorianus
gaacagcttttaacaacagggactt

SEQ ID NO: 191366 - DNA, 25 bp, Saccharomyces pastorianus
tgatctaaacgaacgggactccaac

SEQ ID NO: 191367 - DNA, 25 bp, Saccharomyces pastorianus
acaccacttttctaaacatccatct

SEQ ID NO: 191368 - DNA, 25 bp, Saccharomyces pastorianus
aaataaagcgtttcctgtataggca

SEQ ID NO: 191369 - DNA, 25 bp, Saccharomyces pastorianus
ttgagccaaataaagcgtttcctgt

SEQ ID NO: 191370 - DNA, 25 bp, Saccharomyces pastorianus
gtttcttttattgccaacttcagac

SEQ ID NO: 191371 - DNA, 25 bp, Saccharomyces pastorianus
tgtcagttgtgacgctagacttttc

SEQ ID NO: 191372 - DNA, 25 bp, Saccharomyces pastorianus
gttttctgtgtttcccatatcataa

SEQ ID NO: 191373 - DNA, 25 bp, Saccharomyces pastorianus
gtttagtggctcttcttagtttctt

SEQ ID NO: 191374 - DNA, 25 bp, Saccharomyces pastorianus
aacatgatcatattattgagccaaa

SEQ ID NO: 191375 - DNA, 25 bp, Saccharomyces pastorianus
caaaatttttggagtgttttctgtg

SEQ ID NO: 191376 - DNA, 25 bp, Saccharomyces pastorianus
aacctcgcctctttctttgttctat

SEQ ID NO: 191377 - DNA, 25 bp, Saccharomyces pastorianus
gacgctagacttttcaatgaactct

SEQ ID NO: 191378 - DNA, 25 bp, Saccharomyces pastorianus
gccaacttcagacaaacatgatcat

SEQ ID NO: 191379 - DNA, 25 bp, Saccharomyces pastorianus
gtagaaatctgctgcacatgccaca

SEQ ID NO: 191380 - DNA, 25 bp, Saccharomyces pastorianus
ccatcgccaacttttgctttaacaa

SEQ ID NO: 191381 - DNA, 25 bp, Saccharomyces pastorianus
aatgccctattttctttagcaatta

SEQ ID NO: 191382 - DNA, 25 bp, Saccharomyces pastorianus
gtatgttaatcttccttgttctttt

SEQ ID NO: 191383 - DNA, 25 bp, Saccharomyces pastorianus
agtgtggttcgcttaggatgttttc

SEQ ID NO: 191384 - DNA, 25 bp, Saccharomyces pastorianus
gcaattaatgaaccatcgccaactt

SEQ ID NO: 191385 - DNA, 25 bp, Saccharomyces pastorianus
gccattttcagcagtactaacgtaa

SEQ ID NO: 191386 - DNA, 25 bp, Saccharomyces pastorianus
atgccacacgcagtacttgaaactt

SEQ ID NO: 191387 - DNA, 25 bp, Saccharomyces pastorianus
acgtaagatctagtgtggttcgctt

SEQ ID NO: 191388 - DNA, 25 bp, Saccharomyces pastorianus
aacaattattgccattttcagcagt

SEQ ID NO: 191389 - DNA, 25 bp, Saccharomyces pastorianus
cgcttaggatgttttcgagtagaaa

SEQ ID NO: 191390 - DNA, 25 bp, Saccharomyces pastorianus
attaataggtatctcgtctagcgta

SEQ ID NO: 191391 - DNA, 25 bp, Saccharomyces pastorianus
gcagccaaaaatcaaaatacttcag

SEQ ID NO: 191392 - DNA, 25 bp, Saccharomyces pastorianus
gaaagctgccaggaactgttcctga

SEQ ID NO: 191393 - DNA, 25 bp, Saccharomyces pastorianus
aaaaatctcgtgaggcctccggaat

SEQ ID NO: 191394 - DNA, 25 bp, Saccharomyces pastorianus
aggactgctacgtggaagcggattt

SEQ ID NO: 191395 - DNA, 25 bp, Saccharomyces pastorianus
aaaaccgatgtcaaaaaatctcgtg

SEQ ID NO: 191396 - DNA, 25 bp, Saccharomyces pastorianus
gaaggagccgaaagctgccaggaac

SEQ ID NO: 191397 - DNA, 25 bp, Saccharomyces pastorianus
gaagaagtcgtagcgaggactgcta

SEQ ID NO: 191398 - DNA, 25 bp, Saccharomyces pastorianus
gcctccggaattttgacgctgcaag

SEQ ID NO: 191399 - DNA, 25 bp, Saccharomyces pastorianus
atttgaagatcctttccagaacaag

SEQ ID NO: 191400 - DNA, 25 bp, Saccharomyces pastorianus
tgcaagtcaatctacgggaaagaag

SEQ ID NO: 191401 - DNA, 25 bp, Saccharomyces pastorianus
tttatttttggcactcttcacctac

SEQ ID NO: 191402 - DNA, 25 bp, Saccharomyces pastorianus
actatttatttttggcactcttcac

SEQ ID NO: 191403 - DNA, 25 bp, Saccharomyces pastorianus
atcactatttatttttggcactctt

SEQ ID NO: 191404 - DNA, 25 bp, Saccharomyces pastorianus
tggccacgtccaatgttgtttcagg

SEQ ID NO: 191405 - DNA, 25 bp, Saccharomyces pastorianus
caatgttgtttcaggaagtacacaa

SEQ ID NO: 191406 - DNA, 25 bp, Saccharomyces pastorianus
gtccaatgttgtttcaggaagtaca

SEQ ID NO: 191407 - DNA, 25 bp, Saccharomyces pastorianus
atgccttatcactatttatttttgg

SEQ ID NO: 191408 - DNA, 25 bp, Saccharomyces pastorianus
gccacgtccaatgttgtttcaggaa

SEQ ID NO: 191409 - DNA, 25 bp, Saccharomyces pastorianus
tacctggccacgtccaatgttgttt

SEQ ID NO: 191410 - DNA, 25 bp, Saccharomyces pastorianus
tttttggcactcttcacctacctgg

SEQ ID NO: 191411 - DNA, 25 bp, Saccharomyces pastorianus
tatttttggcactcttcacctacct

SEQ ID NO: 191412 - DNA, 25 bp, Saccharomyces pastorianus
acctccaattacatcgacggatttt

SEQ ID NO: 191413 - DNA, 25 bp, Saccharomyces pastorianus
gcctgataacatcggagggactgtc

SEQ ID NO: 191414 - DNA, 25 bp, Saccharomyces pastorianus
ctgtggactggtacttttacttcta

SEQ ID NO: 191415 - DNA, 25 bp, Saccharomyces pastorianus
aaacatactactagcatcgtcacaa

SEQ ID NO: 191416 - DNA, 25 bp, Saccharomyces pastorianus
atcgacggattttacaatcaatggt

SEQ ID NO: 191417 - DNA, 25 bp, Saccharomyces pastorianus
cgaactgtggactggtacttttact

SEQ ID NO: 191418 - DNA, 25 bp, Saccharomyces pastorianus
ctatcagtcggtggtaacgttgcgt

SEQ ID NO: 191419 - DNA, 25 bp, Saccharomyces pastorianus
gcaaggaagtttgcctgataacatc

SEQ ID NO: 191420 - DNA, 25 bp, Saccharomyces pastorianus
attacatcgacggattttacaatca

SEQ ID NO: 191421 - DNA, 25 bp, Saccharomyces pastorianus
gtttgcctgataacatcggagggac

SEQ ID NO: 191422 - DNA, 25 bp, Saccharomyces pastorianus
gaagtttgcctgataacatcggagg

SEQ ID NO: 191423 - DNA, 25 bp, Saccharomyces pastorianus
acccattagcgtccaaatctgccaa

SEQ ID NO: 191424 - DNA, 25 bp, Saccharomyces pastorianus
ctatggacgctgataaagaaagact

SEQ ID NO: 191425 - DNA, 25 bp, Saccharomyces pastorianus
ttagcgtccaaatctgccaacacca

SEQ ID NO: 191426 - DNA, 25 bp, Saccharomyces pastorianus
tattgggactatggacgctgataaa

SEQ ID NO: 191427 - DNA, 25 bp, Saccharomyces pastorianus
gtccaaatctgccaacaccaagcaa

SEQ ID NO: 191428 - DNA, 25 bp, Saccharomyces pastorianus
attggtatgggaactggctctattt

SEQ ID NO: 191429 - DNA, 25 bp, Saccharomyces pastorianus
tgggaactggctctatttgtattac

SEQ ID NO: 191430 - DNA, 25 bp, Saccharomyces pastorianus
aactggctctatttgtattacccaa

SEQ ID NO: 191431 - DNA, 25 bp, Saccharomyces pastorianus
atcacattatcagaaggtaacgaaa

SEQ ID NO: 191432 - DNA, 25 bp, Saccharomyces pastorianus
tgatgaaaagggtaacttagtttct

SEQ ID NO: 191433 - DNA, 25 bp, Saccharomyces pastorianus
gactaagattattggtaaaagctgg

SEQ ID NO: 191434 - DNA, 25 bp, Saccharomyces pastorianus
gaattccctttgatacaagaaaact

SEQ ID NO: 191435 - DNA, 25 bp, Saccharomyces pastorianus
ccctgtttattgtgtttccactcag

SEQ ID NO: 191436 - DNA, 25 bp, Saccharomyces pastorianus
atcggaattccctttgatacaagaa

SEQ ID NO: 191437 - DNA, 25 bp, Saccharomyces pastorianus
tacccctgtttattgtgtttccact

SEQ ID NO: 191438 - DNA, 25 bp, Saccharomyces pastorianus
cgggtatcgtacatcaatttttgaa

SEQ ID NO: 191439 - DNA, 25 bp, Saccharomyces pastorianus
tgtttattgtgtttccactcagtta

SEQ ID NO: 191440 - DNA, 25 bp, Saccharomyces pastorianus
taacgggtatcgtacatcaattttt

SEQ ID NO: 191441 - DNA, 25 bp, Saccharomyces pastorianus
gatttacatcggaattccctttgat

SEQ ID NO: 191442 - DNA, 25 bp, Saccharomyces pastorianus
agactttagttgaccaagaagtggt

SEQ ID NO: 191443 - DNA, 25 bp, Saccharomyces pastorianus
tttttcaagactttagttgaccaag

SEQ ID NO: 191444 - DNA, 25 bp, Saccharomyces pastorianus
aatgatttacatcggaattcccttt

SEQ ID NO: 191445 - DNA, 25 bp, Saccharomyces pastorianus
ttttcacagggctaacttgcgtact

SEQ ID NO: 191446 - DNA, 25 bp, Saccharomyces pastorianus
aatgaagcaactttactaacatcaa

SEQ ID NO: 191447 - DNA, 25 bp, Saccharomyces pastorianus
cacagggctaacttgcgtactcaaa

SEQ ID NO: 191448 - DNA, 25 bp, Saccharomyces pastorianus
tcacagggctaacttgcgtactcaa

SEQ ID NO: 191449 - DNA, 25 bp, Saccharomyces pastorianus
ccaagccaactctagaaatgccatt

SEQ ID NO: 191450 - DNA, 25 bp, Saccharomyces pastorianus
gcccaagccaactctagaaatgcca

SEQ ID NO: 191451 - DNA, 25 bp, Saccharomyces pastorianus
aactttactaacatcaatatgcaaa

SEQ ID NO: 191452 - DNA, 25 bp, Saccharomyces pastorianus
gaagcaactttactaacatcaatat

SEQ ID NO: 191453 - DNA, 25 bp, Saccharomyces pastorianus
aattgcccaagccaactctagaaat

SEQ ID NO: 191454 - DNA, 25 bp, Saccharomyces pastorianus
ttgcccaagccaactctagaaatgc

SEQ ID NO: 191455 - DNA, 25 bp, Saccharomyces pastorianus
ttcacagggctaacttgcgtactca

SEQ ID NO: 191456 - DNA, 25 bp, Saccharomyces pastorianus
ttcaagacccaaacgttgtacgctt

SEQ ID NO: 191457 - DNA, 25 bp, Saccharomyces pastorianus
ggtatccctatacaatgctctaatg

SEQ ID NO: 191458 - DNA, 25 bp, Saccharomyces pastorianus
ttgacttttcactgggtatccctat

SEQ ID NO: 191459 - DNA, 25 bp, Saccharomyces pastorianus
gtacgctttggttttcataacacga

SEQ ID NO: 191460 - DNA, 25 bp, Saccharomyces pastorianus
aagaaccaacaccattgcgtataat

SEQ ID NO: 191461 - DNA, 25 bp, Saccharomyces pastorianus
accagtatactgatcctgattcata

SEQ ID NO: 191462 - DNA, 25 bp, Saccharomyces pastorianus
taccgcttacattgtagtgctatta

SEQ ID NO: 191463 - DNA, 25 bp, Saccharomyces pastorianus
acctcaattgtacatgctatctaag

SEQ ID NO: 191464 - DNA, 25 bp, Saccharomyces pastorianus
gcatgatacctttaagatccagcat

SEQ ID NO: 191465 - DNA, 25 bp, Saccharomyces pastorianus
gatacttggatctcttgacttttca

SEQ ID NO: 191466 - DNA, 25 bp, Saccharomyces pastorianus
atttttcattgtatctaccgcttac

SEQ ID NO: 191467 - DNA, 25 bp, Saccharomyces pastorianus
gatccgaatgcaaagacggcttccg

SEQ ID NO: 191468 - DNA, 25 bp, Saccharomyces pastorianus
gacggcttccgccaataatgattgg

SEQ ID NO: 191469 - DNA, 25 bp, Saccharomyces pastorianus
acacacattactattttgatccgaa

SEQ ID NO: 191470 - DNA, 25 bp, Saccharomyces pastorianus
acaaagtttatgactggaaagacca

SEQ ID NO: 191471 - DNA, 25 bp, Saccharomyces pastorianus
ggtcatataactacacacattacta

SEQ ID NO: 191472 - DNA, 25 bp, Saccharomyces pastorianus
tgcaaagacggcttccgccaataat

SEQ ID NO: 191473 - DNA, 25 bp, Saccharomyces pastorianus
ggcttccgccaataatgattggatt

SEQ ID NO: 191474 - DNA, 25 bp, Saccharomyces pastorianus
cggtactgtaaaatgtgtcgtcgac

SEQ ID NO: 191475 - DNA, 25 bp, Saccharomyces pastorianus
tgtgtcgtcgacaaagtttatgact

SEQ ID NO: 191476 - DNA, 25 bp, Saccharomyces pastorianus
ttcttatatggccactcaacgtgcc

SEQ ID NO: 191477 - DNA, 25 bp, Saccharomyces pastorianus
tatggccactcaacgtgcccaagga

SEQ ID NO: 191478 - DNA, 25 bp, Saccharomyces pastorianus
aaccaaccatattacaagtcacaaa

SEQ ID NO: 191479 - DNA, 25 bp, Saccharomyces pastorianus
gtaaccaaccatattacaagtcaca

SEQ ID NO: 191480 - DNA, 25 bp, Saccharomyces pastorianus
tggtaaccaaccatattacaagtca

SEQ ID NO: 191481 - DNA, 25 bp, Saccharomyces pastorianus
atggtaaccaaccatattacaagtc

SEQ ID NO: 191482 - DNA, 25 bp, Saccharomyces pastorianus
tatggtaaccaaccatattacaagt

SEQ ID NO: 191483 - DNA, 25 bp, Saccharomyces pastorianus
accaaccatattacaagtcacaaat

SEQ ID NO: 191484 - DNA, 25 bp, Saccharomyces pastorianus
ggtaaccaaccatattacaagtcac

SEQ ID NO: 191485 - DNA, 25 bp, Saccharomyces pastorianus
taaccaaccatattacaagtcacaa

SEQ ID NO: 191486 - DNA, 25 bp, Saccharomyces pastorianus
cagattaaagccagccatctccagt

SEQ ID NO: 191487 - DNA, 25 bp, Saccharomyces pastorianus
aaagccagccatctccagtgctcta

SEQ ID NO: 191488 - DNA, 25 bp, Saccharomyces pastorianus
aagccagccatctccagtgctctat

SEQ ID NO: 191489 - DNA, 25 bp, Saccharomyces pastorianus
agattaaagccagccatctccagtg

SEQ ID NO: 191490 - DNA, 25 bp, Saccharomyces pastorianus
attaaagccagccatctccagtgct

SEQ ID NO: 191491 - DNA, 25 bp, Saccharomyces pastorianus
gattaaagccagccatctccagtgc

SEQ ID NO: 191492 - DNA, 25 bp, Saccharomyces pastorianus
tgaccagaatgatcaccggtgttcc

SEQ ID NO: 191493 - DNA, 25 bp, Saccharomyces pastorianus
taaagccagccatctccagtgctct

SEQ ID NO: 191494 - DNA, 25 bp, Saccharomyces pastorianus
tggtattgccccagaccaagtgacc

SEQ ID NO: 191495 - DNA, 25 bp, Saccharomyces pastorianus
ttaaagccagccatctccagtgctc

SEQ ID NO: 191496 - DNA, 25 bp, Saccharomyces pastorianus
agtgaccagaatgatcaccggtgtt

SEQ ID NO: 191497 - DNA, 25 bp, Saccharomyces pastorianus
gacatatatatataccctaacacta

SEQ ID NO: 191498 - DNA, 25 bp, Saccharomyces pastorianus
ccaattagccatattcaacttcact

SEQ ID NO: 191499 - DNA, 25 bp, Saccharomyces pastorianus
gccatattcaacttcactaccactt

SEQ ID NO: 191500 - DNA, 25 bp, Saccharomyces pastorianus
catatatatataccctaacactacc

SEQ ID NO: 191501 - DNA, 25 bp, Saccharomyces pastorianus
taccacttaccctgccattactcta

SEQ ID NO: 191502 - DNA, 25 bp, Saccharomyces pastorianus
tagccatattcaacttcactaccac

SEQ ID NO: 191503 - DNA, 25 bp, Saccharomyces pastorianus
ttactctaccatccaccatctgcta

SEQ ID NO: 191504 - DNA, 25 bp, Saccharomyces pastorianus
tacttactaccaccaatcaaccgtc

SEQ ID NO: 191505 - DNA, 25 bp, Saccharomyces pastorianus
ctatttcaacccttccaacctgtct

SEQ ID NO: 191506 - DNA, 25 bp, Saccharomyces pastorianus
ttgttaccctgtcccattcaaccat

SEQ ID NO: 191507 - DNA, 25 bp, Saccharomyces pastorianus
cctccaattagccatattcaacttc

SEQ ID NO: 191508 - DNA, 25 bp, Saccharomyces pastorianus
aattaccaccgattaaggaaggctg

SEQ ID NO: 191509 - DNA, 25 bp, Saccharomyces pastorianus
tcgtaagggtgaattaccaccgatt

SEQ ID NO: 191510 - DNA, 25 bp, Saccharomyces pastorianus
gaaaaaaagggccagcatgttggat

SEQ ID NO: 191511 - DNA, 25 bp, Saccharomyces pastorianus
taagggtgaattaccaccgattaag

SEQ ID NO: 191512 - DNA, 25 bp, Saccharomyces pastorianus
aaaaaaagggccagcatgttggatg

SEQ ID NO: 191513 - DNA, 25 bp, Saccharomyces pastorianus
tgaattaccaccgattaaggaaggc

SEQ ID NO: 191514 - DNA, 25 bp, Saccharomyces pastorianus
gaaaggaaaaaaagggccagcatgt

SEQ ID NO: 191515 - DNA, 25 bp, Saccharomyces pastorianus
atcgtaagggtgaattaccaccgat

SEQ ID NO: 191516 - DNA, 25 bp, Saccharomyces pastorianus
aggaaaaaaagggccagcatgttgg

SEQ ID NO: 191517 - DNA, 25 bp, Saccharomyces pastorianus
aaggaaaaaaagggccagcatgttg

SEQ ID NO: 191518 - DNA, 25 bp, Saccharomyces pastorianus
gaattaccaccgattaaggaaggct

SEQ ID NO: 191519 - DNA, 25 bp, Saccharomyces pastorianus
gcgctaaaacgcttttctattggaa

SEQ ID NO: 191520 - DNA, 25 bp, Saccharomyces pastorianus
tttctattagtttcacccgttgtgg

SEQ ID NO: 191521 - DNA, 25 bp, Saccharomyces pastorianus
gtggccattggcttgtatttaattt

SEQ ID NO: 191522 - DNA, 25 bp, Saccharomyces pastorianus
caaacgccggcttgttattttgatt

SEQ ID NO: 191523 - DNA, 25 bp, Saccharomyces pastorianus
gaggctgggatgtcgcattctacaa

SEQ ID NO: 191524 - DNA, 25 bp, Saccharomyces pastorianus
gtggcttctaattcattggatacag

SEQ ID NO: 191525 - DNA, 25 bp, Saccharomyces pastorianus
ttgatcactcatggtctaatttaac

SEQ ID NO: 191526 - DNA, 25 bp, Saccharomyces pastorianus
atatgctacatacttccttacaatt

SEQ ID NO: 191527 - DNA, 25 bp, Saccharomyces pastorianus
ggtaactctatctaccagcaaggtt

SEQ ID NO: 191528 - DNA, 25 bp, Saccharomyces pastorianus
tggatacagctgaccaaacgccggc

SEQ ID NO: 191529 - DNA, 25 bp, Saccharomyces pastorianus
ggtaaagctgtactgttccgaactt

SEQ ID NO: 191530 - DNA, 25 bp, Saccharomyces pastorianus
cttccataagtcctggtacgttcct

SEQ ID NO: 191531 - DNA, 25 bp, Saccharomyces pastorianus
attcatgggcaacaccttccataag

SEQ ID NO: 191532 - DNA, 25 bp, Saccharomyces pastorianus
gccaggacctggtatcgttttacca

SEQ ID NO: 191533 - DNA, 25 bp, Saccharomyces pastorianus
tcgttttaccaggatggaccaggtt

SEQ ID NO: 191534 - DNA, 25 bp, Saccharomyces pastorianus
gaacgctagaggctacagtgatgtt

SEQ ID NO: 191535 - DNA, 25 bp, Saccharomyces pastorianus
gtgtgcatacgaattgaacgctaga

SEQ ID NO: 191536 - DNA, 25 bp, Saccharomyces pastorianus
atggaccaggttatgatatgatcag

SEQ ID NO: 191537 - DNA, 25 bp, Saccharomyces pastorianus
caacttgtttaacgctactttgaag

SEQ ID NO: 191538 - DNA, 25 bp, Saccharomyces pastorianus
ccgaagatgaattggtacgttactc

SEQ ID NO: 191539 - DNA, 25 bp, Saccharomyces pastorianus
ggtacgttactcatacggccaggac

SEQ ID NO: 191540 - DNA, 25 bp, Saccharomyces pastorianus
gatgtttgtgatatcttcaccgaag

SEQ ID NO: 191541 - DNA, 25 bp, Saccharomyces pastorianus
atgctggttttgtatcgaaaaagat

SEQ ID NO: 191542 - DNA, 25 bp, Saccharomyces pastorianus
tgctggttttgtatcgaaaaagatt

SEQ ID NO: 191543 - DNA, 25 bp, Saccharomyces pastorianus
ttttgtatcgaaaaagattttcagg

SEQ ID NO: 191544 - DNA, 25 bp, Saccharomyces pastorianus
gctggttttgtatcgaaaaagattt

SEQ ID NO: 191545 - DNA, 25 bp, Saccharomyces pastorianus
ttgtatcgaaaaagattttcaggtt

SEQ ID NO: 191546 - DNA, 25 bp, Saccharomyces pastorianus
gttttgtatcgaaaaagattttcag

SEQ ID NO: 191547 - DNA, 25 bp, Saccharomyces pastorianus
tttgtatcgaaaaagattttcaggt

SEQ ID NO: 191548 - DNA, 25 bp, Saccharomyces pastorianus
tgtatcgaaaaagattttcaggttt

SEQ ID NO: 191549 - DNA, 25 bp, Saccharomyces pastorianus
gaattgtacgacattacgttcaaga

SEQ ID NO: 191550 - DNA, 25 bp, Saccharomyces pastorianus
acaagatctttttatgtactacagg

SEQ ID NO: 191551 - DNA, 25 bp, Saccharomyces pastorianus
cggaagacgccgcaaaggcacatat

SEQ ID NO: 191552 - DNA, 25 bp, Saccharomyces pastorianus
gcagctgctgatagcgtaccgcaca

SEQ ID NO: 191553 - DNA, 25 bp, Saccharomyces pastorianus
taacgacccctcaaacaagaattgt

SEQ ID NO: 191554 - DNA, 25 bp, Saccharomyces pastorianus
aaggcacatatgactaacctttttt

SEQ ID NO: 191555 - DNA, 25 bp, Saccharomyces pastorianus
ttatcccagttttttccatgcaagg

SEQ ID NO: 191556 - DNA, 25 bp, Saccharomyces pastorianus
attaaggtcatctttctgtacgaaa

SEQ ID NO: 191557 - DNA, 25 bp, Saccharomyces pastorianus
ttacccgacgcagctgctgatagcg

SEQ ID NO: 191558 - DNA, 25 bp, Saccharomyces pastorianus
tagcgtaccgcacaggcacagccag

SEQ ID NO: 191559 - DNA, 25 bp, Saccharomyces pastorianus
gattgtcactaacgacgtgtccctt

SEQ ID NO: 191560 - DNA, 25 bp, Saccharomyces pastorianus
aaccaaccatattacaagtcacaaa

SEQ ID NO: 191561 - DNA, 25 bp, Saccharomyces pastorianus
gtaaccaaccatattacaagtcaca

SEQ ID NO: 191562 - DNA, 25 bp, Saccharomyces pastorianus
tggtaaccaaccatattacaagtca

SEQ ID NO: 191563 - DNA, 25 bp, Saccharomyces pastorianus
atggtaaccaaccatattacaagtc

SEQ ID NO: 191564 - DNA, 25 bp, Saccharomyces pastorianus
tatggtaaccaaccatattacaagt

SEQ ID NO: 191565 - DNA, 25 bp, Saccharomyces pastorianus
accaaccatattacaagtcacaaat

SEQ ID NO: 191566 - DNA, 25 bp, Saccharomyces pastorianus
ggtaaccaaccatattacaagtcac

SEQ ID NO: 191567 - DNA, 25 bp, Saccharomyces pastorianus
taaccaaccatattacaagtcacaa

SEQ ID NO: 191568 - DNA, 25 bp, Saccharomyces pastorianus
gcaccagtcgataccacggcaggaa

SEQ ID NO: 191569 - DNA, 25 bp, Saccharomyces pastorianus
gatagaccatctcaagcaacaattg

SEQ ID NO: 191570 - DNA, 25 bp, Saccharomyces pastorianus
aaaaccacaagattcctcatcggaa

SEQ ID NO: 191571 - DNA, 25 bp, Saccharomyces pastorianus
tcaacccactggtgccaacgaagat

SEQ ID NO: 191572 - DNA, 25 bp, Saccharomyces pastorianus
gagcattgcgatacgatgggtcata

SEQ ID NO: 191573 - DNA, 25 bp, Saccharomyces pastorianus
gaaaatgcataacgattcgctcagt

SEQ ID NO: 191574 - DNA, 25 bp, Saccharomyces pastorianus
aatctttctcataatcaacccactg

SEQ ID NO: 191575 - DNA, 25 bp, Saccharomyces pastorianus
aacagctggaacaattacgcaacat

SEQ ID NO: 191576 - DNA, 25 bp, Saccharomyces pastorianus
aacagccgtggaatcgttgccaatt

SEQ ID NO: 191577 - DNA, 25 bp, Saccharomyces pastorianus
acgaagatgtcgaactcctgaaaaa

SEQ ID NO: 191578 - DNA, 25 bp, Saccharomyces pastorianus
gtgggctaaagaacgcgaacaattg

SEQ ID NO: 191579 - DNA, 25 bp, Saccharomyces pastorianus
gattgcattgtctatatactgtatt

SEQ ID NO: 191580 - DNA, 25 bp, Saccharomyces pastorianus
tgctcttttctgtgttccatttagt

SEQ ID NO: 191581 - DNA, 25 bp, Saccharomyces pastorianus
tttcactgctcttttctgtgttcca

SEQ ID NO: 191582 - DNA, 25 bp, Saccharomyces pastorianus
ttctgtgttccatttagtttttagt

SEQ ID NO: 191583 - DNA, 25 bp, Saccharomyces pastorianus
aatctttcactgctcttttctgtgt

SEQ ID NO: 191584 - DNA, 25 bp, Saccharomyces pastorianus
ctcttttctgtgttccatttagttt

SEQ ID NO: 191585 - DNA, 25 bp, Saccharomyces pastorianus
gtacgattgcattgtctatatactg

SEQ ID NO: 191586 - DNA, 25 bp, Saccharomyces pastorianus
actgctcttttctgtgttccattta

SEQ ID NO: 191587 - DNA, 25 bp, Saccharomyces pastorianus
agtttttagtacgattgcattgtct

SEQ ID NO: 191588 - DNA, 25 bp, Saccharomyces pastorianus
tgttccatttagtttttagtacgat

SEQ ID NO: 191589 - DNA, 25 bp, Saccharomyces pastorianus
agactcaagcaaacaatcaaagaaa

SEQ ID NO: 191590 - DNA, 25 bp, Saccharomyces pastorianus
atattactcacagtttggctccggt

SEQ ID NO: 191591 - DNA, 25 bp, Saccharomyces pastorianus
gcatgtgaggccaagctgcttcaat

SEQ ID NO: 191592 - DNA, 25 bp, Saccharomyces pastorianus
ttctctgctcgctgaagaatggcac

SEQ ID NO: 191593 - DNA, 25 bp, Saccharomyces pastorianus
tgttccttcctctcgatttttaaat

SEQ ID NO: 191594 - DNA, 25 bp, Saccharomyces pastorianus
aaatactcagtttcgacagttcaat

SEQ ID NO: 191595 - DNA, 25 bp, Saccharomyces pastorianus
tcacaggatagcgtctggaagtcaa

SEQ ID NO: 191596 - DNA, 25 bp, Saccharomyces pastorianus
aacgtctagctgagcatgtgaggcc

SEQ ID NO: 191597 - DNA, 25 bp, Saccharomyces pastorianus
gctgcttcaatattattcgaccact

SEQ ID NO: 191598 - DNA, 25 bp, Saccharomyces pastorianus
caaaatgtcttgtcttctctgctcg

SEQ ID NO: 191599 - DNA, 25 bp, Saccharomyces pastorianus
atgtttacttcgaagcctgctttca

SEQ ID NO: 191600 - DNA, 25 bp, Saccharomyces pastorianus
agatatccagattcctgttccttcc

SEQ ID NO: 191601 - DNA, 25 bp, Saccharomyces pastorianus
tggccgtctggcgacccttcgtaaa

SEQ ID NO: 191602 - DNA, 25 bp, Saccharomyces pastorianus
tgcctgtgtctctagagaatgcccc

SEQ ID NO: 191603 - DNA, 25 bp, Saccharomyces pastorianus
ataggctcggcgctgatgcaaacat

SEQ ID NO: 191604 - DNA, 25 bp, Saccharomyces pastorianus
actcagtgactggtataggctcggc

SEQ ID NO: 191605 - DNA, 25 bp, Saccharomyces pastorianus
acatggatgccgtattactagttgt

SEQ ID NO: 191606 - DNA, 25 bp, Saccharomyces pastorianus
aaatcctcgacagcatgagaacggc

SEQ ID NO: 191607 - DNA, 25 bp, Saccharomyces pastorianus
actgccctataatgacaatatcgtc

SEQ ID NO: 191608 - DNA, 25 bp, Saccharomyces pastorianus
tactagttgttaactccgcctggag

SEQ ID NO: 191609 - DNA, 25 bp, Saccharomyces pastorianus
aagcaactgcctgtgtctctagaga

SEQ ID NO: 191610 - DNA, 25 bp, Saccharomyces pastorianus
ataagtcacacactgccctataatg

SEQ ID NO: 191611 - DNA, 25 bp, Saccharomyces pastorianus
aactccgcctggaggtttctggccg

SEQ ID NO: 191612 - DNA, 25 bp, Saccharomyces pastorianus
aatacgtccacgaagtcaactcaaa

SEQ ID NO: 191613 - DNA, 25 bp, Saccharomyces pastorianus
gacggttctcattcgactattggaa

SEQ ID NO: 191614 - DNA, 25 bp, Saccharomyces pastorianus
ggttttcccttggatttgctctaca

SEQ ID NO: 191615 - DNA, 25 bp, Saccharomyces pastorianus
ttaccaacgttattgcggccattgc

SEQ ID NO: 191616 - DNA, 25 bp, Saccharomyces pastorianus
gtgtgctttcaaccactgttttttc

SEQ ID NO: 191617 - DNA, 25 bp, Saccharomyces pastorianus
gtacaactcttggtggtgtgctttc

SEQ ID NO: 191618 - DNA, 25 bp, Saccharomyces pastorianus
atcgctcatgagtgcacagcttcaa

SEQ ID NO: 191619 - DNA, 25 bp, Saccharomyces pastorianus
atttgctctacaagcatcgctcatg

SEQ ID NO: 191620 - DNA, 25 bp, Saccharomyces pastorianus
accaaagatcgtccagaagctgcta

SEQ ID NO: 191621 - DNA, 25 bp, Saccharomyces pastorianus
gagcagggcttatgacacttatgac

SEQ ID NO: 191622 - DNA, 25 bp, Saccharomyces pastorianus
gtatcacgagctcatctagagcctt

SEQ ID NO: 191623 - DNA, 25 bp, Saccharomyces pastorianus
gtctcatgaaggtgttatcgctgca

SEQ ID NO: 191624 - DNA, 25 bp, Saccharomyces pastorianus
tctgtaatcggaggttgtgctgcat

SEQ ID NO: 191625 - DNA, 25 bp, Saccharomyces pastorianus
atcgctgcatctgttatcatgggtt

SEQ ID NO: 191626 - DNA, 25 bp, Saccharomyces pastorianus
gtaggatggctgtaataaccggcat

SEQ ID NO: 191627 - DNA, 25 bp, Saccharomyces pastorianus
agatggtttggttgtcttgccagat

SEQ ID NO: 191628 - DNA, 25 bp, Saccharomyces pastorianus
gttggcttggcatgtacggtaccgt

SEQ ID NO: 191629 - DNA, 25 bp, Saccharomyces pastorianus
gtgtgcatgggccttttttacaaat

SEQ ID NO: 191630 - DNA, 25 bp, Saccharomyces pastorianus
agtgatcgtcatactgcaagccatg

SEQ ID NO: 191631 - DNA, 25 bp, Saccharomyces pastorianus
ggtctcctatgcagcaattcagtga

SEQ ID NO: 191632 - DNA, 25 bp, Saccharomyces pastorianus
tccgtttctggtgccatatggacac

SEQ ID NO: 191633 - DNA, 25 bp, Saccharomyces pastorianus
caaagctaggcgctgctatcggtgc

SEQ ID NO: 191634 - DNA, 25 bp, Saccharomyces pastorianus
tcggcgggttctacggtacctatat

SEQ ID NO: 191635 - DNA, 25 bp, Saccharomyces pastorianus
agggtgtgattcctgtaccatctac

SEQ ID NO: 191636 - DNA, 25 bp, Saccharomyces pastorianus
gctcccgttacgtggtcatcgaaga

SEQ ID NO: 191637 - DNA, 25 bp, Saccharomyces pastorianus
ctcatggagctattcacgatctacc

SEQ ID NO: 191638 - DNA, 25 bp, Saccharomyces pastorianus
gtgcaaatactggtcgtccggacat

SEQ ID NO: 191639 - DNA, 25 bp, Saccharomyces pastorianus
tacgtgactctacttgctggtgctc

SEQ ID NO: 191640 - DNA, 25 bp, Saccharomyces pastorianus
aattcctcggtcttaacattcatca

SEQ ID NO: 191641 - DNA, 25 bp, Saccharomyces pastorianus
agaacctcgcgcaatccatttggag

SEQ ID NO: 191642 - DNA, 25 bp, Saccharomyces pastorianus
ggtcagcttctcttttgtgcaaata

SEQ ID NO: 191643 - DNA, 25 bp, Saccharomyces pastorianus
atttaaacttacacagactccgctc

SEQ ID NO: 191644 - DNA, 25 bp, Saccharomyces pastorianus
gtatcgttctggatctcagttggca

SEQ ID NO: 191645 - DNA, 25 bp, Saccharomyces pastorianus
gcaactgttctctgcttaaacgaag

SEQ ID NO: 191646 - DNA, 25 bp, Saccharomyces pastorianus
ccatcatgggctccggaactgtaaa

SEQ ID NO: 191647 - DNA, 25 bp, Saccharomyces pastorianus
agatcttcatctgctagtgtcgcga

SEQ ID NO: 191648 - DNA, 25 bp, Saccharomyces pastorianus
gaagtcctggctctgtatgttatct

SEQ ID NO: 191649 - DNA, 25 bp, Saccharomyces pastorianus
tagtgtcgcgattcctgactatgaa

SEQ ID NO: 191650 - DNA, 25 bp, Saccharomyces pastorianus
aatttacggagctgatcatcgcata

SEQ ID NO: 191651 - DNA, 25 bp, Saccharomyces pastorianus
gacacaggatgtacttcccacatgt

SEQ ID NO: 191652 - DNA, 25 bp, Saccharomyces pastorianus
acgaccgttccattttttcatcatt

SEQ ID NO: 191653 - DNA, 25 bp, Saccharomyces pastorianus
atgttatcttcgactgttccagcta

SEQ ID NO: 191654 - DNA, 25 bp, Saccharomyces pastorianus
ttccagctaccaaatcctcagaatg

SEQ ID NO: 191655 - DNA, 25 bp, Saccharomyces pastorianus
gaggagttggcggttccatacccat

SEQ ID NO: 191656 - DNA, 25 bp, Saccharomyces pastorianus
ggatccaggcttactcttatagagg

SEQ ID NO: 191657 - DNA, 25 bp, Saccharomyces pastorianus
aattcgttcataccggagatatcca

SEQ ID NO: 191658 - DNA, 25 bp, Saccharomyces pastorianus
aaattcggtgactctaaggctcttc

SEQ ID NO: 191659 - DNA, 25 bp, Saccharomyces pastorianus
agggattacaatctcagcgcgaatg

SEQ ID NO: 191660 - DNA, 25 bp, Saccharomyces pastorianus
gaattcatcatcttcggtctcagat

SEQ ID NO: 191661 - DNA, 25 bp, Saccharomyces pastorianus
aaggctcttcagctatcacaagtca

SEQ ID NO: 191662 - DNA, 25 bp, Saccharomyces pastorianus
attcgcttggaagggtctctgctta

SEQ ID NO: 191663 - DNA, 25 bp, Saccharomyces pastorianus
gttattaatgaccttcttacccgag

SEQ ID NO: 191664 - DNA, 25 bp, Saccharomyces pastorianus
taccaaatatatcctccaagcctgt

SEQ ID NO: 191665 - DNA, 25 bp, Saccharomyces pastorianus
tatcgagaccgctgctgaatatgct

SEQ ID NO: 191666 - DNA, 25 bp, Saccharomyces pastorianus
gcttatgatattttctcgcacttcg

SEQ ID NO: 191667 - DNA, 25 bp, Saccharomyces pastorianus
gctgctccttcaggtaactataagc

SEQ ID NO: 191668 - DNA, 25 bp, Saccharomyces pastorianus
gctccttcaggtaactataagcaat

SEQ ID NO: 191669 - DNA, 25 bp, Saccharomyces pastorianus
actaagtcagtaccgttaatgataa

SEQ ID NO: 191670 - DNA, 25 bp, Saccharomyces pastorianus
aacattagtgggaggaggcgctaaa

SEQ ID NO: 191671 - DNA, 25 bp, Saccharomyces pastorianus
caaactaagtcagtaccgttaatga

SEQ ID NO: 191672 - DNA, 25 bp, Saccharomyces pastorianus
gtatacacagtacgatctccatcct

SEQ ID NO: 191673 - DNA, 25 bp, Saccharomyces pastorianus
tcgctgctccttcaggtaactataa

SEQ ID NO: 191674 - DNA, 25 bp, Saccharomyces pastorianus
attaacattagtgggaggaggcgct

SEQ ID NO: 191675 - DNA, 25 bp, Saccharomyces pastorianus
caggtaactataagcaattaacatt

SEQ ID NO: 191676 - DNA, 25 bp, Saccharomyces pastorianus
atacacagtacgatctccatcctcg

SEQ ID NO: 191677 - DNA, 25 bp, Saccharomyces pastorianus
agtatacacagtacgatctccatcc

SEQ ID NO: 191678 - DNA, 25 bp, Saccharomyces pastorianus
aacagttgtgtgaaatttttccaga

SEQ ID NO: 191679 - DNA, 25 bp, Saccharomyces pastorianus
ctgatcctctttccattattaaatg

SEQ ID NO: 191680 - DNA, 25 bp, Saccharomyces pastorianus
acctttcaaggccatgcctaagaaa

SEQ ID NO: 191681 - DNA, 25 bp, Saccharomyces pastorianus
gtatataacccctcacctttcaagg

SEQ ID NO: 191682 - DNA, 25 bp, Saccharomyces pastorianus
ttcctgatcctctttccattattaa

SEQ ID NO: 191683 - DNA, 25 bp, Saccharomyces pastorianus
gagtatgttgtttttcaacacgaaa

SEQ ID NO: 191684 - DNA, 25 bp, Saccharomyces pastorianus
caacacgaaattcctgatcctcttt

SEQ ID NO: 191685 - DNA, 25 bp, Saccharomyces pastorianus
atggatacatgcgaacaggccgaat

SEQ ID NO: 191686 - DNA, 25 bp, Saccharomyces pastorianus
tatgacccgaaacagttgtgtgaaa

SEQ ID NO: 191687 - DNA, 25 bp, Saccharomyces pastorianus
ttcagatcgtatataacccctcacc

SEQ ID NO: 191688 - DNA, 25 bp, Saccharomyces pastorianus
gaacaggccgaattttcagatcgta

SEQ ID NO: 191689 - DNA, 25 bp, Saccharomyces pastorianus
gccctggatagcgaagcgtgcggtt

SEQ ID NO: 191690 - DNA, 25 bp, Saccharomyces pastorianus
aaggacgtctgtgatgttggagata

SEQ ID NO: 191691 - DNA, 25 bp, Saccharomyces pastorianus
aactcttcttgagacgatttggccc

SEQ ID NO: 191692 - DNA, 25 bp, Saccharomyces pastorianus
atgtattttgttaactcttcttgag

SEQ ID NO: 191693 - DNA, 25 bp, Saccharomyces pastorianus
ttgagacgatttggccctggatagc

SEQ ID NO: 191694 - DNA, 25 bp, Saccharomyces pastorianus
ctgtgatgttggagatatgtatttt

SEQ ID NO: 191695 - DNA, 25 bp, Saccharomyces pastorianus
acgatttggccctggatagcgaagc

SEQ ID NO: 191696 - DNA, 25 bp, Saccharomyces pastorianus
tcttgagacgatttggccctggata

SEQ ID NO: 191697 - DNA, 25 bp, Saccharomyces pastorianus
cttcttgagacgatttggccctgga

SEQ ID NO: 191698 - DNA, 25 bp, Saccharomyces pastorianus
tttggccctggatagcgaagcgtgc

SEQ ID NO: 191699 - DNA, 25 bp, Saccharomyces pastorianus
aattgttgtagaaggacgtctgtga

SEQ ID NO: 191700 - DNA, 25 bp, Saccharomyces pastorianus
gtatggataagtttcgacgctggag

SEQ ID NO: 191701 - DNA, 25 bp, Saccharomyces pastorianus
ggaggctcctatagaaacatcattt

SEQ ID NO: 191702 - DNA, 25 bp, Saccharomyces pastorianus
catgccatatatactctttgggtaa

SEQ ID NO: 191703 - DNA, 25 bp, Saccharomyces pastorianus
ttcgcttttatatgtgaatcaccca

SEQ ID NO: 191704 - DNA, 25 bp, Saccharomyces pastorianus
gatttactgttgatcctttccatgg

SEQ ID NO: 191705 - DNA, 25 bp, Saccharomyces pastorianus
aaattctacattaccgacgaccgtg

SEQ ID NO: 191706 - DNA, 25 bp, Saccharomyces pastorianus
tgtcccaaaagtaacggaggctcct

SEQ ID NO: 191707 - DNA, 25 bp, Saccharomyces pastorianus
gatggcgactgttttataactactc

SEQ ID NO: 191708 - DNA, 25 bp, Saccharomyces pastorianus
gggagtcatggagggctttaactat

SEQ ID NO: 191709 - DNA, 25 bp, Saccharomyces pastorianus
atgattccaacacttctatcagatt

SEQ ID NO: 191710 - DNA, 25 bp, Saccharomyces pastorianus
gacgcagacgttttatatgacccaa

SEQ ID NO: 191711 - DNA, 25 bp, Saccharomyces pastorianus
ttccagctgaacaagtcaccagagt

SEQ ID NO: 191712 - DNA, 25 bp, Saccharomyces pastorianus
tattccagctgaacaagtcaccaga

SEQ ID NO: 191713 - DNA, 25 bp, Saccharomyces pastorianus
gttgactggtattccagctgaacaa

SEQ ID NO: 191714 - DNA, 25 bp, Saccharomyces pastorianus
ctggtattccagctgaacaagtcac

SEQ ID NO: 191715 - DNA, 25 bp, Saccharomyces pastorianus
gtattccagctgaacaagtcaccag

SEQ ID NO: 191716 - DNA, 25 bp, Saccharomyces pastorianus
ttgactggtattccagctgaacaag

SEQ ID NO: 191717 - DNA, 25 bp, Saccharomyces pastorianus
tgactggtattccagctgaacaagt

SEQ ID NO: 191718 - DNA, 25 bp, Saccharomyces pastorianus
tggtattccagctgaacaagtcacc

SEQ ID NO: 191719 - DNA, 25 bp, Saccharomyces pastorianus
actggtattccagctgaacaagtca

SEQ ID NO: 191720 - DNA, 25 bp, Saccharomyces pastorianus
ggtattccagctgaacaagtcacca

SEQ ID NO: 191721 - DNA, 25 bp, Saccharomyces pastorianus
attccagctgaacaagtcaccagag

SEQ ID NO: 191722 - DNA, 25 bp, Saccharomyces pastorianus
ggcgtcagccatgcctttacaagga

SEQ ID NO: 191723 - DNA, 25 bp, Saccharomyces pastorianus
agccgaggtttatgcgttttcgcga

SEQ ID NO: 191724 - DNA, 25 bp, Saccharomyces pastorianus
cgtttgctcatcatctttgtcgaaa

SEQ ID NO: 191725 - DNA, 25 bp, Saccharomyces pastorianus
ctagccgctccattattgtgtggtg

SEQ ID NO: 191726 - DNA, 25 bp, Saccharomyces pastorianus
tcaattgctgctcctgaagttaatg

SEQ ID NO: 191727 - DNA, 25 bp, Saccharomyces pastorianus
ggaggctccatcgtttcaattgctg

SEQ ID NO: 191728 - DNA, 25 bp, Saccharomyces pastorianus
caagcagtgctatcggatctaggaa

SEQ ID NO: 191729 - DNA, 25 bp, Saccharomyces pastorianus
ggtgctgatcactatattgctatgt

SEQ ID NO: 191730 - DNA, 25 bp, Saccharomyces pastorianus
aatactctaacgctttggaccttct

SEQ ID NO: 191731 - DNA, 25 bp, Saccharomyces pastorianus
ggtattacagttttctctccactac

SEQ ID NO: 191732 - DNA, 25 bp, Saccharomyces pastorianus
ggattctatgaaactcggtgctgat

SEQ ID NO: 191733 - DNA, 25 bp, Saccharomyces pastorianus
gctatgtcccaaaacacggctgaag

SEQ ID NO: 191734 - DNA, 25 bp, Saccharomyces pastorianus
actgttcccatgtttagatacgttg

SEQ ID NO: 191735 - DNA, 25 bp, Saccharomyces pastorianus
atgttggcggcttagtatctgtgac

SEQ ID NO: 191736 - DNA, 25 bp, Saccharomyces pastorianus
cagccagagtttgcagagtttcaat

SEQ ID NO: 191737 - DNA, 25 bp, Saccharomyces pastorianus
caattttgatgccttctgggattta

SEQ ID NO: 191738 - DNA, 25 bp, Saccharomyces pastorianus
taaaagccaataccgctatgtccca

SEQ ID NO: 191739 - DNA, 25 bp, Saccharomyces pastorianus
tggaggatgcagttctctccagttc

SEQ ID NO: 191740 - DNA, 25 bp, Saccharomyces pastorianus
gtttcaatcaagttctgttgtgcca

SEQ ID NO: 191741 - DNA, 25 bp, Saccharomyces pastorianus
aagatagttactttggtgcttacca

SEQ ID NO: 191742 - DNA, 25 bp, Saccharomyces pastorianus
aaaattggcctcttccagtatatcc

SEQ ID NO: 191743 - DNA, 25 bp, Saccharomyces pastorianus
ctctccagttccttcgcaataaaag

SEQ ID NO: 191744 - DNA, 25 bp, Saccharomyces pastorianus
cagtatcgatctaacgccagacaat

SEQ ID NO: 191745 - DNA, 25 bp, Saccharomyces pastorianus
ttagaaagtatagttccttttgaca

SEQ ID NO: 191746 - DNA, 25 bp, Saccharomyces pastorianus
aaatggaacgtgttgaacagagatt

SEQ ID NO: 191747 - DNA, 25 bp, Saccharomyces pastorianus
atagttccttttgacatcggatttc

SEQ ID NO: 191748 - DNA, 25 bp, Saccharomyces pastorianus
tattctggtccagcagggcaaggtc

SEQ ID NO: 191749 - DNA, 25 bp, Saccharomyces pastorianus
gaacattaaggctctcagtatcgat

SEQ ID NO: 191750 - DNA, 25 bp, Saccharomyces pastorianus
aaactactacgctacatcttatggt

SEQ ID NO: 191751 - DNA, 25 bp, Saccharomyces pastorianus
tatggtaaaactccctttagtatct

SEQ ID NO: 191752 - DNA, 25 bp, Saccharomyces pastorianus
gcatattctggtccagcagggcaag

SEQ ID NO: 191753 - DNA, 25 bp, Saccharomyces pastorianus
cgtgttgaacagagattttgagcgt

SEQ ID NO: 191754 - DNA, 25 bp, Saccharomyces pastorianus
tgttgaacagagattttgagcgtga

SEQ ID NO: 191755 - DNA, 25 bp, Saccharomyces pastorianus
gccatactcaccttcacttatattg

SEQ ID NO: 191756 - DNA, 25 bp, Saccharomyces pastorianus
catactcaccttcacttatattgat

SEQ ID NO: 191757 - DNA, 25 bp, Saccharomyces pastorianus
actcaccttcacttatattgatggg

SEQ ID NO: 191758 - DNA, 25 bp, Saccharomyces pastorianus
atattgatggggcatacgcacacgg

SEQ ID NO: 191759 - DNA, 25 bp, Saccharomyces pastorianus
atactcaccttcacttatattgatg

SEQ ID NO: 191760 - DNA, 25 bp, Saccharomyces pastorianus
caccttcacttatattgatggggca

SEQ ID NO: 191761 - DNA, 25 bp, Saccharomyces pastorianus
tactcaccttcacttatattgatgg

SEQ ID NO: 191762 - DNA, 25 bp, Saccharomyces pastorianus
tcaccttcacttatattgatggggc

SEQ ID NO: 191763 - DNA, 25 bp, Saccharomyces pastorianus
acttatattgatggggcatacgcac

SEQ ID NO: 191764 - DNA, 25 bp, Saccharomyces pastorianus
ccatactcaccttcacttatattga

SEQ ID NO: 191765 - DNA, 25 bp, Saccharomyces pastorianus
tgccatactcaccttcacttatatt

SEQ ID NO: 191766 - DNA, 25 bp, Saccharomyces pastorianus
gaagaacctgagttaaacgtgtcgc

SEQ ID NO: 191767 - DNA, 25 bp, Saccharomyces pastorianus
cttcttatcctacgaatctctaaaa

SEQ ID NO: 191768 - DNA, 25 bp, Saccharomyces pastorianus
ttaatcttaccgacgatgtaattag

SEQ ID NO: 191769 - DNA, 25 bp, Saccharomyces pastorianus
taaacgtgtcgcttaatcttaccga

SEQ ID NO: 191770 - DNA, 25 bp, Saccharomyces pastorianus
tcgcttaatcttaccgacgatgtaa

SEQ ID NO: 191771 - DNA, 25 bp, Saccharomyces pastorianus
gaccgataacatgtcagacttcgta

SEQ ID NO: 191772 - DNA, 25 bp, Saccharomyces pastorianus
gaacctgagttaaacgtgtcgctta

SEQ ID NO: 191773 - DNA, 25 bp, Saccharomyces pastorianus
gagttaaacgtgtcgcttaatctta

SEQ ID NO: 191774 - DNA, 25 bp, Saccharomyces pastorianus
taacatgtcagacttcgtaccaatt

SEQ ID NO: 191775 - DNA, 25 bp, Saccharomyces pastorianus
acgtgtcgcttaatcttaccgacga

SEQ ID NO: 191776 - DNA, 25 bp, Saccharomyces pastorianus
gtgtcgcttaatcttaccgacgatg

SEQ ID NO: 191777 - DNA, 25 bp, Saccharomyces pastorianus
ccgatatttatcgttcaagaacatc

SEQ ID NO: 191778 - DNA, 25 bp, Saccharomyces pastorianus
acatacttcatcaagcgtagccgat

SEQ ID NO: 191779 - DNA, 25 bp, Saccharomyces pastorianus
agcgtagccgatatttatcgttcaa

SEQ ID NO: 191780 - DNA, 25 bp, Saccharomyces pastorianus
catctactgatgtcaccacattagc

SEQ ID NO: 191781 - DNA, 25 bp, Saccharomyces pastorianus
atacttcatcaagcgtagccgatat

SEQ ID NO: 191782 - DNA, 25 bp, Saccharomyces pastorianus
tcaagcgtagccgatatttatcgtt

SEQ ID NO: 191783 - DNA, 25 bp, Saccharomyces pastorianus
tactgatgtcaccacattagcagct

SEQ ID NO: 191784 - DNA, 25 bp, Saccharomyces pastorianus
tcatcaagcgtagccgatatttatc

SEQ ID NO: 191785 - DNA, 25 bp, Saccharomyces pastorianus
gtagccgatatttatcgttcaagaa

SEQ ID NO: 191786 - DNA, 25 bp, Saccharomyces pastorianus
tctactgatgtcaccacattagcag

SEQ ID NO: 191787 - DNA, 25 bp, Saccharomyces pastorianus
acttcatcaagcgtagccgatattt

SEQ ID NO: 191788 - DNA, 25 bp, Saccharomyces pastorianus
ttcatccagcggtatactaacaaat

SEQ ID NO: 191789 - DNA, 25 bp, Saccharomyces pastorianus
gatcatccatttggattttatgcca

SEQ ID NO: 191790 - DNA, 25 bp, Saccharomyces pastorianus
gtagtagttttcctccttttatgct

SEQ ID NO: 191791 - DNA, 25 bp, Saccharomyces pastorianus
aggcatacacaatttcatccagcgg

SEQ ID NO: 191792 - DNA, 25 bp, Saccharomyces pastorianus
tttgtgtctacagcgtcttcaggaa

SEQ ID NO: 191793 - DNA, 25 bp, Saccharomyces pastorianus
gcttacattctgtaggcatacacaa

SEQ ID NO: 191794 - DNA, 25 bp, Saccharomyces pastorianus
gggaagctggtatcccaggcaaaga

SEQ ID NO: 191795 - DNA, 25 bp, Saccharomyces pastorianus
gatgggtccatggatttacagaaat

SEQ ID NO: 191796 - DNA, 25 bp, Saccharomyces pastorianus
ttttcctccttttatgcttacattc

SEQ ID NO: 191797 - DNA, 25 bp, Saccharomyces pastorianus
gatgaacttaacttgttttacttga

SEQ ID NO: 191798 - DNA, 25 bp, Saccharomyces pastorianus
agttaagaaagctgatgggtccatg

SEQ ID NO: 191799 - DNA, 25 bp, Saccharomyces pastorianus
gagaaacttagctaccttatgcggt

SEQ ID NO: 191800 - DNA, 25 bp, Saccharomyces pastorianus
gtacatgaagcctttacccgtcccg

SEQ ID NO: 191801 - DNA, 25 bp, Saccharomyces pastorianus
ccaatcgattagagcatgacggtat

SEQ ID NO: 191802 - DNA, 25 bp, Saccharomyces pastorianus
gataccggtgcctgattttaatatt

SEQ ID NO: 191803 - DNA, 25 bp, Saccharomyces pastorianus
gaatattttgagttttccaatcgat

SEQ ID NO: 191804 - DNA, 25 bp, Saccharomyces pastorianus
gtgagacgagaaacttagctacctt

SEQ ID NO: 191805 - DNA, 25 bp, Saccharomyces pastorianus
ccttatgcggtaatggtctagattt

SEQ ID NO: 191806 - DNA, 25 bp, Saccharomyces pastorianus
agattttgagataccggtgcctgat

SEQ ID NO: 191807 - DNA, 25 bp, Saccharomyces pastorianus
gaggtgacaatttggaagcagatcc

SEQ ID NO: 191808 - DNA, 25 bp, Saccharomyces pastorianus
tggttgcgagtgttgctaagaacga

SEQ ID NO: 191809 - DNA, 25 bp, Saccharomyces pastorianus
ccgtcccgaaagatttggttgcgag

SEQ ID NO: 191810 - DNA, 25 bp, Saccharomyces pastorianus
atcacagggttttgttatgagaaaa

SEQ ID NO: 191811 - DNA, 25 bp, Saccharomyces pastorianus
taatgaactcaaattatcacagggt

SEQ ID NO: 191812 - DNA, 25 bp, Saccharomyces pastorianus
aattatcacagggttttgttatgag

SEQ ID NO: 191813 - DNA, 25 bp, Saccharomyces pastorianus
tttccttagatgaagtaactgttcg

SEQ ID NO: 191814 - DNA, 25 bp, Saccharomyces pastorianus
gtaactgttcgtaatgaactcaaat

SEQ ID NO: 191815 - DNA, 25 bp, Saccharomyces pastorianus
gatgaagtaactgttcgtaatgaac

SEQ ID NO: 191816 - DNA, 25 bp, Saccharomyces pastorianus
aactagaagcttttccttagatgaa

SEQ ID NO: 191817 - DNA, 25 bp, Saccharomyces pastorianus
atggcagtaaatatcagcaaacagc

SEQ ID NO: 191818 - DNA, 25 bp, Saccharomyces pastorianus
atatcagcaaacagccaactagaag

SEQ ID NO: 191819 - DNA, 25 bp, Saccharomyces pastorianus
gaagcttttccttagatgaagtaac

SEQ ID NO: 191820 - DNA, 25 bp, Saccharomyces pastorianus
agccaactagaagcttttccttaga

SEQ ID NO: 191821 - DNA, 25 bp, Saccharomyces pastorianus
caagagacaaatgggctacgcggta

SEQ ID NO: 191822 - DNA, 25 bp, Saccharomyces pastorianus
ggttttgccgtccattatgctccat

SEQ ID NO: 191823 - DNA, 25 bp, Saccharomyces pastorianus
atgctccatctttcttaatgcaacg

SEQ ID NO: 191824 - DNA, 25 bp, Saccharomyces pastorianus
acttccacgttcaggttattcacta

SEQ ID NO: 191825 - DNA, 25 bp, Saccharomyces pastorianus
tttgcatcactacttacctgcttat

SEQ ID NO: 191826 - DNA, 25 bp, Saccharomyces pastorianus
tacgcggtagtgatcactttccttg

SEQ ID NO: 191827 - DNA, 25 bp, Saccharomyces pastorianus
tagtttcttatgttttccgcagcaa

SEQ ID NO: 191828 - DNA, 25 bp, Saccharomyces pastorianus
tggccacgccttggacataatagtt

SEQ ID NO: 191829 - DNA, 25 bp, Saccharomyces pastorianus
tgaaggactccaaggttgttaactt

SEQ ID NO: 191830 - DNA, 25 bp, Saccharomyces pastorianus
attatttcggtattcttgcccttgg

SEQ ID NO: 191831 - DNA, 25 bp, Saccharomyces pastorianus
attcactacttattgggttttgccg

SEQ ID NO: 191832 - DNA, 25 bp, Saccharomyces pastorianus
aggccactaacagcttctctttaag

SEQ ID NO: 191833 - DNA, 25 bp, Saccharomyces pastorianus
aggccatgccaagccatgcaatcta

SEQ ID NO: 191834 - DNA, 25 bp, Saccharomyces pastorianus
gggccctgcttgatatccagttcgg

SEQ ID NO: 191835 - DNA, 25 bp, Saccharomyces pastorianus
gaggcaaacccaccgaaatgtactt

SEQ ID NO: 191836 - DNA, 25 bp, Saccharomyces pastorianus
tcaaacaccacgctgtcaggccatg

SEQ ID NO: 191837 - DNA, 25 bp, Saccharomyces pastorianus
ctctttaagagtgaccatggttcgt

SEQ ID NO: 191838 - DNA, 25 bp, Saccharomyces pastorianus
attcggcactcggatcggtaacaat

SEQ ID NO: 191839 - DNA, 25 bp, Saccharomyces pastorianus
ccgtgcttgtagctgttagctgttt

SEQ ID NO: 191840 - DNA, 25 bp, Saccharomyces pastorianus
gatcatcctgctctacacgtttgta

SEQ ID NO: 191841 - DNA, 25 bp, Saccharomyces pastorianus
gtttgtacgttttctcttccgacat

SEQ ID NO: 191842 - DNA, 25 bp, Saccharomyces pastorianus
ggttcgtaacgaggccaattcggca

SEQ ID NO: 191843 - DNA, 25 bp, Saccharomyces pastorianus
tttgttcccattttcttatcaatag

SEQ ID NO: 191844 - DNA, 25 bp, Saccharomyces pastorianus
tgattttttgttcccattttcttat

SEQ ID NO: 191845 - DNA, 25 bp, Saccharomyces pastorianus
aatatcagagagatctcaccagcta

SEQ ID NO: 191846 - DNA, 25 bp, Saccharomyces pastorianus
taatattggtcttcagaaacctgga

SEQ ID NO: 191847 - DNA, 25 bp, Saccharomyces pastorianus
ctggctcataaaaacaggaactttt

SEQ ID NO: 191848 - DNA, 25 bp, Saccharomyces pastorianus
aacctggaaccacatgtgaactatt

SEQ ID NO: 191849 - DNA, 25 bp, Saccharomyces pastorianus
gaaatttataagtttatggcacttg

SEQ ID NO: 191850 - DNA, 25 bp, Saccharomyces pastorianus
tcagagagatctcaccagctacaac

SEQ ID NO: 191851 - DNA, 25 bp, Saccharomyces pastorianus
gaatctaaaaatttgaaactggctc

SEQ ID NO: 191852 - DNA, 25 bp, Saccharomyces pastorianus
ggtcttcagaaacctggaaccacat

SEQ ID NO: 191853 - DNA, 25 bp, Saccharomyces pastorianus
atggcacttgttaaaattgtttgga

SEQ ID NO: 191854 - DNA, 25 bp, Saccharomyces pastorianus
gttccctccatgatgcactatgtgt

SEQ ID NO: 191855 - DNA, 25 bp, Saccharomyces pastorianus
gtctctgttgttattcgtggtgcaa

SEQ ID NO: 191856 - DNA, 25 bp, Saccharomyces pastorianus
tgatgaaacagagcgttccctccat

SEQ ID NO: 191857 - DNA, 25 bp, Saccharomyces pastorianus
gcaagaccaaccgtctctgttgtta

SEQ ID NO: 191858 - DNA, 25 bp, Saccharomyces pastorianus
tgcactatgtgttattcgttgtcta

SEQ ID NO: 191859 - DNA, 25 bp, Saccharomyces pastorianus
gattgggttccgctgatttagttga

SEQ ID NO: 191860 - DNA, 25 bp, Saccharomyces pastorianus
ttcgtggtgcaaacaacatgatcat

SEQ ID NO: 191861 - DNA, 25 bp, Saccharomyces pastorianus
tgtacaggcttttatttggcaagaa

SEQ ID NO: 191862 - DNA, 25 bp, Saccharomyces pastorianus
tgggttgtaagccaattgctgatat

SEQ ID NO: 191863 - DNA, 25 bp, Saccharomyces pastorianus
aagttgtcacagaattgcgctctaa

SEQ ID NO: 191864 - DNA, 25 bp, Saccharomyces pastorianus
aaatcgagtttctgtcgaagggctt

SEQ ID NO: 191865 - DNA, 25 bp, Saccharomyces pastorianus
gagcctttgcgtaccatattattct

SEQ ID NO: 191866 - DNA, 25 bp, Saccharomyces pastorianus
aagcatcagtgagatgagctatgat

SEQ ID NO: 191867 - DNA, 25 bp, Saccharomyces pastorianus
catcttcgtcttctaacagagaatg

SEQ ID NO: 191868 - DNA, 25 bp, Saccharomyces pastorianus
ccactctaatatgttttctcttcct

SEQ ID NO: 191869 - DNA, 25 bp, Saccharomyces pastorianus
tgcagaagcgcagtttgaaaatttt

SEQ ID NO: 191870 - DNA, 25 bp, Saccharomyces pastorianus
cagagaatggtcatcatctttatta

SEQ ID NO: 191871 - DNA, 25 bp, Saccharomyces pastorianus
accatattattctatacacccactc

SEQ ID NO: 191872 - DNA, 25 bp, Saccharomyces pastorianus
gagctatgatgagatgagcttcatt

SEQ ID NO: 191873 - DNA, 25 bp, Saccharomyces pastorianus
gtcttagttctgtttgagcctttgc

SEQ ID NO: 191874 - DNA, 25 bp, Saccharomyces pastorianus
atggctaagacttcttcctcatctt

SEQ ID NO: 191875 - DNA, 25 bp, Saccharomyces pastorianus
atatgttttctcttcctccaaaact

SEQ ID NO: 191876 - DNA, 25 bp, Saccharomyces pastorianus
gtagatcgcctagcgtttgaccaaa

SEQ ID NO: 191877 - DNA, 25 bp, Saccharomyces pastorianus
gatcgcctagcgtttgaccaaattt

SEQ ID NO: 191878 - DNA, 25 bp, Saccharomyces pastorianus
tttttctctgttacgagggatatat

SEQ ID NO: 191879 - DNA, 25 bp, Saccharomyces pastorianus
gattgttggccgtagatcgcctagc

SEQ ID NO: 191880 - DNA, 25 bp, Saccharomyces pastorianus
gcttgttagttcattataagtgcta

SEQ ID NO: 191881 - DNA, 25 bp, Saccharomyces pastorianus
gcgtttgaccaaatttaattctcct

SEQ ID NO: 191882 - DNA, 25 bp, Saccharomyces pastorianus
agaggttttgctgaattttaatagg

SEQ ID NO: 191883 - DNA, 25 bp, Saccharomyces pastorianus
tgatgcctgtgcttgttagttcatt

SEQ ID NO: 191884 - DNA, 25 bp, Saccharomyces pastorianus
gaagtttacgttatgattgttggcc

SEQ ID NO: 191885 - DNA, 25 bp, Saccharomyces pastorianus
gggatatatgatgcctgtgcttgtt

SEQ ID NO: 191886 - DNA, 25 bp, Saccharomyces pastorianus
gcctgtgcttgttagttcattataa

SEQ ID NO: 191887 - DNA, 25 bp, Saccharomyces pastorianus
tggtgcatttttggtgtttagggaa

SEQ ID NO: 191888 - DNA, 25 bp, Saccharomyces pastorianus
gaaaacggtcgcatttttgatctaa

SEQ ID NO: 191889 - DNA, 25 bp, Saccharomyces pastorianus
cttgtttttgcctcgttaggtaatg

SEQ ID NO: 191890 - DNA, 25 bp, Saccharomyces pastorianus
acgatgaaggaactgctttactata

SEQ ID NO: 191891 - DNA, 25 bp, Saccharomyces pastorianus
gtgactggtgcatttttggtgttta

SEQ ID NO: 191892 - DNA, 25 bp, Saccharomyces pastorianus
gcctcgttaggtaatgataagcttt

SEQ ID NO: 191893 - DNA, 25 bp, Saccharomyces pastorianus
tcattgaaactgaagtgactggtgc

SEQ ID NO: 191894 - DNA, 25 bp, Saccharomyces pastorianus
aaacggtcgcatttttgatctaaat

SEQ ID NO: 191895 - DNA, 25 bp, Saccharomyces pastorianus
atttttgatctaaatggaccaacga

SEQ ID NO: 191896 - DNA, 25 bp, Saccharomyces pastorianus
acaggatacaatgtacgatttacag

SEQ ID NO: 191897 - DNA, 25 bp, Saccharomyces pastorianus
tggaccaacgatgaaggaactgctt

SEQ ID NO: 191898 - DNA, 25 bp, Saccharomyces pastorianus
aaacgcggaaaatggacaaatgaca

SEQ ID NO: 191899 - DNA, 25 bp, Saccharomyces pastorianus
ggatggaaattcgtgtgcaggttac

SEQ ID NO: 191900 - DNA, 25 bp, Saccharomyces pastorianus
gatagatttatcaccagccttccct

SEQ ID NO: 191901 - DNA, 25 bp, Saccharomyces pastorianus
cagccttccctgaagatcttatctt

SEQ ID NO: 191902 - DNA, 25 bp, Saccharomyces pastorianus
ggaaattcgtgtgcaggttacaaat

SEQ ID NO: 191903 - DNA, 25 bp, Saccharomyces pastorianus
tggtccaaattgtacccttactaca

SEQ ID NO: 191904 - DNA, 25 bp, Saccharomyces pastorianus
tttatcaccagccttccctgaagat

SEQ ID NO: 191905 - DNA, 25 bp, Saccharomyces pastorianus
gaagatcttatcttagggatggaaa

SEQ ID NO: 191906 - DNA, 25 bp, Saccharomyces pastorianus
aaagaaggtgacgattgctgatatt

SEQ ID NO: 191907 - DNA, 25 bp, Saccharomyces pastorianus
gattcggtgggttgatgatagattt

SEQ ID NO: 191908 - DNA, 25 bp, Saccharomyces pastorianus
attgctgatattggctgtggattcg

SEQ ID NO: 191909 - DNA, 25 bp, Saccharomyces pastorianus
ttttccaccgataaagcccaagact

SEQ ID NO: 191910 - DNA, 25 bp, Saccharomyces pastorianus
gagggcgcttgtgtcgaacccttat

SEQ ID NO: 191911 - DNA, 25 bp, Saccharomyces pastorianus
gtcaagccattgataacccacaaat

SEQ ID NO: 191912 - DNA, 25 bp, Saccharomyces pastorianus
cattcggtgattatcgtgacgctgt

SEQ ID NO: 191913 - DNA, 25 bp, Saccharomyces pastorianus
gtgacgctgtgaacttggttgccac

SEQ ID NO: 191914 - DNA, 25 bp, Saccharomyces pastorianus
gatgtttgcattgatgccgctgtca

SEQ ID NO: 191915 - DNA, 25 bp, Saccharomyces pastorianus
gactacaacattgcccatggtggag

SEQ ID NO: 191916 - DNA, 25 bp, Saccharomyces pastorianus
aagttgttgtatttggtgcaggtcc

SEQ ID NO: 191917 - DNA, 25 bp, Saccharomyces pastorianus
aaagatttcggagccacaaacactt

SEQ ID NO: 191918 - DNA, 25 bp, Saccharomyces pastorianus
gatgtttccgttattcattcggtga

SEQ ID NO: 191919 - DNA, 25 bp, Saccharomyces pastorianus
gaacccttatcagtcggtgtacact

SEQ ID NO: 191920 - DNA, 25 bp, Saccharomyces pastorianus
gccaaatactgatacctcatcaaaa

SEQ ID NO: 191921 - DNA, 25 bp, Saccharomyces pastorianus
agtcgccaaatactgatacctcatc

SEQ ID NO: 191922 - DNA, 25 bp, Saccharomyces pastorianus
atagtcgccaaatactgatacctca

SEQ ID NO: 191923 - DNA, 25 bp, Saccharomyces pastorianus
tagtcgccaaatactgatacctcat

SEQ ID NO: 191924 - DNA, 25 bp, Saccharomyces pastorianus
taatagtcgccaaatactgatacct

SEQ ID NO: 191925 - DNA, 25 bp, Saccharomyces pastorianus
cattcaaataatagtcgccaaatac

SEQ ID NO: 191926 - DNA, 25 bp, Saccharomyces pastorianus
aatagtcgccaaatactgatacctc

SEQ ID NO: 191927 - DNA, 25 bp, Saccharomyces pastorianus
gtcgccaaatactgatacctcatca

SEQ ID NO: 191928 - DNA, 25 bp, Saccharomyces pastorianus
ataatagtcgccaaatactgatacc

SEQ ID NO: 191929 - DNA, 25 bp, Saccharomyces pastorianus
tcgccaaatactgatacctcatcaa

SEQ ID NO: 191930 - DNA, 25 bp, Saccharomyces pastorianus
ccaaatactgatacctcatcaaaat

SEQ ID NO: 191931 - DNA, 25 bp, Saccharomyces pastorianus
gaggacgactgctttactcgtgaaa

SEQ ID NO: 191932 - DNA, 25 bp, Saccharomyces pastorianus
agcatttttgccttgcatttcgtat

SEQ ID NO: 191933 - DNA, 25 bp, Saccharomyces pastorianus
tgttggcctggaagacgttcagctt

SEQ ID NO: 191934 - DNA, 25 bp, Saccharomyces pastorianus
gtatctgcgtgtcacagcatttttg

SEQ ID NO: 191935 - DNA, 25 bp, Saccharomyces pastorianus
ttgtgtcctggattgtttttcctca

SEQ ID NO: 191936 - DNA, 25 bp, Saccharomyces pastorianus
gtttttcctcatgatggtgtggctt

SEQ ID NO: 191937 - DNA, 25 bp, Saccharomyces pastorianus
tggtgtggcttttccaaaatatgag

SEQ ID NO: 191938 - DNA, 25 bp, Saccharomyces pastorianus
gatattcatcggtccaagcttactt

SEQ ID NO: 191939 - DNA, 25 bp, Saccharomyces pastorianus
atggcttgcttttttgaactgtatc

SEQ ID NO: 191940 - DNA, 25 bp, Saccharomyces pastorianus
aagacgttcagcttcccaaggatat

SEQ ID NO: 191941 - DNA, 25 bp, Saccharomyces pastorianus
ctatttactctctaccattatggct

SEQ ID NO: 191942 - DNA, 25 bp, Saccharomyces pastorianus
gttcgattcactgataagcaacttg

SEQ ID NO: 191943 - DNA, 25 bp, Saccharomyces pastorianus
aacaacctgaaatgttcgattcact

SEQ ID NO: 191944 - DNA, 25 bp, Saccharomyces pastorianus
ggaagtacataactatacgctatgg

SEQ ID NO: 191945 - DNA, 25 bp, Saccharomyces pastorianus
gccacatgtatattgaacaacctga

SEQ ID NO: 191946 - DNA, 25 bp, Saccharomyces pastorianus
gataagcaacttgaataatcagttt

SEQ ID NO: 191947 - DNA, 25 bp, Saccharomyces pastorianus
gatgactcgttgattaaaatcctaa

SEQ ID NO: 191948 - DNA, 25 bp, Saccharomyces pastorianus
aggatatgcttgatgatgactcgtt

SEQ ID NO: 191949 - DNA, 25 bp, Saccharomyces pastorianus
atgcttgatgatgactcgttgatta

SEQ ID NO: 191950 - DNA, 25 bp, Saccharomyces pastorianus
ggcagatatgatatttcaaagttca

SEQ ID NO: 191951 - DNA, 25 bp, Saccharomyces pastorianus
gaaatgttcgattcactgataagca

SEQ ID NO: 191952 - DNA, 25 bp, Saccharomyces pastorianus
atcctaatcttgttaacaaacatgg

SEQ ID NO: 191953 - DNA, 25 bp, Saccharomyces pastorianus
ggcacgaagttgttgtttttccaat

SEQ ID NO: 191954 - DNA, 25 bp, Saccharomyces pastorianus
gagggacctccttggtattgatctt

SEQ ID NO: 191955 - DNA, 25 bp, Saccharomyces pastorianus
atcaagtcctttaggctcttcttct

SEQ ID NO: 191956 - DNA, 25 bp, Saccharomyces pastorianus
attgatcttgttctcttactccttt

SEQ ID NO: 191957 - DNA, 25 bp, Saccharomyces pastorianus
acagtcttctttctacaacgttgat

SEQ ID NO: 191958 - DNA, 25 bp, Saccharomyces pastorianus
gccacctgtgttctcagacagattt

SEQ ID NO: 191959 - DNA, 25 bp, Saccharomyces pastorianus
tagcctgtcaagctctttcgaggga

SEQ ID NO: 191960 - DNA, 25 bp, Saccharomyces pastorianus
ttactccttttttggcgtccagata

SEQ ID NO: 191961 - DNA, 25 bp, Saccharomyces pastorianus
ccttggagggcttttcttcattgaa

SEQ ID NO: 191962 - DNA, 25 bp, Saccharomyces pastorianus
gtgcacaagctcttttcggcattat

SEQ ID NO: 191963 - DNA, 25 bp, Saccharomyces pastorianus
ttgctggagcaacttcggtgcacaa

SEQ ID NO: 191964 - DNA, 25 bp, Saccharomyces pastorianus
aaccaaccatattacaagtcacaaa

SEQ ID NO: 191965 - DNA, 25 bp, Saccharomyces pastorianus
gtaaccaaccatattacaagtcaca

SEQ ID NO: 191966 - DNA, 25 bp, Saccharomyces pastorianus
tggtaaccaaccatattacaagtca

SEQ ID NO: 191967 - DNA, 25 bp, Saccharomyces pastorianus
atggtaaccaaccatattacaagtc

SEQ ID NO: 191968 - DNA, 25 bp, Saccharomyces pastorianus
tatggtaaccaaccatattacaagt

SEQ ID NO: 191969 - DNA, 25 bp, Saccharomyces pastorianus
accaaccatattacaagtcacaaat

SEQ ID NO: 191970 - DNA, 25 bp, Saccharomyces pastorianus
ggtaaccaaccatattacaagtcac

SEQ ID NO: 191971 - DNA, 25 bp, Saccharomyces pastorianus
taaccaaccatattacaagtcacaa

SEQ ID NO: 191972 - DNA, 25 bp, Saccharomyces pastorianus
gagagtaacaataagcgcgatccat

SEQ ID NO: 191973 - DNA, 25 bp, Saccharomyces pastorianus
gtatagtacttctactacaatccat

SEQ ID NO: 191974 - DNA, 25 bp, Saccharomyces pastorianus
gcgcacaacccggagaatgatttgg

SEQ ID NO: 191975 - DNA, 25 bp, Saccharomyces pastorianus
aacccggagaatgatttggagagta

SEQ ID NO: 191976 - DNA, 25 bp, Saccharomyces pastorianus
tcagagagcgcacaacccggagaat

SEQ ID NO: 191977 - DNA, 25 bp, Saccharomyces pastorianus
aagcgcgatccattcgaagcgtata

SEQ ID NO: 191978 - DNA, 25 bp, Saccharomyces pastorianus
gatccattcgaagcgtatagtactt

SEQ ID NO: 191979 - DNA, 25 bp, Saccharomyces pastorianus
gagagcgcacaacccggagaatgat

SEQ ID NO: 191980 - DNA, 25 bp, Saccharomyces pastorianus
gaagcgtatagtacttctactacaa

SEQ ID NO: 191981 - DNA, 25 bp, Saccharomyces pastorianus
aaaactcagagagcgcacaacccgg

SEQ ID NO: 191982 - DNA, 25 bp, Saccharomyces pastorianus
aataagcgcgatccattcgaagcgt

SEQ ID NO: 191983 - DNA, 25 bp, Saccharomyces pastorianus
ttcgttttgtccttcgtgtaacaat

SEQ ID NO: 191984 - DNA, 25 bp, Saccharomyces pastorianus
ggtgagagtgcttactttttccaac

SEQ ID NO: 191985 - DNA, 25 bp, Saccharomyces pastorianus
tgatgttcttggtggtggttgggac

SEQ ID NO: 191986 - DNA, 25 bp, Saccharomyces pastorianus
gtatatacattagcatgccgttcat

SEQ ID NO: 191987 - DNA, 25 bp, Saccharomyces pastorianus
gtccttcgtgtaacaatatgctact

SEQ ID NO: 191988 - DNA, 25 bp, Saccharomyces pastorianus
tagcatgccgttcatgtccatatga

SEQ ID NO: 191989 - DNA, 25 bp, Saccharomyces pastorianus
tatgctactgataacgagtggcgat

SEQ ID NO: 191990 - DNA, 25 bp, Saccharomyces pastorianus
tttccaactacaaattaggtcagct

SEQ ID NO: 191991 - DNA, 25 bp, Saccharomyces pastorianus
atgccgttcatgtccatatgagttt

SEQ ID NO: 191992 - DNA, 25 bp, Saccharomyces pastorianus
gagtgcttactttttccaactacaa

SEQ ID NO: 191993 - DNA, 25 bp, Saccharomyces pastorianus
atgtccatatgagtttcctatagag

SEQ ID NO: 191994 - DNA, 25 bp, Saccharomyces pastorianus
aaccaaccatattacaagtcacaaa

SEQ ID NO: 191995 - DNA, 25 bp, Saccharomyces pastorianus
gtaaccaaccatattacaagtcaca

SEQ ID NO: 191996 - DNA, 25 bp, Saccharomyces pastorianus
tggtaaccaaccatattacaagtca

SEQ ID NO: 191997 - DNA, 25 bp, Saccharomyces pastorianus
atggtaaccaaccatattacaagtc

SEQ ID NO: 191998 - DNA, 25 bp, Saccharomyces pastorianus
tatggtaaccaaccatattacaagt

SEQ ID NO: 191999 - DNA, 25 bp, Saccharomyces pastorianus
accaaccatattacaagtcacaaat

SEQ ID NO: 192000 - DNA, 25 bp, Saccharomyces pastorianus
ggtaaccaaccatattacaagtcac

SEQ ID NO: 192001 - DNA, 25 bp, Saccharomyces pastorianus
taaccaaccatattacaagtcacaa

SEQ ID NO: 192002 - DNA, 25 bp, Saccharomyces pastorianus
actgactggaccgaacatagccaat

SEQ ID NO: 192003 - DNA, 25 bp, Saccharomyces pastorianus
cagttagatatggacagtgggagga

SEQ ID NO: 192004 - DNA, 25 bp, Saccharomyces pastorianus
gaactgactggaccgaacatagcca

SEQ ID NO: 192005 - DNA, 25 bp, Saccharomyces pastorianus
aggagggaaatggacagaactgact

SEQ ID NO: 192006 - DNA, 25 bp, Saccharomyces pastorianus
gaacatagccaatatttgggaacat

SEQ ID NO: 192007 - DNA, 25 bp, Saccharomyces pastorianus
gactggaccgaacatagccaatatt

SEQ ID NO: 192008 - DNA, 25 bp, Saccharomyces pastorianus
cagaactgactggaccgaacatagc

SEQ ID NO: 192009 - DNA, 25 bp, Saccharomyces pastorianus
tgactggaccgaacatagccaatat

SEQ ID NO: 192010 - DNA, 25 bp, Saccharomyces pastorianus
ggaaatggacagaactgactggacc

SEQ ID NO: 192011 - DNA, 25 bp, Saccharomyces pastorianus
gccaatatttgggaacatataggga

SEQ ID NO: 192012 - DNA, 25 bp, Saccharomyces pastorianus
ggaccgaacatagccaatatttggg

SEQ ID NO: 192013 - DNA, 25 bp, Saccharomyces pastorianus
aaccaaccatattacaagtcacaaa

SEQ ID NO: 192014 - DNA, 25 bp, Saccharomyces pastorianus
gtaaccaaccatattacaagtcaca

SEQ ID NO: 192015 - DNA, 25 bp, Saccharomyces pastorianus
tggtaaccaaccatattacaagtca

SEQ ID NO: 192016 - DNA, 25 bp, Saccharomyces pastorianus
atggtaaccaaccatattacaagtc

SEQ ID NO: 192017 - DNA, 25 bp, Saccharomyces pastorianus
tatggtaaccaaccatattacaagt

SEQ ID NO: 192018 - DNA, 25 bp, Saccharomyces pastorianus
accaaccatattacaagtcacaaat

SEQ ID NO: 192019 - DNA, 25 bp, Saccharomyces pastorianus
ggtaaccaaccatattacaagtcac

SEQ ID NO: 192020 - DNA, 25 bp, Saccharomyces pastorianus
taaccaaccatattacaagtcacaa

SEQ ID NO: 192021 - DNA, 25 bp, Saccharomyces pastorianus
aaccaaccatattacaagtcacaaa

SEQ ID NO: 192022 - DNA, 25 bp, Saccharomyces pastorianus
gtaaccaaccatattacaagtcaca

SEQ ID NO: 192023 - DNA, 25 bp, Saccharomyces pastorianus
tggtaaccaaccatattacaagtca

SEQ ID NO: 192024 - DNA, 25 bp, Saccharomyces pastorianus
atggtaaccaaccatattacaagtc

SEQ ID NO: 192025 - DNA, 25 bp, Saccharomyces pastorianus
tatggtaaccaaccatattacaagt

SEQ ID NO: 192026 - DNA, 25 bp, Saccharomyces pastorianus
accaaccatattacaagtcacaaat

SEQ ID NO: 192027 - DNA, 25 bp, Saccharomyces pastorianus
ggtaaccaaccatattacaagtcac

SEQ ID NO: 192028 - DNA, 25 bp, Saccharomyces pastorianus
taaccaaccatattacaagtcacaa

SEQ ID NO: 192029 - DNA, 25 bp, Saccharomyces pastorianus
acattgagctttactgcacgttccc

SEQ ID NO: 192030 - DNA, 25 bp, Saccharomyces pastorianus
gtccttagctcgaacaacgccgata

SEQ ID NO: 192031 - DNA, 25 bp, Saccharomyces pastorianus
aacgccgataggcatcaagttacat

SEQ ID NO: 192032 - DNA, 25 bp, Saccharomyces pastorianus
ggctaactatcgacgttcacccttc

SEQ ID NO: 192033 - DNA, 25 bp, Saccharomyces pastorianus
tatcacatcgtccttagctcgaaca

SEQ ID NO: 192034 - DNA, 25 bp, Saccharomyces pastorianus
gttcacaacggctaactatcgacgt

SEQ ID NO: 192035 - DNA, 25 bp, Saccharomyces pastorianus
tttactgcacgttcccgcatgatgc

SEQ ID NO: 192036 - DNA, 25 bp, Saccharomyces pastorianus
acgttcccgcatgatgccattgact

SEQ ID NO: 192037 - DNA, 25 bp, Saccharomyces pastorianus
atcacttttatttagttcacaacgg

SEQ ID NO: 192038 - DNA, 25 bp, Saccharomyces pastorianus
taggcatcaagttacattgagcttt

SEQ ID NO: 192039 - DNA, 25 bp, Saccharomyces pastorianus
tagctcgaacaacgccgataggcat

SEQ ID NO: 192040 - DNA, 25 bp, Saccharomyces pastorianus
gcaacatttgataatgatgctatga

SEQ ID NO: 192041 - DNA, 25 bp, Saccharomyces pastorianus
gatgacataaatactcctgaaagtt

SEQ ID NO: 192042 - DNA, 25 bp, Saccharomyces pastorianus
ccgtttagtgttatcgatgggttgt

SEQ ID NO: 192043 - DNA, 25 bp, Saccharomyces pastorianus
ttcacgggaaaatcaaaaaggagat

SEQ ID NO: 192044 - DNA, 25 bp, Saccharomyces pastorianus
ctcctgaaagtttgagctcatgctc

SEQ ID NO: 192045 - DNA, 25 bp, Saccharomyces pastorianus
gtgataaaccgtttagtgttatcga

SEQ ID NO: 192046 - DNA, 25 bp, Saccharomyces pastorianus
tactcctgaaagtttgagctcatgc

SEQ ID NO: 192047 - DNA, 25 bp, Saccharomyces pastorianus
gtttgagctcatgctcaagctcagt

SEQ ID NO: 192048 - DNA, 25 bp, Saccharomyces pastorianus
gaaagtttgagctcatgctcaagct

SEQ ID NO: 192049 - DNA, 25 bp, Saccharomyces pastorianus
gtgatgacataaatactcctgaaag

SEQ ID NO: 192050 - DNA, 25 bp, Saccharomyces pastorianus
aaggagatgcaacatttgataatga

SEQ ID NO: 192051 - DNA, 25 bp, Saccharomyces pastorianus
ccaaggtggtgttttgccaaacatc

SEQ ID NO: 192052 - DNA, 25 bp, Saccharomyces pastorianus
tagggataacaagaagaccagaatt

SEQ ID NO: 192053 - DNA, 25 bp, Saccharomyces pastorianus
gaagaccagaattattccaagacat

SEQ ID NO: 192054 - DNA, 25 bp, Saccharomyces pastorianus
tttgccaaacatccatcaaaacttg

SEQ ID NO: 192055 - DNA, 25 bp, Saccharomyces pastorianus
gactgctgtcttggaatatttggcc

SEQ ID NO: 192056 - DNA, 25 bp, Saccharomyces pastorianus
ggtgttttgccaaacatccatcaaa

SEQ ID NO: 192057 - DNA, 25 bp, Saccharomyces pastorianus
acaagctattgggtaacgttaccat

SEQ ID NO: 192058 - DNA, 25 bp, Saccharomyces pastorianus
agtctacttgactgctgtcttggaa

SEQ ID NO: 192059 - DNA, 25 bp, Saccharomyces pastorianus
atgctgctagggataacaagaagac

SEQ ID NO: 192060 - DNA, 25 bp, Saccharomyces pastorianus
aaggctggtttgacattcccagtcg

SEQ ID NO: 192061 - DNA, 25 bp, Saccharomyces pastorianus
gacgaattgaacaagctattgggta

SEQ ID NO: 192062 - DNA, 25 bp, Saccharomyces pastorianus
ctaggcgaaagtgatgaggaaattc

SEQ ID NO: 192063 - DNA, 25 bp, Saccharomyces pastorianus
gtgacaatttgtttattcgtagatg

SEQ ID NO: 192064 - DNA, 25 bp, Saccharomyces pastorianus
taaatctaggcgaaagtgatgagga

SEQ ID NO: 192065 - DNA, 25 bp, Saccharomyces pastorianus
gacaatttgtttattcgtagatgat

SEQ ID NO: 192066 - DNA, 25 bp, Saccharomyces pastorianus
cagtcaagtgacaatttgtttattc

SEQ ID NO: 192067 - DNA, 25 bp, Saccharomyces pastorianus
ttgtttattcgtagatgatatggta

SEQ ID NO: 192068 - DNA, 25 bp, Saccharomyces pastorianus
gcttaagatgcaatacgacaccaag

SEQ ID NO: 192069 - DNA, 25 bp, Saccharomyces pastorianus
agtgacaatttgtttattcgtagat

SEQ ID NO: 192070 - DNA, 25 bp, Saccharomyces pastorianus
aaaacagtcaagtgacaatttgttt

SEQ ID NO: 192071 - DNA, 25 bp, Saccharomyces pastorianus
aagcttaagatgcaatacgacacca

SEQ ID NO: 192072 - DNA, 25 bp, Saccharomyces pastorianus
gtgatgaggaaattcaatatgacat

SEQ ID NO: 192073 - DNA, 25 bp, Saccharomyces pastorianus
gcaaacctgttaagccaacaaataa

SEQ ID NO: 192074 - DNA, 25 bp, Saccharomyces pastorianus
ggaatacgagagataagcaattaat

SEQ ID NO: 192075 - DNA, 25 bp, Saccharomyces pastorianus
gcacaaaagcaaacctgttaagcca

SEQ ID NO: 192076 - DNA, 25 bp, Saccharomyces pastorianus
atggcacaaaagcaaacctgttaag

SEQ ID NO: 192077 - DNA, 25 bp, Saccharomyces pastorianus
tggcacaaaagcaaacctgttaagc

SEQ ID NO: 192078 - DNA, 25 bp, Saccharomyces pastorianus
gaattgatacagttcatatggaata

SEQ ID NO: 192079 - DNA, 25 bp, Saccharomyces pastorianus
gatacagttcatatggaatacgaga

SEQ ID NO: 192080 - DNA, 25 bp, Saccharomyces pastorianus
acagttcatatggaatacgagagat

SEQ ID NO: 192081 - DNA, 25 bp, Saccharomyces pastorianus
caaaagcaaacctgttaagccaaca

SEQ ID NO: 192082 - DNA, 25 bp, Saccharomyces pastorianus
tatggaatacgagagataagcaatt

SEQ ID NO: 192083 - DNA, 25 bp, Saccharomyces pastorianus
aagcaaacctgttaagccaacaaat

SEQ ID NO: 192084 - DNA, 25 bp, Saccharomyces pastorianus
tgaccaagccaagccagataaaatc

SEQ ID NO: 192085 - DNA, 25 bp, Saccharomyces pastorianus
gaaagggaagaaatcttgacttctt

SEQ ID NO: 192086 - DNA, 25 bp, Saccharomyces pastorianus
gtgaaatgctgggtactatggtaaa

SEQ ID NO: 192087 - DNA, 25 bp, Saccharomyces pastorianus
gattctgtccagcaagccaaaaatt

SEQ ID NO: 192088 - DNA, 25 bp, Saccharomyces pastorianus
agtaggtactgattctgtccagcaa

SEQ ID NO: 192089 - DNA, 25 bp, Saccharomyces pastorianus
tctttattatctccaagtgtgacac

SEQ ID NO: 192090 - DNA, 25 bp, Saccharomyces pastorianus
gtccagcaagccaaaaattttaatg

SEQ ID NO: 192091 - DNA, 25 bp, Saccharomyces pastorianus
ttggagaggctttagtaggtactga

SEQ ID NO: 192092 - DNA, 25 bp, Saccharomyces pastorianus
gtactgattctgtccagcaagccaa

SEQ ID NO: 192093 - DNA, 25 bp, Saccharomyces pastorianus
agccaagccagataaaatcattatg

SEQ ID NO: 192094 - DNA, 25 bp, Saccharomyces pastorianus
tttaatgatgccttcggaaagggaa

SEQ ID NO: 192095 - DNA, 25 bp, Saccharomyces pastorianus
gaacgtagatcatgatcgtccacct

SEQ ID NO: 192096 - DNA, 25 bp, Saccharomyces pastorianus
gtatgtgaggaaaacccctctgatg

SEQ ID NO: 192097 - DNA, 25 bp, Saccharomyces pastorianus
atcgtccacctgtgtatgtgaggaa

SEQ ID NO: 192098 - DNA, 25 bp, Saccharomyces pastorianus
aaaacccctctgatgacatttccat

SEQ ID NO: 192099 - DNA, 25 bp, Saccharomyces pastorianus
ccctctgatgacatttccataccat

SEQ ID NO: 192100 - DNA, 25 bp, Saccharomyces pastorianus
catgatcgtccacctgtgtatgtga

SEQ ID NO: 192101 - DNA, 25 bp, Saccharomyces pastorianus
aaaaaccgtatcattctccgatgac

SEQ ID NO: 192102 - DNA, 25 bp, Saccharomyces pastorianus
tagatcatgatcgtccacctgtgta

SEQ ID NO: 192103 - DNA, 25 bp, Saccharomyces pastorianus
taacaacgcaccaaaatcgtgagaa

SEQ ID NO: 192104 - DNA, 25 bp, Saccharomyces pastorianus
gacacaacattaacaacgcaccaaa

SEQ ID NO: 192105 - DNA, 25 bp, Saccharomyces pastorianus
gtatcattctccgatgacacaacat

SEQ ID NO: 192106 - DNA, 25 bp, Saccharomyces pastorianus
ttcaaggtggcgatttcactcacag

SEQ ID NO: 192107 - DNA, 25 bp, Saccharomyces pastorianus
gaaacacgttcaaagatgagaattt

SEQ ID NO: 192108 - DNA, 25 bp, Saccharomyces pastorianus
tcaaggtggcgatttcactcacaga

SEQ ID NO: 192109 - DNA, 25 bp, Saccharomyces pastorianus
aaggtggcgatttcactcacagatc

SEQ ID NO: 192110 - DNA, 25 bp, Saccharomyces pastorianus
atgattcaaggtggcgatttcactc

SEQ ID NO: 192111 - DNA, 25 bp, Saccharomyces pastorianus
gtggcgatttcactcacagatcagg

SEQ ID NO: 192112 - DNA, 25 bp, Saccharomyces pastorianus
attcaaggtggcgatttcactcaca

SEQ ID NO: 192113 - DNA, 25 bp, Saccharomyces pastorianus
caaggtggcgatttcactcacagat

SEQ ID NO: 192114 - DNA, 25 bp, Saccharomyces pastorianus
aggtggcgatttcactcacagatca

SEQ ID NO: 192115 - DNA, 25 bp, Saccharomyces pastorianus
ggtggcgatttcactcacagatcag

SEQ ID NO: 192116 - DNA, 25 bp, Saccharomyces pastorianus
aacacgttcaaagatgagaattttg

SEQ ID NO: 192117 - DNA, 25 bp, Saccharomyces pastorianus
gacctgaggccggacagtcggtacc

SEQ ID NO: 192118 - DNA, 25 bp, Saccharomyces pastorianus
catccaagatggacctgaggccgga

SEQ ID NO: 192119 - DNA, 25 bp, Saccharomyces pastorianus
taactatatggagaccttataatct

SEQ ID NO: 192120 - DNA, 25 bp, Saccharomyces pastorianus
aggctgactctatcaacgttgccat

SEQ ID NO: 192121 - DNA, 25 bp, Saccharomyces pastorianus
gactttacagttaatacatagattt

SEQ ID NO: 192122 - DNA, 25 bp, Saccharomyces pastorianus
gtggcaatataaggctgactctatc

SEQ ID NO: 192123 - DNA, 25 bp, Saccharomyces pastorianus
tctatcaacgttgccatccaagatg

SEQ ID NO: 192124 - DNA, 25 bp, Saccharomyces pastorianus
tgactctatcaacgttgccatccaa

SEQ ID NO: 192125 - DNA, 25 bp, Saccharomyces pastorianus
aagatggacctgaggccggacagtc

SEQ ID NO: 192126 - DNA, 25 bp, Saccharomyces pastorianus
gattatttcaagactttacagttaa

SEQ ID NO: 192127 - DNA, 25 bp, Saccharomyces pastorianus
ataaggctgactctatcaacgttgc

SEQ ID NO: 192128 - DNA, 25 bp, Saccharomyces pastorianus
tatgttttgttagttgttccagaaa

SEQ ID NO: 192129 - DNA, 25 bp, Saccharomyces pastorianus
ttgtatggttgtctatgcttccgtg

SEQ ID NO: 192130 - DNA, 25 bp, Saccharomyces pastorianus
cgttgttgagagatatggtcgtcgt

SEQ ID NO: 192131 - DNA, 25 bp, Saccharomyces pastorianus
cttcatgttcttctatgttttgtta

SEQ ID NO: 192132 - DNA, 25 bp, Saccharomyces pastorianus
caattccttatgtcgttgtttctga

SEQ ID NO: 192133 - DNA, 25 bp, Saccharomyces pastorianus
gggctgtttggtcttcatgttcttc

SEQ ID NO: 192134 - DNA, 25 bp, Saccharomyces pastorianus
ctttgttggtatttacgttgttgag

SEQ ID NO: 192135 - DNA, 25 bp, Saccharomyces pastorianus
ttttgctactacatgggctccaatt

SEQ ID NO: 192136 - DNA, 25 bp, Saccharomyces pastorianus
gtctaaggctatgtctattgctaca

SEQ ID NO: 192137 - DNA, 25 bp, Saccharomyces pastorianus
gcttccgtgggtgtcaccagattat

SEQ ID NO: 192138 - DNA, 25 bp, Saccharomyces pastorianus
attgctacagctgctaattggttgt

SEQ ID NO: 192139 - DNA, 25 bp, Saccharomyces pastorianus
aataagcaacacacaccgaaacagg

SEQ ID NO: 192140 - DNA, 25 bp, Saccharomyces pastorianus
cccctgctactacttggaaattaat

SEQ ID NO: 192141 - DNA, 25 bp, Saccharomyces pastorianus
agaaattccgaacacaagcctaaga

SEQ ID NO: 192142 - DNA, 25 bp, Saccharomyces pastorianus
tgtcctggacattttttccttcctt

SEQ ID NO: 192143 - DNA, 25 bp, Saccharomyces pastorianus
gaagacaccgcagttgttgcaacat

SEQ ID NO: 192144 - DNA, 25 bp, Saccharomyces pastorianus
gacaccaacacattttttcatgagt

SEQ ID NO: 192145 - DNA, 25 bp, Saccharomyces pastorianus
ttagcttactcagacaccaacacat

SEQ ID NO: 192146 - DNA, 25 bp, Saccharomyces pastorianus
tttgacttttgccacacagctgcac

SEQ ID NO: 192147 - DNA, 25 bp, Saccharomyces pastorianus
taagttttcgggttgaatggcatca

SEQ ID NO: 192148 - DNA, 25 bp, Saccharomyces pastorianus
aaatctttccatgcttatcagccgg

SEQ ID NO: 192149 - DNA, 25 bp, Saccharomyces pastorianus
acaacggctgctgtgatgccgcaaa

SEQ ID NO: 192150 - DNA, 25 bp, Saccharomyces pastorianus
aagggcattcatctgctggttatgg

SEQ ID NO: 192151 - DNA, 25 bp, Saccharomyces pastorianus
tgggattggaatacgtcgcgcttat

SEQ ID NO: 192152 - DNA, 25 bp, Saccharomyces pastorianus
agcagactatttacttgggattgga

SEQ ID NO: 192153 - DNA, 25 bp, Saccharomyces pastorianus
ggctttttctggtgatggtcgttac

SEQ ID NO: 192154 - DNA, 25 bp, Saccharomyces pastorianus
taacatcaagattccaggcaacaag

SEQ ID NO: 192155 - DNA, 25 bp, Saccharomyces pastorianus
gatggtcgttacatatgttcaggcg

SEQ ID NO: 192156 - DNA, 25 bp, Saccharomyces pastorianus
gaatacgtcgcgcttattaaataac

SEQ ID NO: 192157 - DNA, 25 bp, Saccharomyces pastorianus
gttcaggcgattcaaaaagcagact

SEQ ID NO: 192158 - DNA, 25 bp, Saccharomyces pastorianus
aacaagtaaagtcatttgcagcgga

SEQ ID NO: 192159 - DNA, 25 bp, Saccharomyces pastorianus
ctggttatgggataagcttggcttt

SEQ ID NO: 192160 - DNA, 25 bp, Saccharomyces pastorianus
ggcaacaagcctataactcaagtgg

SEQ ID NO: 192161 - DNA, 25 bp, Saccharomyces pastorianus
aaccaaccatattacaagtcacaaa

SEQ ID NO: 192162 - DNA, 25 bp, Saccharomyces pastorianus
gtaaccaaccatattacaagtcaca

SEQ ID NO: 192163 - DNA, 25 bp, Saccharomyces pastorianus
tggtaaccaaccatattacaagtca

SEQ ID NO: 192164 - DNA, 25 bp, Saccharomyces pastorianus
atggtaaccaaccatattacaagtc

SEQ ID NO: 192165 - DNA, 25 bp, Saccharomyces pastorianus
tatggtaaccaaccatattacaagt

SEQ ID NO: 192166 - DNA, 25 bp, Saccharomyces pastorianus
accaaccatattacaagtcacaaat

SEQ ID NO: 192167 - DNA, 25 bp, Saccharomyces pastorianus
ggtaaccaaccatattacaagtcac

SEQ ID NO: 192168 - DNA, 25 bp, Saccharomyces pastorianus
taaccaaccatattacaagtcacaa

SEQ ID NO: 192169 - DNA, 25 bp, Saccharomyces pastorianus
aaggctacacacctaccaaaggata

SEQ ID NO: 192170 - DNA, 25 bp, Saccharomyces pastorianus
aaatgaactcgttaccatctcctgg

SEQ ID NO: 192171 - DNA, 25 bp, Saccharomyces pastorianus
gacagactggttgaatggaacgatc

SEQ ID NO: 192172 - DNA, 25 bp, Saccharomyces pastorianus
actcgttaccatctcctgggtccaa

SEQ ID NO: 192173 - DNA, 25 bp, Saccharomyces pastorianus
gggttctattgaccaagtaaatgaa

SEQ ID NO: 192174 - DNA, 25 bp, Saccharomyces pastorianus
tattaggatgctttcatttgaagat

SEQ ID NO: 192175 - DNA, 25 bp, Saccharomyces pastorianus
ttgggtctattaaagggttctattg

SEQ ID NO: 192176 - DNA, 25 bp, Saccharomyces pastorianus
agagccataagtttgggtctattaa

SEQ ID NO: 192177 - DNA, 25 bp, Saccharomyces pastorianus
aggataatgtcgaacacctggtcat

SEQ ID NO: 192178 - DNA, 25 bp, Saccharomyces pastorianus
cgaacacctggtcatgagagccata

SEQ ID NO: 192179 - DNA, 25 bp, Saccharomyces pastorianus
gaagatatttcaaaggctacacacc

SEQ ID NO: 192180 - DNA, 25 bp, Saccharomyces pastorianus
gaggcggatatggtggctccagagg

SEQ ID NO: 192181 - DNA, 25 bp, Saccharomyces pastorianus
tccagaggcggatatggtggctcca

SEQ ID NO: 192182 - DNA, 25 bp, Saccharomyces pastorianus
cccagaggtggatttggtggtccaa

SEQ ID NO: 192183 - DNA, 25 bp, Saccharomyces pastorianus
aggcggcttcggtggccccagaggt

SEQ ID NO: 192184 - DNA, 25 bp, Saccharomyces pastorianus
tggtcctccaagagatgcatacaga

SEQ ID NO: 192185 - DNA, 25 bp, Saccharomyces pastorianus
attatggtcctccaagagatgcata

SEQ ID NO: 192186 - DNA, 25 bp, Saccharomyces pastorianus
agaggcggtttctccagaggcggct

SEQ ID NO: 192187 - DNA, 25 bp, Saccharomyces pastorianus
tcctccaccaatcagaagatcaaat

SEQ ID NO: 192188 - DNA, 25 bp, Saccharomyces pastorianus
aggcggtttctccagaggcggcttc

SEQ ID NO: 192189 - DNA, 25 bp, Saccharomyces pastorianus
tatggtcctccaagagatgcataca

SEQ ID NO: 192190 - DNA, 25 bp, Saccharomyces pastorianus
cgattatggtcctccaagagatgca

SEQ ID NO: 192191 - DNA, 25 bp, Saccharomyces pastorianus
aaagctaaatccacttctcttttat

SEQ ID NO: 192192 - DNA, 25 bp, Saccharomyces pastorianus
atccacttctcttttatttcaaaat

SEQ ID NO: 192193 - DNA, 25 bp, Saccharomyces pastorianus
acgaccaatcgtgtcgatctgcaaa

SEQ ID NO: 192194 - DNA, 25 bp, Saccharomyces pastorianus
cactgagttgaacagatagctatct

SEQ ID NO: 192195 - DNA, 25 bp, Saccharomyces pastorianus
atgtaatttatcagtgttcaacact

SEQ ID NO: 192196 - DNA, 25 bp, Saccharomyces pastorianus
gtgtcgatctgcaaaaaaggcacat

SEQ ID NO: 192197 - DNA, 25 bp, Saccharomyces pastorianus
gggagcaccacattcacgaccaatc

SEQ ID NO: 192198 - DNA, 25 bp, Saccharomyces pastorianus
acaaattttcgtattatcgtagctg

SEQ ID NO: 192199 - DNA, 25 bp, Saccharomyces pastorianus
gtaggaggtaccaattgtgccagta

SEQ ID NO: 192200 - DNA, 25 bp, Saccharomyces pastorianus
ttcgtattatcgtagctgtcgttgt

SEQ ID NO: 192201 - DNA, 25 bp, Saccharomyces pastorianus
taatcaatgttaactttccagggaa

SEQ ID NO: 192202 - DNA, 25 bp, Saccharomyces pastorianus
tttagttttttcattactatggtat

SEQ ID NO: 192203 - DNA, 25 bp, Saccharomyces pastorianus
tactatggtattttttggtgggtgg

SEQ ID NO: 192204 - DNA, 25 bp, Saccharomyces pastorianus
ttagttttttcattactatggtatt

SEQ ID NO: 192205 - DNA, 25 bp, Saccharomyces pastorianus
tatttagttttttcattactatggt

SEQ ID NO: 192206 - DNA, 25 bp, Saccharomyces pastorianus
attatttagttttttcattactatg

SEQ ID NO: 192207 - DNA, 25 bp, Saccharomyces pastorianus
ttatttagttttttcattactatgg

SEQ ID NO: 192208 - DNA, 25 bp, Saccharomyces pastorianus
tttttcattactatggtattttttg

SEQ ID NO: 192209 - DNA, 25 bp, Saccharomyces pastorianus
tgaattatttagttttttcattact

SEQ ID NO: 192210 - DNA, 25 bp, Saccharomyces pastorianus
tagttttttcattactatggtattt

SEQ ID NO: 192211 - DNA, 25 bp, Saccharomyces pastorianus
ttactatggtattttttggtgggtg

SEQ ID NO: 192212 - DNA, 25 bp, Saccharomyces pastorianus
ttttcattactatggtattttttgg

SEQ ID NO: 192213 - DNA, 25 bp, Saccharomyces pastorianus
acaaatgcactcacatcattataca

SEQ ID NO: 192214 - DNA, 25 bp, Saccharomyces pastorianus
taaatcagtacaaatgcactcacat

SEQ ID NO: 192215 - DNA, 25 bp, Saccharomyces pastorianus
ttataccgcttttacaccgtatact

SEQ ID NO: 192216 - DNA, 25 bp, Saccharomyces pastorianus
aatcagtacaaatgcactcacatca

SEQ ID NO: 192217 - DNA, 25 bp, Saccharomyces pastorianus
atcagtacaaatgcactcacatcat

SEQ ID NO: 192218 - DNA, 25 bp, Saccharomyces pastorianus
gtacaaatgcactcacatcattata

SEQ ID NO: 192219 - DNA, 25 bp, Saccharomyces pastorianus
ccaatattacagaaaaatcaccacc

SEQ ID NO: 192220 - DNA, 25 bp, Saccharomyces pastorianus
aaatcagtacaaatgcactcacatc

SEQ ID NO: 192221 - DNA, 25 bp, Saccharomyces pastorianus
gcttttacaccgtatactaaccact

SEQ ID NO: 192222 - DNA, 25 bp, Saccharomyces pastorianus
catacgttataccgcttttacaccg

SEQ ID NO: 192223 - DNA, 25 bp, Saccharomyces pastorianus
tataccgcttttacaccgtatacta

SEQ ID NO: 192224 - DNA, 25 bp, Saccharomyces pastorianus
cacccacaccagagagaagcctaag

SEQ ID NO: 192225 - DNA, 25 bp, Saccharomyces pastorianus
tgtgtactaccaccaaccgaccgtc

SEQ ID NO: 192226 - DNA, 25 bp, Saccharomyces pastorianus
gagagaagcctaagcctaagactaa

SEQ ID NO: 192227 - DNA, 25 bp, Saccharomyces pastorianus
gaagcctaagcctaagactaagaca

SEQ ID NO: 192228 - DNA, 25 bp, Saccharomyces pastorianus
taagactaagacaagccaagcctga

SEQ ID NO: 192229 - DNA, 25 bp, Saccharomyces pastorianus
gacaagccaagcctgaccaacctgt

SEQ ID NO: 192230 - DNA, 25 bp, Saccharomyces pastorianus
taccctgactcattcaactatacca

SEQ ID NO: 192231 - DNA, 25 bp, Saccharomyces pastorianus
actaagacaagccaagcctgaccaa

SEQ ID NO: 192232 - DNA, 25 bp, Saccharomyces pastorianus
cacaccagagagaagcctaagccta

SEQ ID NO: 192233 - DNA, 25 bp, Saccharomyces pastorianus
tgtctctcaaattaccctccattac

SEQ ID NO: 192234 - DNA, 25 bp, Saccharomyces pastorianus
tcgttaccctgactcattcaactat

SEQ ID NO: 192235 - DNA, 25 bp, Saccharomyces pastorianus
atatggatggcactggtgtttccag

SEQ ID NO: 192236 - DNA, 25 bp, Saccharomyces pastorianus
atcctaacattgatatcgcatcggg

SEQ ID NO: 192237 - DNA, 25 bp, Saccharomyces pastorianus
gtagagttgccggataattacccat

SEQ ID NO: 192238 - DNA, 25 bp, Saccharomyces pastorianus
gttcgttaacaagatattccatcct

SEQ ID NO: 192239 - DNA, 25 bp, Saccharomyces pastorianus
taattacccatacaagtcgccaagc

SEQ ID NO: 192240 - DNA, 25 bp, Saccharomyces pastorianus
gtttccagtggcgatgatagcgtag

SEQ ID NO: 192241 - DNA, 25 bp, Saccharomyces pastorianus
tgatagcggcggtgatttacaagaa

SEQ ID NO: 192242 - DNA, 25 bp, Saccharomyces pastorianus
gagcctaatggtagcgatcccttga

SEQ ID NO: 192243 - DNA, 25 bp, Saccharomyces pastorianus
gtttcatgtaaagttcttgggacca

SEQ ID NO: 192244 - DNA, 25 bp, Saccharomyces pastorianus
caagtcgccaagcatagggttcgtt

SEQ ID NO: 192245 - DNA, 25 bp, Saccharomyces pastorianus
gaagctgccacattgcaattacgag

SEQ ID NO: 192246 - DNA, 25 bp, Saccharomyces pastorianus
aagggtatcgtaatcctttctattg

SEQ ID NO: 192247 - DNA, 25 bp, Saccharomyces pastorianus
catctacgtgtaggctgccaaattg

SEQ ID NO: 192248 - DNA, 25 bp, Saccharomyces pastorianus
tctacgtgtaggctgccaaattgta

SEQ ID NO: 192249 - DNA, 25 bp, Saccharomyces pastorianus
tcatctacgtgtaggctgccaaatt

SEQ ID NO: 192250 - DNA, 25 bp, Saccharomyces pastorianus
ctacgtgtaggctgccaaattgtac

SEQ ID NO: 192251 - DNA, 25 bp, Saccharomyces pastorianus
tacgtgtaggctgccaaattgtacc

SEQ ID NO: 192252 - DNA, 25 bp, Saccharomyces pastorianus
atctacgtgtaggctgccaaattgt

SEQ ID NO: 192253 - DNA, 25 bp, Saccharomyces pastorianus
ctcatctacgtgtaggctgccaaat

SEQ ID NO: 192254 - DNA, 25 bp, Saccharomyces pastorianus
atcactggtgtgcactgtgacgcta

SEQ ID NO: 192255 - DNA, 25 bp, Saccharomyces pastorianus
gttgtttgtacaatcactggtgtgc

SEQ ID NO: 192256 - DNA, 25 bp, Saccharomyces pastorianus
acatgaactttgtgatgttgtttgt

SEQ ID NO: 192257 - DNA, 25 bp, Saccharomyces pastorianus
tactgcgcgtcctcgattttgatga

SEQ ID NO: 192258 - DNA, 25 bp, Saccharomyces pastorianus
ggtgtgcactgtgacgctatgtatc

SEQ ID NO: 192259 - DNA, 25 bp, Saccharomyces pastorianus
tgaatggacggaatcagtggccaac

SEQ ID NO: 192260 - DNA, 25 bp, Saccharomyces pastorianus
ggccggcttcaatcttatcttactg

SEQ ID NO: 192261 - DNA, 25 bp, Saccharomyces pastorianus
gcgcgtcctcgattttgatgacagt

SEQ ID NO: 192262 - DNA, 25 bp, Saccharomyces pastorianus
actctgggccggcttcaatcttatc

SEQ ID NO: 192263 - DNA, 25 bp, Saccharomyces pastorianus
ggttaacctggacaactttaacatg

SEQ ID NO: 192264 - DNA, 25 bp, Saccharomyces pastorianus
gcttcaatcttatcttactgcgcgt

SEQ ID NO: 192265 - DNA, 25 bp, Saccharomyces pastorianus
gttcttaaaatccacaaggcctatg

SEQ ID NO: 192266 - DNA, 25 bp, Saccharomyces pastorianus
taacttatcacccagatctcgtagt

SEQ ID NO: 192267 - DNA, 25 bp, Saccharomyces pastorianus
gatgatccgaattgtgaagcccact

SEQ ID NO: 192268 - DNA, 25 bp, Saccharomyces pastorianus
atccgtcctgggatacagagggctt

SEQ ID NO: 192269 - DNA, 25 bp, Saccharomyces pastorianus
aaggcctatgggtcttatcatctcc

SEQ ID NO: 192270 - DNA, 25 bp, Saccharomyces pastorianus
atctccctctctgtttctaataact

SEQ ID NO: 192271 - DNA, 25 bp, Saccharomyces pastorianus
tgtgcacacagtttgtccagctagg

SEQ ID NO: 192272 - DNA, 25 bp, Saccharomyces pastorianus
attgtgaagcccacttttcgtactt

SEQ ID NO: 192273 - DNA, 25 bp, Saccharomyces pastorianus
ttatcgatccgcttatgtgcacaca

SEQ ID NO: 192274 - DNA, 25 bp, Saccharomyces pastorianus
tttcgtacttcactaatccgtcctg

SEQ ID NO: 192275 - DNA, 25 bp, Saccharomyces pastorianus
agatctcgtagtgggcccatggcag

SEQ ID NO: 192276 - DNA, 25 bp, Saccharomyces pastorianus
gaactccttcctattgaaacatttc

SEQ ID NO: 192277 - DNA, 25 bp, Saccharomyces pastorianus
aagagcagccacttttaaccctgat

SEQ ID NO: 192278 - DNA, 25 bp, Saccharomyces pastorianus
gaaacatttcgtactaacatatttt

SEQ ID NO: 192279 - DNA, 25 bp, Saccharomyces pastorianus
atcaataacttattctgcgcgaaat

SEQ ID NO: 192280 - DNA, 25 bp, Saccharomyces pastorianus
cccgtttttgtaatccactatcaat

SEQ ID NO: 192281 - DNA, 25 bp, Saccharomyces pastorianus
cattttcaaatagacaacacccgtt

SEQ ID NO: 192282 - DNA, 25 bp, Saccharomyces pastorianus
gagctaataatctcaatctgtgtta

SEQ ID NO: 192283 - DNA, 25 bp, Saccharomyces pastorianus
tagttatcaaaagcaatttaccccg

SEQ ID NO: 192284 - DNA, 25 bp, Saccharomyces pastorianus
tgcgcgaaatattgtgtccagaaat

SEQ ID NO: 192285 - DNA, 25 bp, Saccharomyces pastorianus
taaccctgatactgactagagctaa

SEQ ID NO: 192286 - DNA, 25 bp, Saccharomyces pastorianus
ttttctcgaactccttcctattgaa

SEQ ID NO: 192287 - DNA, 25 bp, Saccharomyces pastorianus
cccaacctggaagtcatattatgat

SEQ ID NO: 192288 - DNA, 25 bp, Saccharomyces pastorianus
aattgggagcatctacctatcggta

SEQ ID NO: 192289 - DNA, 25 bp, Saccharomyces pastorianus
ttgttggctctttcaactgttgcta

SEQ ID NO: 192290 - DNA, 25 bp, Saccharomyces pastorianus
gggcgttcatcatctataacattgt

SEQ ID NO: 192291 - DNA, 25 bp, Saccharomyces pastorianus
aatgtacactgtcgctttatccgct

SEQ ID NO: 192292 - DNA, 25 bp, Saccharomyces pastorianus
actgttgctaataatgtccctggaa

SEQ ID NO: 192293 - DNA, 25 bp, Saccharomyces pastorianus
atgtccctggaatgtacactgtcgc

SEQ ID NO: 192294 - DNA, 25 bp, Saccharomyces pastorianus
aattctgctgtgttttgttggctct

SEQ ID NO: 192295 - DNA, 25 bp, Saccharomyces pastorianus
cggaagttgggcgttcatcatctat

SEQ ID NO: 192296 - DNA, 25 bp, Saccharomyces pastorianus
tacggcggtgacattgggttcgagt

SEQ ID NO: 192297 - DNA, 25 bp, Saccharomyces pastorianus
gcatctacctatcggtatcgcaggt

SEQ ID NO: 192298 - DNA, 25 bp, Saccharomyces pastorianus
tgacccgtaatattttatcccgctt

SEQ ID NO: 192299 - DNA, 25 bp, Saccharomyces pastorianus
tcgaatagctgacccgtaatatttt

SEQ ID NO: 192300 - DNA, 25 bp, Saccharomyces pastorianus
tcccgctttaagagttcaacgctaa

SEQ ID NO: 192301 - DNA, 25 bp, Saccharomyces pastorianus
tattttatcccgctttaagagttca

SEQ ID NO: 192302 - DNA, 25 bp, Saccharomyces pastorianus
gctaaccattatgctacaggaacct

SEQ ID NO: 192303 - DNA, 25 bp, Saccharomyces pastorianus
tttttctcagtctgacgctgttact

SEQ ID NO: 192304 - DNA, 25 bp, Saccharomyces pastorianus
gagttcaacgctaaaaaatgatatc

SEQ ID NO: 192305 - DNA, 25 bp, Saccharomyces pastorianus
aatgatatctagctaaccattatgc

SEQ ID NO: 192306 - DNA, 25 bp, Saccharomyces pastorianus
gctgacccgtaatattttatcccgc

SEQ ID NO: 192307 - DNA, 25 bp, Saccharomyces pastorianus
ttatcccgctttaagagttcaacgc

SEQ ID NO: 192308 - DNA, 25 bp, Saccharomyces pastorianus
atagctgacccgtaatattttatcc

SEQ ID NO: 192309 - DNA, 25 bp, Saccharomyces pastorianus
atctaagttacctgatacaagaact

SEQ ID NO: 192310 - DNA, 25 bp, Saccharomyces pastorianus
aaataatctaagttacctgatacaa

SEQ ID NO: 192311 - DNA, 25 bp, Saccharomyces pastorianus
ttattaaataatctaagttacctga

SEQ ID NO: 192312 - DNA, 25 bp, Saccharomyces pastorianus
taatctaagttacctgatacaagaa

SEQ ID NO: 192313 - DNA, 25 bp, Saccharomyces pastorianus
tattaaataatctaagttacctgat

SEQ ID NO: 192314 - DNA, 25 bp, Saccharomyces pastorianus
ataatctaagttacctgatacaaga

SEQ ID NO: 192315 - DNA, 25 bp, Saccharomyces pastorianus
aataatctaagttacctgatacaag

SEQ ID NO: 192316 - DNA, 25 bp, Saccharomyces pastorianus
ttaaataatctaagttacctgatac

SEQ ID NO: 192317 - DNA, 25 bp, Saccharomyces pastorianus
attaaataatctaagttacctgata

SEQ ID NO: 192318 - DNA, 25 bp, Saccharomyces pastorianus
taaataatctaagttacctgataca

SEQ ID NO: 192319 - DNA, 25 bp, Saccharomyces pastorianus
aatctaagttacctgatacaagaac

SEQ ID NO: 192320 - DNA, 25 bp, Saccharomyces pastorianus
cagaactggcagaatgacgaaggtg

SEQ ID NO: 192321 - DNA, 25 bp, Saccharomyces pastorianus
gagacgcagtcaagagttcgccacc

SEQ ID NO: 192322 - DNA, 25 bp, Saccharomyces pastorianus
atgctcatcgatcaaatcgtggcag

SEQ ID NO: 192323 - DNA, 25 bp, Saccharomyces pastorianus
ggcattcaagtctgagatatatttt

SEQ ID NO: 192324 - DNA, 25 bp, Saccharomyces pastorianus
gtctgagatatattttaacacttac

SEQ ID NO: 192325 - DNA, 25 bp, Saccharomyces pastorianus
ggtacctgatataagtggcaacgct

SEQ ID NO: 192326 - DNA, 25 bp, Saccharomyces pastorianus
aacgcttcggccctatcgttacaga

SEQ ID NO: 192327 - DNA, 25 bp, Saccharomyces pastorianus
ggccctatcgttacagagacgcagt

SEQ ID NO: 192328 - DNA, 25 bp, Saccharomyces pastorianus
aaacggtgagccacttgattacgat

SEQ ID NO: 192329 - DNA, 25 bp, Saccharomyces pastorianus
ggacacgaaaaacggtgagccactt

SEQ ID NO: 192330 - DNA, 25 bp, Saccharomyces pastorianus
agggattggaaatactgctttgctg

SEQ ID NO: 192331 - DNA, 25 bp, Saccharomyces pastorianus
tttttcaccatctactatccactca

SEQ ID NO: 192332 - DNA, 25 bp, Saccharomyces pastorianus
actttttcaccatctactatccact

SEQ ID NO: 192333 - DNA, 25 bp, Saccharomyces pastorianus
taccactttttcaccatctactatc

SEQ ID NO: 192334 - DNA, 25 bp, Saccharomyces pastorianus
ttttcaccatctactatccactcaa

SEQ ID NO: 192335 - DNA, 25 bp, Saccharomyces pastorianus
ccactttttcaccatctactatcca

SEQ ID NO: 192336 - DNA, 25 bp, Saccharomyces pastorianus
catctactatccactcaatttatat

SEQ ID NO: 192337 - DNA, 25 bp, Saccharomyces pastorianus
tcaccatctactatccactcaattt

SEQ ID NO: 192338 - DNA, 25 bp, Saccharomyces pastorianus
ataccactttttcaccatctactat

SEQ ID NO: 192339 - DNA, 25 bp, Saccharomyces pastorianus
ttcaccatctactatccactcaatt

SEQ ID NO: 192340 - DNA, 25 bp, Saccharomyces pastorianus
tttcaccatctactatccactcaat

SEQ ID NO: 192341 - DNA, 25 bp, Saccharomyces pastorianus
accactttttcaccatctactatcc

SEQ ID NO: 192342 - DNA, 25 bp, Saccharomyces pastorianus
gtagtcgcattggtactggcattag

SEQ ID NO: 192343 - DNA, 25 bp, Saccharomyces pastorianus
tagtcgcattggtactggcattagc

SEQ ID NO: 192344 - DNA, 25 bp, Saccharomyces pastorianus
ctggagttggtagtcgcattggtac

SEQ ID NO: 192345 - DNA, 25 bp, Saccharomyces pastorianus
agtcgcattggtactggcattagca

SEQ ID NO: 192346 - DNA, 25 bp, Saccharomyces pastorianus
tgcaatactttctgcacctgtcact

SEQ ID NO: 192347 - DNA, 25 bp, Saccharomyces pastorianus
tggagttggtagtcgcattggtact

SEQ ID NO: 192348 - DNA, 25 bp, Saccharomyces pastorianus
catgaatgcacgtgtcgctgtcctc

SEQ ID NO: 192349 - DNA, 25 bp, Saccharomyces pastorianus
gttggtagtcgcattggtactggca

SEQ ID NO: 192350 - DNA, 25 bp, Saccharomyces pastorianus
ggtagtcgcattggtactggcatta

SEQ ID NO: 192351 - DNA, 25 bp, Saccharomyces pastorianus
ttggtagtcgcattggtactggcat

SEQ ID NO: 192352 - DNA, 25 bp, Saccharomyces pastorianus
tagcactaccatgaatgcacgtgtc

SEQ ID NO: 192353 - DNA, 25 bp, Saccharomyces pastorianus
aaccaaccatattacaagtcacaaa

SEQ ID NO: 192354 - DNA, 25 bp, Saccharomyces pastorianus
gtaaccaaccatattacaagtcaca

SEQ ID NO: 192355 - DNA, 25 bp, Saccharomyces pastorianus
tggtaaccaaccatattacaagtca

SEQ ID NO: 192356 - DNA, 25 bp, Saccharomyces pastorianus
atggtaaccaaccatattacaagtc

SEQ ID NO: 192357 - DNA, 25 bp, Saccharomyces pastorianus
tatggtaaccaaccatattacaagt

SEQ ID NO: 192358 - DNA, 25 bp, Saccharomyces pastorianus
accaaccatattacaagtcacaaat

SEQ ID NO: 192359 - DNA, 25 bp, Saccharomyces pastorianus
ggtaaccaaccatattacaagtcac

SEQ ID NO: 192360 - DNA, 25 bp, Saccharomyces pastorianus
taaccaaccatattacaagtcacaa

SEQ ID NO: 192361 - DNA, 25 bp, Saccharomyces pastorianus
gtccaagttgaacgatgccgtcgaa

SEQ ID NO: 192362 - DNA, 25 bp, Saccharomyces pastorianus
aacgatgccgtcgaatatgtttccg

SEQ ID NO: 192363 - DNA, 25 bp, Saccharomyces pastorianus
tagagattacatgggagccgccaag

SEQ ID NO: 192364 - DNA, 25 bp, Saccharomyces pastorianus
ttggcagaccaagctagagattaca

SEQ ID NO: 192365 - DNA, 25 bp, Saccharomyces pastorianus
aaaggattcggtgaaaaagcttctg

SEQ ID NO: 192366 - DNA, 25 bp, Saccharomyces pastorianus
gtgtccacgactctgccgaaaaagg

SEQ ID NO: 192367 - DNA, 25 bp, Saccharomyces pastorianus
aaggcaaggataacgctgaaggtca

SEQ ID NO: 192368 - DNA, 25 bp, Saccharomyces pastorianus
gtcaaggtgaatctttggcagacca

SEQ ID NO: 192369 - DNA, 25 bp, Saccharomyces pastorianus
gacaaggtcgctggtaaggttcaac

SEQ ID NO: 192370 - DNA, 25 bp, Saccharomyces pastorianus
cgtcgaatatgtttccggtcgtgtc

SEQ ID NO: 192371 - DNA, 25 bp, Saccharomyces pastorianus
gtaaggttcaaccagaagacaacaa

SEQ ID NO: 192372 - DNA, 25 bp, Saccharomyces pastorianus
agatatactactaaagactcccttt

SEQ ID NO: 192373 - DNA, 25 bp, Saccharomyces pastorianus
ttaaccagttacaggtcaaaagact

SEQ ID NO: 192374 - DNA, 25 bp, Saccharomyces pastorianus
caaagggcatacatatcaatttttt

SEQ ID NO: 192375 - DNA, 25 bp, Saccharomyces pastorianus
aggctccaccagtcatttcgaaatt

SEQ ID NO: 192376 - DNA, 25 bp, Saccharomyces pastorianus
gactaaacttactgcaaaaccaatt

SEQ ID NO: 192377 - DNA, 25 bp, Saccharomyces pastorianus
cacttctttccaccccaaagataat

SEQ ID NO: 192378 - DNA, 25 bp, Saccharomyces pastorianus
tatattcgagtcaggctccaccagt

SEQ ID NO: 192379 - DNA, 25 bp, Saccharomyces pastorianus
ttttttcacctgtcactaggataac

SEQ ID NO: 192380 - DNA, 25 bp, Saccharomyces pastorianus
ttgcttctgttttcacttctttcca

SEQ ID NO: 192381 - DNA, 25 bp, Saccharomyces pastorianus
agactccctttgctctatattcgag

SEQ ID NO: 192382 - DNA, 25 bp, Saccharomyces pastorianus
accaatttgcttctgttttcacttc

SEQ ID NO: 192383 - DNA, 25 bp, Saccharomyces pastorianus
gtattcccgccgaccaagttaccag

SEQ ID NO: 192384 - DNA, 25 bp, Saccharomyces pastorianus
gccgaccaagttaccagagttatca

SEQ ID NO: 192385 - DNA, 25 bp, Saccharomyces pastorianus
gttgactggtattcccgccgaccaa

SEQ ID NO: 192386 - DNA, 25 bp, Saccharomyces pastorianus
ccgccgaccaagttaccagagttat

SEQ ID NO: 192387 - DNA, 25 bp, Saccharomyces pastorianus
attcccgccgaccaagttaccagag

SEQ ID NO: 192388 - DNA, 25 bp, Saccharomyces pastorianus
tcccgccgaccaagttaccagagtt

SEQ ID NO: 192389 - DNA, 25 bp, Saccharomyces pastorianus
ttcccgccgaccaagttaccagagt

SEQ ID NO: 192390 - DNA, 25 bp, Saccharomyces pastorianus
ccgaccaagttaccagagttatcac

SEQ ID NO: 192391 - DNA, 25 bp, Saccharomyces pastorianus
cgaccaagttaccagagttatcact

SEQ ID NO: 192392 - DNA, 25 bp, Saccharomyces pastorianus
ttgactggtattcccgccgaccaag

SEQ ID NO: 192393 - DNA, 25 bp, Saccharomyces pastorianus
cgccgaccaagttaccagagttatc

SEQ ID NO: 192394 - DNA, 25 bp, Saccharomyces pastorianus
atatgggtgtgaccgcttgcaacaa

SEQ ID NO: 192395 - DNA, 25 bp, Saccharomyces pastorianus
gatttgcaccgtgaaatgagtgatt

SEQ ID NO: 192396 - DNA, 25 bp, Saccharomyces pastorianus
gcttgcaacaagaatttaccgtaca

SEQ ID NO: 192397 - DNA, 25 bp, Saccharomyces pastorianus
gcaccgtgaaatgagtgattggttt

SEQ ID NO: 192398 - DNA, 25 bp, Saccharomyces pastorianus
tgggtgtgaccgcttgcaacaagaa

SEQ ID NO: 192399 - DNA, 25 bp, Saccharomyces pastorianus
gaatttaccgtacatgaagaactgc

SEQ ID NO: 192400 - DNA, 25 bp, Saccharomyces pastorianus
tatatccgtattggacatatgggtg

SEQ ID NO: 192401 - DNA, 25 bp, Saccharomyces pastorianus
tattggacatatgggtgtgaccgct

SEQ ID NO: 192402 - DNA, 25 bp, Saccharomyces pastorianus
gtgtgaccgcttgcaacaagaattt

SEQ ID NO: 192403 - DNA, 25 bp, Saccharomyces pastorianus
tgcaacaagaatttaccgtacatga

SEQ ID NO: 192404 - DNA, 25 bp, Saccharomyces pastorianus
gacatatgggtgtgaccgcttgcaa

SEQ ID NO: 192405 - DNA, 25 bp, Saccharomyces pastorianus
gcactcgtcgtctgatacgttcaca

SEQ ID NO: 192406 - DNA, 25 bp, Saccharomyces pastorianus
aaaatgtaccagagtcgacgacgct

SEQ ID NO: 192407 - DNA, 25 bp, Saccharomyces pastorianus
gacccactctgcgacgatatagcgg

SEQ ID NO: 192408 - DNA, 25 bp, Saccharomyces pastorianus
tgaacaagaacactagccccagctt

SEQ ID NO: 192409 - DNA, 25 bp, Saccharomyces pastorianus
actgtacaatggagcctgcgacttt

SEQ ID NO: 192410 - DNA, 25 bp, Saccharomyces pastorianus
acaatttgtttgatgcggtggcctc

SEQ ID NO: 192411 - DNA, 25 bp, Saccharomyces pastorianus
aagagtatgcgcgattccgcgtcgg

SEQ ID NO: 192412 - DNA, 25 bp, Saccharomyces pastorianus
gagccattcttttcttattactaag

SEQ ID NO: 192413 - DNA, 25 bp, Saccharomyces pastorianus
gacggcttgcttgtactgtccgaag

SEQ ID NO: 192414 - DNA, 25 bp, Saccharomyces pastorianus
gggaaacagtctaccctttgacaat

SEQ ID NO: 192415 - DNA, 25 bp, Saccharomyces pastorianus
gtccgaagcgcagtcaggtttgaat

SEQ ID NO: 192416 - DNA, 25 bp, Saccharomyces pastorianus
gaagcttgcttaccaacaaacaaaa

SEQ ID NO: 192417 - DNA, 25 bp, Saccharomyces pastorianus
tctccatatactatagtccgccttg

SEQ ID NO: 192418 - DNA, 25 bp, Saccharomyces pastorianus
tcttggtcttcgtggcgctagctac

SEQ ID NO: 192419 - DNA, 25 bp, Saccharomyces pastorianus
tagccagtacagaagcttgcttacc

SEQ ID NO: 192420 - DNA, 25 bp, Saccharomyces pastorianus
gctactacaaccttagccagtacag

SEQ ID NO: 192421 - DNA, 25 bp, Saccharomyces pastorianus
gtggcgctagctactacaaccttag

SEQ ID NO: 192422 - DNA, 25 bp, Saccharomyces pastorianus
atggatatgatccttgcggacctct

SEQ ID NO: 192423 - DNA, 25 bp, Saccharomyces pastorianus
gtgacccaaatactgcctattggag

SEQ ID NO: 192424 - DNA, 25 bp, Saccharomyces pastorianus
tatagtccgccttgtgagagcactc

SEQ ID NO: 192425 - DNA, 25 bp, Saccharomyces pastorianus
cttgcggacctctttatgaaactaa

SEQ ID NO: 192426 - DNA, 25 bp, Saccharomyces pastorianus
agagcactcctacctgtgtgactta

SEQ ID NO: 192427 - DNA, 25 bp, Saccharomyces pastorianus
gagggaacttcatacggtgccactt

SEQ ID NO: 192428 - DNA, 25 bp, Saccharomyces pastorianus
atgcttctttgatgctctagctacc

SEQ ID NO: 192429 - DNA, 25 bp, Saccharomyces pastorianus
ttgtcttctctcttaagcattgtga

SEQ ID NO: 192430 - DNA, 25 bp, Saccharomyces pastorianus
ttcctctttctaatccgcttgaatc

SEQ ID NO: 192431 - DNA, 25 bp, Saccharomyces pastorianus
accgactctgctaatgtaacctgta

SEQ ID NO: 192432 - DNA, 25 bp, Saccharomyces pastorianus
aagtgtcagtgtgcgcttatcacgc

SEQ ID NO: 192433 - DNA, 25 bp, Saccharomyces pastorianus
gactatctctcgacagcttcttgga

SEQ ID NO: 192434 - DNA, 25 bp, Saccharomyces pastorianus
agaaccatggtcttacggctatgta

SEQ ID NO: 192435 - DNA, 25 bp, Saccharomyces pastorianus
tactgtaccgggaaaatgcttcttt

SEQ ID NO: 192436 - DNA, 25 bp, Saccharomyces pastorianus
agacatatctttttcacggcattgg

SEQ ID NO: 192437 - DNA, 25 bp, Saccharomyces pastorianus
gcggtatgcgaatcagtttcctttc

SEQ ID NO: 192438 - DNA, 25 bp, Saccharomyces pastorianus
aagctgcttatgatggtgccgaaaa

SEQ ID NO: 192439 - DNA, 25 bp, Saccharomyces pastorianus
aggactctgatcgatgctctgcaac

SEQ ID NO: 192440 - DNA, 25 bp, Saccharomyces pastorianus
gcaaccttttgtcgaagcgctgaaa

SEQ ID NO: 192441 - DNA, 25 bp, Saccharomyces pastorianus
gaactactcttgtgtccggtggtga

SEQ ID NO: 192442 - DNA, 25 bp, Saccharomyces pastorianus
taagtatacgagagcccgtcctggt

SEQ ID NO: 192443 - DNA, 25 bp, Saccharomyces pastorianus
cgaggatgctgctcttggtatcgaa

SEQ ID NO: 192444 - DNA, 25 bp, Saccharomyces pastorianus
ggagcagttggtcttgctgcactac

SEQ ID NO: 192445 - DNA, 25 bp, Saccharomyces pastorianus
tggtctgtactctatctatctttct

SEQ ID NO: 192446 - DNA, 25 bp, Saccharomyces pastorianus
ttgggcgtgcttcttacgtggctaa

SEQ ID NO: 192447 - DNA, 25 bp, Saccharomyces pastorianus
taaaaaccatacgttgcgcctcgag

SEQ ID NO: 192448 - DNA, 25 bp, Saccharomyces pastorianus
tatctttctgctctcgcacaaggag

SEQ ID NO: 192449 - DNA, 25 bp, Saccharomyces pastorianus
agtcgctgcaattggtatggccctt

SEQ ID NO: 192450 - DNA, 25 bp, Saccharomyces pastorianus
gaaatgccttctttgacgaattcat

SEQ ID NO: 192451 - DNA, 25 bp, Saccharomyces pastorianus
ggttatttttggagctctatcacag

SEQ ID NO: 192452 - DNA, 25 bp, Saccharomyces pastorianus
accggtgcgtgtttgtttactgatc

SEQ ID NO: 192453 - DNA, 25 bp, Saccharomyces pastorianus
ggagcctctatacttgtgggttgtt

SEQ ID NO: 192454 - DNA, 25 bp, Saccharomyces pastorianus
aagagatctcggtcctcgcatattt

SEQ ID NO: 192455 - DNA, 25 bp, Saccharomyces pastorianus
tgattggctatggtccacatgcttt

SEQ ID NO: 192456 - DNA, 25 bp, Saccharomyces pastorianus
aattgccggcggtattgctggagca

SEQ ID NO: 192457 - DNA, 25 bp, Saccharomyces pastorianus
tttacatgcggagttccaccagaat

SEQ ID NO: 192458 - DNA, 25 bp, Saccharomyces pastorianus
acatgcttttcatctcacacattgg

SEQ ID NO: 192459 - DNA, 25 bp, Saccharomyces pastorianus
gtaatgctccacctggcaatggtat

SEQ ID NO: 192460 - DNA, 25 bp, Saccharomyces pastorianus
agctgcaaatgcgtactcttatatc

SEQ ID NO: 192461 - DNA, 25 bp, Saccharomyces pastorianus
tagtctggccgctaacatttttcta

SEQ ID NO: 192462 - DNA, 25 bp, Saccharomyces pastorianus
aatctttctggtgttggcgtcttta

SEQ ID NO: 192463 - DNA, 25 bp, Saccharomyces pastorianus
atttcgtaccttttgatgcgggcaa

SEQ ID NO: 192464 - DNA, 25 bp, Saccharomyces pastorianus
gcttatatccttctgcctgttggaa

SEQ ID NO: 192465 - DNA, 25 bp, Saccharomyces pastorianus
acatttttctagcactcatccaagg

SEQ ID NO: 192466 - DNA, 25 bp, Saccharomyces pastorianus
aattctggcttggaccgatcgaaga

SEQ ID NO: 192467 - DNA, 25 bp, Saccharomyces pastorianus
tgaagcgctattttatccgtggacg

SEQ ID NO: 192468 - DNA, 25 bp, Saccharomyces pastorianus
gagtagcttagcatcttcggaaacg

SEQ ID NO: 192469 - DNA, 25 bp, Saccharomyces pastorianus
aacgccttgggcctaatatcattga

SEQ ID NO: 192470 - DNA, 25 bp, Saccharomyces pastorianus
gggagcagaaccttgacgcatttag

SEQ ID NO: 192471 - DNA, 25 bp, Saccharomyces pastorianus
taatcgccaccaagtttaccactga

SEQ ID NO: 192472 - DNA, 25 bp, Saccharomyces pastorianus
agcttttgagttgctcgatgctttt

SEQ ID NO: 192473 - DNA, 25 bp, Saccharomyces pastorianus
ggaatgtcaattggcgacgcttggt

SEQ ID NO: 192474 - DNA, 25 bp, Saccharomyces pastorianus
gagtttcccctctcattttgggagg

SEQ ID NO: 192475 - DNA, 25 bp, Saccharomyces pastorianus
aagcgcaaactactgtggcaatcac

SEQ ID NO: 192476 - DNA, 25 bp, Saccharomyces pastorianus
gacgcttggtctgaaatcctaggat

SEQ ID NO: 192477 - DNA, 25 bp, Saccharomyces pastorianus
ctgctcctgaaccatctacagagtt

SEQ ID NO: 192478 - DNA, 25 bp, Saccharomyces pastorianus
agtgctggtattagagtttcccctc

SEQ ID NO: 192479 - DNA, 25 bp, Saccharomyces pastorianus
ttctagtgcagcaggcaaggtcctc

SEQ ID NO: 192480 - DNA, 25 bp, Saccharomyces pastorianus
gttaggacgtctcagagttctttct

SEQ ID NO: 192481 - DNA, 25 bp, Saccharomyces pastorianus
attacgcgaccagattgtaatcgcc

SEQ ID NO: 192482 - DNA, 25 bp, Saccharomyces pastorianus
ttttgatgttggttttcctactaat

SEQ ID NO: 192483 - DNA, 25 bp, Saccharomyces pastorianus
tgatgttggttttcctactaatttt

SEQ ID NO: 192484 - DNA, 25 bp, Saccharomyces pastorianus
atccggctgttaccaagaaggcttc

SEQ ID NO: 192485 - DNA, 25 bp, Saccharomyces pastorianus
tttcctactaattttatcggtgatg

SEQ ID NO: 192486 - DNA, 25 bp, Saccharomyces pastorianus
aattttatcggtgatgatccggctg

SEQ ID NO: 192487 - DNA, 25 bp, Saccharomyces pastorianus
tatcggtgatgatccggctgttacc

SEQ ID NO: 192488 - DNA, 25 bp, Saccharomyces pastorianus
atcggtgatgatccggctgttacca

SEQ ID NO: 192489 - DNA, 25 bp, Saccharomyces pastorianus
gtgatgatccggctgttaccaagaa

SEQ ID NO: 192490 - DNA, 25 bp, Saccharomyces pastorianus
gatccggctgttaccaagaaggctt

SEQ ID NO: 192491 - DNA, 25 bp, Saccharomyces pastorianus
atgatccggctgttaccaagaaggc

SEQ ID NO: 192492 - DNA, 25 bp, Saccharomyces pastorianus
tgatgatccggctgttaccaagaag

SEQ ID NO: 192493 - DNA, 25 bp, Saccharomyces pastorianus
ggatttgactgggactggctacatt

SEQ ID NO: 192494 - DNA, 25 bp, Saccharomyces pastorianus
agtaactgaggccatcattcgtcac

SEQ ID NO: 192495 - DNA, 25 bp, Saccharomyces pastorianus
gaaactgctaggcttgttcgggaat

SEQ ID NO: 192496 - DNA, 25 bp, Saccharomyces pastorianus
gttgttccgcctccaaacagtgaaa

SEQ ID NO: 192497 - DNA, 25 bp, Saccharomyces pastorianus
gttctaaaccactctttgcgtgttt

SEQ ID NO: 192498 - DNA, 25 bp, Saccharomyces pastorianus
gggctcattctgcagattgctacta

SEQ ID NO: 192499 - DNA, 25 bp, Saccharomyces pastorianus
aagactgcactggttatcatgtttt

SEQ ID NO: 192500 - DNA, 25 bp, Saccharomyces pastorianus
tggtggcatactttcaagggagctt

SEQ ID NO: 192501 - DNA, 25 bp, Saccharomyces pastorianus
ttgctactacgcttgacaatgtcgg

SEQ ID NO: 192502 - DNA, 25 bp, Saccharomyces pastorianus
gagaccaatttccagcatgggactt

SEQ ID NO: 192503 - DNA, 25 bp, Saccharomyces pastorianus
gtcacctgcttacttcatgatattg

SEQ ID NO: 192504 - DNA, 25 bp, Saccharomyces pastorianus
aatgcacacatacttaccctgccaa

SEQ ID NO: 192505 - DNA, 25 bp, Saccharomyces pastorianus
atatttatatcttattccgcggccc

SEQ ID NO: 192506 - DNA, 25 bp, Saccharomyces pastorianus
ctgtcatactcaccatcacttgtat

SEQ ID NO: 192507 - DNA, 25 bp, Saccharomyces pastorianus
atctgtcatactcaccatcacttgt

SEQ ID NO: 192508 - DNA, 25 bp, Saccharomyces pastorianus
cacttcatgagtacaaatgcaccca

SEQ ID NO: 192509 - DNA, 25 bp, Saccharomyces pastorianus
gatcgtaaacaatgcacacatactt

SEQ ID NO: 192510 - DNA, 25 bp, Saccharomyces pastorianus
aacaatgcacacatacttaccctgc

SEQ ID NO: 192511 - DNA, 25 bp, Saccharomyces pastorianus
tgcacacatacttaccctgccaata

SEQ ID NO: 192512 - DNA, 25 bp, Saccharomyces pastorianus
catctctcacttcatgagtacaaat

SEQ ID NO: 192513 - DNA, 25 bp, Saccharomyces pastorianus
ttatatcttattccgcggccccaaa

SEQ ID NO: 192514 - DNA, 25 bp, Saccharomyces pastorianus
atttatatcttattccgcggcccca

SEQ ID NO: 192515 - DNA, 25 bp, Saccharomyces pastorianus
aatttggcaccccacatgtttttgt

SEQ ID NO: 192516 - DNA, 25 bp, Saccharomyces pastorianus
ggcaccccacatgtttttgttacta

SEQ ID NO: 192517 - DNA, 25 bp, Saccharomyces pastorianus
ctgactttgtttctggcgcacctat

SEQ ID NO: 192518 - DNA, 25 bp, Saccharomyces pastorianus
tggcaccccacatgtttttgttact

SEQ ID NO: 192519 - DNA, 25 bp, Saccharomyces pastorianus
tttcactgactttgtttctggcgca

SEQ ID NO: 192520 - DNA, 25 bp, Saccharomyces pastorianus
ctttcactgactttgtttctggcgc

SEQ ID NO: 192521 - DNA, 25 bp, Saccharomyces pastorianus
ttcactgactttgtttctggcgcac

SEQ ID NO: 192522 - DNA, 25 bp, Saccharomyces pastorianus
gtacaatttggcaccccacatgttt

SEQ ID NO: 192523 - DNA, 25 bp, Saccharomyces pastorianus
ttggcaccccacatgtttttgttac

SEQ ID NO: 192524 - DNA, 25 bp, Saccharomyces pastorianus
tttggcaccccacatgtttttgtta

SEQ ID NO: 192525 - DNA, 25 bp, Saccharomyces pastorianus
actgactttgtttctggcgcaccta

SEQ ID NO: 192526 - DNA, 25 bp, Saccharomyces pastorianus
tgctcttggagaaagtattttaggg

SEQ ID NO: 192527 - DNA, 25 bp, Saccharomyces pastorianus
gcctgctcttggagaaagtatttta

SEQ ID NO: 192528 - DNA, 25 bp, Saccharomyces pastorianus
ctgctcttggagaaagtattttagg

SEQ ID NO: 192529 - DNA, 25 bp, Saccharomyces pastorianus
tggagaaagtattttagggtggtat

SEQ ID NO: 192530 - DNA, 25 bp, Saccharomyces pastorianus
gaaagtattttagggtggtatggat

SEQ ID NO: 192531 - DNA, 25 bp, Saccharomyces pastorianus
tcttggagaaagtattttagggtgg

SEQ ID NO: 192532 - DNA, 25 bp, Saccharomyces pastorianus
gctcttggagaaagtattttagggt

SEQ ID NO: 192533 - DNA, 25 bp, Saccharomyces pastorianus
ctcttggagaaagtattttagggtg

SEQ ID NO: 192534 - DNA, 25 bp, Saccharomyces pastorianus
ggcctgctcttggagaaagtatttt

SEQ ID NO: 192535 - DNA, 25 bp, Saccharomyces pastorianus
cctgctcttggagaaagtattttag

SEQ ID NO: 192536 - DNA, 25 bp, Saccharomyces pastorianus
cgcattagtactggcgttagtactg

SEQ ID NO: 192537 - DNA, 25 bp, Saccharomyces pastorianus
tagcagtggtaatcgcattagtact

SEQ ID NO: 192538 - DNA, 25 bp, Saccharomyces pastorianus
agtactagcattggtagtcgcatta

SEQ ID NO: 192539 - DNA, 25 bp, Saccharomyces pastorianus
gtggtaatcgcattagtactggcgt

SEQ ID NO: 192540 - DNA, 25 bp, Saccharomyces pastorianus
gtactggcattggtagtcgcattag

SEQ ID NO: 192541 - DNA, 25 bp, Saccharomyces pastorianus
attggtactggcattggtagtcgca

SEQ ID NO: 192542 - DNA, 25 bp, Saccharomyces pastorianus
attggtactggcattggtactggca

SEQ ID NO: 192543 - DNA, 25 bp, Saccharomyces pastorianus
aatcgcattagtactggcgttagta

SEQ ID NO: 192544 - DNA, 25 bp, Saccharomyces pastorianus
gtcgcattagtactagcattggtag

SEQ ID NO: 192545 - DNA, 25 bp, Saccharomyces pastorianus
ggtactggcattggtagtcgcattg

SEQ ID NO: 192546 - DNA, 25 bp, Saccharomyces pastorianus
ggtagtcgcattagtactagcattg

SEQ ID NO: 192547 - DNA, 25 bp, Saccharomyces pastorianus
cagaaagtacaagcccgcctacaaa

SEQ ID NO: 192548 - DNA, 25 bp, Saccharomyces pastorianus
gtacaagcccgcctacaaaaaacag

SEQ ID NO: 192549 - DNA, 25 bp, Saccharomyces pastorianus
aaaacaggcacatcgtgtgaagagt

SEQ ID NO: 192550 - DNA, 25 bp, Saccharomyces pastorianus
gcccgcctacaaaaaacaggcacat

SEQ ID NO: 192551 - DNA, 25 bp, Saccharomyces pastorianus
ccagaaagtacaagcccgcctacaa

SEQ ID NO: 192552 - DNA, 25 bp, Saccharomyces pastorianus
cctacaaaaaacaggcacatcgtgt

SEQ ID NO: 192553 - DNA, 25 bp, Saccharomyces pastorianus
aaaaaacaggcacatcgtgtgaaga

SEQ ID NO: 192554 - DNA, 25 bp, Saccharomyces pastorianus
atgctccccagaaagtacaagcccg

SEQ ID NO: 192555 - DNA, 25 bp, Saccharomyces pastorianus
acaaaaaacaggcacatcgtgtgaa

SEQ ID NO: 192556 - DNA, 25 bp, Saccharomyces pastorianus
caagcccgcctacaaaaaacaggca

SEQ ID NO: 192557 - DNA, 25 bp, Saccharomyces pastorianus
tacaagcccgcctacaaaaaacagg

SEQ ID NO: 192558 - DNA, 25 bp, Saccharomyces pastorianus
tgattactggaaggctcccggtgat

SEQ ID NO: 192559 - DNA, 25 bp, Saccharomyces pastorianus
ctcccggtgattacggtatcgaaca

SEQ ID NO: 192560 - DNA, 25 bp, Saccharomyces pastorianus
attactggaaggctcccggtgatta

SEQ ID NO: 192561 - DNA, 25 bp, Saccharomyces pastorianus
atgattactggaaggctcccggtga

SEQ ID NO: 192562 - DNA, 25 bp, Saccharomyces pastorianus
gctcccggtgattacggtatcgaac

SEQ ID NO: 192563 - DNA, 25 bp, Saccharomyces pastorianus
caatgattactggaaggctcccggt

SEQ ID NO: 192564 - DNA, 25 bp, Saccharomyces pastorianus
aatgattactggaaggctcccggtg

SEQ ID NO: 192565 - DNA, 25 bp, Saccharomyces pastorianus
tcccggtgattacggtatcgaacaa

SEQ ID NO: 192566 - DNA, 25 bp, Saccharomyces pastorianus
tacaatgattactggaaggctcccg

SEQ ID NO: 192567 - DNA, 25 bp, Saccharomyces pastorianus
ttacaatgattactggaaggctccc

SEQ ID NO: 192568 - DNA, 25 bp, Saccharomyces pastorianus
acaatgattactggaaggctcccgg

SEQ ID NO: 192569 - DNA, 25 bp, Saccharomyces pastorianus
ctttatgtgtgcatctattttgtca

SEQ ID NO: 192570 - DNA, 25 bp, Saccharomyces pastorianus
atgagtttctgcacctttatgtgtg

SEQ ID NO: 192571 - DNA, 25 bp, Saccharomyces pastorianus
gtctgtcgtcccaagattgagcgta

SEQ ID NO: 192572 - DNA, 25 bp, Saccharomyces pastorianus
tcccagaacattaggcctcgaattt

SEQ ID NO: 192573 - DNA, 25 bp, Saccharomyces pastorianus
acttttcccagaacattaggcctcg

SEQ ID NO: 192574 - DNA, 25 bp, Saccharomyces pastorianus
attaggctgtctgtcgtcccaagat

SEQ ID NO: 192575 - DNA, 25 bp, Saccharomyces pastorianus
tattttgtcattaggctgtctgtcg

SEQ ID NO: 192576 - DNA, 25 bp, Saccharomyces pastorianus
gtcgtcccaagattgagcgtaaaat

SEQ ID NO: 192577 - DNA, 25 bp, Saccharomyces pastorianus
aggcctcgaatttatttgatccatg

SEQ ID NO: 192578 - DNA, 25 bp, Saccharomyces pastorianus
tttgatccatgagtttctgcacctt

SEQ ID NO: 192579 - DNA, 25 bp, Saccharomyces pastorianus
atgccagatttttccaattccaatt

SEQ ID NO: 192580 - DNA, 25 bp, Saccharomyces pastorianus
aaatgcaatattgaaaatgcctcta

SEQ ID NO: 192581 - DNA, 25 bp, Saccharomyces pastorianus
atcgtgaaaagggtcctgcgttatt

SEQ ID NO: 192582 - DNA, 25 bp, Saccharomyces pastorianus
aacaatcgtgaaaagggtcctgcgt

SEQ ID NO: 192583 - DNA, 25 bp, Saccharomyces pastorianus
atggcacagagacaatcaggaatac

SEQ ID NO: 192584 - DNA, 25 bp, Saccharomyces pastorianus
gcaatggcacagagacaatcaggaa

SEQ ID NO: 192585 - DNA, 25 bp, Saccharomyces pastorianus
gatcagtatgcaatggcacagagac

SEQ ID NO: 192586 - DNA, 25 bp, Saccharomyces pastorianus
attttcattatacatcacttcgcaa

SEQ ID NO: 192587 - DNA, 25 bp, Saccharomyces pastorianus
taccacattttcattatacatcact

SEQ ID NO: 192588 - DNA, 25 bp, Saccharomyces pastorianus
gggtcctgcgttattaaaacatttg

SEQ ID NO: 192589 - DNA, 25 bp, Saccharomyces pastorianus
tatgcaatggcacagagacaatcag

SEQ ID NO: 192590 - DNA, 25 bp, Saccharomyces pastorianus
acatttgatcagtatgcaatggcac

SEQ ID NO: 192591 - DNA, 25 bp, Saccharomyces pastorianus
gcgcactacatgaagctggattatt

SEQ ID NO: 192592 - DNA, 25 bp, Saccharomyces pastorianus
acgtggtgacgtagcaagattggaa

SEQ ID NO: 192593 - DNA, 25 bp, Saccharomyces pastorianus
actgagtgtacctatgccccagaag

SEQ ID NO: 192594 - DNA, 25 bp, Saccharomyces pastorianus
taatgaatatcctacgtggtgacgt

SEQ ID NO: 192595 - DNA, 25 bp, Saccharomyces pastorianus
gcggctctcccatcaagagatcaaa

SEQ ID NO: 192596 - DNA, 25 bp, Saccharomyces pastorianus
attgtcctgtatgcgcactacatga

SEQ ID NO: 192597 - DNA, 25 bp, Saccharomyces pastorianus
ggaaattgtcctgtatgcgcactac

SEQ ID NO: 192598 - DNA, 25 bp, Saccharomyces pastorianus
ttatcacacaaagtagcggctctcc

SEQ ID NO: 192599 - DNA, 25 bp, Saccharomyces pastorianus
ggcagagacagtactaatgaatatc

SEQ ID NO: 192600 - DNA, 25 bp, Saccharomyces pastorianus
caagattggaaaaatcgactgcgat

SEQ ID NO: 192601 - DNA, 25 bp, Saccharomyces pastorianus
atcgactgcgattatcacacaaagt

SEQ ID NO: 192602 - DNA, 25 bp, Saccharomyces pastorianus
aggatgtttctaccgtcttcaaaag

SEQ ID NO: 192603 - DNA, 25 bp, Saccharomyces pastorianus
ggtcttccgcaagttcctatgttaa

SEQ ID NO: 192604 - DNA, 25 bp, Saccharomyces pastorianus
aggcacacaggatgtttctaccgtc

SEQ ID NO: 192605 - DNA, 25 bp, Saccharomyces pastorianus
gatggaaatcggaacgcctccacaa

SEQ ID NO: 192606 - DNA, 25 bp, Saccharomyces pastorianus
gcctattgcaaatcgatgtctgacg

SEQ ID NO: 192607 - DNA, 25 bp, Saccharomyces pastorianus
atcctctctttgttgtcatcattga

SEQ ID NO: 192608 - DNA, 25 bp, Saccharomyces pastorianus
atgcaattgttttccatcctctctt

SEQ ID NO: 192609 - DNA, 25 bp, Saccharomyces pastorianus
gatgtgttcattgaccgttttaggg

SEQ ID NO: 192610 - DNA, 25 bp, Saccharomyces pastorianus
gatactggctcttcagatatgattg

SEQ ID NO: 192611 - DNA, 25 bp, Saccharomyces pastorianus
gaggttcttaacaccacagtgataa

SEQ ID NO: 192612 - DNA, 25 bp, Saccharomyces pastorianus
gttcctatgttaagtttcctgttca

SEQ ID NO: 192613 - DNA, 25 bp, Saccharomyces pastorianus
acaacaaagatggtgctcaatgcga

SEQ ID NO: 192614 - DNA, 25 bp, Saccharomyces pastorianus
gggcacattcattgcagagacgcat

SEQ ID NO: 192615 - DNA, 25 bp, Saccharomyces pastorianus
atgcatgttcggttggttcgcaaat

SEQ ID NO: 192616 - DNA, 25 bp, Saccharomyces pastorianus
tgtggtaaaggccatctgcgattat

SEQ ID NO: 192617 - DNA, 25 bp, Saccharomyces pastorianus
gggttgatggcttctgtaatgacaa

SEQ ID NO: 192618 - DNA, 25 bp, Saccharomyces pastorianus
tggatcgctaccagatactctttct

SEQ ID NO: 192619 - DNA, 25 bp, Saccharomyces pastorianus
gatgaaaatgctgtccacggtgaat

SEQ ID NO: 192620 - DNA, 25 bp, Saccharomyces pastorianus
ggaggaggacgatcaatgcatgttc

SEQ ID NO: 192621 - DNA, 25 bp, Saccharomyces pastorianus
gtgttcaaacacctggatcgctacc

SEQ ID NO: 192622 - DNA, 25 bp, Saccharomyces pastorianus
cgcataagctattttgacgtcaatt

SEQ ID NO: 192623 - DNA, 25 bp, Saccharomyces pastorianus
gagacagcttgtggttattgataca

SEQ ID NO: 192624 - DNA, 25 bp, Saccharomyces pastorianus
atggttacggttccaaacttctctg

SEQ ID NO: 192625 - DNA, 25 bp, Saccharomyces pastorianus
ggaattcgccaatactgttctcaga

SEQ ID NO: 192626 - DNA, 25 bp, Saccharomyces pastorianus
aagcgtctttgtcagttggttccac

SEQ ID NO: 192627 - DNA, 25 bp, Saccharomyces pastorianus
atggtatttcagtacccctgtatct

SEQ ID NO: 192628 - DNA, 25 bp, Saccharomyces pastorianus
tacctgacggatctgtttgttacac

SEQ ID NO: 192629 - DNA, 25 bp, Saccharomyces pastorianus
ccaaacttctctgggctttcaagga

SEQ ID NO: 192630 - DNA, 25 bp, Saccharomyces pastorianus
acgctttgcgttcttcagtattgct

SEQ ID NO: 192631 - DNA, 25 bp, Saccharomyces pastorianus
cactgattttgaactctggccatat

SEQ ID NO: 192632 - DNA, 25 bp, Saccharomyces pastorianus
gtatgtgcagttctttcatctatga

SEQ ID NO: 192633 - DNA, 25 bp, Saccharomyces pastorianus
tgcttacttaaacggtctccttact

SEQ ID NO: 192634 - DNA, 25 bp, Saccharomyces pastorianus
attcactgcatatcctctatgtatg

SEQ ID NO: 192635 - DNA, 25 bp, Saccharomyces pastorianus
gatttgtgaaatgcatactccgttg

SEQ ID NO: 192636 - DNA, 25 bp, Saccharomyces pastorianus
gaaaattatgtgctcattgtgaaaa

SEQ ID NO: 192637 - DNA, 25 bp, Saccharomyces pastorianus
gggcaacatagatttaagtgtggat

SEQ ID NO: 192638 - DNA, 25 bp, Saccharomyces pastorianus
acgtgagtacgcagaggagatagaa

SEQ ID NO: 192639 - DNA, 25 bp, Saccharomyces pastorianus
gaaatgcatactccgttggatgtgg

SEQ ID NO: 192640 - DNA, 25 bp, Saccharomyces pastorianus
ttgtgaaatgcatactccgttggat

SEQ ID NO: 192641 - DNA, 25 bp, Saccharomyces pastorianus
ggaagttaccgtttatattgatttg

SEQ ID NO: 192642 - DNA, 25 bp, Saccharomyces pastorianus
gtgaaatgcatactccgttggatgt

SEQ ID NO: 192643 - DNA, 25 bp, Saccharomyces pastorianus
atccaatattgaaaaacgtgagtac

SEQ ID NO: 192644 - DNA, 25 bp, Saccharomyces pastorianus
gttaccgtttatattgatttgtgaa

SEQ ID NO: 192645 - DNA, 25 bp, Saccharomyces pastorianus
tattatttgttttcaatagacgttt

SEQ ID NO: 192646 - DNA, 25 bp, Saccharomyces pastorianus
aaccaaccatattacaagtcacaaa

SEQ ID NO: 192647 - DNA, 25 bp, Saccharomyces pastorianus
gtaaccaaccatattacaagtcaca

SEQ ID NO: 192648 - DNA, 25 bp, Saccharomyces pastorianus
tggtaaccaaccatattacaagtca

SEQ ID NO: 192649 - DNA, 25 bp, Saccharomyces pastorianus
atggtaaccaaccatattacaagtc

SEQ ID NO: 192650 - DNA, 25 bp, Saccharomyces pastorianus
tatggtaaccaaccatattacaagt

SEQ ID NO: 192651 - DNA, 25 bp, Saccharomyces pastorianus
accaaccatattacaagtcacaaat

SEQ ID NO: 192652 - DNA, 25 bp, Saccharomyces pastorianus
ggtaaccaaccatattacaagtcac

SEQ ID NO: 192653 - DNA, 25 bp, Saccharomyces pastorianus
taaccaaccatattacaagtcacaa

SEQ ID NO: 192654 - DNA, 25 bp, Saccharomyces pastorianus
ttaaaggcaggatttcacagaacgc

SEQ ID NO: 192655 - DNA, 25 bp, Saccharomyces pastorianus
ctacagcaaagtgagactgcggtaa

SEQ ID NO: 192656 - DNA, 25 bp, Saccharomyces pastorianus
ttgaaggttgccctacagcaaagtg

SEQ ID NO: 192657 - DNA, 25 bp, Saccharomyces pastorianus
gcaagaagttaagtcttttgagaca

SEQ ID NO: 192658 - DNA, 25 bp, Saccharomyces pastorianus
gaaaatttgaaggttgccctacagc

SEQ ID NO: 192659 - DNA, 25 bp, Saccharomyces pastorianus
aacacatgacgaaaagagcacttta

SEQ ID NO: 192660 - DNA, 25 bp, Saccharomyces pastorianus
ggttgccctacagcaaagtgagact

SEQ ID NO: 192661 - DNA, 25 bp, Saccharomyces pastorianus
ggcaggatttcacagaacgcaacac

SEQ ID NO: 192662 - DNA, 25 bp, Saccharomyces pastorianus
gagactgcggtaaataagttagaga

SEQ ID NO: 192663 - DNA, 25 bp, Saccharomyces pastorianus
tttcacagaacgcaacacatgacga

SEQ ID NO: 192664 - DNA, 25 bp, Saccharomyces pastorianus
ggaattcagcaagaagttaagtctt

SEQ ID NO: 192665 - DNA, 25 bp, Saccharomyces pastorianus
tagtaagcttcgcttgtactcagtc

SEQ ID NO: 192666 - DNA, 25 bp, Saccharomyces pastorianus
taagcttcgcttgtactcagtcatt

SEQ ID NO: 192667 - DNA, 25 bp, Saccharomyces pastorianus
tttcttccaaatttgaataggacac

SEQ ID NO: 192668 - DNA, 25 bp, Saccharomyces pastorianus
ggtgttatccaattatttagtaagc

SEQ ID NO: 192669 - DNA, 25 bp, Saccharomyces pastorianus
tccaattatttagtaagcttcgctt

SEQ ID NO: 192670 - DNA, 25 bp, Saccharomyces pastorianus
agcttcgcttgtactcagtcatttt

SEQ ID NO: 192671 - DNA, 25 bp, Saccharomyces pastorianus
cttcgcttgtactcagtcatttttt

SEQ ID NO: 192672 - DNA, 25 bp, Saccharomyces pastorianus
gtaagcttcgcttgtactcagtcat

SEQ ID NO: 192673 - DNA, 25 bp, Saccharomyces pastorianus
atttagtaagcttcgcttgtactca

SEQ ID NO: 192674 - DNA, 25 bp, Saccharomyces pastorianus
tccaaatttgaataggacacgatcg

SEQ ID NO: 192675 - DNA, 25 bp, Saccharomyces pastorianus
aagcttcgcttgtactcagtcattt

SEQ ID NO: 192676 - DNA, 25 bp, Saccharomyces pastorianus
gaacttgatgctgatggagacacta

SEQ ID NO: 192677 - DNA, 25 bp, Saccharomyces pastorianus
ggagacactatcatcggtgccacaa

SEQ ID NO: 192678 - DNA, 25 bp, Saccharomyces pastorianus
gaagaatacgactctgactatgatt

SEQ ID NO: 192679 - DNA, 25 bp, Saccharomyces pastorianus
ggtgccacaacccacttacaagaag

SEQ ID NO: 192680 - DNA, 25 bp, Saccharomyces pastorianus
gagggacatcgcctgaacgaatgta

SEQ ID NO: 192681 - DNA, 25 bp, Saccharomyces pastorianus
gattcttcccaggattcgaacttga

SEQ ID NO: 192682 - DNA, 25 bp, Saccharomyces pastorianus
tgcaatcacgcaactttccgaagct

SEQ ID NO: 192683 - DNA, 25 bp, Saccharomyces pastorianus
ctaaacttggtattgagcgtctcaa

SEQ ID NO: 192684 - DNA, 25 bp, Saccharomyces pastorianus
aaaatcggctatgcttctattgtaa

SEQ ID NO: 192685 - DNA, 25 bp, Saccharomyces pastorianus
gagcgtctcaaccaacgattcagaa

SEQ ID NO: 192686 - DNA, 25 bp, Saccharomyces pastorianus
gggacagaatgccaccagacttcat

SEQ ID NO: 192687 - DNA, 25 bp, Saccharomyces pastorianus
attggtgtccctatgtaatacaatt

SEQ ID NO: 192688 - DNA, 25 bp, Saccharomyces pastorianus
tccctatgtaatacaattacgatta

SEQ ID NO: 192689 - DNA, 25 bp, Saccharomyces pastorianus
gaattggtgtccctatgtaatacaa

SEQ ID NO: 192690 - DNA, 25 bp, Saccharomyces pastorianus
tgtccctatgtaatacaattacgat

SEQ ID NO: 192691 - DNA, 25 bp, Saccharomyces pastorianus
ccctatgtaatacaattacgattat

SEQ ID NO: 192692 - DNA, 25 bp, Saccharomyces pastorianus
ggtgtccctatgtaatacaattacg

SEQ ID NO: 192693 - DNA, 25 bp, Saccharomyces pastorianus
tggtgtccctatgtaatacaattac

SEQ ID NO: 192694 - DNA, 25 bp, Saccharomyces pastorianus
gtgtccctatgtaatacaattacga

SEQ ID NO: 192695 - DNA, 25 bp, Saccharomyces pastorianus
gtccctatgtaatacaattacgatt

SEQ ID NO: 192696 - DNA, 25 bp, Saccharomyces pastorianus
ttggtgtccctatgtaatacaatta

SEQ ID NO: 192697 - DNA, 25 bp, Saccharomyces pastorianus
aattggtgtccctatgtaatacaat

SEQ ID NO: 192698 - DNA, 25 bp, Saccharomyces pastorianus
atctccacagaaaacgaacattaat

SEQ ID NO: 192699 - DNA, 25 bp, Saccharomyces pastorianus
aaattattatcccacttgcataaaa

SEQ ID NO: 192700 - DNA, 25 bp, Saccharomyces pastorianus
accaagagcagtttacaatcaaata

SEQ ID NO: 192701 - DNA, 25 bp, Saccharomyces pastorianus
gtttgtgatcgtctcattccaacat

SEQ ID NO: 192702 - DNA, 25 bp, Saccharomyces pastorianus
ttctcattcgcataatctcactcca

SEQ ID NO: 192703 - DNA, 25 bp, Saccharomyces pastorianus
aaataagttatattgctccgaagat

SEQ ID NO: 192704 - DNA, 25 bp, Saccharomyces pastorianus
gaaggattcgaaccctcttaatgag

SEQ ID NO: 192705 - DNA, 25 bp, Saccharomyces pastorianus
atcaaaaacttctcattcgcataat

SEQ ID NO: 192706 - DNA, 25 bp, Saccharomyces pastorianus
gtaagctgaaggattcgaaccctct

SEQ ID NO: 192707 - DNA, 25 bp, Saccharomyces pastorianus
tctcattccaacatctccacagaaa

SEQ ID NO: 192708 - DNA, 25 bp, Saccharomyces pastorianus
tcgaaccctcttaatgagaaattat

SEQ ID NO: 192709 - DNA, 25 bp, Saccharomyces pastorianus
ttgattccttttccggcgctaagat

SEQ ID NO: 192710 - DNA, 25 bp, Saccharomyces pastorianus
gctggtgtccaaggttccaaggttt

SEQ ID NO: 192711 - DNA, 25 bp, Saccharomyces pastorianus
gttgaagttgattccttttccggcg

SEQ ID NO: 192712 - DNA, 25 bp, Saccharomyces pastorianus
gaagttgattccttttccggcgcta

SEQ ID NO: 192713 - DNA, 25 bp, Saccharomyces pastorianus
aaaaggctaagtccgctggtgtcca

SEQ ID NO: 192714 - DNA, 25 bp, Saccharomyces pastorianus
ggctaagtccgctggtgtccaaggt

SEQ ID NO: 192715 - DNA, 25 bp, Saccharomyces pastorianus
ttttccggcgctaagatctacccag

SEQ ID NO: 192716 - DNA, 25 bp, Saccharomyces pastorianus
tccggcgctaagatctacccaggta

SEQ ID NO: 192717 - DNA, 25 bp, Saccharomyces pastorianus
cggcgctaagatctacccaggtaga

SEQ ID NO: 192718 - DNA, 25 bp, Saccharomyces pastorianus
agtccgctggtgtccaaggttccaa

SEQ ID NO: 192719 - DNA, 25 bp, Saccharomyces pastorianus
tgtccaaggttccaaggtttccaag

SEQ ID NO: 192720 - DNA, 25 bp, Saccharomyces pastorianus
aaccaaccatattacaagtcacaaa

SEQ ID NO: 192721 - DNA, 25 bp, Saccharomyces pastorianus
gtaaccaaccatattacaagtcaca

SEQ ID NO: 192722 - DNA, 25 bp, Saccharomyces pastorianus
tggtaaccaaccatattacaagtca

SEQ ID NO: 192723 - DNA, 25 bp, Saccharomyces pastorianus
atggtaaccaaccatattacaagtc

SEQ ID NO: 192724 - DNA, 25 bp, Saccharomyces pastorianus
tatggtaaccaaccatattacaagt

SEQ ID NO: 192725 - DNA, 25 bp, Saccharomyces pastorianus
accaaccatattacaagtcacaaat

SEQ ID NO: 192726 - DNA, 25 bp, Saccharomyces pastorianus
ggtaaccaaccatattacaagtcac

SEQ ID NO: 192727 - DNA, 25 bp, Saccharomyces pastorianus
taaccaaccatattacaagtcacaa

SEQ ID NO: 192728 - DNA, 25 bp, Saccharomyces pastorianus
atgtctcgccaaagcgcattcaaat

SEQ ID NO: 192729 - DNA, 25 bp, Saccharomyces pastorianus
cgaacgagcctgtctgtcagatgtt

SEQ ID NO: 192730 - DNA, 25 bp, Saccharomyces pastorianus
aatagcattttcttggtatcctttg

SEQ ID NO: 192731 - DNA, 25 bp, Saccharomyces pastorianus
gccaaagcgcattcaaatttcagaa

SEQ ID NO: 192732 - DNA, 25 bp, Saccharomyces pastorianus
gagcctgtctgtcagatgttcacaa

SEQ ID NO: 192733 - DNA, 25 bp, Saccharomyces pastorianus
cttggtatcctttgaatcttatata

SEQ ID NO: 192734 - DNA, 25 bp, Saccharomyces pastorianus
gtctgtcagatgttcacaaaatcct

SEQ ID NO: 192735 - DNA, 25 bp, Saccharomyces pastorianus
tggaaatagacacgaacgagcctgt

SEQ ID NO: 192736 - DNA, 25 bp, Saccharomyces pastorianus
gatgttcacaaaatccttattataa

SEQ ID NO: 192737 - DNA, 25 bp, Saccharomyces pastorianus
gcattttcttggtatcctttgaatc

SEQ ID NO: 192738 - DNA, 25 bp, Saccharomyces pastorianus
acacgaacgagcctgtctgtcagat

SEQ ID NO: 192739 - DNA, 25 bp, Saccharomyces pastorianus
atgcgtttccattcaggttactaac

SEQ ID NO: 192740 - DNA, 25 bp, Saccharomyces pastorianus
atttgatactgctattacttcatgg

SEQ ID NO: 192741 - DNA, 25 bp, Saccharomyces pastorianus
gagtagtctttttcatcactatata

SEQ ID NO: 192742 - DNA, 25 bp, Saccharomyces pastorianus
gagcgcaacgacttagcgaagctta

SEQ ID NO: 192743 - DNA, 25 bp, Saccharomyces pastorianus
aatgttatccgtggaatcttcctta

SEQ ID NO: 192744 - DNA, 25 bp, Saccharomyces pastorianus
gtgctgcttcacatttcaggctaaa

SEQ ID NO: 192745 - DNA, 25 bp, Saccharomyces pastorianus
aatatgttccatgcgtttccattca

SEQ ID NO: 192746 - DNA, 25 bp, Saccharomyces pastorianus
ggaaagatgtcaaggctcgaatagc

SEQ ID NO: 192747 - DNA, 25 bp, Saccharomyces pastorianus
aaattagtttcccaccgatgagcgc

SEQ ID NO: 192748 - DNA, 25 bp, Saccharomyces pastorianus
ggaatcttccttagccaagtatcat

SEQ ID NO: 192749 - DNA, 25 bp, Saccharomyces pastorianus
tgaaattggtgacagcagctctatg

SEQ ID NO: 192750 - DNA, 25 bp, Saccharomyces pastorianus
gtatcacctacacaggatagaaaag

SEQ ID NO: 192751 - DNA, 25 bp, Saccharomyces pastorianus
ggatcacaagtatcacctacacagg

SEQ ID NO: 192752 - DNA, 25 bp, Saccharomyces pastorianus
acaagtatcacctacacaggataga

SEQ ID NO: 192753 - DNA, 25 bp, Saccharomyces pastorianus
caccttaaacgtatctttcgaagag

SEQ ID NO: 192754 - DNA, 25 bp, Saccharomyces pastorianus
atgcgaacaccttaaacgtatcttt

SEQ ID NO: 192755 - DNA, 25 bp, Saccharomyces pastorianus
aaaagaattggatcaagttgtggga

SEQ ID NO: 192756 - DNA, 25 bp, Saccharomyces pastorianus
tcacctgataaagatcatgaggatg

SEQ ID NO: 192757 - DNA, 25 bp, Saccharomyces pastorianus
gattccatcggattaacattatcac

SEQ ID NO: 192758 - DNA, 25 bp, Saccharomyces pastorianus
atggatgcgaacaccttaaacgtat

SEQ ID NO: 192759 - DNA, 25 bp, Saccharomyces pastorianus
gaggatggatcacaagtatcaccta

SEQ ID NO: 192760 - DNA, 25 bp, Saccharomyces pastorianus
tcggattaacattatcacctgataa

SEQ ID NO: 192761 - DNA, 25 bp, Saccharomyces pastorianus
ttggatattttagcaacgcctgctt

SEQ ID NO: 192762 - DNA, 25 bp, Saccharomyces pastorianus
gcttttggatattttagcaacgcct

SEQ ID NO: 192763 - DNA, 25 bp, Saccharomyces pastorianus
atattttagcaacgcctgcttcaaa

SEQ ID NO: 192764 - DNA, 25 bp, Saccharomyces pastorianus
gggctgcttttggatattttagcaa

SEQ ID NO: 192765 - DNA, 25 bp, Saccharomyces pastorianus
acagggctgcttttggatattttag

SEQ ID NO: 192766 - DNA, 25 bp, Saccharomyces pastorianus
cacagggctgcttttggatatttta

SEQ ID NO: 192767 - DNA, 25 bp, Saccharomyces pastorianus
ggatattttagcaacgcctgcttca

SEQ ID NO: 192768 - DNA, 25 bp, Saccharomyces pastorianus
ggaccacagggctgcttttggatat

SEQ ID NO: 192769 - DNA, 25 bp, Saccharomyces pastorianus
ttttggatattttagcaacgcctgc

SEQ ID NO: 192770 - DNA, 25 bp, Saccharomyces pastorianus
tttagcaacgcctgcttcaaagtca

SEQ ID NO: 192771 - DNA, 25 bp, Saccharomyces pastorianus
gaccacagggctgcttttggatatt

SEQ ID NO: 192772 - DNA, 25 bp, Saccharomyces pastorianus
tgttacctacgttaggtacgctagg

SEQ ID NO: 192773 - DNA, 25 bp, Saccharomyces pastorianus
gatccaaatcatgttacctacgtta

SEQ ID NO: 192774 - DNA, 25 bp, Saccharomyces pastorianus
tccaaatcatgttacctacgttagg

SEQ ID NO: 192775 - DNA, 25 bp, Saccharomyces pastorianus
aactttttataccttgcccagagcg

SEQ ID NO: 192776 - DNA, 25 bp, Saccharomyces pastorianus
tcttacgttgtttgtatcatcccac

SEQ ID NO: 192777 - DNA, 25 bp, Saccharomyces pastorianus
tttttataccttgcccagagcgcct

SEQ ID NO: 192778 - DNA, 25 bp, Saccharomyces pastorianus
tacgttgtttgtatcatcccacgat

SEQ ID NO: 192779 - DNA, 25 bp, Saccharomyces pastorianus
taccttgcccagagcgcctcaagaa

SEQ ID NO: 192780 - DNA, 25 bp, Saccharomyces pastorianus
ggaactttttataccttgcccagag

SEQ ID NO: 192781 - DNA, 25 bp, Saccharomyces pastorianus
catcttacgttgtttgtatcatccc

SEQ ID NO: 192782 - DNA, 25 bp, Saccharomyces pastorianus
ttataccttgcccagagcgcctcaa

SEQ ID NO: 192783 - DNA, 25 bp, Saccharomyces pastorianus
atttgcataatgtcttcatttcacg

SEQ ID NO: 192784 - DNA, 25 bp, Saccharomyces pastorianus
ttcacgaaatgatggcactatagca

SEQ ID NO: 192785 - DNA, 25 bp, Saccharomyces pastorianus
tttccggaatatgaggatgatcgtt

SEQ ID NO: 192786 - DNA, 25 bp, Saccharomyces pastorianus
aatgatggcactatagcacgtccct

SEQ ID NO: 192787 - DNA, 25 bp, Saccharomyces pastorianus
agcacgtcccttgtttcttgtggtg

SEQ ID NO: 192788 - DNA, 25 bp, Saccharomyces pastorianus
atggcactatagcacgtcccttgtt

SEQ ID NO: 192789 - DNA, 25 bp, Saccharomyces pastorianus
gtttcttgtggtgctgttttttatc

SEQ ID NO: 192790 - DNA, 25 bp, Saccharomyces pastorianus
gcataatgtcttcatttcacgaaat

SEQ ID NO: 192791 - DNA, 25 bp, Saccharomyces pastorianus
atagcacgtcccttgtttcttgtgg

SEQ ID NO: 192792 - DNA, 25 bp, Saccharomyces pastorianus
acgtcccttgtttcttgtggtgctg

SEQ ID NO: 192793 - DNA, 25 bp, Saccharomyces pastorianus
actatagcacgtcccttgtttcttg

SEQ ID NO: 192794 - DNA, 25 bp, Saccharomyces pastorianus
ggattttttctaaatgctgccaaga

SEQ ID NO: 192795 - DNA, 25 bp, Saccharomyces pastorianus
atagggaacttaggcctgactcgac

SEQ ID NO: 192796 - DNA, 25 bp, Saccharomyces pastorianus
gcaaatctgttttccattgctcaat

SEQ ID NO: 192797 - DNA, 25 bp, Saccharomyces pastorianus
gcatgtattgcaaatctgttttcca

SEQ ID NO: 192798 - DNA, 25 bp, Saccharomyces pastorianus
atttgagcccaattgcagacgatca

SEQ ID NO: 192799 - DNA, 25 bp, Saccharomyces pastorianus
atgctgccaagattgtcctaatcta

SEQ ID NO: 192800 - DNA, 25 bp, Saccharomyces pastorianus
gggaaccttacatgaatccttaaga

SEQ ID NO: 192801 - DNA, 25 bp, Saccharomyces pastorianus
attatctacaaggtgcacagagaca

SEQ ID NO: 192802 - DNA, 25 bp, Saccharomyces pastorianus
gcctgactcgaccaatttctcaaaa

SEQ ID NO: 192803 - DNA, 25 bp, Saccharomyces pastorianus
agaagctatcatgggaaccttacat

SEQ ID NO: 192804 - DNA, 25 bp, Saccharomyces pastorianus
acaacgtttgtacaacattccacat

SEQ ID NO: 192805 - DNA, 25 bp, Saccharomyces pastorianus
attacccacatgaaagagtctttta

SEQ ID NO: 192806 - DNA, 25 bp, Saccharomyces pastorianus
ataatccagtacttggttcggtata

SEQ ID NO: 192807 - DNA, 25 bp, Saccharomyces pastorianus
gaagcagagcttcatgccatttatg

SEQ ID NO: 192808 - DNA, 25 bp, Saccharomyces pastorianus
gccatttatgaaggctatgcagact

SEQ ID NO: 192809 - DNA, 25 bp, Saccharomyces pastorianus
ggctagactagtaaattacccacat

SEQ ID NO: 192810 - DNA, 25 bp, Saccharomyces pastorianus
gacattgtcatgatcactgactcaa

SEQ ID NO: 192811 - DNA, 25 bp, Saccharomyces pastorianus
tggaatacactatgaccgagactgt

SEQ ID NO: 192812 - DNA, 25 bp, Saccharomyces pastorianus
gatgtgtatcatcaacagaagcaga

SEQ ID NO: 192813 - DNA, 25 bp, Saccharomyces pastorianus
acaaaaccagtatcagcatctgatt

SEQ ID NO: 192814 - DNA, 25 bp, Saccharomyces pastorianus
taaatcgcagctatcaacaaccaaa

SEQ ID NO: 192815 - DNA, 25 bp, Saccharomyces pastorianus
gactcaaagccagccattcaaggat

SEQ ID NO: 192816 - DNA, 25 bp, Saccharomyces pastorianus
agaacctttggtcttggctaatctc

SEQ ID NO: 192817 - DNA, 25 bp, Saccharomyces pastorianus
acctttggtcttggctaatctcaaa

SEQ ID NO: 192818 - DNA, 25 bp, Saccharomyces pastorianus
aagagaacctttggtcttggctaat

SEQ ID NO: 192819 - DNA, 25 bp, Saccharomyces pastorianus
gaacctttggtcttggctaatctca

SEQ ID NO: 192820 - DNA, 25 bp, Saccharomyces pastorianus
gagaacctttggtcttggctaatct

SEQ ID NO: 192821 - DNA, 25 bp, Saccharomyces pastorianus
atctttaagagaacctttggtcttg

SEQ ID NO: 192822 - DNA, 25 bp, Saccharomyces pastorianus
gcatctttaagagaacctttggtct

SEQ ID NO: 192823 - DNA, 25 bp, Saccharomyces pastorianus
agagaacctttggtcttggctaatc

SEQ ID NO: 192824 - DNA, 25 bp, Saccharomyces pastorianus
ttttgcatctttaagagaacctttg

SEQ ID NO: 192825 - DNA, 25 bp, Saccharomyces pastorianus
ttaagagaacctttggtcttggcta

SEQ ID NO: 192826 - DNA, 25 bp, Saccharomyces pastorianus
aacctttggtcttggctaatctcaa

SEQ ID NO: 192827 - DNA, 25 bp, Saccharomyces pastorianus
gaacgattgtcttctgggacttcga

SEQ ID NO: 192828 - DNA, 25 bp, Saccharomyces pastorianus
tcatctctgggcgacgaatcgtcat

SEQ ID NO: 192829 - DNA, 25 bp, Saccharomyces pastorianus
ttatctttcatttcatctctgggcg

SEQ ID NO: 192830 - DNA, 25 bp, Saccharomyces pastorianus
gacttcgatcatatttcctttggcc

SEQ ID NO: 192831 - DNA, 25 bp, Saccharomyces pastorianus
gtatcatactttttagccattagct

SEQ ID NO: 192832 - DNA, 25 bp, Saccharomyces pastorianus
gttacaactgtttttggagctcaag

SEQ ID NO: 192833 - DNA, 25 bp, Saccharomyces pastorianus
gaatcgtcatccatcttttcatcaa

SEQ ID NO: 192834 - DNA, 25 bp, Saccharomyces pastorianus
ctttggcccaaagagttacaactgt

SEQ ID NO: 192835 - DNA, 25 bp, Saccharomyces pastorianus
tccatcttttcatcaaccatcagtt

SEQ ID NO: 192836 - DNA, 25 bp, Saccharomyces pastorianus
gtattcttacgctttgtttggctag

SEQ ID NO: 192837 - DNA, 25 bp, Saccharomyces pastorianus
tagccattagctcagacttacgaat

SEQ ID NO: 192838 - DNA, 25 bp, Saccharomyces pastorianus
gttccttctaacattctgcgtaaga

SEQ ID NO: 192839 - DNA, 25 bp, Saccharomyces pastorianus
attttcagcgcctatgttccttcta

SEQ ID NO: 192840 - DNA, 25 bp, Saccharomyces pastorianus
ggctcaccactaacttttattcttt

SEQ ID NO: 192841 - DNA, 25 bp, Saccharomyces pastorianus
tattcagtcggtaacatcccatgag

SEQ ID NO: 192842 - DNA, 25 bp, Saccharomyces pastorianus
gggtactccagttaggtctgcgatg

SEQ ID NO: 192843 - DNA, 25 bp, Saccharomyces pastorianus
gattttgcccaaaagttacctgaca

SEQ ID NO: 192844 - DNA, 25 bp, Saccharomyces pastorianus
gactggatcgcgaaacgttttgcaa

SEQ ID NO: 192845 - DNA, 25 bp, Saccharomyces pastorianus
tggacgcagtcattgtaccctaaat

SEQ ID NO: 192846 - DNA, 25 bp, Saccharomyces pastorianus
atgggactattttaccgctacaggt

SEQ ID NO: 192847 - DNA, 25 bp, Saccharomyces pastorianus
atttccggtgccatatggacgcagt

SEQ ID NO: 192848 - DNA, 25 bp, Saccharomyces pastorianus
acatgggagacgctgacctggctac

SEQ ID NO: 192849 - DNA, 25 bp, Saccharomyces pastorianus
tgacatctgggtaatcaccacttct

SEQ ID NO: 192850 - DNA, 25 bp, Saccharomyces pastorianus
atgcatgacatctgggtaatcacca

SEQ ID NO: 192851 - DNA, 25 bp, Saccharomyces pastorianus
catgacatctgggtaatcaccactt

SEQ ID NO: 192852 - DNA, 25 bp, Saccharomyces pastorianus
atctgggtaatcaccacttctcccg

SEQ ID NO: 192853 - DNA, 25 bp, Saccharomyces pastorianus
tgggtaatcaccacttctcccgctt

SEQ ID NO: 192854 - DNA, 25 bp, Saccharomyces pastorianus
gtagagcacggatgggaggccttat

SEQ ID NO: 192855 - DNA, 25 bp, Saccharomyces pastorianus
ctcccgcttgctttgagattctgta

SEQ ID NO: 192856 - DNA, 25 bp, Saccharomyces pastorianus
gcacggatgggaggccttatagtaa

SEQ ID NO: 192857 - DNA, 25 bp, Saccharomyces pastorianus
cacttctcccgcttgctttgagatt

SEQ ID NO: 192858 - DNA, 25 bp, Saccharomyces pastorianus
ttctcccgcttgctttgagattctg

SEQ ID NO: 192859 - DNA, 25 bp, Saccharomyces pastorianus
gacatctgggtaatcaccacttctc

SEQ ID NO: 192860 - DNA, 25 bp, Saccharomyces pastorianus
tttttaggcgctttttctatcgtct

SEQ ID NO: 192861 - DNA, 25 bp, Saccharomyces pastorianus
cgctttttctatcgtctcttatctt

SEQ ID NO: 192862 - DNA, 25 bp, Saccharomyces pastorianus
cattcagctccccaaagaagcttac

SEQ ID NO: 192863 - DNA, 25 bp, Saccharomyces pastorianus
agagtcctttcgacctggaagacat

SEQ ID NO: 192864 - DNA, 25 bp, Saccharomyces pastorianus
gacaaagagtggaagctgtttaata

SEQ ID NO: 192865 - DNA, 25 bp, Saccharomyces pastorianus
gtcctttcgacctggaagacattca

SEQ ID NO: 192866 - DNA, 25 bp, Saccharomyces pastorianus
tggaagacattcagctccccaaaga

SEQ ID NO: 192867 - DNA, 25 bp, Saccharomyces pastorianus
ggaagagagtcctttcgacctggaa

SEQ ID NO: 192868 - DNA, 25 bp, Saccharomyces pastorianus
gaagctgtttaatactgagaaggaa

SEQ ID NO: 192869 - DNA, 25 bp, Saccharomyces pastorianus
gaagacattcagctccccaaagaag

SEQ ID NO: 192870 - DNA, 25 bp, Saccharomyces pastorianus
taggcgctttttctatcgtctctta

SEQ ID NO: 192871 - DNA, 25 bp, Saccharomyces pastorianus
ggcaccccacatgtttttgttacta

SEQ ID NO: 192872 - DNA, 25 bp, Saccharomyces pastorianus
aaaattgtcgtttccgtcatggtcg

SEQ ID NO: 192873 - DNA, 25 bp, Saccharomyces pastorianus
aaattgtcgtttccgtcatggtcgg

SEQ ID NO: 192874 - DNA, 25 bp, Saccharomyces pastorianus
tttcactgactttgtttctggcgca

SEQ ID NO: 192875 - DNA, 25 bp, Saccharomyces pastorianus
gtttccgtcatggtcgggaaaaatg

SEQ ID NO: 192876 - DNA, 25 bp, Saccharomyces pastorianus
aatgtacaaaagttcctgacgtttg

SEQ ID NO: 192877 - DNA, 25 bp, Saccharomyces pastorianus
gtacaatttggcaccccacatgttt

SEQ ID NO: 192878 - DNA, 25 bp, Saccharomyces pastorianus
tgtcgtttccgtcatggtcgggaaa

SEQ ID NO: 192879 - DNA, 25 bp, Saccharomyces pastorianus
caaaagttcctgacgtttgttgaag

SEQ ID NO: 192880 - DNA, 25 bp, Saccharomyces pastorianus
tttggcaccccacatgtttttgtta

SEQ ID NO: 192881 - DNA, 25 bp, Saccharomyces pastorianus
gaaaaaattgtcgtttccgtcatgg

SEQ ID NO: 192882 - DNA, 25 bp, Saccharomyces pastorianus
atgcatgcccgtttggtgccgtacg

SEQ ID NO: 192883 - DNA, 25 bp, Saccharomyces pastorianus
tgccgtacgggcacgtgtattattt

SEQ ID NO: 192884 - DNA, 25 bp, Saccharomyces pastorianus
gcaaaaatgcatgcccgtttggtgc

SEQ ID NO: 192885 - DNA, 25 bp, Saccharomyces pastorianus
gaagggcagcaaactttttcaaatg

SEQ ID NO: 192886 - DNA, 25 bp, Saccharomyces pastorianus
atgcaaaaatgcatgcccgtttggt

SEQ ID NO: 192887 - DNA, 25 bp, Saccharomyces pastorianus
gcagcaaactttttcaaatgcaaaa

SEQ ID NO: 192888 - DNA, 25 bp, Saccharomyces pastorianus
tattattttgccggtggcatgccac

SEQ ID NO: 192889 - DNA, 25 bp, Saccharomyces pastorianus
acgtgtattattttgccggtggcat

SEQ ID NO: 192890 - DNA, 25 bp, Saccharomyces pastorianus
gtgtattattttgccggtggcatgc

SEQ ID NO: 192891 - DNA, 25 bp, Saccharomyces pastorianus
cgtacgggcacgtgtattattttgc

SEQ ID NO: 192892 - DNA, 25 bp, Saccharomyces pastorianus
tgcatgcccgtttggtgccgtacgg

SEQ ID NO: 192893 - DNA, 25 bp, Saccharomyces pastorianus
ggtttcgccatgtggcatgccaccg

SEQ ID NO: 192894 - DNA, 25 bp, Saccharomyces pastorianus
ttttaagggtttcgccatgtggcat

SEQ ID NO: 192895 - DNA, 25 bp, Saccharomyces pastorianus
cccagtcttctagccaattatgttg

SEQ ID NO: 192896 - DNA, 25 bp, Saccharomyces pastorianus
aagggtttcgccatgtggcatgcca

SEQ ID NO: 192897 - DNA, 25 bp, Saccharomyces pastorianus
gtcttctagccaattatgttggtaa

SEQ ID NO: 192898 - DNA, 25 bp, Saccharomyces pastorianus
gtaattttaagggtttcgccatgtg

SEQ ID NO: 192899 - DNA, 25 bp, Saccharomyces pastorianus
atgccaccggcaaaataatacacgt

SEQ ID NO: 192900 - DNA, 25 bp, Saccharomyces pastorianus
acacccagtcttctagccaattatg

SEQ ID NO: 192901 - DNA, 25 bp, Saccharomyces pastorianus
atgtggcatgccaccggcaaaataa

SEQ ID NO: 192902 - DNA, 25 bp, Saccharomyces pastorianus
atcacacccagtcttctagccaatt

SEQ ID NO: 192903 - DNA, 25 bp, Saccharomyces pastorianus
caaaataatacacgtgcccgtacgg

SEQ ID NO: 192904 - DNA, 25 bp, Saccharomyces pastorianus
atggtatgtgccattacattacgtg

SEQ ID NO: 192905 - DNA, 25 bp, Saccharomyces pastorianus
acttctgtctctaacaagcgttctt

SEQ ID NO: 192906 - DNA, 25 bp, Saccharomyces pastorianus
tgtaatattctctttagtcccaaaa

SEQ ID NO: 192907 - DNA, 25 bp, Saccharomyces pastorianus
cattacgtgtcaacacttctgtctc

SEQ ID NO: 192908 - DNA, 25 bp, Saccharomyces pastorianus
acttttttaaaactgtgctctcttg

SEQ ID NO: 192909 - DNA, 25 bp, Saccharomyces pastorianus
cattgttgctcagaactatgtaata

SEQ ID NO: 192910 - DNA, 25 bp, Saccharomyces pastorianus
gtgtcaacacttctgtctctaacaa

SEQ ID NO: 192911 - DNA, 25 bp, Saccharomyces pastorianus
aacaagcgttcttactaacatgaaa

SEQ ID NO: 192912 - DNA, 25 bp, Saccharomyces pastorianus
gtgctctcttgttggactggtacct

SEQ ID NO: 192913 - DNA, 25 bp, Saccharomyces pastorianus
gttggactggtacctcgtgacaaag

SEQ ID NO: 192914 - DNA, 25 bp, Saccharomyces pastorianus
gtacctcgtgacaaaggtattggtt

SEQ ID NO: 192915 - DNA, 25 bp, Saccharomyces pastorianus
tccctggtgcagagaatttattgtt

SEQ ID NO: 192916 - DNA, 25 bp, Saccharomyces pastorianus
aggtgttcttgcgttagaaaaggat

SEQ ID NO: 192917 - DNA, 25 bp, Saccharomyces pastorianus
cttatccctggtgcagagaatttat

SEQ ID NO: 192918 - DNA, 25 bp, Saccharomyces pastorianus
agataattatttggacacagtaagc

SEQ ID NO: 192919 - DNA, 25 bp, Saccharomyces pastorianus
gtgttcttgcgttagaaaaggatat

SEQ ID NO: 192920 - DNA, 25 bp, Saccharomyces pastorianus
cttgcgttagaaaaggatatggcag

SEQ ID NO: 192921 - DNA, 25 bp, Saccharomyces pastorianus
ttccaaaattggacaataccgataa

SEQ ID NO: 192922 - DNA, 25 bp, Saccharomyces pastorianus
ggcagataattatttggacacagta

SEQ ID NO: 192923 - DNA, 25 bp, Saccharomyces pastorianus
ccctggtgcagagaatttattgtta

SEQ ID NO: 192924 - DNA, 25 bp, Saccharomyces pastorianus
atatggcagataattatttggacac

SEQ ID NO: 192925 - DNA, 25 bp, Saccharomyces pastorianus
ttatccctggtgcagagaatttatt

SEQ ID NO: 192926 - DNA, 25 bp, Saccharomyces pastorianus
tgacgcatcgcgcagtgccctgtca

SEQ ID NO: 192927 - DNA, 25 bp, Saccharomyces pastorianus
tctgcagtgaccttgagcgcggcaa

SEQ ID NO: 192928 - DNA, 25 bp, Saccharomyces pastorianus
gcaacgaaacggcattcaacggaag

SEQ ID NO: 192929 - DNA, 25 bp, Saccharomyces pastorianus
ggcattcaacggaagatcgtctgca

SEQ ID NO: 192930 - DNA, 25 bp, Saccharomyces pastorianus
acggaagatcgtctgcagtgacctt

SEQ ID NO: 192931 - DNA, 25 bp, Saccharomyces pastorianus
ctttgcgcaccaaatgcaacgaaac

SEQ ID NO: 192932 - DNA, 25 bp, Saccharomyces pastorianus
ataatacgggcatgaacgcgtgcat

SEQ ID NO: 192933 - DNA, 25 bp, Saccharomyces pastorianus
aagatcgtctgcagtgaccttgagc

SEQ ID NO: 192934 - DNA, 25 bp, Saccharomyces pastorianus
gcgcggcaataatacgggcatgaac

SEQ ID NO: 192935 - DNA, 25 bp, Saccharomyces pastorianus
ttgagcgcggcaataatacgggcat

SEQ ID NO: 192936 - DNA, 25 bp, Saccharomyces pastorianus
cagtgaccttgagcgcggcaataat

SEQ ID NO: 192937 - DNA, 25 bp, Saccharomyces pastorianus
aggcttgtgctcaatggctttatta

SEQ ID NO: 192938 - DNA, 25 bp, Saccharomyces pastorianus
ggagaggcttgtgctcaatggcttt

SEQ ID NO: 192939 - DNA, 25 bp, Saccharomyces pastorianus
cattactggagaggcttgtgctcaa

SEQ ID NO: 192940 - DNA, 25 bp, Saccharomyces pastorianus
acattactggagaggcttgtgctca

SEQ ID NO: 192941 - DNA, 25 bp, Saccharomyces pastorianus
agaggcttgtgctcaatggctttat

SEQ ID NO: 192942 - DNA, 25 bp, Saccharomyces pastorianus
cttgtgctcaatggctttattaaaa

SEQ ID NO: 192943 - DNA, 25 bp, Saccharomyces pastorianus
ctggagaggcttgtgctcaatggct

SEQ ID NO: 192944 - DNA, 25 bp, Saccharomyces pastorianus
gtgctcaatggctttattaaaagct

SEQ ID NO: 192945 - DNA, 25 bp, Saccharomyces pastorianus
gcttgtgctcaatggctttattaaa

SEQ ID NO: 192946 - DNA, 25 bp, Saccharomyces pastorianus
ttactggagaggcttgtgctcaatg

SEQ ID NO: 192947 - DNA, 25 bp, Saccharomyces pastorianus
gaggcttgtgctcaatggctttatt

SEQ ID NO: 192948 - DNA, 25 bp, Saccharomyces pastorianus
acaacggtactcatcatcagacaaa

SEQ ID NO: 192949 - DNA, 25 bp, Saccharomyces pastorianus
agcacaacggtactcatcatcagac

SEQ ID NO: 192950 - DNA, 25 bp, Saccharomyces pastorianus
gagtcttccactggcagaaatccgt

SEQ ID NO: 192951 - DNA, 25 bp, Saccharomyces pastorianus
tcatcagacaaattacagcagaaag

SEQ ID NO: 192952 - DNA, 25 bp, Saccharomyces pastorianus
gtcttccactggcagaaatccgtat

SEQ ID NO: 192953 - DNA, 25 bp, Saccharomyces pastorianus
agaaatccgtatcagactccgccct

SEQ ID NO: 192954 - DNA, 25 bp, Saccharomyces pastorianus
gcccttagagcacaacggtactcat

SEQ ID NO: 192955 - DNA, 25 bp, Saccharomyces pastorianus
aaagagtcttccactggcagaaatc

SEQ ID NO: 192956 - DNA, 25 bp, Saccharomyces pastorianus
agactccgcccttagagcacaacgg

SEQ ID NO: 192957 - DNA, 25 bp, Saccharomyces pastorianus
acggtactcatcatcagacaaatta

SEQ ID NO: 192958 - DNA, 25 bp, Saccharomyces pastorianus
ggcagaaatccgtatcagactccgc

SEQ ID NO: 192959 - DNA, 25 bp, Saccharomyces pastorianus
ctaaagtactgaacacctgaatgat

SEQ ID NO: 192960 - DNA, 25 bp, Saccharomyces pastorianus
gaatttagccgtttccccattacag

SEQ ID NO: 192961 - DNA, 25 bp, Saccharomyces pastorianus
acttcatttacttttgagctagtta

SEQ ID NO: 192962 - DNA, 25 bp, Saccharomyces pastorianus
tcattttgaaccagttaacgtccca

SEQ ID NO: 192963 - DNA, 25 bp, Saccharomyces pastorianus
caactatcatgctaaatttgctgtg

SEQ ID NO: 192964 - DNA, 25 bp, Saccharomyces pastorianus
tttgtgaatttagccgtttccccat

SEQ ID NO: 192965 - DNA, 25 bp, Saccharomyces pastorianus
gatacaactaattacatgtgcagtc

SEQ ID NO: 192966 - DNA, 25 bp, Saccharomyces pastorianus
gaatgatacttttattggccctttt

SEQ ID NO: 192967 - DNA, 25 bp, Saccharomyces pastorianus
attttcatcatttcctaaagtactg

SEQ ID NO: 192968 - DNA, 25 bp, Saccharomyces pastorianus
tggcccttttaataagaactctggt

SEQ ID NO: 192969 - DNA, 25 bp, Saccharomyces pastorianus
atttgctgtgatatcattttgaacc

SEQ ID NO: 192970 - DNA, 25 bp, Saccharomyces pastorianus
tttctgctttagtctctaattcatc

SEQ ID NO: 192971 - DNA, 25 bp, Saccharomyces pastorianus
aagtccacaatttcttcagcgttta

SEQ ID NO: 192972 - DNA, 25 bp, Saccharomyces pastorianus
gtaattctactttcttttctgcttt

SEQ ID NO: 192973 - DNA, 25 bp, Saccharomyces pastorianus
ggtaatgtgaagtccacaatttctt

SEQ ID NO: 192974 - DNA, 25 bp, Saccharomyces pastorianus
tcttttctgctttagtctctaattc

SEQ ID NO: 192975 - DNA, 25 bp, Saccharomyces pastorianus
atgtaattctactttcttttctgct

SEQ ID NO: 192976 - DNA, 25 bp, Saccharomyces pastorianus
tgctttagtctctaattcatctaga

SEQ ID NO: 192977 - DNA, 25 bp, Saccharomyces pastorianus
gaagtccacaatttcttcagcgttt

SEQ ID NO: 192978 - DNA, 25 bp, Saccharomyces pastorianus
tagtctctaattcatctagacctgg

SEQ ID NO: 192979 - DNA, 25 bp, Saccharomyces pastorianus
ttctctttccatgtaattctacttt

SEQ ID NO: 192980 - DNA, 25 bp, Saccharomyces pastorianus
ctctaattcatctagacctggaggg

SEQ ID NO: 192981 - DNA, 25 bp, Saccharomyces pastorianus
atgtctggtggtgctgaaaccggta

SEQ ID NO: 192982 - DNA, 25 bp, Saccharomyces pastorianus
gtctccatatggtgtcttcaacagt

SEQ ID NO: 192983 - DNA, 25 bp, Saccharomyces pastorianus
ggatccatcgaaaacagagcccgtt

SEQ ID NO: 192984 - DNA, 25 bp, Saccharomyces pastorianus
agttgtcgatgctattggccctgaa

SEQ ID NO: 192985 - DNA, 25 bp, Saccharomyces pastorianus
agtcggtttgagattgtctccatat

SEQ ID NO: 192986 - DNA, 25 bp, Saccharomyces pastorianus
aaaccggtattgttgctcaatatgc

SEQ ID NO: 192987 - DNA, 25 bp, Saccharomyces pastorianus
tgcttattctatctggaagggccca

SEQ ID NO: 192988 - DNA, 25 bp, Saccharomyces pastorianus
ttgctctgcacccagaagttgtcag

SEQ ID NO: 192989 - DNA, 25 bp, Saccharomyces pastorianus
gggatacattgactaccctacgtac

SEQ ID NO: 192990 - DNA, 25 bp, Saccharomyces pastorianus
agttcttggacccacactccaataa

SEQ ID NO: 192991 - DNA, 25 bp, Saccharomyces pastorianus
tattggccctgaaaaagtcggtttg

SEQ ID NO: 192992 - DNA, 25 bp, Saccharomyces pastorianus
cagaattgaactagcgacctttgca

SEQ ID NO: 192993 - DNA, 25 bp, Saccharomyces pastorianus
cacctgccagaattgaactagcgac

SEQ ID NO: 192994 - DNA, 25 bp, Saccharomyces pastorianus
ctgccagaattgaactagcgacctt

SEQ ID NO: 192995 - DNA, 25 bp, Saccharomyces pastorianus
actagcgacctttgcattacaagtg

SEQ ID NO: 192996 - DNA, 25 bp, Saccharomyces pastorianus
atgccacctgccagaattgaactag

SEQ ID NO: 192997 - DNA, 25 bp, Saccharomyces pastorianus
tgccacctgccagaattgaactagc

SEQ ID NO: 192998 - DNA, 25 bp, Saccharomyces pastorianus
gccacctgccagaattgaactagcg

SEQ ID NO: 192999 - DNA, 25 bp, Saccharomyces pastorianus
ccagaattgaactagcgacctttgc

SEQ ID NO: 193000 - DNA, 25 bp, Saccharomyces pastorianus
gccagaattgaactagcgacctttg

SEQ ID NO: 193001 - DNA, 25 bp, Saccharomyces pastorianus
tgccagaattgaactagcgaccttt

SEQ ID NO: 193002 - DNA, 25 bp, Saccharomyces pastorianus
acctgccagaattgaactagcgacc

SEQ ID NO: 193003 - DNA, 25 bp, Saccharomyces pastorianus
tatttttagcctccttagcttagtg

SEQ ID NO: 193004 - DNA, 25 bp, Saccharomyces pastorianus
ggtggcattataccggtattatttt

SEQ ID NO: 193005 - DNA, 25 bp, Saccharomyces pastorianus
tggcattataccggtattatttttt

SEQ ID NO: 193006 - DNA, 25 bp, Saccharomyces pastorianus
gcaggtggcattataccggtattat

SEQ ID NO: 193007 - DNA, 25 bp, Saccharomyces pastorianus
caggtggcattataccggtattatt

SEQ ID NO: 193008 - DNA, 25 bp, Saccharomyces pastorianus
tagttgtatttttagcctccttagc

SEQ ID NO: 193009 - DNA, 25 bp, Saccharomyces pastorianus
aggtggcattataccggtattattt

SEQ ID NO: 193010 - DNA, 25 bp, Saccharomyces pastorianus
aacatagttgtatttttagcctcct

SEQ ID NO: 193011 - DNA, 25 bp, Saccharomyces pastorianus
gtggcattataccggtattattttt

SEQ ID NO: 193012 - DNA, 25 bp, Saccharomyces pastorianus
gttgtatttttagcctccttagctt

SEQ ID NO: 193013 - DNA, 25 bp, Saccharomyces pastorianus
agttgtatttttagcctccttagct

SEQ ID NO: 193014 - DNA, 25 bp, Saccharomyces pastorianus
gcttacagaaccctatcgacatcaa

SEQ ID NO: 193015 - DNA, 25 bp, Saccharomyces pastorianus
cattggcccatcacttcgtaagaag

SEQ ID NO: 193016 - DNA, 25 bp, Saccharomyces pastorianus
aaacaggatcacgacggcaactact

SEQ ID NO: 193017 - DNA, 25 bp, Saccharomyces pastorianus
attcaagactagttctactccgaca

SEQ ID NO: 193018 - DNA, 25 bp, Saccharomyces pastorianus
aggatacaacggcacctatacactc

SEQ ID NO: 193019 - DNA, 25 bp, Saccharomyces pastorianus
cactgaaccgccgacgataattata

SEQ ID NO: 193020 - DNA, 25 bp, Saccharomyces pastorianus
aatcttgtcaccaacattatctaca

SEQ ID NO: 193021 - DNA, 25 bp, Saccharomyces pastorianus
atacctcggccattcaagactagtt

SEQ ID NO: 193022 - DNA, 25 bp, Saccharomyces pastorianus
ggcaactactgcgacactcactgaa

SEQ ID NO: 193023 - DNA, 25 bp, Saccharomyces pastorianus
gtgacatagacataccattggccca

SEQ ID NO: 193024 - DNA, 25 bp, Saccharomyces pastorianus
aaggatggccatttcatacctcggc

SEQ ID NO: 193025 - DNA, 25 bp, Saccharomyces pastorianus
aaaaatattgttggtctgcaccagc

SEQ ID NO: 193026 - DNA, 25 bp, Saccharomyces pastorianus
acttcgaagggcagggcttctagcc

SEQ ID NO: 193027 - DNA, 25 bp, Saccharomyces pastorianus
catcccttccagttttagactcatt

SEQ ID NO: 193028 - DNA, 25 bp, Saccharomyces pastorianus
gcagggaatccctttcagtaatgta

SEQ ID NO: 193029 - DNA, 25 bp, Saccharomyces pastorianus
tttttgtcgggaggagcatcccttc

SEQ ID NO: 193030 - DNA, 25 bp, Saccharomyces pastorianus
gaatatgctcttagcgatgccgctg

SEQ ID NO: 193031 - DNA, 25 bp, Saccharomyces pastorianus
ccatcgtatgtttattttgagctta

SEQ ID NO: 193032 - DNA, 25 bp, Saccharomyces pastorianus
taccttgctacagaaaactgccggg

SEQ ID NO: 193033 - DNA, 25 bp, Saccharomyces pastorianus
gacggtattctcaagttacttcgaa

SEQ ID NO: 193034 - DNA, 25 bp, Saccharomyces pastorianus
ttctagcccaatacacataccttgc

SEQ ID NO: 193035 - DNA, 25 bp, Saccharomyces pastorianus
gatgccgctgctattgacggtattc

SEQ ID NO: 193036 - DNA, 25 bp, Saccharomyces pastorianus
gaaggacaaccaaatctatgctatt

SEQ ID NO: 193037 - DNA, 25 bp, Saccharomyces pastorianus
aggcagtgtcaacgccgcagcagaa

SEQ ID NO: 193038 - DNA, 25 bp, Saccharomyces pastorianus
agctgacatgcaagccgccgcagaa

SEQ ID NO: 193039 - DNA, 25 bp, Saccharomyces pastorianus
aagctagcggtattatgccatctaa

SEQ ID NO: 193040 - DNA, 25 bp, Saccharomyces pastorianus
ggtatcatcagagtcactttcagga

SEQ ID NO: 193041 - DNA, 25 bp, Saccharomyces pastorianus
gtttgaagcaaatcccaggtatcat

SEQ ID NO: 193042 - DNA, 25 bp, Saccharomyces pastorianus
taacgaagacgtcgctaccaagtcc

SEQ ID NO: 193043 - DNA, 25 bp, Saccharomyces pastorianus
aactttacccaaaagctagccgctg

SEQ ID NO: 193044 - DNA, 25 bp, Saccharomyces pastorianus
tgctatcccagaaaacgccaacgtt

SEQ ID NO: 193045 - DNA, 25 bp, Saccharomyces pastorianus
aagtcttcagatctgccggtggtaa

SEQ ID NO: 193046 - DNA, 25 bp, Saccharomyces pastorianus
gtggtaactacgttgtcttcggtga

SEQ ID NO: 193047 - DNA, 25 bp, Saccharomyces pastorianus
gcttcttatgccagtgtgaccgctg

SEQ ID NO: 193048 - DNA, 25 bp, Saccharomyces pastorianus
atgaggaactgaggttgcatgcaag

SEQ ID NO: 193049 - DNA, 25 bp, Saccharomyces pastorianus
aaatcttccatgagagaggcccagc

SEQ ID NO: 193050 - DNA, 25 bp, Saccharomyces pastorianus
gaattagacataccagaaactgttg

SEQ ID NO: 193051 - DNA, 25 bp, Saccharomyces pastorianus
gtgaccgctgtcaaaatgaactatc

SEQ ID NO: 193052 - DNA, 25 bp, Saccharomyces pastorianus
aaaaacctcagtcagattcgattca

SEQ ID NO: 193053 - DNA, 25 bp, Saccharomyces pastorianus
agaggcccagccagatttaaaagaa

SEQ ID NO: 193054 - DNA, 25 bp, Saccharomyces pastorianus
gatggctctaagaaatcaactggta

SEQ ID NO: 193055 - DNA, 25 bp, Saccharomyces pastorianus
atgattgtgaaccaaacgcctatat

SEQ ID NO: 193056 - DNA, 25 bp, Saccharomyces pastorianus
attacgtacgtcaatcccttacatg

SEQ ID NO: 193057 - DNA, 25 bp, Saccharomyces pastorianus
accaaacgcctatattgagcaagta

SEQ ID NO: 193058 - DNA, 25 bp, Saccharomyces pastorianus
gctggcagtgccaacagcttactgg

SEQ ID NO: 193059 - DNA, 25 bp, Saccharomyces pastorianus
agtgccaacagcttactggccggta

SEQ ID NO: 193060 - DNA, 25 bp, Saccharomyces pastorianus
caacagcttactggccggtagtggt

SEQ ID NO: 193061 - DNA, 25 bp, Saccharomyces pastorianus
tggcaacaccatgagtctaacaagt

SEQ ID NO: 193062 - DNA, 25 bp, Saccharomyces pastorianus
aacaagttccgggttgagcactatg

SEQ ID NO: 193063 - DNA, 25 bp, Saccharomyces pastorianus
aaatttcaacgtatgctggcagtgc

SEQ ID NO: 193064 - DNA, 25 bp, Saccharomyces pastorianus
ccatgagtctaacaagttccgggtt

SEQ ID NO: 193065 - DNA, 25 bp, Saccharomyces pastorianus
tggccggtagtggtttaagtgtctt

SEQ ID NO: 193066 - DNA, 25 bp, Saccharomyces pastorianus
ttcaacgtatgctggcagtgccaac

SEQ ID NO: 193067 - DNA, 25 bp, Saccharomyces pastorianus
gtacagcttctttagaaatttcaac

SEQ ID NO: 193068 - DNA, 25 bp, Saccharomyces pastorianus
gttccgggttgagcactatgtcgca

SEQ ID NO: 193069 - DNA, 25 bp, Saccharomyces pastorianus
tttcccttttgtcttttgcaccgct

SEQ ID NO: 193070 - DNA, 25 bp, Saccharomyces pastorianus
ggttcagtctttgtagttcgagcga

SEQ ID NO: 193071 - DNA, 25 bp, Saccharomyces pastorianus
ttgtcttttgcaccgcttatatatg

SEQ ID NO: 193072 - DNA, 25 bp, Saccharomyces pastorianus
ggtacagaaggtgccggttatccgt

SEQ ID NO: 193073 - DNA, 25 bp, Saccharomyces pastorianus
ttgcaccgcttatatatgggtatga

SEQ ID NO: 193074 - DNA, 25 bp, Saccharomyces pastorianus
gcaccgcttatatatgggtatgaaa

SEQ ID NO: 193075 - DNA, 25 bp, Saccharomyces pastorianus
ccgcttatatatgggtatgaaacaa

SEQ ID NO: 193076 - DNA, 25 bp, Saccharomyces pastorianus
cttttgtcttttgcaccgcttatat

SEQ ID NO: 193077 - DNA, 25 bp, Saccharomyces pastorianus
aaacgggcgatgtagtggtacagaa

SEQ ID NO: 193078 - DNA, 25 bp, Saccharomyces pastorianus
cgacattgcgcgtttccttagaaaa

SEQ ID NO: 193079 - DNA, 25 bp, Saccharomyces pastorianus
tatatgggtatgaaacaagttcaag

SEQ ID NO: 193080 - DNA, 25 bp, Saccharomyces pastorianus
tcctgtcaagacatcggctgtaggt

SEQ ID NO: 193081 - DNA, 25 bp, Saccharomyces pastorianus
gtcgctaactttattaaagaataat

SEQ ID NO: 193082 - DNA, 25 bp, Saccharomyces pastorianus
attcctgtcaagacatcggctgtag

SEQ ID NO: 193083 - DNA, 25 bp, Saccharomyces pastorianus
taggtcgctaactttattaaagaat

SEQ ID NO: 193084 - DNA, 25 bp, Saccharomyces pastorianus
tcaactagaaggtggcgttcataat

SEQ ID NO: 193085 - DNA, 25 bp, Saccharomyces pastorianus
actggctctatttgtattacccaag

SEQ ID NO: 193086 - DNA, 25 bp, Saccharomyces pastorianus
tggctctatttgtattacccaagaa

SEQ ID NO: 193087 - DNA, 25 bp, Saccharomyces pastorianus
gtcgttgacaaaggatccattaaga

SEQ ID NO: 193088 - DNA, 25 bp, Saccharomyces pastorianus
attggtatgggaactggctctattt

SEQ ID NO: 193089 - DNA, 25 bp, Saccharomyces pastorianus
tgtaggtcgctaactttattaaaga

SEQ ID NO: 193090 - DNA, 25 bp, Saccharomyces pastorianus
ctgtcaagacatcggctgtaggtcg

SEQ ID NO: 193091 - DNA, 25 bp, Saccharomyces pastorianus
ttgtctaacaccatccagcatgcaa

SEQ ID NO: 193092 - DNA, 25 bp, Saccharomyces pastorianus
cagcatgcaatacagtgacatatat

SEQ ID NO: 193093 - DNA, 25 bp, Saccharomyces pastorianus
tccagcatgcaatacagtgacatat

SEQ ID NO: 193094 - DNA, 25 bp, Saccharomyces pastorianus
ggccttgtctaacaccatccagcat

SEQ ID NO: 193095 - DNA, 25 bp, Saccharomyces pastorianus
aacaccatccagcatgcaatacagt

SEQ ID NO: 193096 - DNA, 25 bp, Saccharomyces pastorianus
catgcaatacagtgacatatatata

SEQ ID NO: 193097 - DNA, 25 bp, Saccharomyces pastorianus
accatccagcatgcaatacagtgac

SEQ ID NO: 193098 - DNA, 25 bp, Saccharomyces pastorianus
gtctaacaccatccagcatgcaata

SEQ ID NO: 193099 - DNA, 25 bp, Saccharomyces pastorianus
tacggccttgtctaacaccatccag

SEQ ID NO: 193100 - DNA, 25 bp, Saccharomyces pastorianus
ctaacaccatccagcatgcaataca

SEQ ID NO: 193101 - DNA, 25 bp, Saccharomyces pastorianus
catccagcatgcaatacagtgacat

SEQ ID NO: 193102 - DNA, 25 bp, Saccharomyces pastorianus
gaattaccaccgattaaggaaggct

SEQ ID NO: 193103 - DNA, 25 bp, Saccharomyces pastorianus
aattaccaccgattaaggaaggctg

SEQ ID NO: 193104 - DNA, 25 bp, Saccharomyces pastorianus
tcgtaagggtgaattaccaccgatt

SEQ ID NO: 193105 - DNA, 25 bp, Saccharomyces pastorianus
gaaaaaaagggccagcatgttggat

SEQ ID NO: 193106 - DNA, 25 bp, Saccharomyces pastorianus
taagggtgaattaccaccgattaag

SEQ ID NO: 193107 - DNA, 25 bp, Saccharomyces pastorianus
aaaaaaagggccagcatgttggatg

SEQ ID NO: 193108 - DNA, 25 bp, Saccharomyces pastorianus
tgaattaccaccgattaaggaaggc

SEQ ID NO: 193109 - DNA, 25 bp, Saccharomyces pastorianus
gaaaggaaaaaaagggccagcatgt

SEQ ID NO: 193110 - DNA, 25 bp, Saccharomyces pastorianus
atcgtaagggtgaattaccaccgat

SEQ ID NO: 193111 - DNA, 25 bp, Saccharomyces pastorianus
aggaaaaaaagggccagcatgttgg

SEQ ID NO: 193112 - DNA, 25 bp, Saccharomyces pastorianus
aaggaaaaaaagggccagcatgttg

SEQ ID NO: 193113 - DNA, 25 bp, Saccharomyces pastorianus
tttctaaccgcttctaacttaattg

SEQ ID NO: 193114 - DNA, 25 bp, Saccharomyces pastorianus
aaatgctcccgctacaatacgagaa

SEQ ID NO: 193115 - DNA, 25 bp, Saccharomyces pastorianus
gcgtaagctggtttataacatactc

SEQ ID NO: 193116 - DNA, 25 bp, Saccharomyces pastorianus
tactcagtgatcgtttccatttggg

SEQ ID NO: 193117 - DNA, 25 bp, Saccharomyces pastorianus
cattgcgaaaatgcttcaatattca

SEQ ID NO: 193118 - DNA, 25 bp, Saccharomyces pastorianus
tattcatttctaccattttccccgt

SEQ ID NO: 193119 - DNA, 25 bp, Saccharomyces pastorianus
taaaatcccccaagtggttcaactg

SEQ ID NO: 193120 - DNA, 25 bp, Saccharomyces pastorianus
aaattggatgcattttttcctatta

SEQ ID NO: 193121 - DNA, 25 bp, Saccharomyces pastorianus
gtgtagtcagggtataaacgttcct

SEQ ID NO: 193122 - DNA, 25 bp, Saccharomyces pastorianus
aattgttcaattggcctatttttca

SEQ ID NO: 193123 - DNA, 25 bp, Saccharomyces pastorianus
ttctaccattttccccgttcaatct

SEQ ID NO: 193124 - DNA, 25 bp, Saccharomyces pastorianus
aatacttttcatatggagcaatccc

SEQ ID NO: 193125 - DNA, 25 bp, Saccharomyces pastorianus
ttctccgctgttgaaagattgaaat

SEQ ID NO: 193126 - DNA, 25 bp, Saccharomyces pastorianus
agttgacttcagtttctaagtggaa

SEQ ID NO: 193127 - DNA, 25 bp, Saccharomyces pastorianus
gacagcatgaacgaacagtatccag

SEQ ID NO: 193128 - DNA, 25 bp, Saccharomyces pastorianus
gataatattcattcagcaacgccga

SEQ ID NO: 193129 - DNA, 25 bp, Saccharomyces pastorianus
cagtatccagtaatgtggacagcaa

SEQ ID NO: 193130 - DNA, 25 bp, Saccharomyces pastorianus
gaagaccttggtcgacccaaatgga

SEQ ID NO: 193131 - DNA, 25 bp, Saccharomyces pastorianus
aaatgaatttttctccgctgttgaa

SEQ ID NO: 193132 - DNA, 25 bp, Saccharomyces pastorianus
taagtggaagaccttggtcgaccca

SEQ ID NO: 193133 - DNA, 25 bp, Saccharomyces pastorianus
ttcagcaacgccgaaatacttttca

SEQ ID NO: 193134 - DNA, 25 bp, Saccharomyces pastorianus
gtggacagcaataagttgacttcag

SEQ ID NO: 193135 - DNA, 25 bp, Saccharomyces pastorianus
aacgtattctgctaaaaatgactgg

SEQ ID NO: 193136 - DNA, 25 bp, Saccharomyces pastorianus
cagtaacgtaagatcagcgagaaca

SEQ ID NO: 193137 - DNA, 25 bp, Saccharomyces pastorianus
gagctttgcttccattcattttatt

SEQ ID NO: 193138 - DNA, 25 bp, Saccharomyces pastorianus
tagattactaacgtattctgctaaa

SEQ ID NO: 193139 - DNA, 25 bp, Saccharomyces pastorianus
aatatttattctgtgtattcctcag

SEQ ID NO: 193140 - DNA, 25 bp, Saccharomyces pastorianus
gtgtattcctcagtaacgtaagatc

SEQ ID NO: 193141 - DNA, 25 bp, Saccharomyces pastorianus
agtactgctgtaatgtttctggatt

SEQ ID NO: 193142 - DNA, 25 bp, Saccharomyces pastorianus
aatgtttctggattatttttctgat

SEQ ID NO: 193143 - DNA, 25 bp, Saccharomyces pastorianus
ttttctgattaattgttctgtttag

SEQ ID NO: 193144 - DNA, 25 bp, Saccharomyces pastorianus
aaaatgactggtgagctttgcttcc

SEQ ID NO: 193145 - DNA, 25 bp, Saccharomyces pastorianus
agcgagaacaaattcccagggttgg

SEQ ID NO: 193146 - DNA, 25 bp, Saccharomyces pastorianus
ggcatgtatatttaccacaaatcga

SEQ ID NO: 193147 - DNA, 25 bp, Saccharomyces pastorianus
ctacacctactagaacacttggaaa

SEQ ID NO: 193148 - DNA, 25 bp, Saccharomyces pastorianus
tactgccgtagaacttgccaaacac

SEQ ID NO: 193149 - DNA, 25 bp, Saccharomyces pastorianus
gtccagacgcgtacccaaagaataa

SEQ ID NO: 193150 - DNA, 25 bp, Saccharomyces pastorianus
gatacagacattaaacaggttacta

SEQ ID NO: 193151 - DNA, 25 bp, Saccharomyces pastorianus
aggatatttaccgaatacccctgct

SEQ ID NO: 193152 - DNA, 25 bp, Saccharomyces pastorianus
gatggacaatccgaacgaacgatac

SEQ ID NO: 193153 - DNA, 25 bp, Saccharomyces pastorianus
aaagtttgtataccgtccagacgcg

SEQ ID NO: 193154 - DNA, 25 bp, Saccharomyces pastorianus
caacgcaagaagttttactgccgta

SEQ ID NO: 193155 - DNA, 25 bp, Saccharomyces pastorianus
gaatacccctgctattaagtcagat

SEQ ID NO: 193156 - DNA, 25 bp, Saccharomyces pastorianus
tatacgtcggaccatttcgagttgt

SEQ ID NO: 193157 - DNA, 25 bp, Saccharomyces pastorianus
ccccaagatatgacgatgagagctc

SEQ ID NO: 193158 - DNA, 25 bp, Saccharomyces pastorianus
cagtgacttgtggaaaatatgatta

SEQ ID NO: 193159 - DNA, 25 bp, Saccharomyces pastorianus
gacttaacagtctcattgcctaaga

SEQ ID NO: 193160 - DNA, 25 bp, Saccharomyces pastorianus
tgagcgggtgatgcgacttaacagt

SEQ ID NO: 193161 - DNA, 25 bp, Saccharomyces pastorianus
gaaatatccaaatttgtggttcatg

SEQ ID NO: 193162 - DNA, 25 bp, Saccharomyces pastorianus
ggtgatgcgacttaacagtctcatt

SEQ ID NO: 193163 - DNA, 25 bp, Saccharomyces pastorianus
caaatttgtggttcatgctctcccc

SEQ ID NO: 193164 - DNA, 25 bp, Saccharomyces pastorianus
gacttagtgaatgtacagtgacttg

SEQ ID NO: 193165 - DNA, 25 bp, Saccharomyces pastorianus
agtctcattgcctaagaaatatcca

SEQ ID NO: 193166 - DNA, 25 bp, Saccharomyces pastorianus
gattttgagcgggtgatgcgactta

SEQ ID NO: 193167 - DNA, 25 bp, Saccharomyces pastorianus
atatgattagattttgagcgggtga

SEQ ID NO: 193168 - DNA, 25 bp, Saccharomyces pastorianus
ggagatgtcttccagttgactgtca

SEQ ID NO: 193169 - DNA, 25 bp, Saccharomyces pastorianus
agtgttattattgatccttatggag

SEQ ID NO: 193170 - DNA, 25 bp, Saccharomyces pastorianus
tagtgcagtgcagttcatgccagat

SEQ ID NO: 193171 - DNA, 25 bp, Saccharomyces pastorianus
gccatctgctgacgacaactgtatt

SEQ ID NO: 193172 - DNA, 25 bp, Saccharomyces pastorianus
tggagagattattgcagggccattg

SEQ ID NO: 193173 - DNA, 25 bp, Saccharomyces pastorianus
gggagattattgaccaagctacagg

SEQ ID NO: 193174 - DNA, 25 bp, Saccharomyces pastorianus
aaattacctggatggccatctgctg

SEQ ID NO: 193175 - DNA, 25 bp, Saccharomyces pastorianus
aaccgccgaaattaacactgacttg

SEQ ID NO: 193176 - DNA, 25 bp, Saccharomyces pastorianus
ggtcgtctattcttgattagtgcag

SEQ ID NO: 193177 - DNA, 25 bp, Saccharomyces pastorianus
aaaaatattgcatacgaaggtcgtc

SEQ ID NO: 193178 - DNA, 25 bp, Saccharomyces pastorianus
acactgacttgattgctgaagctcg

SEQ ID NO: 193179 - DNA, 25 bp, Saccharomyces pastorianus
acggtgactccaaagactccctcaa

SEQ ID NO: 193180 - DNA, 25 bp, Saccharomyces pastorianus
cctcaaccttgatgctactgaagca

SEQ ID NO: 193181 - DNA, 25 bp, Saccharomyces pastorianus
actgagcacggtgactccaaagact

SEQ ID NO: 193182 - DNA, 25 bp, Saccharomyces pastorianus
tgagcacggtgactccaaagactcc

SEQ ID NO: 193183 - DNA, 25 bp, Saccharomyces pastorianus
agcacggtgactccaaagactccct

SEQ ID NO: 193184 - DNA, 25 bp, Saccharomyces pastorianus
tccctcaaccttgatgctactgaag

SEQ ID NO: 193185 - DNA, 25 bp, Saccharomyces pastorianus
tgatgctactgaagcacctattgac

SEQ ID NO: 193186 - DNA, 25 bp, Saccharomyces pastorianus
aaagactccctcaaccttgatgcta

SEQ ID NO: 193187 - DNA, 25 bp, Saccharomyces pastorianus
agactgagcacggtgactccaaaga

SEQ ID NO: 193188 - DNA, 25 bp, Saccharomyces pastorianus
ccttgatgctactgaagcacctatt

SEQ ID NO: 193189 - DNA, 25 bp, Saccharomyces pastorianus
aaccttgatgctactgaagcaccta

SEQ ID NO: 193190 - DNA, 25 bp, Saccharomyces pastorianus
ttctatctcttgaattcgtacaaca

SEQ ID NO: 193191 - DNA, 25 bp, Saccharomyces pastorianus
gcgcctgcgaagtttccattttcgg

SEQ ID NO: 193192 - DNA, 25 bp, Saccharomyces pastorianus
gcgcgcctgcgaagtttccattttc

SEQ ID NO: 193193 - DNA, 25 bp, Saccharomyces pastorianus
ctgcgaagtttccattttcggtcaa

SEQ ID NO: 193194 - DNA, 25 bp, Saccharomyces pastorianus
cgcgcctgcgaagtttccattttcg

SEQ ID NO: 193195 - DNA, 25 bp, Saccharomyces pastorianus
tgcgcgcctgcgaagtttccatttt

SEQ ID NO: 193196 - DNA, 25 bp, Saccharomyces pastorianus
gaagcctattgtctaagcctaaatt

SEQ ID NO: 193197 - DNA, 25 bp, Saccharomyces pastorianus
ttgcgcgcctgcgaagtttccattt

SEQ ID NO: 193198 - DNA, 25 bp, Saccharomyces pastorianus
cctgcgaagtttccattttcggtca

SEQ ID NO: 193199 - DNA, 25 bp, Saccharomyces pastorianus
cgcctgcgaagtttccattttcggt

SEQ ID NO: 193200 - DNA, 25 bp, Saccharomyces pastorianus
gcctgcgaagtttccattttcggtc

SEQ ID NO: 193201 - DNA, 25 bp, Saccharomyces pastorianus
cagattaaagccagccatctccagt

SEQ ID NO: 193202 - DNA, 25 bp, Saccharomyces pastorianus
aaagccagccatctccagtgctcta

SEQ ID NO: 193203 - DNA, 25 bp, Saccharomyces pastorianus
ctggtatttctccagaccaagtgac

SEQ ID NO: 193204 - DNA, 25 bp, Saccharomyces pastorianus
agattaaagccagccatctccagtg

SEQ ID NO: 193205 - DNA, 25 bp, Saccharomyces pastorianus
attaaagccagccatctccagtgct

SEQ ID NO: 193206 - DNA, 25 bp, Saccharomyces pastorianus
actggtatttctccagaccaagtga

SEQ ID NO: 193207 - DNA, 25 bp, Saccharomyces pastorianus
atactacatgttccaagccgcacac

SEQ ID NO: 193208 - DNA, 25 bp, Saccharomyces pastorianus
caatactacatgttccaagccgcac

SEQ ID NO: 193209 - DNA, 25 bp, Saccharomyces pastorianus
tggtatttctccagaccaagtgacc

SEQ ID NO: 193210 - DNA, 25 bp, Saccharomyces pastorianus
tgttccaagccgcacacccaactga

SEQ ID NO: 193211 - DNA, 25 bp, Saccharomyces pastorianus
gactggtatttctccagaccaagtg

SEQ ID NO: 193212 - DNA, 25 bp, Saccharomyces pastorianus
gcctagtgattatacttcccattac

SEQ ID NO: 193213 - DNA, 25 bp, Saccharomyces pastorianus
cattacccagtaatacttatcaaaa

SEQ ID NO: 193214 - DNA, 25 bp, Saccharomyces pastorianus
agtgattatacttcccattacccag

SEQ ID NO: 193215 - DNA, 25 bp, Saccharomyces pastorianus
atagtaagcggtaccttgagataat

SEQ ID NO: 193216 - DNA, 25 bp, Saccharomyces pastorianus
atacttcccattacccagtaatact

SEQ ID NO: 193217 - DNA, 25 bp, Saccharomyces pastorianus
cttcccattacccagtaatacttat

SEQ ID NO: 193218 - DNA, 25 bp, Saccharomyces pastorianus
ttatacttcccattacccagtaata

SEQ ID NO: 193219 - DNA, 25 bp, Saccharomyces pastorianus
atgcctagtgattatacttcccatt

SEQ ID NO: 193220 - DNA, 25 bp, Saccharomyces pastorianus
taagcggtaccttgagataatgtcc

SEQ ID NO: 193221 - DNA, 25 bp, Saccharomyces pastorianus
gattatacttcccattacccagtaa

SEQ ID NO: 193222 - DNA, 25 bp, Saccharomyces pastorianus
gtgattatacttcccattacccagt

SEQ ID NO: 193223 - DNA, 25 bp, Saccharomyces pastorianus
ttccagctgaacaagtcaccagagt

SEQ ID NO: 193224 - DNA, 25 bp, Saccharomyces pastorianus
tattccagctgaacaagtcaccaga

SEQ ID NO: 193225 - DNA, 25 bp, Saccharomyces pastorianus
gttgactggtattccagctgaacaa

SEQ ID NO: 193226 - DNA, 25 bp, Saccharomyces pastorianus
gtattccagctgaacaagtcaccag

SEQ ID NO: 193227 - DNA, 25 bp, Saccharomyces pastorianus
ctggtattccagctgaacaagtcac

SEQ ID NO: 193228 - DNA, 25 bp, Saccharomyces pastorianus
ttgactggtattccagctgaacaag

SEQ ID NO: 193229 - DNA, 25 bp, Saccharomyces pastorianus
tgactggtattccagctgaacaagt

SEQ ID NO: 193230 - DNA, 25 bp, Saccharomyces pastorianus
tggtattccagctgaacaagtcacc

SEQ ID NO: 193231 - DNA, 25 bp, Saccharomyces pastorianus
actggtattccagctgaacaagtca

SEQ ID NO: 193232 - DNA, 25 bp, Saccharomyces pastorianus
ggtattccagctgaacaagtcacca

SEQ ID NO: 193233 - DNA, 25 bp, Saccharomyces pastorianus
attccagctgaacaagtcaccagag

SEQ ID NO: 193234 - DNA, 25 bp, Saccharomyces pastorianus
aacggttcactagaagttggatatg

SEQ ID NO: 193235 - DNA, 25 bp, Saccharomyces pastorianus
agtgcctatagtgaggcaggccaaa

SEQ ID NO: 193236 - DNA, 25 bp, Saccharomyces pastorianus
aatcgatgaagccaacggttcacta

SEQ ID NO: 193237 - DNA, 25 bp, Saccharomyces pastorianus
tacgcattcgtaaaacctttgaaga

SEQ ID NO: 193238 - DNA, 25 bp, Saccharomyces pastorianus
ggatatgttgttttttcaccagaat

SEQ ID NO: 193239 - DNA, 25 bp, Saccharomyces pastorianus
aactgaagctcaatttctgttaatg

SEQ ID NO: 193240 - DNA, 25 bp, Saccharomyces pastorianus
gatagtttaaatgggccgtcaagga

SEQ ID NO: 193241 - DNA, 25 bp, Saccharomyces pastorianus
acgtgccgttggtacattgtgctta

SEQ ID NO: 193242 - DNA, 25 bp, Saccharomyces pastorianus
gcagcgatgcgcttaggctttaagt

SEQ ID NO: 193243 - DNA, 25 bp, Saccharomyces pastorianus
gagaaagacatggttcggaactttt

SEQ ID NO: 193244 - DNA, 25 bp, Saccharomyces pastorianus
aagtatgaaggcacgtttcgacaag

SEQ ID NO: 193245 - DNA, 25 bp, Saccharomyces pastorianus
gtttgcttcgttgaacgttgagcta

SEQ ID NO: 193246 - DNA, 25 bp, Saccharomyces pastorianus
tccggtagtaatgttttttatcatg

SEQ ID NO: 193247 - DNA, 25 bp, Saccharomyces pastorianus
tatcacgtttcttgtttccggtagt

SEQ ID NO: 193248 - DNA, 25 bp, Saccharomyces pastorianus
atatcacgtttcttgtttccggtag

SEQ ID NO: 193249 - DNA, 25 bp, Saccharomyces pastorianus
ctatgtggtttgcttcgttgaacgt

SEQ ID NO: 193250 - DNA, 25 bp, Saccharomyces pastorianus
ttaattgtctacacgtctggaaatg

SEQ ID NO: 193251 - DNA, 25 bp, Saccharomyces pastorianus
ttcgttgaacgttgagctatggcca

SEQ ID NO: 193252 - DNA, 25 bp, Saccharomyces pastorianus
ttttaattgtctacacgtctggaaa

SEQ ID NO: 193253 - DNA, 25 bp, Saccharomyces pastorianus
gttgaacgttgagctatggccatac

SEQ ID NO: 193254 - DNA, 25 bp, Saccharomyces pastorianus
atgtggtttgcttcgttgaacgttg

SEQ ID NO: 193255 - DNA, 25 bp, Saccharomyces pastorianus
cttatatcacgtttcttgtttccgg

SEQ ID NO: 193256 - DNA, 25 bp, Saccharomyces pastorianus
caaaagactgttttaccccaggatg

SEQ ID NO: 193257 - DNA, 25 bp, Saccharomyces pastorianus
atgttttccgaaacgaattgacctg

SEQ ID NO: 193258 - DNA, 25 bp, Saccharomyces pastorianus
aaagcgtagatgtgttatccttcaa

SEQ ID NO: 193259 - DNA, 25 bp, Saccharomyces pastorianus
ccaggatgttttccgaaacgaattg

SEQ ID NO: 193260 - DNA, 25 bp, Saccharomyces pastorianus
gaaaagcgtagatgtgttatccttc

SEQ ID NO: 193261 - DNA, 25 bp, Saccharomyces pastorianus
gatgttttccgaaacgaattgacct

SEQ ID NO: 193262 - DNA, 25 bp, Saccharomyces pastorianus
gtcaaagatgagaaaagcgtagatg

SEQ ID NO: 193263 - DNA, 25 bp, Saccharomyces pastorianus
caggatgttttccgaaacgaattga

SEQ ID NO: 193264 - DNA, 25 bp, Saccharomyces pastorianus
aaaagcgtagatgtgttatccttca

SEQ ID NO: 193265 - DNA, 25 bp, Saccharomyces pastorianus
tgttttccgaaacgaattgacctgg

SEQ ID NO: 193266 - DNA, 25 bp, Saccharomyces pastorianus
tccgaaacgaattgacctggttttg

SEQ ID NO: 193267 - DNA, 25 bp, Saccharomyces pastorianus
tattacttccttggctgtgttgata

SEQ ID NO: 193268 - DNA, 25 bp, Saccharomyces pastorianus
gattggctccattgggttctttatt

SEQ ID NO: 193269 - DNA, 25 bp, Saccharomyces pastorianus
gctccattgggttctttattacttc

SEQ ID NO: 193270 - DNA, 25 bp, Saccharomyces pastorianus
gtttctaattctctctattttattt

SEQ ID NO: 193271 - DNA, 25 bp, Saccharomyces pastorianus
tagattatgaggataagatcgggcc

SEQ ID NO: 193272 - DNA, 25 bp, Saccharomyces pastorianus
tgggttctttattacttccttggct

SEQ ID NO: 193273 - DNA, 25 bp, Saccharomyces pastorianus
cattgggttctttattacttccttg

SEQ ID NO: 193274 - DNA, 25 bp, Saccharomyces pastorianus
gttctttattacttccttggctgtg

SEQ ID NO: 193275 - DNA, 25 bp, Saccharomyces pastorianus
tggctccattgggttctttattact

SEQ ID NO: 193276 - DNA, 25 bp, Saccharomyces pastorianus
tgtgtttctaattctctctatttta

SEQ ID NO: 193277 - DNA, 25 bp, Saccharomyces pastorianus
tggtttatgccaagagagtggtaaa

SEQ ID NO: 193278 - DNA, 25 bp, Saccharomyces pastorianus
cacagggaaattttacaacaggtat

SEQ ID NO: 193279 - DNA, 25 bp, Saccharomyces pastorianus
cgcacagggaaattttacaacaggt

SEQ ID NO: 193280 - DNA, 25 bp, Saccharomyces pastorianus
cctgaagtcatcaagcagcaaagtg

SEQ ID NO: 193281 - DNA, 25 bp, Saccharomyces pastorianus
acacgcacagggaaattttacaaca

SEQ ID NO: 193282 - DNA, 25 bp, Saccharomyces pastorianus
agtcatcaagcagcaaagtgtcaaa

SEQ ID NO: 193283 - DNA, 25 bp, Saccharomyces pastorianus
gtagatatggttagttacggtattt

SEQ ID NO: 193284 - DNA, 25 bp, Saccharomyces pastorianus
aagcagcaaagtgtcaaaaccgcta

SEQ ID NO: 193285 - DNA, 25 bp, Saccharomyces pastorianus
atcaagcagcaaagtgtcaaaaccg

SEQ ID NO: 193286 - DNA, 25 bp, Saccharomyces pastorianus
gaagtcatcaagcagcaaagtgtca

SEQ ID NO: 193287 - DNA, 25 bp, Saccharomyces pastorianus
gatatggttagttacggtatttggg

SEQ ID NO: 193288 - DNA, 25 bp, Saccharomyces pastorianus
gcagcaaagtgtcaaaaccgctatt

SEQ ID NO: 193289 - DNA, 25 bp, Saccharomyces pastorianus
gcctgccatgatcagggcccgtaaa

SEQ ID NO: 193290 - DNA, 25 bp, Saccharomyces pastorianus
gggctctgtttactactacacatat

SEQ ID NO: 193291 - DNA, 25 bp, Saccharomyces pastorianus
tacacatatcattttctgcacaagg

SEQ ID NO: 193292 - DNA, 25 bp, Saccharomyces pastorianus
tctcacgctgctgctgggtgtcacg

SEQ ID NO: 193293 - DNA, 25 bp, Saccharomyces pastorianus
gtgtcacgggctctgtttactacta

SEQ ID NO: 193294 - DNA, 25 bp, Saccharomyces pastorianus
aaaggcaatatgctcggtctcacgc

SEQ ID NO: 193295 - DNA, 25 bp, Saccharomyces pastorianus
gaatccgtccaagtaccaagacacc

SEQ ID NO: 193296 - DNA, 25 bp, Saccharomyces pastorianus
gatgacgcctgccatgatcagggcc

SEQ ID NO: 193297 - DNA, 25 bp, Saccharomyces pastorianus
aatatgctcggtctcacgctgctgc

SEQ ID NO: 193298 - DNA, 25 bp, Saccharomyces pastorianus
atcgatccgcaggagctcgaggctc

SEQ ID NO: 193299 - DNA, 25 bp, Saccharomyces pastorianus
atatcattttctgcacaaggacaac

SEQ ID NO: 193300 - DNA, 25 bp, Saccharomyces pastorianus
taattccgaattagtgggtttccat

SEQ ID NO: 193301 - DNA, 25 bp, Saccharomyces pastorianus
ttccagaactactcttagaactttt

SEQ ID NO: 193302 - DNA, 25 bp, Saccharomyces pastorianus
gatactttatcatgtgtggtctaag

SEQ ID NO: 193303 - DNA, 25 bp, Saccharomyces pastorianus
gtgggtttccatattccagaactac

SEQ ID NO: 193304 - DNA, 25 bp, Saccharomyces pastorianus
gaacttttctttcattcatgtgcag

SEQ ID NO: 193305 - DNA, 25 bp, Saccharomyces pastorianus
catctctaagaaatgtggcgtttta

SEQ ID NO: 193306 - DNA, 25 bp, Saccharomyces pastorianus
gtggtctaagtacacatctctaaga

SEQ ID NO: 193307 - DNA, 25 bp, Saccharomyces pastorianus
gcaaataacccatttaaattggcac

SEQ ID NO: 193308 - DNA, 25 bp, Saccharomyces pastorianus
attggcacaagtgttacctgatact

SEQ ID NO: 193309 - DNA, 25 bp, Saccharomyces pastorianus
ggaatcccaagagagatatgctgaa

SEQ ID NO: 193310 - DNA, 25 bp, Saccharomyces pastorianus
tagggtgggaccaacatgggtttat

SEQ ID NO: 193311 - DNA, 25 bp, Saccharomyces pastorianus
agcagtatctgtattggcaacccct

SEQ ID NO: 193312 - DNA, 25 bp, Saccharomyces pastorianus
agagactcatcttgttgctgcgatt

SEQ ID NO: 193313 - DNA, 25 bp, Saccharomyces pastorianus
gaacagttgcttcatccttcagaga

SEQ ID NO: 193314 - DNA, 25 bp, Saccharomyces pastorianus
aatcctgtattgtgctgtcttcctt

SEQ ID NO: 193315 - DNA, 25 bp, Saccharomyces pastorianus
tagcttattcgcttgcatagtcggc

SEQ ID NO: 193316 - DNA, 25 bp, Saccharomyces pastorianus
tattgttttcattgtctaccgggtt

SEQ ID NO: 193317 - DNA, 25 bp, Saccharomyces pastorianus
acagaactctcggtttcgccaaaga

SEQ ID NO: 193318 - DNA, 25 bp, Saccharomyces pastorianus
actatcctcattatcttggccaaag

SEQ ID NO: 193319 - DNA, 25 bp, Saccharomyces pastorianus
ggagtgtttgcctcattgttcgaaa

SEQ ID NO: 193320 - DNA, 25 bp, Saccharomyces pastorianus
ttctgcatcgcgtgtgttcggaaca

SEQ ID NO: 193321 - DNA, 25 bp, Saccharomyces pastorianus
agcgttgctatcactattgttgtca

SEQ ID NO: 193322 - DNA, 25 bp, Saccharomyces pastorianus
atgaagatgttcttgtttttgaacg

SEQ ID NO: 193323 - DNA, 25 bp, Saccharomyces pastorianus
ttgttttatggcactcatgtgtatt

SEQ ID NO: 193324 - DNA, 25 bp, Saccharomyces pastorianus
gtattgttttatggcactcatgtgt

SEQ ID NO: 193325 - DNA, 25 bp, Saccharomyces pastorianus
attgttttatggcactcatgtgtat

SEQ ID NO: 193326 - DNA, 25 bp, Saccharomyces pastorianus
ggagtattgttttatggcactcatg

SEQ ID NO: 193327 - DNA, 25 bp, Saccharomyces pastorianus
agtattgttttatggcactcatgtg

SEQ ID NO: 193328 - DNA, 25 bp, Saccharomyces pastorianus
tgaagatgttcttgtttttgaacga

SEQ ID NO: 193329 - DNA, 25 bp, Saccharomyces pastorianus
aagatgttcttgtttttgaacgaat

SEQ ID NO: 193330 - DNA, 25 bp, Saccharomyces pastorianus
tgtggagtattgttttatggcactc

SEQ ID NO: 193331 - DNA, 25 bp, Saccharomyces pastorianus
gtggagtattgttttatggcactca

SEQ ID NO: 193332 - DNA, 25 bp, Saccharomyces pastorianus
gaagatgttcttgtttttgaacgaa

SEQ ID NO: 193333 - DNA, 25 bp, Saccharomyces pastorianus
gataaggccaaaattttcaacgaag

SEQ ID NO: 193334 - DNA, 25 bp, Saccharomyces pastorianus
tgacttgcacaagacttttaaagat

SEQ ID NO: 193335 - DNA, 25 bp, Saccharomyces pastorianus
acatgcgccgtaattgtgaggagac

SEQ ID NO: 193336 - DNA, 25 bp, Saccharomyces pastorianus
gggtccgacaatcgataaggccaaa

SEQ ID NO: 193337 - DNA, 25 bp, Saccharomyces pastorianus
acgctgaagattcccatcattgaaa

SEQ ID NO: 193338 - DNA, 25 bp, Saccharomyces pastorianus
ggagctggccataaagatgtaccaa

SEQ ID NO: 193339 - DNA, 25 bp, Saccharomyces pastorianus
catggcgcatgaggacgagttgatc

SEQ ID NO: 193340 - DNA, 25 bp, Saccharomyces pastorianus
gtgaggagacatggcatttttgttt

SEQ ID NO: 193341 - DNA, 25 bp, Saccharomyces pastorianus
taaagattatccagacacatgcgcc

SEQ ID NO: 193342 - DNA, 25 bp, Saccharomyces pastorianus
tatccagacacatgcgccgtaattg

SEQ ID NO: 193343 - DNA, 25 bp, Saccharomyces pastorianus
tttttgatacgctgaagattcccat

SEQ ID NO: 193344 - DNA, 25 bp, Saccharomyces pastorianus
atctaagttacctgatacaagaact

SEQ ID NO: 193345 - DNA, 25 bp, Saccharomyces pastorianus
aaataatctaagttacctgatacaa

SEQ ID NO: 193346 - DNA, 25 bp, Saccharomyces pastorianus
ttattaaataatctaagttacctga

SEQ ID NO: 193347 - DNA, 25 bp, Saccharomyces pastorianus
taatctaagttacctgatacaagaa

SEQ ID NO: 193348 - DNA, 25 bp, Saccharomyces pastorianus
ataatctaagttacctgatacaaga

SEQ ID NO: 193349 - DNA, 25 bp, Saccharomyces pastorianus
tattaaataatctaagttacctgat

SEQ ID NO: 193350 - DNA, 25 bp, Saccharomyces pastorianus
aataatctaagttacctgatacaag

SEQ ID NO: 193351 - DNA, 25 bp, Saccharomyces pastorianus
ttaaataatctaagttacctgatac

SEQ ID NO: 193352 - DNA, 25 bp, Saccharomyces pastorianus
attaaataatctaagttacctgata

SEQ ID NO: 193353 - DNA, 25 bp, Saccharomyces pastorianus
taaataatctaagttacctgataca

SEQ ID NO: 193354 - DNA, 25 bp, Saccharomyces pastorianus
aatctaagttacctgatacaagaac

SEQ ID NO: 193355 - DNA, 25 bp, Saccharomyces pastorianus
gaatagaatatgtcaataggctcat

SEQ ID NO: 193356 - DNA, 25 bp, Saccharomyces pastorianus
gaaaaatcccgatgacgaagttata

SEQ ID NO: 193357 - DNA, 25 bp, Saccharomyces pastorianus
gaatatgtcaataggctcatagaag

SEQ ID NO: 193358 - DNA, 25 bp, Saccharomyces pastorianus
aatcccgatgacgaagttatagaac

SEQ ID NO: 193359 - DNA, 25 bp, Saccharomyces pastorianus
tcccgatgacgaagttatagaacaa

SEQ ID NO: 193360 - DNA, 25 bp, Saccharomyces pastorianus
atgtcaataggctcatagaagagaa

SEQ ID NO: 193361 - DNA, 25 bp, Saccharomyces pastorianus
gagaaaaatcccgatgacgaagtta

SEQ ID NO: 193362 - DNA, 25 bp, Saccharomyces pastorianus
tattatagaagaggtaacagttact

SEQ ID NO: 193363 - DNA, 25 bp, Saccharomyces pastorianus
gagactagacgaagctttacaagat

SEQ ID NO: 193364 - DNA, 25 bp, Saccharomyces pastorianus
caagcaaaggcttattatagaagag

SEQ ID NO: 193365 - DNA, 25 bp, Saccharomyces pastorianus
tgtaaagagaaaaatcccgatgacg

SEQ ID NO: 193366 - DNA, 25 bp, Saccharomyces pastorianus
cgttgtgttgatgactcggtgattc

SEQ ID NO: 193367 - DNA, 25 bp, Saccharomyces pastorianus
tcaaatcgggcgcacgttacgtaaa

SEQ ID NO: 193368 - DNA, 25 bp, Saccharomyces pastorianus
aaatctgctaggtcaaatcgggcgc

SEQ ID NO: 193369 - DNA, 25 bp, Saccharomyces pastorianus
acgacgaatttcacagtctctgtat

SEQ ID NO: 193370 - DNA, 25 bp, Saccharomyces pastorianus
gatcagatcactacagattcactgt

SEQ ID NO: 193371 - DNA, 25 bp, Saccharomyces pastorianus
gattcactgtcgtactttttcagca

SEQ ID NO: 193372 - DNA, 25 bp, Saccharomyces pastorianus
gtctgactgcattcattcctgagaa

SEQ ID NO: 193373 - DNA, 25 bp, Saccharomyces pastorianus
aactaaggaggcatttgtggcgtta

SEQ ID NO: 193374 - DNA, 25 bp, Saccharomyces pastorianus
atctgacgtatcttgatcttggttt

SEQ ID NO: 193375 - DNA, 25 bp, Saccharomyces pastorianus
gctttattaccgcagtacctagtca

SEQ ID NO: 193376 - DNA, 25 bp, Saccharomyces pastorianus
gttagcctgtcctaatctgacgtat

SEQ ID NO: 193377 - DNA, 25 bp, Saccharomyces pastorianus
caatgaggacacttaacggtacaac

SEQ ID NO: 193378 - DNA, 25 bp, Saccharomyces pastorianus
ttagcctcatggtttataccccgag

SEQ ID NO: 193379 - DNA, 25 bp, Saccharomyces pastorianus
gaaagtacggtcaatagcaagagaa

SEQ ID NO: 193380 - DNA, 25 bp, Saccharomyces pastorianus
gaaactccagaaataagctctactt

SEQ ID NO: 193381 - DNA, 25 bp, Saccharomyces pastorianus
gatgagaccattatcagtgttgatg

SEQ ID NO: 193382 - DNA, 25 bp, Saccharomyces pastorianus
ctccgtaaataccattcaatgagga

SEQ ID NO: 193383 - DNA, 25 bp, Saccharomyces pastorianus
aattttaccacgaggagaacaggtg

SEQ ID NO: 193384 - DNA, 25 bp, Saccharomyces pastorianus
agctctactttccatttgagttcaa

SEQ ID NO: 193385 - DNA, 25 bp, Saccharomyces pastorianus
gtttataccccgagatgagaccatt

SEQ ID NO: 193386 - DNA, 25 bp, Saccharomyces pastorianus
ggtggtgtaaaaagttagcctcatg

SEQ ID NO: 193387 - DNA, 25 bp, Saccharomyces pastorianus
ttaacggtacaacagaaactccaga

SEQ ID NO: 193388 - DNA, 25 bp, Saccharomyces pastorianus
tgaaagcgtacttcagggagcctga

SEQ ID NO: 193389 - DNA, 25 bp, Saccharomyces pastorianus
ctcgaatctcagacttttgacgatt

SEQ ID NO: 193390 - DNA, 25 bp, Saccharomyces pastorianus
aacagtagtagacctagaccacctc

SEQ ID NO: 193391 - DNA, 25 bp, Saccharomyces pastorianus
gtcaggatgtatgtgggcccattcc

SEQ ID NO: 193392 - DNA, 25 bp, Saccharomyces pastorianus
cagggagcctgatcttccgaggaag

SEQ ID NO: 193393 - DNA, 25 bp, Saccharomyces pastorianus
tagaccacctcctttacagacaaaa

SEQ ID NO: 193394 - DNA, 25 bp, Saccharomyces pastorianus
aatcgttcgttgacaatggcaatcc

SEQ ID NO: 193395 - DNA, 25 bp, Saccharomyces pastorianus
acaaaatacactctgctggacaatt

SEQ ID NO: 193396 - DNA, 25 bp, Saccharomyces pastorianus
gtttcacgggccattagattctatg

SEQ ID NO: 193397 - DNA, 25 bp, Saccharomyces pastorianus
gattctctgcgattctagattcacc

SEQ ID NO: 193398 - DNA, 25 bp, Saccharomyces pastorianus
acaatataccactagattctctgcg

SEQ ID NO: 193399 - DNA, 25 bp, Saccharomyces pastorianus
gtaggtccaccacaactcaatatga

SEQ ID NO: 193400 - DNA, 25 bp, Saccharomyces pastorianus
catcgaatcagttataaggcaagtt

SEQ ID NO: 193401 - DNA, 25 bp, Saccharomyces pastorianus
gggcaatctcactgtaggtccacca

SEQ ID NO: 193402 - DNA, 25 bp, Saccharomyces pastorianus
tggttcatcattgagaagacaagtt

SEQ ID NO: 193403 - DNA, 25 bp, Saccharomyces pastorianus
gggttgataaaccacgaaatatcgc

SEQ ID NO: 193404 - DNA, 25 bp, Saccharomyces pastorianus
ggagatgcgtggtagatttgaatta

SEQ ID NO: 193405 - DNA, 25 bp, Saccharomyces pastorianus
agaaggtcggtatcacaggtaaata

SEQ ID NO: 193406 - DNA, 25 bp, Saccharomyces pastorianus
agccaggatagatggtagcgcattt

SEQ ID NO: 193407 - DNA, 25 bp, Saccharomyces pastorianus
actcaatatgactacatcgaatcag

SEQ ID NO: 193408 - DNA, 25 bp, Saccharomyces pastorianus
cacgaaatatcgcagttgaggagaa

SEQ ID NO: 193409 - DNA, 25 bp, Saccharomyces pastorianus
ggatgactaaatgttcttatattgg

SEQ ID NO: 193410 - DNA, 25 bp, Saccharomyces pastorianus
attgtcaaggactctccagttgaaa

SEQ ID NO: 193411 - DNA, 25 bp, Saccharomyces pastorianus
gctcaaagaattgtcaaggactctc

SEQ ID NO: 193412 - DNA, 25 bp, Saccharomyces pastorianus
gactctccagttgaaaagactgtca

SEQ ID NO: 193413 - DNA, 25 bp, Saccharomyces pastorianus
atatccagtcaaacctttggactct

SEQ ID NO: 193414 - DNA, 25 bp, Saccharomyces pastorianus
tgtcctccaagggtaccagcacata

SEQ ID NO: 193415 - DNA, 25 bp, Saccharomyces pastorianus
tcctccaagggtaccagcacatatc

SEQ ID NO: 193416 - DNA, 25 bp, Saccharomyces pastorianus
caaggactctccagttgaaaagact

SEQ ID NO: 193417 - DNA, 25 bp, Saccharomyces pastorianus
tgtcaaggactctccagttgaaaag

SEQ ID NO: 193418 - DNA, 25 bp, Saccharomyces pastorianus
gcacatatccagtcaaacctttgga

SEQ ID NO: 193419 - DNA, 25 bp, Saccharomyces pastorianus
cagcacatatccagtcaaacctttg

SEQ ID NO: 193420 - DNA, 25 bp, Saccharomyces pastorianus
gaattgtcaaggactctccagttga

SEQ ID NO: 193421 - DNA, 25 bp, Saccharomyces pastorianus
gatccgttagtgctgacattcgcaa

SEQ ID NO: 193422 - DNA, 25 bp, Saccharomyces pastorianus
gaaattcaatttcgtaagggctatt

SEQ ID NO: 193423 - DNA, 25 bp, Saccharomyces pastorianus
aagaggctttgatccgttagtgctg

SEQ ID NO: 193424 - DNA, 25 bp, Saccharomyces pastorianus
tgattatattcctatggttccacca

SEQ ID NO: 193425 - DNA, 25 bp, Saccharomyces pastorianus
ccattctatcatccggctggtttag

SEQ ID NO: 193426 - DNA, 25 bp, Saccharomyces pastorianus
tccggctggtttagagatgtttatt

SEQ ID NO: 193427 - DNA, 25 bp, Saccharomyces pastorianus
agggctattttagggttgtgcatac

SEQ ID NO: 193428 - DNA, 25 bp, Saccharomyces pastorianus
ttgtgcatacaggtgattatattcc

SEQ ID NO: 193429 - DNA, 25 bp, Saccharomyces pastorianus
gcggaagatattgaataccgtggta

SEQ ID NO: 193430 - DNA, 25 bp, Saccharomyces pastorianus
tatggttccaccattctatcatccg

SEQ ID NO: 193431 - DNA, 25 bp, Saccharomyces pastorianus
agttggtctacctcagaatgcggaa

SEQ ID NO: 193432 - DNA, 25 bp, Saccharomyces pastorianus
agtgtctgggactacttcagatcta

SEQ ID NO: 193433 - DNA, 25 bp, Saccharomyces pastorianus
agactgtgtataccaacttttgacg

SEQ ID NO: 193434 - DNA, 25 bp, Saccharomyces pastorianus
gtttaccacttgtattcatgccaat

SEQ ID NO: 193435 - DNA, 25 bp, Saccharomyces pastorianus
ttttgacgcaaaacccagatctatt

SEQ ID NO: 193436 - DNA, 25 bp, Saccharomyces pastorianus
aagtggagtggatttcgccggatct

SEQ ID NO: 193437 - DNA, 25 bp, Saccharomyces pastorianus
tcgtctccccagttttccaacaatt

SEQ ID NO: 193438 - DNA, 25 bp, Saccharomyces pastorianus
gaattacgccataaacgagactcag

SEQ ID NO: 193439 - DNA, 25 bp, Saccharomyces pastorianus
aagcggcatgaatgagcacgatcaa

SEQ ID NO: 193440 - DNA, 25 bp, Saccharomyces pastorianus
gagcatagtaattccgatggcggta

SEQ ID NO: 193441 - DNA, 25 bp, Saccharomyces pastorianus
gaacattcctttccaatagcgagaa

SEQ ID NO: 193442 - DNA, 25 bp, Saccharomyces pastorianus
gactcagtacccatatcggtggata

SEQ ID NO: 193443 - DNA, 25 bp, Saccharomyces pastorianus
acagaacggcttacggcattggaat

SEQ ID NO: 193444 - DNA, 25 bp, Saccharomyces pastorianus
acactggtccatgtatatggccctt

SEQ ID NO: 193445 - DNA, 25 bp, Saccharomyces pastorianus
ttcttaaaacaggacctctggccgg

SEQ ID NO: 193446 - DNA, 25 bp, Saccharomyces pastorianus
tatacaacaaagtctcaacccgcgt

SEQ ID NO: 193447 - DNA, 25 bp, Saccharomyces pastorianus
gcgatcaatggcctgactatgctaa

SEQ ID NO: 193448 - DNA, 25 bp, Saccharomyces pastorianus
tcccctttcggaaacctctatgaga

SEQ ID NO: 193449 - DNA, 25 bp, Saccharomyces pastorianus
aaactcttcgtacccagacttatgg

SEQ ID NO: 193450 - DNA, 25 bp, Saccharomyces pastorianus
tggccggccttccaagagcgatcaa

SEQ ID NO: 193451 - DNA, 25 bp, Saccharomyces pastorianus
atatggccctttgtttgcctttgat

SEQ ID NO: 193452 - DNA, 25 bp, Saccharomyces pastorianus
gataattgcttctttggttccacaa

SEQ ID NO: 193453 - DNA, 25 bp, Saccharomyces pastorianus
tagtaccgcacttagacccaataga

SEQ ID NO: 193454 - DNA, 25 bp, Saccharomyces pastorianus
cgctatgtccctttttcaactggaa

SEQ ID NO: 193455 - DNA, 25 bp, Saccharomyces pastorianus
gtcaaatgcaattccgctatgtccc

SEQ ID NO: 193456 - DNA, 25 bp, Saccharomyces pastorianus
gtccctttttcaactggaaagcaag

SEQ ID NO: 193457 - DNA, 25 bp, Saccharomyces pastorianus
aatgcaattccgctatgtccctttt

SEQ ID NO: 193458 - DNA, 25 bp, Saccharomyces pastorianus
tcttcagggtactttccttggtcga

SEQ ID NO: 193459 - DNA, 25 bp, Saccharomyces pastorianus
gatatttcttcagggtactttcctt

SEQ ID NO: 193460 - DNA, 25 bp, Saccharomyces pastorianus
gaaagcaagttttaacccggatgat

SEQ ID NO: 193461 - DNA, 25 bp, Saccharomyces pastorianus
aacgctgtcaaatgcaattccgcta

SEQ ID NO: 193462 - DNA, 25 bp, Saccharomyces pastorianus
atgcccaagcaaacgctgtcaaatg

SEQ ID NO: 193463 - DNA, 25 bp, Saccharomyces pastorianus
ttaacccggatgatatttcttcagg

SEQ ID NO: 193464 - DNA, 25 bp, Saccharomyces pastorianus
tccttggtcgaaaacttggttcagt

SEQ ID NO: 193465 - DNA, 25 bp, Saccharomyces pastorianus
tcgaccatccccaaagcgattaaag

SEQ ID NO: 193466 - DNA, 25 bp, Saccharomyces pastorianus
taaagtcagttgctctgcgggtgcc

SEQ ID NO: 193467 - DNA, 25 bp, Saccharomyces pastorianus
accagaaccggattgtctatcactc

SEQ ID NO: 193468 - DNA, 25 bp, Saccharomyces pastorianus
taccagcaaagtcatctcaccaatt

SEQ ID NO: 193469 - DNA, 25 bp, Saccharomyces pastorianus
acatgctctggtggtgtttgctcga

SEQ ID NO: 193470 - DNA, 25 bp, Saccharomyces pastorianus
tactgtgaccaactgctcaggtgga

SEQ ID NO: 193471 - DNA, 25 bp, Saccharomyces pastorianus
attgctcattcatctgcttcttata

SEQ ID NO: 193472 - DNA, 25 bp, Saccharomyces pastorianus
gatgtctccggttagtagtttcaac

SEQ ID NO: 193473 - DNA, 25 bp, Saccharomyces pastorianus
gaagatgtcgcctctactaaaaccg

SEQ ID NO: 193474 - DNA, 25 bp, Saccharomyces pastorianus
acctgtaccatgttaactgcaccaa

SEQ ID NO: 193475 - DNA, 25 bp, Saccharomyces pastorianus
accaacggtgcctataatttcgata

SEQ ID NO: 193476 - DNA, 25 bp, Saccharomyces pastorianus
tatcagtgcgaattcctcgggatat

SEQ ID NO: 193477 - DNA, 25 bp, Saccharomyces pastorianus
aggtcgctatggtcgtatgttatgc

SEQ ID NO: 193478 - DNA, 25 bp, Saccharomyces pastorianus
atagctgccgagagagggttccctg

SEQ ID NO: 193479 - DNA, 25 bp, Saccharomyces pastorianus
ggcaggaccacaaacctttattgct

SEQ ID NO: 193480 - DNA, 25 bp, Saccharomyces pastorianus
ttgcgtactttccaatatcagtgcg

SEQ ID NO: 193481 - DNA, 25 bp, Saccharomyces pastorianus
gtccactttttggtattctagcagt

SEQ ID NO: 193482 - DNA, 25 bp, Saccharomyces pastorianus
gcccgtctcatttatttgcgtactt

SEQ ID NO: 193483 - DNA, 25 bp, Saccharomyces pastorianus
aagactggctggtgcttacctgtgg

SEQ ID NO: 193484 - DNA, 25 bp, Saccharomyces pastorianus
tgggctatttttgcagctgtcttag

SEQ ID NO: 193485 - DNA, 25 bp, Saccharomyces pastorianus
atcgtgcttctatctatactgctca

SEQ ID NO: 193486 - DNA, 25 bp, Saccharomyces pastorianus
aggctcctaaatatcatggcgctaa

SEQ ID NO: 193487 - DNA, 25 bp, Saccharomyces pastorianus
tactggaactgctacaggtggcgtt

SEQ ID NO: 193488 - DNA, 25 bp, Saccharomyces pastorianus
actgtattgctgtgaattccggttc

SEQ ID NO: 193489 - DNA, 25 bp, Saccharomyces pastorianus
gaacaactactgctacaatggccat

SEQ ID NO: 193490 - DNA, 25 bp, Saccharomyces pastorianus
gtgcgacaggcacagtcactaatgt

SEQ ID NO: 193491 - DNA, 25 bp, Saccharomyces pastorianus
gttggtggccgttctgataatacag

SEQ ID NO: 193492 - DNA, 25 bp, Saccharomyces pastorianus
taccggtggttcttcctattctgga

SEQ ID NO: 193493 - DNA, 25 bp, Saccharomyces pastorianus
cggtgattcggctggtggtcataat

SEQ ID NO: 193494 - DNA, 25 bp, Saccharomyces pastorianus
aacgctactaactggcaatggtctg

SEQ ID NO: 193495 - DNA, 25 bp, Saccharomyces pastorianus
gttcagatttaaccatcagcgacat

SEQ ID NO: 193496 - DNA, 25 bp, Saccharomyces pastorianus
tacagtcaatggtttctgggctgaa

SEQ ID NO: 193497 - DNA, 25 bp, Saccharomyces pastorianus
gtggcgttcccatttcgaatttagt

SEQ ID NO: 193498 - DNA, 25 bp, Saccharomyces pastorianus
gggtccgcacgattcctgtgggaac

SEQ ID NO: 193499 - DNA, 25 bp, Saccharomyces pastorianus
gtttaccattggaagccttgcaact

SEQ ID NO: 193500 - DNA, 25 bp, Saccharomyces pastorianus
acgacccatcaagcatgtgaacgtt

SEQ ID NO: 193501 - DNA, 25 bp, Saccharomyces pastorianus
agccagtgcaaatcgtacgtcacaa

SEQ ID NO: 193502 - DNA, 25 bp, Saccharomyces pastorianus
ccagggctaccaccgagaagatatt

SEQ ID NO: 193503 - DNA, 25 bp, Saccharomyces pastorianus
gagtccaggacatcttatcagttct

SEQ ID NO: 193504 - DNA, 25 bp, Saccharomyces pastorianus
ggagacgcagttctattcttaggga

SEQ ID NO: 193505 - DNA, 25 bp, Saccharomyces pastorianus
tatagtctacaaggttggcgctggt

SEQ ID NO: 193506 - DNA, 25 bp, Saccharomyces pastorianus
agatattgttcatcatacgacccat

SEQ ID NO: 193507 - DNA, 25 bp, Saccharomyces pastorianus
ttcttagggagcctctaccatgcag

SEQ ID NO: 193508 - DNA, 25 bp, Saccharomyces pastorianus
gtgatattcaactgaactccggtat

SEQ ID NO: 193509 - DNA, 25 bp, Saccharomyces pastorianus
gcgaaacatgttttcccattagtgg

SEQ ID NO: 193510 - DNA, 25 bp, Saccharomyces pastorianus
ttccttttgatgtcggatttcccac

SEQ ID NO: 193511 - DNA, 25 bp, Saccharomyces pastorianus
gtacttcggaacagacggatatgga

SEQ ID NO: 193512 - DNA, 25 bp, Saccharomyces pastorianus
gcagcagggcaaagtactctatcta

SEQ ID NO: 193513 - DNA, 25 bp, Saccharomyces pastorianus
gccatagcttatgttcggtctaaag

SEQ ID NO: 193514 - DNA, 25 bp, Saccharomyces pastorianus
ccaagaaaccttcatttctcaccga

SEQ ID NO: 193515 - DNA, 25 bp, Saccharomyces pastorianus
gatgacccagctgttaccaagaaac

SEQ ID NO: 193516 - DNA, 25 bp, Saccharomyces pastorianus
aagtactctatctaggtgtgtctga

SEQ ID NO: 193517 - DNA, 25 bp, Saccharomyces pastorianus
gtcggatttcccactaattttattg

SEQ ID NO: 193518 - DNA, 25 bp, Saccharomyces pastorianus
gagaaggcttgcgtaccttttttgg

SEQ ID NO: 193519 - DNA, 25 bp, Saccharomyces pastorianus
tgtcactgctattgccatagcttat

SEQ ID NO: 193520 - DNA, 25 bp, Saccharomyces pastorianus
ttatgccaatattacaaaaaaatca

SEQ ID NO: 193521 - DNA, 25 bp, Saccharomyces pastorianus
tatacacttatgccaatattacaaa

SEQ ID NO: 193522 - DNA, 25 bp, Saccharomyces pastorianus
aactcccacgattatccacatttta

SEQ ID NO: 193523 - DNA, 25 bp, Saccharomyces pastorianus
atacacttatgccaatattacaaaa

SEQ ID NO: 193524 - DNA, 25 bp, Saccharomyces pastorianus
tgccaatattacaaaaaaatcacca

SEQ ID NO: 193525 - DNA, 25 bp, Saccharomyces pastorianus
tacacttatgccaatattacaaaaa

SEQ ID NO: 193526 - DNA, 25 bp, Saccharomyces pastorianus
cttatgccaatattacaaaaaaatc

SEQ ID NO: 193527 - DNA, 25 bp, Saccharomyces pastorianus
taactcccacgattatccacatttt

SEQ ID NO: 193528 - DNA, 25 bp, Saccharomyces pastorianus
ataactcccacgattatccacattt

SEQ ID NO: 193529 - DNA, 25 bp, Saccharomyces pastorianus
atgccaatattacaaaaaaatcacc

SEQ ID NO: 193530 - DNA, 25 bp, Saccharomyces pastorianus
tatgccaatattacaaaaaaatcac

SEQ ID NO: 193531 - DNA, 25 bp, Saccharomyces pastorianus
tatcgtcgtcatacgatgaatccgt

SEQ ID NO: 193532 - DNA, 25 bp, Saccharomyces pastorianus
acgatgaatccgttaggctttggga

SEQ ID NO: 193533 - DNA, 25 bp, Saccharomyces pastorianus
acgtttctatcgtcgtcatacgatg

SEQ ID NO: 193534 - DNA, 25 bp, Saccharomyces pastorianus
gaacgatacgtttctatcgtcgtca

SEQ ID NO: 193535 - DNA, 25 bp, Saccharomyces pastorianus
tgaaccccgtgaacgatacgtttct

SEQ ID NO: 193536 - DNA, 25 bp, Saccharomyces pastorianus
cgtcgtcatacgatgaatccgttag

SEQ ID NO: 193537 - DNA, 25 bp, Saccharomyces pastorianus
gtttctatcgtcgtcatacgatgaa

SEQ ID NO: 193538 - DNA, 25 bp, Saccharomyces pastorianus
gtcatacgatgaatccgttaggctt

SEQ ID NO: 193539 - DNA, 25 bp, Saccharomyces pastorianus
atccgttaggctttgggatttgaag

SEQ ID NO: 193540 - DNA, 25 bp, Saccharomyces pastorianus
ccccgtgaacgatacgtttctatcg

SEQ ID NO: 193541 - DNA, 25 bp, Saccharomyces pastorianus
gatacgtttctatcgtcgtcatacg

SEQ ID NO: 193542 - DNA, 25 bp, Saccharomyces pastorianus
tcatcttcagatgagattgctttgg

SEQ ID NO: 193543 - DNA, 25 bp, Saccharomyces pastorianus
taccaaaaactactaagactagcat

SEQ ID NO: 193544 - DNA, 25 bp, Saccharomyces pastorianus
ggaacagaatgctaactcgtttaaa

SEQ ID NO: 193545 - DNA, 25 bp, Saccharomyces pastorianus
gagcctgacggatctttatggaaca

SEQ ID NO: 193546 - DNA, 25 bp, Saccharomyces pastorianus
gtgattgtgaatcatcttcagatga

SEQ ID NO: 193547 - DNA, 25 bp, Saccharomyces pastorianus
ctagattcggattcaggttatgaca

SEQ ID NO: 193548 - DNA, 25 bp, Saccharomyces pastorianus
tggagttctttaacacccacaaaat

SEQ ID NO: 193549 - DNA, 25 bp, Saccharomyces pastorianus
acccacaaaatcaaggacttctctt

SEQ ID NO: 193550 - DNA, 25 bp, Saccharomyces pastorianus
gattgctttggagttctttaacacc

SEQ ID NO: 193551 - DNA, 25 bp, Saccharomyces pastorianus
agactagcatagagcctgacggatc

SEQ ID NO: 193552 - DNA, 25 bp, Saccharomyces pastorianus
aaggacttctcttcaaagccaaatg

SEQ ID NO: 193553 - DNA, 25 bp, Saccharomyces pastorianus
gttctattgtgtgtttctcaccacc

SEQ ID NO: 193554 - DNA, 25 bp, Saccharomyces pastorianus
aagcagtcgctctcgttctattgtg

SEQ ID NO: 193555 - DNA, 25 bp, Saccharomyces pastorianus
ttatgacgttttcgagtgcgaggat

SEQ ID NO: 193556 - DNA, 25 bp, Saccharomyces pastorianus
gaaggcggccatactcattaaaaac

SEQ ID NO: 193557 - DNA, 25 bp, Saccharomyces pastorianus
ttttcgagtgcgaggatgtcagaaa

SEQ ID NO: 193558 - DNA, 25 bp, Saccharomyces pastorianus
ggaagaactctacagctcgaacaat

SEQ ID NO: 193559 - DNA, 25 bp, Saccharomyces pastorianus
gtaattatgacgttttcgagtgcga

SEQ ID NO: 193560 - DNA, 25 bp, Saccharomyces pastorianus
ttccctctttcgtttgcaaaagaag

SEQ ID NO: 193561 - DNA, 25 bp, Saccharomyces pastorianus
tatggatgcatctctctgcatataa

SEQ ID NO: 193562 - DNA, 25 bp, Saccharomyces pastorianus
gacgttttcgagtgcgaggatgtca

SEQ ID NO: 193563 - DNA, 25 bp, Saccharomyces pastorianus
aattatgacgttttcgagtgcgagg

SEQ ID NO: 193564 - DNA, 25 bp, Saccharomyces pastorianus
acaagagctcttctggtttctacgc

SEQ ID NO: 193565 - DNA, 25 bp, Saccharomyces pastorianus
tgctgccactggtttttctattaaa

SEQ ID NO: 193566 - DNA, 25 bp, Saccharomyces pastorianus
gacgctaccggtgttgcgattagac

SEQ ID NO: 193567 - DNA, 25 bp, Saccharomyces pastorianus
tgtcgagacctctactactgtggaa

SEQ ID NO: 193568 - DNA, 25 bp, Saccharomyces pastorianus
gtttctacgctatcaaggacgggtc

SEQ ID NO: 193569 - DNA, 25 bp, Saccharomyces pastorianus
agatttttctccaagcgactctagt

SEQ ID NO: 193570 - DNA, 25 bp, Saccharomyces pastorianus
ttccggctcggatttacaatacttg

SEQ ID NO: 193571 - DNA, 25 bp, Saccharomyces pastorianus
ggtcgtcttacattttctcttctaa

SEQ ID NO: 193572 - DNA, 25 bp, Saccharomyces pastorianus
ttgaggcaactattaccgatgacgg

SEQ ID NO: 193573 - DNA, 25 bp, Saccharomyces pastorianus
ggcactttgaaacttggcagcggta

SEQ ID NO: 193574 - DNA, 25 bp, Saccharomyces pastorianus
aaggttctgagagcgatgctgccac

SEQ ID NO: 193575 - DNA, 25 bp, Saccharomyces pastorianus
ttccagctgaacaagtcaccagagt

SEQ ID NO: 193576 - DNA, 25 bp, Saccharomyces pastorianus
tattccagctgaacaagtcaccaga

SEQ ID NO: 193577 - DNA, 25 bp, Saccharomyces pastorianus
gttgactggtattccagctgaacaa

SEQ ID NO: 193578 - DNA, 25 bp, Saccharomyces pastorianus
gtattccagctgaacaagtcaccag

SEQ ID NO: 193579 - DNA, 25 bp, Saccharomyces pastorianus
ctggtattccagctgaacaagtcac

SEQ ID NO: 193580 - DNA, 25 bp, Saccharomyces pastorianus
ttgactggtattccagctgaacaag

SEQ ID NO: 193581 - DNA, 25 bp, Saccharomyces pastorianus
tgactggtattccagctgaacaagt

SEQ ID NO: 193582 - DNA, 25 bp, Saccharomyces pastorianus
tggtattccagctgaacaagtcacc

SEQ ID NO: 193583 - DNA, 25 bp, Saccharomyces pastorianus
actggtattccagctgaacaagtca

SEQ ID NO: 193584 - DNA, 25 bp, Saccharomyces pastorianus
ggtattccagctgaacaagtcacca

SEQ ID NO: 193585 - DNA, 25 bp, Saccharomyces pastorianus
attccagctgaacaagtcaccagag

SEQ ID NO: 193586 - DNA, 25 bp, Saccharomyces pastorianus
gcatacattataccacttttactcc

SEQ ID NO: 193587 - DNA, 25 bp, Saccharomyces pastorianus
aatatacccacaaaatcaccactaa

SEQ ID NO: 193588 - DNA, 25 bp, Saccharomyces pastorianus
atgcatacattataccacttttact

SEQ ID NO: 193589 - DNA, 25 bp, Saccharomyces pastorianus
tgcatacattataccacttttactc

SEQ ID NO: 193590 - DNA, 25 bp, Saccharomyces pastorianus
tactccatatactaaccattcaatt

SEQ ID NO: 193591 - DNA, 25 bp, Saccharomyces pastorianus
atatacccacaaaatcaccactaaa

SEQ ID NO: 193592 - DNA, 25 bp, Saccharomyces pastorianus
gtgcaatttacccataaaacccacg

SEQ ID NO: 193593 - DNA, 25 bp, Saccharomyces pastorianus
tgcaatttacccataaaacccacga

SEQ ID NO: 193594 - DNA, 25 bp, Saccharomyces pastorianus
acattataccacttttactccatat

SEQ ID NO: 193595 - DNA, 25 bp, Saccharomyces pastorianus
caatatacccacaaaatcaccacta

SEQ ID NO: 193596 - DNA, 25 bp, Saccharomyces pastorianus
tatacacacttatttcaatataccc

SEQ ID NO: 193597 - DNA, 25 bp, Saccharomyces pastorianus
cgaactataccttgtaccactacag

SEQ ID NO: 193598 - DNA, 25 bp, Saccharomyces pastorianus
cgacgtctatgtttccaaaacatta

SEQ ID NO: 193599 - DNA, 25 bp, Saccharomyces pastorianus
atgatgggctgtttcgaggaacgat

SEQ ID NO: 193600 - DNA, 25 bp, Saccharomyces pastorianus
agatgcggccagtagtgagacttta

SEQ ID NO: 193601 - DNA, 25 bp, Saccharomyces pastorianus
agcttggtggacatgttgcgtgaca

SEQ ID NO: 193602 - DNA, 25 bp, Saccharomyces pastorianus
gtctggccattttctacacgaacta

SEQ ID NO: 193603 - DNA, 25 bp, Saccharomyces pastorianus
gtcgttagagtctggccattttcta

SEQ ID NO: 193604 - DNA, 25 bp, Saccharomyces pastorianus
gttgcgtgacagtcacagcaactgg

SEQ ID NO: 193605 - DNA, 25 bp, Saccharomyces pastorianus
actacagtggcagcttggtggacat

SEQ ID NO: 193606 - DNA, 25 bp, Saccharomyces pastorianus
taaagcgacagatgcagatgcggcc

SEQ ID NO: 193607 - DNA, 25 bp, Saccharomyces pastorianus
gaatggtattgttttatgatgggct

SEQ ID NO: 193608 - DNA, 25 bp, Saccharomyces pastorianus
gtaaccacaactttaacatcttcaa

SEQ ID NO: 193609 - DNA, 25 bp, Saccharomyces pastorianus
aactactaccgctagtccaactact

SEQ ID NO: 193610 - DNA, 25 bp, Saccharomyces pastorianus
ggatgatgtaaccacaactttaaca

SEQ ID NO: 193611 - DNA, 25 bp, Saccharomyces pastorianus
taacatcttcaacacaacctaccag

SEQ ID NO: 193612 - DNA, 25 bp, Saccharomyces pastorianus
aacctccgcaagtgccacacaggat

SEQ ID NO: 193613 - DNA, 25 bp, Saccharomyces pastorianus
ctttaacatcttcaacacaacctac

SEQ ID NO: 193614 - DNA, 25 bp, Saccharomyces pastorianus
actaccgctagtccaactactactg

SEQ ID NO: 193615 - DNA, 25 bp, Saccharomyces pastorianus
tccgcaagtgccacacaggatgatg

SEQ ID NO: 193616 - DNA, 25 bp, Saccharomyces pastorianus
tcaagctccgatttctcaacgtcaa

SEQ ID NO: 193617 - DNA, 25 bp, Saccharomyces pastorianus
aagcactcaatcctcaagctccgat

SEQ ID NO: 193618 - DNA, 25 bp, Saccharomyces pastorianus
gtgccacacaggatgatgtaaccac

SEQ ID NO: 193619 - DNA, 25 bp, Saccharomyces pastorianus
gttgataaccaaatgctcttagcca

SEQ ID NO: 193620 - DNA, 25 bp, Saccharomyces pastorianus
gaacatgaagtttcagccaagcttg

SEQ ID NO: 193621 - DNA, 25 bp, Saccharomyces pastorianus
tgttgaatgagggacgaaccgtatt

SEQ ID NO: 193622 - DNA, 25 bp, Saccharomyces pastorianus
cggatgcatctcataatttgacgaa

SEQ ID NO: 193623 - DNA, 25 bp, Saccharomyces pastorianus
taaaatggtcatttgccgtggcata

SEQ ID NO: 193624 - DNA, 25 bp, Saccharomyces pastorianus
gaaatacactttctactatagattg

SEQ ID NO: 193625 - DNA, 25 bp, Saccharomyces pastorianus
gtatctcatggattgatggacagtt

SEQ ID NO: 193626 - DNA, 25 bp, Saccharomyces pastorianus
atggacagttcctatcagaaagttt

SEQ ID NO: 193627 - DNA, 25 bp, Saccharomyces pastorianus
gccgtggcatattactcggatgcat

SEQ ID NO: 193628 - DNA, 25 bp, Saccharomyces pastorianus
tcagccaagcttgattggaacctgg

SEQ ID NO: 193629 - DNA, 25 bp, Saccharomyces pastorianus
ttgggcacgaaagttcatgcactac

SEQ ID NO: 193630 - DNA, 25 bp, Saccharomyces pastorianus
tatcgctacttcaccagtacacgaa

SEQ ID NO: 193631 - DNA, 25 bp, Saccharomyces pastorianus
gaaggccgaagaacttatcttcacc

SEQ ID NO: 193632 - DNA, 25 bp, Saccharomyces pastorianus
aaatcctctggatggtatcgctact

SEQ ID NO: 193633 - DNA, 25 bp, Saccharomyces pastorianus
acttcaccagtacacgaaattgcgt

SEQ ID NO: 193634 - DNA, 25 bp, Saccharomyces pastorianus
aagaacttatcttcacctctgtgaa

SEQ ID NO: 193635 - DNA, 25 bp, Saccharomyces pastorianus
atcttcacctctgtgaatttgctag

SEQ ID NO: 193636 - DNA, 25 bp, Saccharomyces pastorianus
gcgtacttctacaatggttataata

SEQ ID NO: 193637 - DNA, 25 bp, Saccharomyces pastorianus
cttcaaatcgaagaacctgccatta

SEQ ID NO: 193638 - DNA, 25 bp, Saccharomyces pastorianus
ggatggtatcgctacttcaccagta

SEQ ID NO: 193639 - DNA, 25 bp, Saccharomyces pastorianus
gaaattgcgtacttctacaatggtt

SEQ ID NO: 193640 - DNA, 25 bp, Saccharomyces pastorianus
cctctgtgaatttgctaggtaagaa

SEQ ID NO: 193641 - DNA, 25 bp, Saccharomyces pastorianus
gattccggagcaattaatactttac

SEQ ID NO: 193642 - DNA, 25 bp, Saccharomyces pastorianus
tatctggaagcggtctaacttgccc

SEQ ID NO: 193643 - DNA, 25 bp, Saccharomyces pastorianus
atactttacccgaagatggattgat

SEQ ID NO: 193644 - DNA, 25 bp, Saccharomyces pastorianus
cgggtgattccggagcaattaatac

SEQ ID NO: 193645 - DNA, 25 bp, Saccharomyces pastorianus
atagtctattggcagaaatttacac

SEQ ID NO: 193646 - DNA, 25 bp, Saccharomyces pastorianus
atcatagtccgtgatatctggaagc

SEQ ID NO: 193647 - DNA, 25 bp, Saccharomyces pastorianus
gaaatttacacgaaggtagacacaa

SEQ ID NO: 193648 - DNA, 25 bp, Saccharomyces pastorianus
gtctaacttgcccaatagtctattg

SEQ ID NO: 193649 - DNA, 25 bp, Saccharomyces pastorianus
gatattgggtatcatagtccgtgat

SEQ ID NO: 193650 - DNA, 25 bp, Saccharomyces pastorianus
ttttattgtgggtatgtggctggtc

SEQ ID NO: 193651 - DNA, 25 bp, Saccharomyces pastorianus
gaagcggtctaacttgcccaatagt

SEQ ID NO: 193652 - DNA, 25 bp, Saccharomyces pastorianus
ttagtcacaaaaagtccctgagggt

SEQ ID NO: 193653 - DNA, 25 bp, Saccharomyces pastorianus
aagtcaacgaccttctcaaagaaat

SEQ ID NO: 193654 - DNA, 25 bp, Saccharomyces pastorianus
aaaagccagcgaggctcattctggg

SEQ ID NO: 193655 - DNA, 25 bp, Saccharomyces pastorianus
gtccctgagggtgagcagtctgaac

SEQ ID NO: 193656 - DNA, 25 bp, Saccharomyces pastorianus
gaaaccgagactaacaattctatca

SEQ ID NO: 193657 - DNA, 25 bp, Saccharomyces pastorianus
ttacaaacgccaatgaagaccaaat

SEQ ID NO: 193658 - DNA, 25 bp, Saccharomyces pastorianus
agaagagataaagaacctgcccttt

SEQ ID NO: 193659 - DNA, 25 bp, Saccharomyces pastorianus
aaaggtcgtcaagaagcacgtatag

SEQ ID NO: 193660 - DNA, 25 bp, Saccharomyces pastorianus
aattcacaataagctcttgggcaaa

SEQ ID NO: 193661 - DNA, 25 bp, Saccharomyces pastorianus
ctgccctttaagaggctagtacaaa

SEQ ID NO: 193662 - DNA, 25 bp, Saccharomyces pastorianus
atagataccgaagcaaacactgaga

SEQ ID NO: 193663 - DNA, 25 bp, Saccharomyces pastorianus
cgagatatatcttcattttcattaa

SEQ ID NO: 193664 - DNA, 25 bp, Saccharomyces pastorianus
ttcctgtttttcttcctttgaggct

SEQ ID NO: 193665 - DNA, 25 bp, Saccharomyces pastorianus
gagcttattagtttcctgtttttct

SEQ ID NO: 193666 - DNA, 25 bp, Saccharomyces pastorianus
acagttgtaatctttcatttttctt

SEQ ID NO: 193667 - DNA, 25 bp, Saccharomyces pastorianus
aggctttattggcttgcttttgtaa

SEQ ID NO: 193668 - DNA, 25 bp, Saccharomyces pastorianus
agtgttttccaaacctgctgcagaa

SEQ ID NO: 193669 - DNA, 25 bp, Saccharomyces pastorianus
gcacgtttgagcttattagtttcct

SEQ ID NO: 193670 - DNA, 25 bp, Saccharomyces pastorianus
ggcttgcttttgtaattgttttgat

SEQ ID NO: 193671 - DNA, 25 bp, Saccharomyces pastorianus
gcattggatgcatatatacgagata

SEQ ID NO: 193672 - DNA, 25 bp, Saccharomyces pastorianus
tttctttcttatagcattggatgca

SEQ ID NO: 193673 - DNA, 25 bp, Saccharomyces pastorianus
tcctttgaggctttattggcttgct

SEQ ID NO: 193674 - DNA, 25 bp, Saccharomyces pastorianus
ttatcttcacacctacacatagcga

SEQ ID NO: 193675 - DNA, 25 bp, Saccharomyces pastorianus
gaagcaccaatgataggagccctcc

SEQ ID NO: 193676 - DNA, 25 bp, Saccharomyces pastorianus
aaattggtaacaggctcgatggaca

SEQ ID NO: 193677 - DNA, 25 bp, Saccharomyces pastorianus
ggagccctccaatgttacaactctg

SEQ ID NO: 193678 - DNA, 25 bp, Saccharomyces pastorianus
tggcattgtgcgactatgggatcta

SEQ ID NO: 193679 - DNA, 25 bp, Saccharomyces pastorianus
gacgggcaaatgtattcagcaactt

SEQ ID NO: 193680 - DNA, 25 bp, Saccharomyces pastorianus
atgcctgcacgttcattaaacaatg

SEQ ID NO: 193681 - DNA, 25 bp, Saccharomyces pastorianus
tcagcaacttgaccttatcttcaca

SEQ ID NO: 193682 - DNA, 25 bp, Saccharomyces pastorianus
gttggcaaaccggtgagattactag

SEQ ID NO: 193683 - DNA, 25 bp, Saccharomyces pastorianus
gcatgtttacttggcacagaagcac

SEQ ID NO: 193684 - DNA, 25 bp, Saccharomyces pastorianus
ttccactgggatttaacgacgggca

SEQ ID NO: 193685 - DNA, 25 bp, Saccharomyces pastorianus
atatcggcgcttttactgcatgctg

SEQ ID NO: 193686 - DNA, 25 bp, Saccharomyces pastorianus
ttgtcgtcatcgctgttcatataat

SEQ ID NO: 193687 - DNA, 25 bp, Saccharomyces pastorianus
tctcctgcgctttctgacgaaaatt

SEQ ID NO: 193688 - DNA, 25 bp, Saccharomyces pastorianus
ttttttctcttgacacttcggcgta

SEQ ID NO: 193689 - DNA, 25 bp, Saccharomyces pastorianus
gtaacacacttgtagcctgctatgc

SEQ ID NO: 193690 - DNA, 25 bp, Saccharomyces pastorianus
aagcgtagcctcatgactagttgta

SEQ ID NO: 193691 - DNA, 25 bp, Saccharomyces pastorianus
atcgccactggtacaagccgtatgg

SEQ ID NO: 193692 - DNA, 25 bp, Saccharomyces pastorianus
tataatcgtcgtcactcatatcggc

SEQ ID NO: 193693 - DNA, 25 bp, Saccharomyces pastorianus
agccgtatggtgcttttttgctcat

SEQ ID NO: 193694 - DNA, 25 bp, Saccharomyces pastorianus
atgacttcgtttcaagcggtctctt

SEQ ID NO: 193695 - DNA, 25 bp, Saccharomyces pastorianus
tagttgcaacgtagtcttcttctct

SEQ ID NO: 193696 - DNA, 25 bp, Saccharomyces pastorianus
ccgttcgacagtattggcgcatgac

SEQ ID NO: 193697 - DNA, 25 bp, Saccharomyces pastorianus
gtcatgaggctacgcttttcgagta

SEQ ID NO: 193698 - DNA, 25 bp, Saccharomyces pastorianus
catacggcttgtaccagtggcgatg

SEQ ID NO: 193699 - DNA, 25 bp, Saccharomyces pastorianus
agactagacttgattcgccgcgata

SEQ ID NO: 193700 - DNA, 25 bp, Saccharomyces pastorianus
gattggtccgcgaaaccatcgcaac

SEQ ID NO: 193701 - DNA, 25 bp, Saccharomyces pastorianus
ggtagacgttttcgcctttgaccag

SEQ ID NO: 193702 - DNA, 25 bp, Saccharomyces pastorianus
ttgaagccgaagaacgctacgcgcg

SEQ ID NO: 193703 - DNA, 25 bp, Saccharomyces pastorianus
atgaccaaagacgagccggctacct

SEQ ID NO: 193704 - DNA, 25 bp, Saccharomyces pastorianus
atgagcagtgccttgatggatgcaa

SEQ ID NO: 193705 - DNA, 25 bp, Saccharomyces pastorianus
accctagcggctgtgagtttagata

SEQ ID NO: 193706 - DNA, 25 bp, Saccharomyces pastorianus
gtggcacccggacaaacatcgttat

SEQ ID NO: 193707 - DNA, 25 bp, Saccharomyces pastorianus
gtcaatggtgcttgctcttacgaaa

SEQ ID NO: 193708 - DNA, 25 bp, Saccharomyces pastorianus
taacaacgctggtgtctctgtggaa

SEQ ID NO: 193709 - DNA, 25 bp, Saccharomyces pastorianus
gaaaatggtgtctactctggctctg

SEQ ID NO: 193710 - DNA, 25 bp, Saccharomyces pastorianus
gcttgttctccaggttacgctaaga

SEQ ID NO: 193711 - DNA, 25 bp, Saccharomyces pastorianus
accgatggctctaccgtcaatggtg

SEQ ID NO: 193712 - DNA, 25 bp, Saccharomyces pastorianus
gtggtaccgattatccaggttctga

SEQ ID NO: 193713 - DNA, 25 bp, Saccharomyces pastorianus
tgttaacaaggtctccggctccatt

SEQ ID NO: 193714 - DNA, 25 bp, Saccharomyces pastorianus
gaaaacatggtcgttcctaccgtag

SEQ ID NO: 193715 - DNA, 25 bp, Saccharomyces pastorianus
aaggctctgctcaagctgttaacaa

SEQ ID NO: 193716 - DNA, 25 bp, Saccharomyces pastorianus
aatggccttctgaacaaccttccga

SEQ ID NO: 193717 - DNA, 25 bp, Saccharomyces pastorianus
gctccattgctatctgtggtaccga

SEQ ID NO: 193718 - DNA, 25 bp, Saccharomyces pastorianus
ttgcaaagctcgcctgataagccct

SEQ ID NO: 193719 - DNA, 25 bp, Saccharomyces pastorianus
agttttgcaaagctcgcctgataag

SEQ ID NO: 193720 - DNA, 25 bp, Saccharomyces pastorianus
atacgagttttgcaaagctcgcctg

SEQ ID NO: 193721 - DNA, 25 bp, Saccharomyces pastorianus
tggtacatacgagttttgcaaagct

SEQ ID NO: 193722 - DNA, 25 bp, Saccharomyces pastorianus
gcagtatattttggtacatacgagt

SEQ ID NO: 193723 - DNA, 25 bp, Saccharomyces pastorianus
ttttgcaaagctcgcctgataagcc

SEQ ID NO: 193724 - DNA, 25 bp, Saccharomyces pastorianus
ggtacatacgagttttgcaaagctc

SEQ ID NO: 193725 - DNA, 25 bp, Saccharomyces pastorianus
gttttgcaaagctcgcctgataagc

SEQ ID NO: 193726 - DNA, 25 bp, Saccharomyces pastorianus
acgagttttgcaaagctcgcctgat

SEQ ID NO: 193727 - DNA, 25 bp, Saccharomyces pastorianus
gagttttgcaaagctcgcctgataa

SEQ ID NO: 193728 - DNA, 25 bp, Saccharomyces pastorianus
attttggtacatacgagttttgcaa

SEQ ID NO: 193729 - DNA, 25 bp, Saccharomyces pastorianus
gtaggtacgcatcatgtggttctaa

SEQ ID NO: 193730 - DNA, 25 bp, Saccharomyces pastorianus
tgaggcctctggtaggtgtcgcttc

SEQ ID NO: 193731 - DNA, 25 bp, Saccharomyces pastorianus
gacgtcattagcaagacagctgtct

SEQ ID NO: 193732 - DNA, 25 bp, Saccharomyces pastorianus
gcaggtatacctacaaccgtctttt

SEQ ID NO: 193733 - DNA, 25 bp, Saccharomyces pastorianus
gtttattgtacagcggtgtttccaa

SEQ ID NO: 193734 - DNA, 25 bp, Saccharomyces pastorianus
tacaaccgtctttttgctatgccca

SEQ ID NO: 193735 - DNA, 25 bp, Saccharomyces pastorianus
ggaaggtttctcatatacgcaggta

SEQ ID NO: 193736 - DNA, 25 bp, Saccharomyces pastorianus
gtgtcgcttctgtgattgtttggaa

SEQ ID NO: 193737 - DNA, 25 bp, Saccharomyces pastorianus
aaaggttcatttccataacgagaca

SEQ ID NO: 193738 - DNA, 25 bp, Saccharomyces pastorianus
gttctaaggtgttcttgaggcctct

SEQ ID NO: 193739 - DNA, 25 bp, Saccharomyces pastorianus
gctgtctacacgctgttaattaaac

SEQ ID NO: 193740 - DNA, 25 bp, Saccharomyces pastorianus
gttttacatcaggtcgaactttacg

SEQ ID NO: 193741 - DNA, 25 bp, Saccharomyces pastorianus
gcaactccgaaggtgccatagacca

SEQ ID NO: 193742 - DNA, 25 bp, Saccharomyces pastorianus
gtattaaatcatcactcaccaccac

SEQ ID NO: 193743 - DNA, 25 bp, Saccharomyces pastorianus
gaatggaaagtgcatggctgtttaa

SEQ ID NO: 193744 - DNA, 25 bp, Saccharomyces pastorianus
aaacgtaggcatccgcaatgtatgg

SEQ ID NO: 193745 - DNA, 25 bp, Saccharomyces pastorianus
accagctctgaatgcagcctacaaa

SEQ ID NO: 193746 - DNA, 25 bp, Saccharomyces pastorianus
ctcaccaccaccaacaatgtgtttt

SEQ ID NO: 193747 - DNA, 25 bp, Saccharomyces pastorianus
ggttaccgataataagcaactccga

SEQ ID NO: 193748 - DNA, 25 bp, Saccharomyces pastorianus
aggtgccatagaccagctctgaatg

SEQ ID NO: 193749 - DNA, 25 bp, Saccharomyces pastorianus
attcttcgattactttcttcacatg

SEQ ID NO: 193750 - DNA, 25 bp, Saccharomyces pastorianus
aagggccaattagtatgttcgagaa

SEQ ID NO: 193751 - DNA, 25 bp, Saccharomyces pastorianus
aaagcctgctagtgtcgatcctgct

SEQ ID NO: 193752 - DNA, 25 bp, Saccharomyces pastorianus
ggtataacagcggtggtaacttgaa

SEQ ID NO: 193753 - DNA, 25 bp, Saccharomyces pastorianus
gattactaacactcatatgaccggt

SEQ ID NO: 193754 - DNA, 25 bp, Saccharomyces pastorianus
aagcccgttttggtgaatgagttat

SEQ ID NO: 193755 - DNA, 25 bp, Saccharomyces pastorianus
gatagaatagagtttgaccccaaga

SEQ ID NO: 193756 - DNA, 25 bp, Saccharomyces pastorianus
aagacttgaaagacggttggccaca

SEQ ID NO: 193757 - DNA, 25 bp, Saccharomyces pastorianus
tttcaaatacctttccacctacgat

SEQ ID NO: 193758 - DNA, 25 bp, Saccharomyces pastorianus
gaaaatgtgcaattaccgcaatttg

SEQ ID NO: 193759 - DNA, 25 bp, Saccharomyces pastorianus
gtgtcgatcctgctactatcaaaag

SEQ ID NO: 193760 - DNA, 25 bp, Saccharomyces pastorianus
aaggtatttcctgcaaagacttgaa

SEQ ID NO: 193761 - DNA, 25 bp, Saccharomyces pastorianus
attccccttcggaactgctgaagtt

SEQ ID NO: 193762 - DNA, 25 bp, Saccharomyces pastorianus
gtttgttccatcttattttgcataa

SEQ ID NO: 193763 - DNA, 25 bp, Saccharomyces pastorianus
atagttatatttacttggtcgcata

SEQ ID NO: 193764 - DNA, 25 bp, Saccharomyces pastorianus
tttctttatgatgtacgcacgcacg

SEQ ID NO: 193765 - DNA, 25 bp, Saccharomyces pastorianus
gaaaaactattactcgcggcaagct

SEQ ID NO: 193766 - DNA, 25 bp, Saccharomyces pastorianus
tcgcatatgtgctgaagggtttgtt

SEQ ID NO: 193767 - DNA, 25 bp, Saccharomyces pastorianus
ggcaagcttctgagtttacattaaa

SEQ ID NO: 193768 - DNA, 25 bp, Saccharomyces pastorianus
ttctttctttatgatgtacgcacgc

SEQ ID NO: 193769 - DNA, 25 bp, Saccharomyces pastorianus
tattactcgcggcaagcttctgagt

SEQ ID NO: 193770 - DNA, 25 bp, Saccharomyces pastorianus
tcgcggcaagcttctgagtttacat

SEQ ID NO: 193771 - DNA, 25 bp, Saccharomyces pastorianus
gagcaaattgaaaatgtcgcatatg

SEQ ID NO: 193772 - DNA, 25 bp, Saccharomyces pastorianus
gaagggtttgtttgttccatcttat

SEQ ID NO: 193773 - DNA, 25 bp, Saccharomyces pastorianus
tagagatgtcaagctacctcggcat

SEQ ID NO: 193774 - DNA, 25 bp, Saccharomyces pastorianus
tgccctctttctgctacggaattaa

SEQ ID NO: 193775 - DNA, 25 bp, Saccharomyces pastorianus
tgaatatactacatggtgccctctt

SEQ ID NO: 193776 - DNA, 25 bp, Saccharomyces pastorianus
actgctaccgtcaatgatgtcgtta

SEQ ID NO: 193777 - DNA, 25 bp, Saccharomyces pastorianus
gaaactgcttcacctgctatcgttt

SEQ ID NO: 193778 - DNA, 25 bp, Saccharomyces pastorianus
gttccaacttctgggactacttcta

SEQ ID NO: 193779 - DNA, 25 bp, Saccharomyces pastorianus
aatgtttctgcttctgaggctgtca

SEQ ID NO: 193780 - DNA, 25 bp, Saccharomyces pastorianus
gtcgttacagtttattccacatgga

SEQ ID NO: 193781 - DNA, 25 bp, Saccharomyces pastorianus
ttagtgtatctcaacagcctcgtgg

SEQ ID NO: 193782 - DNA, 25 bp, Saccharomyces pastorianus
actagcggttagttctgacatcgaa

SEQ ID NO: 193783 - DNA, 25 bp, Saccharomyces pastorianus
aggcttcattcgtttcagaggctgc

SEQ ID NO: 193784 - DNA, 25 bp, Saccharomyces pastorianus
tcgaaggactctcttatagcgtcgt

SEQ ID NO: 193785 - DNA, 25 bp, Saccharomyces pastorianus
tttcataatgtcacgccgactggaa

SEQ ID NO: 193786 - DNA, 25 bp, Saccharomyces pastorianus
agcgtaggtttatcactcaatcttt

SEQ ID NO: 193787 - DNA, 25 bp, Saccharomyces pastorianus
tcaatatctctccaatacaccagtt

SEQ ID NO: 193788 - DNA, 25 bp, Saccharomyces pastorianus
ttttttatctcaatatggccaccga

SEQ ID NO: 193789 - DNA, 25 bp, Saccharomyces pastorianus
atagcgtcgttgtttgtctgtggat

SEQ ID NO: 193790 - DNA, 25 bp, Saccharomyces pastorianus
gtacgttatatcttcgtgcatctag

SEQ ID NO: 193791 - DNA, 25 bp, Saccharomyces pastorianus
gatatgttactcctcaatttctgtt

SEQ ID NO: 193792 - DNA, 25 bp, Saccharomyces pastorianus
gcgaagcttctatccagtatcttat

SEQ ID NO: 193793 - DNA, 25 bp, Saccharomyces pastorianus
tacaccagttattcgctgaagccat

SEQ ID NO: 193794 - DNA, 25 bp, Saccharomyces pastorianus
tatgcgctctttattataccgtatg

SEQ ID NO: 193795 - DNA, 25 bp, Saccharomyces pastorianus
ggtggttcaaacttatctcaagggc

SEQ ID NO: 193796 - DNA, 25 bp, Saccharomyces pastorianus
acgatccatgcttggtgcacgtaat

SEQ ID NO: 193797 - DNA, 25 bp, Saccharomyces pastorianus
catcccacaggatcctactttattt

SEQ ID NO: 193798 - DNA, 25 bp, Saccharomyces pastorianus
aagacaacttttgtgcttggcacga

SEQ ID NO: 193799 - DNA, 25 bp, Saccharomyces pastorianus
gaaattctataagctgcatcccaca

SEQ ID NO: 193800 - DNA, 25 bp, Saccharomyces pastorianus
actattgctcatcgattaaggtcag

SEQ ID NO: 193801 - DNA, 25 bp, Saccharomyces pastorianus
gaagcaaccgcctcaatagattata

SEQ ID NO: 193802 - DNA, 25 bp, Saccharomyces pastorianus
gagcagcctaatttttctagtcata

SEQ ID NO: 193803 - DNA, 25 bp, Saccharomyces pastorianus
aacatatccctttagagcgtttaag

SEQ ID NO: 193804 - DNA, 25 bp, Saccharomyces pastorianus
gaaataccattttttaccgcctctg

SEQ ID NO: 193805 - DNA, 25 bp, Saccharomyces pastorianus
gatcctttcgatcggtattctgatg

SEQ ID NO: 193806 - DNA, 25 bp, Saccharomyces pastorianus
atttttgcaaatcgagtcagtccat

SEQ ID NO: 193807 - DNA, 25 bp, Saccharomyces pastorianus
ggttcctgattctgtacaacttgat

SEQ ID NO: 193808 - DNA, 25 bp, Saccharomyces pastorianus
actgcgaatgtggttgataataaga

SEQ ID NO: 193809 - DNA, 25 bp, Saccharomyces pastorianus
gctcaaatgaagaggtatttactca

SEQ ID NO: 193810 - DNA, 25 bp, Saccharomyces pastorianus
gtgcaagatagctcagcacttgttc

SEQ ID NO: 193811 - DNA, 25 bp, Saccharomyces pastorianus
catgggtttatttggttcctgattc

SEQ ID NO: 193812 - DNA, 25 bp, Saccharomyces pastorianus
aagaagcgtttacttttcgtgcaag

SEQ ID NO: 193813 - DNA, 25 bp, Saccharomyces pastorianus
aatcgagtcagtccatgggtttatt

SEQ ID NO: 193814 - DNA, 25 bp, Saccharomyces pastorianus
agcacttgttctagggcttgttgca

SEQ ID NO: 193815 - DNA, 25 bp, Saccharomyces pastorianus
gttctagggcttgttgcaggatttt

SEQ ID NO: 193816 - DNA, 25 bp, Saccharomyces pastorianus
tacttttcgtgcaagatagctcagc

SEQ ID NO: 193817 - DNA, 25 bp, Saccharomyces pastorianus
agaccaatttggaccctttcaatcg

SEQ ID NO: 193818 - DNA, 25 bp, Saccharomyces pastorianus
ccgtaccatcttaacaattgcacat

SEQ ID NO: 193819 - DNA, 25 bp, Saccharomyces pastorianus
aagggctgttgagcaggcacattta

SEQ ID NO: 193820 - DNA, 25 bp, Saccharomyces pastorianus
aagcaacggcttctgtggatatgga

SEQ ID NO: 193821 - DNA, 25 bp, Saccharomyces pastorianus
aatgctgcacagtaaaccaagaggt

SEQ ID NO: 193822 - DNA, 25 bp, Saccharomyces pastorianus
aagagcgctgctaaaccgttccaaa

SEQ ID NO: 193823 - DNA, 25 bp, Saccharomyces pastorianus
ttggtccttgatgaagcaacggctt

SEQ ID NO: 193824 - DNA, 25 bp, Saccharomyces pastorianus
ggcacatttaaagcctcatctggaa

SEQ ID NO: 193825 - DNA, 25 bp, Saccharomyces pastorianus
gattcaccctcgaaattgttatccg

SEQ ID NO: 193826 - DNA, 25 bp, Saccharomyces pastorianus
gataattgttcttgaccagggtagt

SEQ ID NO: 193827 - DNA, 25 bp, Saccharomyces pastorianus
tggaccctttcaatcgttattcaga

SEQ ID NO: 193828 - DNA, 25 bp, Saccharomyces pastorianus
gaatattattccaatactggctttt

SEQ ID NO: 193829 - DNA, 25 bp, Saccharomyces pastorianus
ttgtgtcaagttgttgccactctat

SEQ ID NO: 193830 - DNA, 25 bp, Saccharomyces pastorianus
gccactctatcttttgtttttgtta

SEQ ID NO: 193831 - DNA, 25 bp, Saccharomyces pastorianus
tactggcttttttacaattcattaa

SEQ ID NO: 193832 - DNA, 25 bp, Saccharomyces pastorianus
taatggcgcacattatgcaagcgcg

SEQ ID NO: 193833 - DNA, 25 bp, Saccharomyces pastorianus
atttactctcaaccgcctttcttgt

SEQ ID NO: 193834 - DNA, 25 bp, Saccharomyces pastorianus
ccattgcctcttttcttactatatt

SEQ ID NO: 193835 - DNA, 25 bp, Saccharomyces pastorianus
agatttctgcccattgcctcttttc

SEQ ID NO: 193836 - DNA, 25 bp, Saccharomyces pastorianus
ttttgttacagggtaatggcgcaca

SEQ ID NO: 193837 - DNA, 25 bp, Saccharomyces pastorianus
ggaaccaaaccacatcatttactct

SEQ ID NO: 193838 - DNA, 25 bp, Saccharomyces pastorianus
agaaaattttcttctctatgaacct

SEQ ID NO: 193839 - DNA, 25 bp, Saccharomyces pastorianus
acgtgtcagcgtatttagggtgtca

SEQ ID NO: 193840 - DNA, 25 bp, Saccharomyces pastorianus
tatcagtgaaatcggcagtgtcgct

SEQ ID NO: 193841 - DNA, 25 bp, Saccharomyces pastorianus
cgcataccacgtccatatcagtgaa

SEQ ID NO: 193842 - DNA, 25 bp, Saccharomyces pastorianus
tctcctcgtctttagtccaattttt

SEQ ID NO: 193843 - DNA, 25 bp, Saccharomyces pastorianus
tttgcaaacagagggcgctctcctc

SEQ ID NO: 193844 - DNA, 25 bp, Saccharomyces pastorianus
acctcaattttcgttttctcattct

SEQ ID NO: 193845 - DNA, 25 bp, Saccharomyces pastorianus
tcatttgtcttcagaatagcggcaa

SEQ ID NO: 193846 - DNA, 25 bp, Saccharomyces pastorianus
gaaactatcatttgtcttcagaata

SEQ ID NO: 193847 - DNA, 25 bp, Saccharomyces pastorianus
agaatagcggcaataccaccatctc

SEQ ID NO: 193848 - DNA, 25 bp, Saccharomyces pastorianus
agcgtatttagggtgtcaatgcaac

SEQ ID NO: 193849 - DNA, 25 bp, Saccharomyces pastorianus
aatcggcagtgtcgctttgcaaaca

SEQ ID NO: 193850 - DNA, 25 bp, Saccharomyces pastorianus
ggcgggtggaataagcaagctctca

SEQ ID NO: 193851 - DNA, 25 bp, Saccharomyces pastorianus
aagacagtgaagatacgcccggcgt

SEQ ID NO: 193852 - DNA, 25 bp, Saccharomyces pastorianus
atacgcacgaatatgcccgattctc

SEQ ID NO: 193853 - DNA, 25 bp, Saccharomyces pastorianus
tggaataagcaagctctcatttaga

SEQ ID NO: 193854 - DNA, 25 bp, Saccharomyces pastorianus
gacaacggacaaggaatacgcacga

SEQ ID NO: 193855 - DNA, 25 bp, Saccharomyces pastorianus
ctcacgcgacaaagcttagaaaaga

SEQ ID NO: 193856 - DNA, 25 bp, Saccharomyces pastorianus
tttggatcccctggccgaagaagac

SEQ ID NO: 193857 - DNA, 25 bp, Saccharomyces pastorianus
caccaccagcactagcttagatttc

SEQ ID NO: 193858 - DNA, 25 bp, Saccharomyces pastorianus
cagcactagcttagatttccagaga

SEQ ID NO: 193859 - DNA, 25 bp, Saccharomyces pastorianus
aatatgcccgattctctttggatcc

SEQ ID NO: 193860 - DNA, 25 bp, Saccharomyces pastorianus
atcccctggccgaagaagacagtga

SEQ ID NO: 193861 - DNA, 25 bp, Saccharomyces pastorianus
aagaccaagtcatctatttcagaca

SEQ ID NO: 193862 - DNA, 25 bp, Saccharomyces pastorianus
gggttggtttacgatgtctgtattt

SEQ ID NO: 193863 - DNA, 25 bp, Saccharomyces pastorianus
acatcggacctgagtgacttctcat

SEQ ID NO: 193864 - DNA, 25 bp, Saccharomyces pastorianus
taaatctgttcagcgcggcaaaaga

SEQ ID NO: 193865 - DNA, 25 bp, Saccharomyces pastorianus
agagcctggtttagaaggcctggtt

SEQ ID NO: 193866 - DNA, 25 bp, Saccharomyces pastorianus
aaggcctggttggaagaagagaaat

SEQ ID NO: 193867 - DNA, 25 bp, Saccharomyces pastorianus
tcagcgcggcaaaagaacgtttggt

SEQ ID NO: 193868 - DNA, 25 bp, Saccharomyces pastorianus
tagagcaagaagaacatcggacctg

SEQ ID NO: 193869 - DNA, 25 bp, Saccharomyces pastorianus
gagtgacttctcatacaataacgat

SEQ ID NO: 193870 - DNA, 25 bp, Saccharomyces pastorianus
ggacctgagtgacttctcatacaat

SEQ ID NO: 193871 - DNA, 25 bp, Saccharomyces pastorianus
gaaatgattatgagagcctggttta

SEQ ID NO: 193872 - DNA, 25 bp, Saccharomyces pastorianus
acttatttcaatatacccacaaaat

SEQ ID NO: 193873 - DNA, 25 bp, Saccharomyces pastorianus
ttatttcaatatacccacaaaatca

SEQ ID NO: 193874 - DNA, 25 bp, Saccharomyces pastorianus
aatatacccacaaaatcaccaccaa

SEQ ID NO: 193875 - DNA, 25 bp, Saccharomyces pastorianus
tcaatatacccacaaaatcaccacc

SEQ ID NO: 193876 - DNA, 25 bp, Saccharomyces pastorianus
tatttcaatatacccacaaaatcac

SEQ ID NO: 193877 - DNA, 25 bp, Saccharomyces pastorianus
cacttatttcaatatacccacaaaa

SEQ ID NO: 193878 - DNA, 25 bp, Saccharomyces pastorianus
atatacccacaaaatcaccaccaaa

SEQ ID NO: 193879 - DNA, 25 bp, Saccharomyces pastorianus
tttcaatatacccacaaaatcacca

SEQ ID NO: 193880 - DNA, 25 bp, Saccharomyces pastorianus
atacccacaaaatcaccaccaaaat

SEQ ID NO: 193881 - DNA, 25 bp, Saccharomyces pastorianus
cttatttcaatatacccacaaaatc

SEQ ID NO: 193882 - DNA, 25 bp, Saccharomyces pastorianus
ttcaatatacccacaaaatcaccac

SEQ ID NO: 193883 - DNA, 25 bp, Saccharomyces pastorianus
ttgggttacaaagctaagcaaggtt

SEQ ID NO: 193884 - DNA, 25 bp, Saccharomyces pastorianus
tagaagattgggttacaaagctaag

SEQ ID NO: 193885 - DNA, 25 bp, Saccharomyces pastorianus
attgggttacaaagctaagcaaggt

SEQ ID NO: 193886 - DNA, 25 bp, Saccharomyces pastorianus
aagattgggttacaaagctaagcaa

SEQ ID NO: 193887 - DNA, 25 bp, Saccharomyces pastorianus
tgggttacaaagctaagcaaggttt

SEQ ID NO: 193888 - DNA, 25 bp, Saccharomyces pastorianus
agaagattgggttacaaagctaagc

SEQ ID NO: 193889 - DNA, 25 bp, Saccharomyces pastorianus
ctagaagattgggttacaaagctaa

SEQ ID NO: 193890 - DNA, 25 bp, Saccharomyces pastorianus
gaagattgggttacaaagctaagca

SEQ ID NO: 193891 - DNA, 25 bp, Saccharomyces pastorianus
gattgggttacaaagctaagcaagg

SEQ ID NO: 193892 - DNA, 25 bp, Saccharomyces pastorianus
agattgggttacaaagctaagcaag

SEQ ID NO: 193893 - DNA, 25 bp, Saccharomyces pastorianus
ccggttatccatgattgttggcaaa

SEQ ID NO: 193894 - DNA, 25 bp, Saccharomyces pastorianus
acagagattaagttttgaggaacat

SEQ ID NO: 193895 - DNA, 25 bp, Saccharomyces pastorianus
caggaaatgtggctcaacagagatt

SEQ ID NO: 193896 - DNA, 25 bp, Saccharomyces pastorianus
attgttggcaaaataaagagtactc

SEQ ID NO: 193897 - DNA, 25 bp, Saccharomyces pastorianus
gtggctcaacagagattaagttttg

SEQ ID NO: 193898 - DNA, 25 bp, Saccharomyces pastorianus
ggttatccatgattgttggcaaaat

SEQ ID NO: 193899 - DNA, 25 bp, Saccharomyces pastorianus
agtactcaactcaaagatattcagg

SEQ ID NO: 193900 - DNA, 25 bp, Saccharomyces pastorianus
ggaaatgtggctcaacagagattaa

SEQ ID NO: 193901 - DNA, 25 bp, Saccharomyces pastorianus
ttatccatgattgttggcaaaataa

SEQ ID NO: 193902 - DNA, 25 bp, Saccharomyces pastorianus
gatattcaggaaatgtggctcaaca

SEQ ID NO: 193903 - DNA, 25 bp, Saccharomyces pastorianus
attcaggaaatgtggctcaacagag

SEQ ID NO: 193904 - DNA, 25 bp, Saccharomyces pastorianus
gacggtaaaggtcttggcaatcttt

SEQ ID NO: 193905 - DNA, 25 bp, Saccharomyces pastorianus
atgtggtcgatcaagtacttagcgt

SEQ ID NO: 193906 - DNA, 25 bp, Saccharomyces pastorianus
gaagctgggtcgaagacaccgtttt

SEQ ID NO: 193907 - DNA, 25 bp, Saccharomyces pastorianus
agcgttacccaagttaccgacagca

SEQ ID NO: 193908 - DNA, 25 bp, Saccharomyces pastorianus
gtgacagtgacagcgttacccaagt

SEQ ID NO: 193909 - DNA, 25 bp, Saccharomyces pastorianus
gaacttggcagtggaaacaacagta

SEQ ID NO: 193910 - DNA, 25 bp, Saccharomyces pastorianus
gaagacaccgttttcagttggagaa

SEQ ID NO: 193911 - DNA, 25 bp, Saccharomyces pastorianus
gttggagaagagacatcgacggtaa

SEQ ID NO: 193912 - DNA, 25 bp, Saccharomyces pastorianus
gtacttcaagtacttaccagagaac

SEQ ID NO: 193913 - DNA, 25 bp, Saccharomyces pastorianus
aacggtaccatcttcagtgacagtg

SEQ ID NO: 193914 - DNA, 25 bp, Saccharomyces pastorianus
acagcaccttcgaccttgatgtggt

SEQ ID NO: 193915 - DNA, 25 bp, Saccharomyces pastorianus
gcccaaacgaaactctacttcaaag

SEQ ID NO: 193916 - DNA, 25 bp, Saccharomyces pastorianus
tcagcccaaacgaaactctacttca

SEQ ID NO: 193917 - DNA, 25 bp, Saccharomyces pastorianus
gattttcagcccaaacgaaactcta

SEQ ID NO: 193918 - DNA, 25 bp, Saccharomyces pastorianus
cccctgaactacaatggaccaagag

SEQ ID NO: 193919 - DNA, 25 bp, Saccharomyces pastorianus
ttcaaaggagtgaatacttggccaa

SEQ ID NO: 193920 - DNA, 25 bp, Saccharomyces pastorianus
atacttggccaaatttaatctggag

SEQ ID NO: 193921 - DNA, 25 bp, Saccharomyces pastorianus
aatctggaggtatacaattggagaa

SEQ ID NO: 193922 - DNA, 25 bp, Saccharomyces pastorianus
ggccaaatttaatctggaggtatac

SEQ ID NO: 193923 - DNA, 25 bp, Saccharomyces pastorianus
ggagaagggatttgccccctgaact

SEQ ID NO: 193924 - DNA, 25 bp, Saccharomyces pastorianus
actacaatggaccaagaggtcattg

SEQ ID NO: 193925 - DNA, 25 bp, Saccharomyces pastorianus
acgaaactctacttcaaaggagtga

SEQ ID NO: 193926 - DNA, 25 bp, Saccharomyces pastorianus
gagctcgcagatgcacagcgtcaat

SEQ ID NO: 193927 - DNA, 25 bp, Saccharomyces pastorianus
atggcagatagcgaggatacctctg

SEQ ID NO: 193928 - DNA, 25 bp, Saccharomyces pastorianus
ggcctggaagaagatggttacctca

SEQ ID NO: 193929 - DNA, 25 bp, Saccharomyces pastorianus
tgcagggcatcgacacaatcaacag

SEQ ID NO: 193930 - DNA, 25 bp, Saccharomyces pastorianus
aatcaacagcgtggagggcctggaa

SEQ ID NO: 193931 - DNA, 25 bp, Saccharomyces pastorianus
atacctctgtgatcctgcagggcat

SEQ ID NO: 193932 - DNA, 25 bp, Saccharomyces pastorianus
cagatgcacagcgtcaatgggaaga

SEQ ID NO: 193933 - DNA, 25 bp, Saccharomyces pastorianus
gtcaatgggaagagtcgctgcaaca

SEQ ID NO: 193934 - DNA, 25 bp, Saccharomyces pastorianus
gtcactcagcaacgagctcgcagat

SEQ ID NO: 193935 - DNA, 25 bp, Saccharomyces pastorianus
agaagatggttacctcagcgacgag

SEQ ID NO: 193936 - DNA, 25 bp, Saccharomyces pastorianus
agcgacgaggacacgtcactcagca

SEQ ID NO: 193937 - DNA, 25 bp, Saccharomyces pastorianus
agtattcttatagggcacggactag

SEQ ID NO: 193938 - DNA, 25 bp, Saccharomyces pastorianus
gagattgaccgaaccaattgcccga

SEQ ID NO: 193939 - DNA, 25 bp, Saccharomyces pastorianus
gatctgaacgtcatgaggctatttc

SEQ ID NO: 193940 - DNA, 25 bp, Saccharomyces pastorianus
gaacgatctgaacgtcatgaggcta

SEQ ID NO: 193941 - DNA, 25 bp, Saccharomyces pastorianus
aaccaattgcccgacgtacaaggag

SEQ ID NO: 193942 - DNA, 25 bp, Saccharomyces pastorianus
ggcacggactagagaacgatctgaa

SEQ ID NO: 193943 - DNA, 25 bp, Saccharomyces pastorianus
aatagtattcttatagggcacggac

SEQ ID NO: 193944 - DNA, 25 bp, Saccharomyces pastorianus
ttgaccgaaccaattgcccgacgta

SEQ ID NO: 193945 - DNA, 25 bp, Saccharomyces pastorianus
tgaacgtcatgaggctatttcataa

SEQ ID NO: 193946 - DNA, 25 bp, Saccharomyces pastorianus
gtccatgagattgaccgaaccaatt

SEQ ID NO: 193947 - DNA, 25 bp, Saccharomyces pastorianus
tagggcacggactagagaacgatct

SEQ ID NO: 193948 - DNA, 25 bp, Saccharomyces pastorianus
acctgtgcctgtgcctcttgatcaa

SEQ ID NO: 193949 - DNA, 25 bp, Saccharomyces pastorianus
atatcagccgcggatttttgaacaa

SEQ ID NO: 193950 - DNA, 25 bp, Saccharomyces pastorianus
gatttttgaacaatggctcctacag

SEQ ID NO: 193951 - DNA, 25 bp, Saccharomyces pastorianus
gtgaaccccagtgaaacctcactaa

SEQ ID NO: 193952 - DNA, 25 bp, Saccharomyces pastorianus
gatttcatcaatgtgaaccccagtg

SEQ ID NO: 193953 - DNA, 25 bp, Saccharomyces pastorianus
gaacaatggctcctacagacaatta

SEQ ID NO: 193954 - DNA, 25 bp, Saccharomyces pastorianus
ggctcctacagacaattagatttca

SEQ ID NO: 193955 - DNA, 25 bp, Saccharomyces pastorianus
tttacgatttcctacgaacactgcc

SEQ ID NO: 193956 - DNA, 25 bp, Saccharomyces pastorianus
caatgtgaaccccagtgaaacctca

SEQ ID NO: 193957 - DNA, 25 bp, Saccharomyces pastorianus
gaacactgcccaagatgataaatac

SEQ ID NO: 193958 - DNA, 25 bp, Saccharomyces pastorianus
tcctacgaacactgcccaagatgat

SEQ ID NO: 193959 - DNA, 25 bp, Saccharomyces pastorianus
tgccttcaagctccgtatatattat

SEQ ID NO: 193960 - DNA, 25 bp, Saccharomyces pastorianus
aagctccgtatatattatgtactag

SEQ ID NO: 193961 - DNA, 25 bp, Saccharomyces pastorianus
gaagagctaggaaagcacagcgcat

SEQ ID NO: 193962 - DNA, 25 bp, Saccharomyces pastorianus
gtcacctaggatggagcaccaacaa

SEQ ID NO: 193963 - DNA, 25 bp, Saccharomyces pastorianus
atattttctccagtgccttcaagct

SEQ ID NO: 193964 - DNA, 25 bp, Saccharomyces pastorianus
aaagcacagcgcatacgacggtcac

SEQ ID NO: 193965 - DNA, 25 bp, Saccharomyces pastorianus
acgacggtcacctaggatggagcac

SEQ ID NO: 193966 - DNA, 25 bp, Saccharomyces pastorianus
gcgcatacgacggtcacctaggatg

SEQ ID NO: 193967 - DNA, 25 bp, Saccharomyces pastorianus
tctatattttctccagtgccttcaa

SEQ ID NO: 193968 - DNA, 25 bp, Saccharomyces pastorianus
agtgccttcaagctccgtatatatt

SEQ ID NO: 193969 - DNA, 25 bp, Saccharomyces pastorianus
atgcttactctatattttctccagt

SEQ ID NO: 193970 - DNA, 25 bp, Saccharomyces pastorianus
gttgtcgcctctcataattaccaat

SEQ ID NO: 193971 - DNA, 25 bp, Saccharomyces pastorianus
tggcgaggattcttattttggtcac

SEQ ID NO: 193972 - DNA, 25 bp, Saccharomyces pastorianus
gggcccaccattggaaactaaagat

SEQ ID NO: 193973 - DNA, 25 bp, Saccharomyces pastorianus
gacctaattaccaaccatggcgcta

SEQ ID NO: 193974 - DNA, 25 bp, Saccharomyces pastorianus
tattttggtcacttggttgtcgcct

SEQ ID NO: 193975 - DNA, 25 bp, Saccharomyces pastorianus
taagcttgggctgaaactggttcgt

SEQ ID NO: 193976 - DNA, 25 bp, Saccharomyces pastorianus
aagacaactcttatgccaaatcgaa

SEQ ID NO: 193977 - DNA, 25 bp, Saccharomyces pastorianus
tgaagctggcccaagaaaacggcta

SEQ ID NO: 193978 - DNA, 25 bp, Saccharomyces pastorianus
ggcagataatgttacctatgaccta

SEQ ID NO: 193979 - DNA, 25 bp, Saccharomyces pastorianus
atctttggcgataaaacgggcactg

SEQ ID NO: 193980 - DNA, 25 bp, Saccharomyces pastorianus
gatcgtatcatcactcaagttgtca

SEQ ID NO: 193981 - DNA, 25 bp, Saccharomyces pastorianus
cattcatatgattcacgccattcct

SEQ ID NO: 193982 - DNA, 25 bp, Saccharomyces pastorianus
tcttcatgggtcagaacaccaaatt

SEQ ID NO: 193983 - DNA, 25 bp, Saccharomyces pastorianus
tgggtcagaacaccaaattttgtca

SEQ ID NO: 193984 - DNA, 25 bp, Saccharomyces pastorianus
tcacgccattcctataacatcagca

SEQ ID NO: 193985 - DNA, 25 bp, Saccharomyces pastorianus
acaccaaattttgtcaaagaggagt

SEQ ID NO: 193986 - DNA, 25 bp, Saccharomyces pastorianus
aatacattcatatgattcacgccat

SEQ ID NO: 193987 - DNA, 25 bp, Saccharomyces pastorianus
taaaattgatcacgccacgtatttt

SEQ ID NO: 193988 - DNA, 25 bp, Saccharomyces pastorianus
cgccattcctataacatcagcatct

SEQ ID NO: 193989 - DNA, 25 bp, Saccharomyces pastorianus
aaataaaattgatcacgccacgtat

SEQ ID NO: 193990 - DNA, 25 bp, Saccharomyces pastorianus
attcacgccattcctataacatcag

SEQ ID NO: 193991 - DNA, 25 bp, Saccharomyces pastorianus
gattcacgccattcctataacatca

SEQ ID NO: 193992 - DNA, 25 bp, Saccharomyces pastorianus
atctctggagcaagaatatcggtta

SEQ ID NO: 193993 - DNA, 25 bp, Saccharomyces pastorianus
atatcggttaatattgctcttgaac

SEQ ID NO: 193994 - DNA, 25 bp, Saccharomyces pastorianus
gtgatacgatctctggagcaagaat

SEQ ID NO: 193995 - DNA, 25 bp, Saccharomyces pastorianus
gatggataatgtgatacgatctctg

SEQ ID NO: 193996 - DNA, 25 bp, Saccharomyces pastorianus
tgctcttgaaccataggaacaaaaa

SEQ ID NO: 193997 - DNA, 25 bp, Saccharomyces pastorianus
ggctagctggtatggatcgttcaat

SEQ ID NO: 193998 - DNA, 25 bp, Saccharomyces pastorianus
gtatggatcgttcaatgagatgaaa

SEQ ID NO: 193999 - DNA, 25 bp, Saccharomyces pastorianus
agctggtatggatcgttcaatgaga

SEQ ID NO: 194000 - DNA, 25 bp, Saccharomyces pastorianus
aaaatcaacatagagcggctagctg

SEQ ID NO: 194001 - DNA, 25 bp, Saccharomyces pastorianus
gcggctagctggtatggatcgttca

SEQ ID NO: 194002 - DNA, 25 bp, Saccharomyces pastorianus
taatgtgatacgatctctggagcaa

SEQ ID NO: 194003 - DNA, 25 bp, Saccharomyces pastorianus
gccctgggaggagttatcttttctt

SEQ ID NO: 194004 - DNA, 25 bp, Saccharomyces pastorianus
tatcaccccggaattggtttatccg

SEQ ID NO: 194005 - DNA, 25 bp, Saccharomyces pastorianus
ctgggaggagttatcttttcttctt

SEQ ID NO: 194006 - DNA, 25 bp, Saccharomyces pastorianus
ggagttatcttttcttcttaacagc

SEQ ID NO: 194007 - DNA, 25 bp, Saccharomyces pastorianus
ttaacagcttatcaccccggaattg

SEQ ID NO: 194008 - DNA, 25 bp, Saccharomyces pastorianus
atgtggagacgtcggcgcgagccct

SEQ ID NO: 194009 - DNA, 25 bp, Saccharomyces pastorianus
ttcttaacagcttatcaccccggaa

SEQ ID NO: 194010 - DNA, 25 bp, Saccharomyces pastorianus
tttcttcttaacagcttatcacccc

SEQ ID NO: 194011 - DNA, 25 bp, Saccharomyces pastorianus
aacagcttatcaccccggaattggt

SEQ ID NO: 194012 - DNA, 25 bp, Saccharomyces pastorianus
tatcttttcttcttaacagcttatc

SEQ ID NO: 194013 - DNA, 25 bp, Saccharomyces pastorianus
gcgagccctgggaggagttatcttt

SEQ ID NO: 194014 - DNA, 25 bp, Saccharomyces pastorianus
ggtctctcgccaatatttagcttta

SEQ ID NO: 194015 - DNA, 25 bp, Saccharomyces pastorianus
atgtctgatcaaatgcccttccctt

SEQ ID NO: 194016 - DNA, 25 bp, Saccharomyces pastorianus
caaagttgccctctccaaattacaa

SEQ ID NO: 194017 - DNA, 25 bp, Saccharomyces pastorianus
atcactgtacttgttcgctatcggt

SEQ ID NO: 194018 - DNA, 25 bp, Saccharomyces pastorianus
gagggcacaaaacaccatgtctgat

SEQ ID NO: 194019 - DNA, 25 bp, Saccharomyces pastorianus
tggaatttaccacccacttagagct

SEQ ID NO: 194020 - DNA, 25 bp, Saccharomyces pastorianus
atttcacgtactttttcactctctt

SEQ ID NO: 194021 - DNA, 25 bp, Saccharomyces pastorianus
aactcgactcttcgaaggcacttta

SEQ ID NO: 194022 - DNA, 25 bp, Saccharomyces pastorianus
cttagagctgcattcccaaacaact

SEQ ID NO: 194023 - DNA, 25 bp, Saccharomyces pastorianus
aagttcttttcatctttccatcact

SEQ ID NO: 194024 - DNA, 25 bp, Saccharomyces pastorianus
ctctatgacgtcctgttccaaggaa

SEQ ID NO: 194025 - DNA, 25 bp, Saccharomyces pastorianus
tcattacgcgtatgggttttacacc

SEQ ID NO: 194026 - DNA, 25 bp, Saccharomyces pastorianus
gttcactttcattacgcgtatgggt

SEQ ID NO: 194027 - DNA, 25 bp, Saccharomyces pastorianus
aggatcggtcgattgtgcacctctt

SEQ ID NO: 194028 - DNA, 25 bp, Saccharomyces pastorianus
ggtcgattgtgcacctcttgcgagg

SEQ ID NO: 194029 - DNA, 25 bp, Saccharomyces pastorianus
atgctcttactcaaatccatccgaa

SEQ ID NO: 194030 - DNA, 25 bp, Saccharomyces pastorianus
gaagacatcaggatcggtcgattgt

SEQ ID NO: 194031 - DNA, 25 bp, Saccharomyces pastorianus
ttttacacccaaacactcgcataga

SEQ ID NO: 194032 - DNA, 25 bp, Saccharomyces pastorianus
aacctacgttcactttcattacgcg

SEQ ID NO: 194033 - DNA, 25 bp, Saccharomyces pastorianus
cactcgcatagacgttagactcctt

SEQ ID NO: 194034 - DNA, 25 bp, Saccharomyces pastorianus
actcaaatccatccgaagacatcag

SEQ ID NO: 194035 - DNA, 25 bp, Saccharomyces pastorianus
ttgtgcacctcttgcgaggccccaa

SEQ ID NO: 194036 - DNA, 25 bp, Saccharomyces pastorianus
tacccttttgttctactggagattt

SEQ ID NO: 194037 - DNA, 25 bp, Saccharomyces pastorianus
tttacccttttgttctactggagat

SEQ ID NO: 194038 - DNA, 25 bp, Saccharomyces pastorianus
atcgtttaacagatgtgccgcccca

SEQ ID NO: 194039 - DNA, 25 bp, Saccharomyces pastorianus
taggacatctgcgttatcgtttaac

SEQ ID NO: 194040 - DNA, 25 bp, Saccharomyces pastorianus
ttgttctactggagatttctgttct

SEQ ID NO: 194041 - DNA, 25 bp, Saccharomyces pastorianus
actggagatttctgttctccatgag

SEQ ID NO: 194042 - DNA, 25 bp, Saccharomyces pastorianus
cccttaggacatctgcgttatcgtt

SEQ ID NO: 194043 - DNA, 25 bp, Saccharomyces pastorianus
gtttaacagatgtgccgccccagcc

SEQ ID NO: 194044 - DNA, 25 bp, Saccharomyces pastorianus
ggacatctgcgttatcgtttaacag

SEQ ID NO: 194045 - DNA, 25 bp, Saccharomyces pastorianus
ttatcgtttaacagatgtgccgccc

SEQ ID NO: 194046 - DNA, 25 bp, Saccharomyces pastorianus
atggtttgtattcacactgaaaatc

SEQ ID NO: 194047 - DNA, 25 bp, Saccharomyces pastorianus
attcgatgattcacggaattctgca

SEQ ID NO: 194048 - DNA, 25 bp, Saccharomyces pastorianus
attacgtatcgcatttcgctgcgtt

SEQ ID NO: 194049 - DNA, 25 bp, Saccharomyces pastorianus
ggcgcaatgtgcgttcaaagattcg

SEQ ID NO: 194050 - DNA, 25 bp, Saccharomyces pastorianus
gcaattcacattacgtatcgcattt

SEQ ID NO: 194051 - DNA, 25 bp, Saccharomyces pastorianus
atttcgctgcgttcttcatcgatgc

SEQ ID NO: 194052 - DNA, 25 bp, Saccharomyces pastorianus
ttcttcatcgatgcgagaaccaaga

SEQ ID NO: 194053 - DNA, 25 bp, Saccharomyces pastorianus
gattcacggaattctgcaattcaca

SEQ ID NO: 194054 - DNA, 25 bp, Saccharomyces pastorianus
ccaagagatccgttgttgaaagttt

SEQ ID NO: 194055 - DNA, 25 bp, Saccharomyces pastorianus
gctgcgttcttcatcgatgcgagaa

SEQ ID NO: 194056 - DNA, 25 bp, Saccharomyces pastorianus
tgcgagaaccaagagatccgttgtt

SEQ ID NO: 194057 - DNA, 25 bp, Saccharomyces pastorianus
gtgcgttcaaagattcgatgattca

SEQ ID NO: 194058 - DNA, 25 bp, Saccharomyces pastorianus
gcaggttcacctacggaaaccttgt

SEQ ID NO: 194059 - DNA, 25 bp, Saccharomyces pastorianus
ttaatgatccttccgcaggttcacc

SEQ ID NO: 194060 - DNA, 25 bp, Saccharomyces pastorianus
tttctttaatgatccttccgcaggt

SEQ ID NO: 194061 - DNA, 25 bp, Saccharomyces pastorianus
tgctcttgccaaaacaaaaaaatcc

SEQ ID NO: 194062 - DNA, 25 bp, Saccharomyces pastorianus
tctttaatgatccttccgcaggttc

SEQ ID NO: 194063 - DNA, 25 bp, Saccharomyces pastorianus
atttctttaatgatccttccgcagg

SEQ ID NO: 194064 - DNA, 25 bp, Saccharomyces pastorianus
ttctttaatgatccttccgcaggtt

SEQ ID NO: 194065 - DNA, 25 bp, Saccharomyces pastorianus
tttaatgatccttccgcaggttcac

SEQ ID NO: 194066 - DNA, 25 bp, Saccharomyces pastorianus
tccttccgcaggttcacctacggaa

SEQ ID NO: 194067 - DNA, 25 bp, Saccharomyces pastorianus
atgatccttccgcaggttcacctac

SEQ ID NO: 194068 - DNA, 25 bp, Saccharomyces pastorianus
aatttctttaatgatccttccgcag

SEQ ID NO: 194069 - DNA, 25 bp, Saccharomyces pastorianus
tcacagacccttcggaaattccaga

SEQ ID NO: 194070 - DNA, 25 bp, Saccharomyces pastorianus
tggagttttactacccaccagtcaa

SEQ ID NO: 194071 - DNA, 25 bp, Saccharomyces pastorianus
ttttgacatttccaacctcacagac

SEQ ID NO: 194072 - DNA, 25 bp, Saccharomyces pastorianus
ggtcgtggcacgatgatcactctaa

SEQ ID NO: 194073 - DNA, 25 bp, Saccharomyces pastorianus
ctaaacgatcgtattgcctctgggt

SEQ ID NO: 194074 - DNA, 25 bp, Saccharomyces pastorianus
agatggtacagttcctccagatgat

SEQ ID NO: 194075 - DNA, 25 bp, Saccharomyces pastorianus
cagtgtctattgctgcttctgagaa

SEQ ID NO: 194076 - DNA, 25 bp, Saccharomyces pastorianus
gttcctggactgctacgggtagtat

SEQ ID NO: 194077 - DNA, 25 bp, Saccharomyces pastorianus
gtcattattctgtactcctatcaag

SEQ ID NO: 194078 - DNA, 25 bp, Saccharomyces pastorianus
aattatgtttgtactccggctacgg

SEQ ID NO: 194079 - DNA, 25 bp, Saccharomyces pastorianus
agatgatgccccagagtacgccatt

SEQ ID NO: 194080 - DNA, 25 bp, Saccharomyces pastorianus
atatgcgttggccaaggaacagcta

SEQ ID NO: 194081 - DNA, 25 bp, Saccharomyces pastorianus
ctggcttccggaatactatttctct

SEQ ID NO: 194082 - DNA, 25 bp, Saccharomyces pastorianus
atctctcattttctgttgtacagca

SEQ ID NO: 194083 - DNA, 25 bp, Saccharomyces pastorianus
gaagttccaatatgcgttggccaag

SEQ ID NO: 194084 - DNA, 25 bp, Saccharomyces pastorianus
gaatactatttctctgatctctcat

SEQ ID NO: 194085 - DNA, 25 bp, Saccharomyces pastorianus
atgcggcccgcaaaccaagagattt

SEQ ID NO: 194086 - DNA, 25 bp, Saccharomyces pastorianus
aatcatatcttgtatgcggcccgca

SEQ ID NO: 194087 - DNA, 25 bp, Saccharomyces pastorianus
taagtaaacaccactggcttccgga

SEQ ID NO: 194088 - DNA, 25 bp, Saccharomyces pastorianus
tacagcagtgggacagtagagccat

SEQ ID NO: 194089 - DNA, 25 bp, Saccharomyces pastorianus
ggaacagctaggcagcaactcgcgc

SEQ ID NO: 194090 - DNA, 25 bp, Saccharomyces pastorianus
gcaactcgcgcagtggcgtcaaaaa

SEQ ID NO: 194091 - DNA, 25 bp, Saccharomyces pastorianus
atctaagttacctgatacaagaact

SEQ ID NO: 194092 - DNA, 25 bp, Saccharomyces pastorianus
aaataatctaagttacctgatacaa

SEQ ID NO: 194093 - DNA, 25 bp, Saccharomyces pastorianus
ttattaaataatctaagttacctga

SEQ ID NO: 194094 - DNA, 25 bp, Saccharomyces pastorianus
taatctaagttacctgatacaagaa

SEQ ID NO: 194095 - DNA, 25 bp, Saccharomyces pastorianus
ataatctaagttacctgatacaaga

SEQ ID NO: 194096 - DNA, 25 bp, Saccharomyces pastorianus
tattaaataatctaagttacctgat

SEQ ID NO: 194097 - DNA, 25 bp, Saccharomyces pastorianus
aataatctaagttacctgatacaag

SEQ ID NO: 194098 - DNA, 25 bp, Saccharomyces pastorianus
ttaaataatctaagttacctgatac

SEQ ID NO: 194099 - DNA, 25 bp, Saccharomyces pastorianus
attaaataatctaagttacctgata

SEQ ID NO: 194100 - DNA, 25 bp, Saccharomyces pastorianus
taaataatctaagttacctgataca

SEQ ID NO: 194101 - DNA, 25 bp, Saccharomyces pastorianus
aatctaagttacctgatacaagaac

SEQ ID NO: 194102 - DNA, 25 bp, Saccharomyces pastorianus
gttttcatcactatatgcacgctct

SEQ ID NO: 194103 - DNA, 25 bp, Saccharomyces pastorianus
gagacattgtgagaccctccgttcg

SEQ ID NO: 194104 - DNA, 25 bp, Saccharomyces pastorianus
atgcacgctctttccaaagctcctg

SEQ ID NO: 194105 - DNA, 25 bp, Saccharomyces pastorianus
ttcgcaaccgtgctctctgttttca

SEQ ID NO: 194106 - DNA, 25 bp, Saccharomyces pastorianus
atcactatatgcacgctctttccaa

SEQ ID NO: 194107 - DNA, 25 bp, Saccharomyces pastorianus
tttgagacattgtgagaccctccgt

SEQ ID NO: 194108 - DNA, 25 bp, Saccharomyces pastorianus
aaagctcctgcactttgcacgtggc

SEQ ID NO: 194109 - DNA, 25 bp, Saccharomyces pastorianus
ttgtgagaccctccgttcgcaaccg

SEQ ID NO: 194110 - DNA, 25 bp, Saccharomyces pastorianus
gtgctctctgttttcatcactatat

SEQ ID NO: 194111 - DNA, 25 bp, Saccharomyces pastorianus
tgcactttgcacgtggcggagccat

SEQ ID NO: 194112 - DNA, 25 bp, Saccharomyces pastorianus
tatatgcacgctctttccaaagctc

SEQ ID NO: 194113 - DNA, 25 bp, Saccharomyces pastorianus
tctctgccagaacgctcgagcagcg

SEQ ID NO: 194114 - DNA, 25 bp, Saccharomyces pastorianus
tgacattgctatccgccggcaagca

SEQ ID NO: 194115 - DNA, 25 bp, Saccharomyces pastorianus
aaaatgacattgctatccgccggca

SEQ ID NO: 194116 - DNA, 25 bp, Saccharomyces pastorianus
gccagacagctgcgagactctcgtc

SEQ ID NO: 194117 - DNA, 25 bp, Saccharomyces pastorianus
ggttcgtcttcgttagtatgagccc

SEQ ID NO: 194118 - DNA, 25 bp, Saccharomyces pastorianus
actgtgtatcttttggttcgtcttc

SEQ ID NO: 194119 - DNA, 25 bp, Saccharomyces pastorianus
tatcttttggttcgtcttcgttagt

SEQ ID NO: 194120 - DNA, 25 bp, Saccharomyces pastorianus
tcgtcccgctactgtgtatcttttg

SEQ ID NO: 194121 - DNA, 25 bp, Saccharomyces pastorianus
gtcttcgttagtatgagcccgctcc

SEQ ID NO: 194122 - DNA, 25 bp, Saccharomyces pastorianus
cggctcgtgccaacaaatcagacaa

SEQ ID NO: 194123 - DNA, 25 bp, Saccharomyces pastorianus
gctactgtgtatcttttggttcgtc

SEQ ID NO: 194124 - DNA, 25 bp, Saccharomyces pastorianus
tatgagctggccaccaggacggaat

SEQ ID NO: 194125 - DNA, 25 bp, Saccharomyces pastorianus
gttgcagatcattagcgtcgcagaa

SEQ ID NO: 194126 - DNA, 25 bp, Saccharomyces pastorianus
ttactgtcacgttctgtacttggcg

SEQ ID NO: 194127 - DNA, 25 bp, Saccharomyces pastorianus
tcatgctgctggtgctttctattat

SEQ ID NO: 194128 - DNA, 25 bp, Saccharomyces pastorianus
aaacttcttcaccttcagcgatctg

SEQ ID NO: 194129 - DNA, 25 bp, Saccharomyces pastorianus
ttcgccggcggcaagctaatacgat

SEQ ID NO: 194130 - DNA, 25 bp, Saccharomyces pastorianus
ctgggtcccactgaagaaacacgct

SEQ ID NO: 194131 - DNA, 25 bp, Saccharomyces pastorianus
attatcgcgatctgggttctttact

SEQ ID NO: 194132 - DNA, 25 bp, Saccharomyces pastorianus
aagccaccgctactacagcagttta

SEQ ID NO: 194133 - DNA, 25 bp, Saccharomyces pastorianus
aaggagccatgcaccattctttctt

SEQ ID NO: 194134 - DNA, 25 bp, Saccharomyces pastorianus
acgaattcctggctacgttccagaa

SEQ ID NO: 194135 - DNA, 25 bp, Saccharomyces pastorianus
tgctaaacgttactacgaccaagtt

SEQ ID NO: 194136 - DNA, 25 bp, Saccharomyces pastorianus
gaagacttcatggtacaagcaattg

SEQ ID NO: 194137 - DNA, 25 bp, Saccharomyces pastorianus
gatcatagattttacttggcttcca

SEQ ID NO: 194138 - DNA, 25 bp, Saccharomyces pastorianus
cttggcttccaaattgagtgtttta

SEQ ID NO: 194139 - DNA, 25 bp, Saccharomyces pastorianus
gaccaagtttcagaacacgatcata

SEQ ID NO: 194140 - DNA, 25 bp, Saccharomyces pastorianus
agtactctatacaggctatctggaa

SEQ ID NO: 194141 - DNA, 25 bp, Saccharomyces pastorianus
ggaacttagggtacatgcatgagca

SEQ ID NO: 194142 - DNA, 25 bp, Saccharomyces pastorianus
gtcatggttgacttggatcaccaga

SEQ ID NO: 194143 - DNA, 25 bp, Saccharomyces pastorianus
gatactcagcactcgaagacttcat

SEQ ID NO: 194144 - DNA, 25 bp, Saccharomyces pastorianus
ctcgccacttaaccctaacgaagat

SEQ ID NO: 194145 - DNA, 25 bp, Saccharomyces pastorianus
gagatttccatcttgctaaacgtta

SEQ ID NO: 194146 - DNA, 25 bp, Saccharomyces pastorianus
tgttcccgaagtcattgttgcaaga

SEQ ID NO: 194147 - DNA, 25 bp, Saccharomyces pastorianus
caagacattgcggatggagggtttt

SEQ ID NO: 194148 - DNA, 25 bp, Saccharomyces pastorianus
gtgcgttggacgaatcacctgtacc

SEQ ID NO: 194149 - DNA, 25 bp, Saccharomyces pastorianus
agtactgttcccgaagtcattgttg

SEQ ID NO: 194150 - DNA, 25 bp, Saccharomyces pastorianus
gaatcacctgtacccttagaaaaag

SEQ ID NO: 194151 - DNA, 25 bp, Saccharomyces pastorianus
atagccctgccagtgcgttggacga

SEQ ID NO: 194152 - DNA, 25 bp, Saccharomyces pastorianus
aaaaggcaaagcgactcacgctgaa

SEQ ID NO: 194153 - DNA, 25 bp, Saccharomyces pastorianus
tcgaaacaagagcagaatccaaaat

SEQ ID NO: 194154 - DNA, 25 bp, Saccharomyces pastorianus
atacttgcgtggtggatagccctgc

SEQ ID NO: 194155 - DNA, 25 bp, Saccharomyces pastorianus
gcgactcacgctgaagtactggaga

SEQ ID NO: 194156 - DNA, 25 bp, Saccharomyces pastorianus
agtttgattaccaatacttgcgtgg

SEQ ID NO: 194157 - DNA, 25 bp, Saccharomyces pastorianus
aaccaaccatattacaagtcacaaa

SEQ ID NO: 194158 - DNA, 25 bp, Saccharomyces pastorianus
gtaaccaaccatattacaagtcaca

SEQ ID NO: 194159 - DNA, 25 bp, Saccharomyces pastorianus
tggtaaccaaccatattacaagtca

SEQ ID NO: 194160 - DNA, 25 bp, Saccharomyces pastorianus
atggtaaccaaccatattacaagtc

SEQ ID NO: 194161 - DNA, 25 bp, Saccharomyces pastorianus
tatggtaaccaaccatattacaagt

SEQ ID NO: 194162 - DNA, 25 bp, Saccharomyces pastorianus
accaaccatattacaagtcacaaat

SEQ ID NO: 194163 - DNA, 25 bp, Saccharomyces pastorianus
ggtaaccaaccatattacaagtcac

SEQ ID NO: 194164 - DNA, 25 bp, Saccharomyces pastorianus
taaccaaccatattacaagtcacaa

SEQ ID NO: 194165 - DNA, 25 bp, Saccharomyces pastorianus
gcggcgacttctgcatggtttgatg

SEQ ID NO: 194166 - DNA, 25 bp, Saccharomyces pastorianus
ttatggccgtactctgtgcatccgc

SEQ ID NO: 194167 - DNA, 25 bp, Saccharomyces pastorianus
caacatgcgtttacgcggcgcgctg

SEQ ID NO: 194168 - DNA, 25 bp, Saccharomyces pastorianus
ctatgcgtttggtagtcgcgcgtga

SEQ ID NO: 194169 - DNA, 25 bp, Saccharomyces pastorianus
ctggagcttctgtggcggcgacttc

SEQ ID NO: 194170 - DNA, 25 bp, Saccharomyces pastorianus
tttgcagccttatggccgtactctg

SEQ ID NO: 194171 - DNA, 25 bp, Saccharomyces pastorianus
atcggctctctgaaaccttccctat

SEQ ID NO: 194172 - DNA, 25 bp, Saccharomyces pastorianus
gggcgccttccaacatgcgtttacg

SEQ ID NO: 194173 - DNA, 25 bp, Saccharomyces pastorianus
gaaaccttccctatgcgtttggtag

SEQ ID NO: 194174 - DNA, 25 bp, Saccharomyces pastorianus
gtttgatgcagttgcggctggtact

SEQ ID NO: 194175 - DNA, 25 bp, Saccharomyces pastorianus
agtcgcgcgtgaatatgctaattgg

SEQ ID NO: 194176 - DNA, 25 bp, Saccharomyces pastorianus
aagacaatactccatcactaatgcc

SEQ ID NO: 194177 - DNA, 25 bp, Saccharomyces pastorianus
gaaaaagacaatactccatcactaa

SEQ ID NO: 194178 - DNA, 25 bp, Saccharomyces pastorianus
tgactccttcttctcgtttttgatc

SEQ ID NO: 194179 - DNA, 25 bp, Saccharomyces pastorianus
cttcttctcgtttttgatctccttt

SEQ ID NO: 194180 - DNA, 25 bp, Saccharomyces pastorianus
tcactaagggtgttaactggagagc

SEQ ID NO: 194181 - DNA, 25 bp, Saccharomyces pastorianus
tcaatttcttttacggtgactcctt

SEQ ID NO: 194182 - DNA, 25 bp, Saccharomyces pastorianus
caacactggtattgtcaatttcttt

SEQ ID NO: 194183 - DNA, 25 bp, Saccharomyces pastorianus
actcctatcatttctgtcatgattt

SEQ ID NO: 194184 - DNA, 25 bp, Saccharomyces pastorianus
ttcttttacggtgactccttcttct

SEQ ID NO: 194185 - DNA, 25 bp, Saccharomyces pastorianus
catttctgtcatgatttgcgataac

SEQ ID NO: 194186 - DNA, 25 bp, Saccharomyces pastorianus
tactatttcactaagggtgttaact

SEQ ID NO: 194187 - DNA, 25 bp, Saccharomyces pastorianus
cactagaggcgtcccgggcatgaat

SEQ ID NO: 194188 - DNA, 25 bp, Saccharomyces pastorianus
gatcagcaactggtaaagctgcaaa

SEQ ID NO: 194189 - DNA, 25 bp, Saccharomyces pastorianus
taaaacagttggaaagggaccatat

SEQ ID NO: 194190 - DNA, 25 bp, Saccharomyces pastorianus
atggattaagaaggaaactgtcggg

SEQ ID NO: 194191 - DNA, 25 bp, Saccharomyces pastorianus
ggcgtcccgggcatgaatcctaagg

SEQ ID NO: 194192 - DNA, 25 bp, Saccharomyces pastorianus
gcaactggtaaagctgcaaaatgga

SEQ ID NO: 194193 - DNA, 25 bp, Saccharomyces pastorianus
gaatacacgaacaaacttttagtgg

SEQ ID NO: 194194 - DNA, 25 bp, Saccharomyces pastorianus
aactaggttagaagtggaacgatat

SEQ ID NO: 194195 - DNA, 25 bp, Saccharomyces pastorianus
gacactagaggcgtcccgggcatga

SEQ ID NO: 194196 - DNA, 25 bp, Saccharomyces pastorianus
cgtcccgggcatgaatcctaagggt

SEQ ID NO: 194197 - DNA, 25 bp, Saccharomyces pastorianus
tggaaagggaccatatgtttttcaa

SEQ ID NO: 194198 - DNA, 25 bp, Saccharomyces pastorianus
gaatttgtggtcaaggactttccaa

SEQ ID NO: 194199 - DNA, 25 bp, Saccharomyces pastorianus
tcatgacaatgggagaactgctgcc

SEQ ID NO: 194200 - DNA, 25 bp, Saccharomyces pastorianus
tcgctcaggatggaaatgcatggtc

SEQ ID NO: 194201 - DNA, 25 bp, Saccharomyces pastorianus
taatggcaggccatcgctcaggatg

SEQ ID NO: 194202 - DNA, 25 bp, Saccharomyces pastorianus
atgcatggtcatttgtggcgattct

SEQ ID NO: 194203 - DNA, 25 bp, Saccharomyces pastorianus
gcggcgtttgcaggcagtttatcaa

SEQ ID NO: 194204 - DNA, 25 bp, Saccharomyces pastorianus
gattctgaggaccagtgtgtttccc

SEQ ID NO: 194205 - DNA, 25 bp, Saccharomyces pastorianus
aattccacaggttctcgttctaaag

SEQ ID NO: 194206 - DNA, 25 bp, Saccharomyces pastorianus
aatagtcatgcttaattccacaggt

SEQ ID NO: 194207 - DNA, 25 bp, Saccharomyces pastorianus
agtgtgtttccccttgcggcgtttg

SEQ ID NO: 194208 - DNA, 25 bp, Saccharomyces pastorianus
ggttctcgttctaaagtcatgacaa

SEQ ID NO: 194209 - DNA, 25 bp, Saccharomyces pastorianus
ggccacttttccaagcgattaactt

SEQ ID NO: 194210 - DNA, 25 bp, Saccharomyces pastorianus
actaattgggcagtttggccacttt

SEQ ID NO: 194211 - DNA, 25 bp, Saccharomyces pastorianus
agtttggccacttttccaagcgatt

SEQ ID NO: 194212 - DNA, 25 bp, Saccharomyces pastorianus
cttttccaagcgattaacttttctg

SEQ ID NO: 194213 - DNA, 25 bp, Saccharomyces pastorianus
taaaagagcaatggtggcctacact

SEQ ID NO: 194214 - DNA, 25 bp, Saccharomyces pastorianus
aaagagcaatggtggcctacacttt

SEQ ID NO: 194215 - DNA, 25 bp, Saccharomyces pastorianus
ataggttactagctgttaatgtcgt

SEQ ID NO: 194216 - DNA, 25 bp, Saccharomyces pastorianus
gtttgcgccgctaggtttgccattt

SEQ ID NO: 194217 - DNA, 25 bp, Saccharomyces pastorianus
gctgttaatgtcgttgcaatatttt

SEQ ID NO: 194218 - DNA, 25 bp, Saccharomyces pastorianus
taattgggcagtttggccacttttc

SEQ ID NO: 194219 - DNA, 25 bp, Saccharomyces pastorianus
tcctttacaacataggttactagct

SEQ ID NO: 194220 - DNA, 25 bp, Saccharomyces pastorianus
aatgaaagtttggaggcttcgcctg

SEQ ID NO: 194221 - DNA, 25 bp, Saccharomyces pastorianus
gatcttacgttatgcaactaaatga

SEQ ID NO: 194222 - DNA, 25 bp, Saccharomyces pastorianus
gtactttggagatcttacgttatgc

SEQ ID NO: 194223 - DNA, 25 bp, Saccharomyces pastorianus
gtttggacgtccttctacattaata

SEQ ID NO: 194224 - DNA, 25 bp, Saccharomyces pastorianus
ggacgtccttctacattaatagatt

SEQ ID NO: 194225 - DNA, 25 bp, Saccharomyces pastorianus
gaaaagtttggacgtccttctacat

SEQ ID NO: 194226 - DNA, 25 bp, Saccharomyces pastorianus
ggagatcttacgttatgcaactaaa

SEQ ID NO: 194227 - DNA, 25 bp, Saccharomyces pastorianus
ttcgcctgcaataaaaggtgaaaag

SEQ ID NO: 194228 - DNA, 25 bp, Saccharomyces pastorianus
gtccttctacattaatagattgtga

SEQ ID NO: 194229 - DNA, 25 bp, Saccharomyces pastorianus
aagacacagaacttgctgaattaga

SEQ ID NO: 194230 - DNA, 25 bp, Saccharomyces pastorianus
aagaataatatgataccaatggtaa

SEQ ID NO: 194231 - DNA, 25 bp, Saccharomyces pastorianus
aagagccttcatctctgtccatgga

SEQ ID NO: 194232 - DNA, 25 bp, Saccharomyces pastorianus
actccgttctagatgctttgaatag

SEQ ID NO: 194233 - DNA, 25 bp, Saccharomyces pastorianus
gccttcatctctgtccatggacaaa

SEQ ID NO: 194234 - DNA, 25 bp, Saccharomyces pastorianus
aataactccgttctagatgctttga

SEQ ID NO: 194235 - DNA, 25 bp, Saccharomyces pastorianus
acctggaccaataactccgttctag

SEQ ID NO: 194236 - DNA, 25 bp, Saccharomyces pastorianus
ctagatgctttgaatagcaagtcca

SEQ ID NO: 194237 - DNA, 25 bp, Saccharomyces pastorianus
tttccccagagtcaagagccttcat

SEQ ID NO: 194238 - DNA, 25 bp, Saccharomyces pastorianus
atatttccccagagtcaagagcctt

SEQ ID NO: 194239 - DNA, 25 bp, Saccharomyces pastorianus
tactacaaacaatatttccccagag

SEQ ID NO: 194240 - DNA, 25 bp, Saccharomyces pastorianus
agagtcaagagccttcatctctgtc

SEQ ID NO: 194241 - DNA, 25 bp, Saccharomyces pastorianus
tgtccatggacaaacagcagcaaca

SEQ ID NO: 194242 - DNA, 25 bp, Saccharomyces pastorianus
acacagatttttcgagggcaacagc

SEQ ID NO: 194243 - DNA, 25 bp, Saccharomyces pastorianus
gcagagtgaagtttatttttagcat

SEQ ID NO: 194244 - DNA, 25 bp, Saccharomyces pastorianus
gggcaacagcgtggacttaacataa

SEQ ID NO: 194245 - DNA, 25 bp, Saccharomyces pastorianus
atatatctttaaactggctccaccc

SEQ ID NO: 194246 - DNA, 25 bp, Saccharomyces pastorianus
tagcatccttgctgatacgccaaat

SEQ ID NO: 194247 - DNA, 25 bp, Saccharomyces pastorianus
ggtacgtaatgcctcattaggattt

SEQ ID NO: 194248 - DNA, 25 bp, Saccharomyces pastorianus
taacaacattttttgacggagagtt

SEQ ID NO: 194249 - DNA, 25 bp, Saccharomyces pastorianus
gtttcatatctatatataccgcaga

SEQ ID NO: 194250 - DNA, 25 bp, Saccharomyces pastorianus
aattcactatactaacatggtcatt

SEQ ID NO: 194251 - DNA, 25 bp, Saccharomyces pastorianus
aaaacgtaattgcttgacacagatt

SEQ ID NO: 194252 - DNA, 25 bp, Saccharomyces pastorianus
aaaaatggacgtttcagcgaggaat

SEQ ID NO: 194253 - DNA, 25 bp, Saccharomyces pastorianus
gcattaactacgctcttgggaaata

SEQ ID NO: 194254 - DNA, 25 bp, Saccharomyces pastorianus
aactacgctcttgggaaatacttct

SEQ ID NO: 194255 - DNA, 25 bp, Saccharomyces pastorianus
gtatagcattaactacgctcttggg

SEQ ID NO: 194256 - DNA, 25 bp, Saccharomyces pastorianus
cgctcttgggaaatacttctttcat

SEQ ID NO: 194257 - DNA, 25 bp, Saccharomyces pastorianus
cctgacattgcgtatagcattaact

SEQ ID NO: 194258 - DNA, 25 bp, Saccharomyces pastorianus
attaactacgctcttgggaaatact

SEQ ID NO: 194259 - DNA, 25 bp, Saccharomyces pastorianus
ctacgctcttgggaaatacttcttt

SEQ ID NO: 194260 - DNA, 25 bp, Saccharomyces pastorianus
cattctcccctgacattgcgtatag

SEQ ID NO: 194261 - DNA, 25 bp, Saccharomyces pastorianus
atagcattaactacgctcttgggaa

SEQ ID NO: 194262 - DNA, 25 bp, Saccharomyces pastorianus
tcccctgacattgcgtatagcatta

SEQ ID NO: 194263 - DNA, 25 bp, Saccharomyces pastorianus
tctcccctgacattgcgtatagcat

SEQ ID NO: 194264 - DNA, 25 bp, Saccharomyces pastorianus
gaccccagcgtatctggactttgaa

SEQ ID NO: 194265 - DNA, 25 bp, Saccharomyces pastorianus
gggtcacaagacaattaggaatcta

SEQ ID NO: 194266 - DNA, 25 bp, Saccharomyces pastorianus
gtccgcacgtggaggccataattga

SEQ ID NO: 194267 - DNA, 25 bp, Saccharomyces pastorianus
ctatgttaggaagcggtctcccctg

SEQ ID NO: 194268 - DNA, 25 bp, Saccharomyces pastorianus
gctgcactatatatgaaggcgctaa

SEQ ID NO: 194269 - DNA, 25 bp, Saccharomyces pastorianus
gtctcccctgctttaagggtcacaa

SEQ ID NO: 194270 - DNA, 25 bp, Saccharomyces pastorianus
gccataattgagtgtgtaaatccta

SEQ ID NO: 194271 - DNA, 25 bp, Saccharomyces pastorianus
tatcaaggcatatctagccgcccgt

SEQ ID NO: 194272 - DNA, 25 bp, Saccharomyces pastorianus
aaaaccgatcacgaagctgcactat

SEQ ID NO: 194273 - DNA, 25 bp, Saccharomyces pastorianus
tctggactttgaagaactttgtatc

SEQ ID NO: 194274 - DNA, 25 bp, Saccharomyces pastorianus
ctaagagcaagatttcaacctcaaa

SEQ ID NO: 194275 - DNA, 25 bp, Saccharomyces pastorianus
caaagttactgtgtgagggtgagaa

SEQ ID NO: 194276 - DNA, 25 bp, Saccharomyces pastorianus
atttgctgaagctgtgagattgacc

SEQ ID NO: 194277 - DNA, 25 bp, Saccharomyces pastorianus
gacccgttaaacaaggatgcagcaa

SEQ ID NO: 194278 - DNA, 25 bp, Saccharomyces pastorianus
gcagagtattataaccgggcttctt

SEQ ID NO: 194279 - DNA, 25 bp, Saccharomyces pastorianus
attcttggctttattcaaatagttg

SEQ ID NO: 194280 - DNA, 25 bp, Saccharomyces pastorianus
caaggatgcagcaaagttactgtgt

SEQ ID NO: 194281 - DNA, 25 bp, Saccharomyces pastorianus
ttcttgttcttggagcctaatccca

SEQ ID NO: 194282 - DNA, 25 bp, Saccharomyces pastorianus
gagcctaatcccaatgacccgttaa

SEQ ID NO: 194283 - DNA, 25 bp, Saccharomyces pastorianus
gtactggatatgtatattcttggct

SEQ ID NO: 194284 - DNA, 25 bp, Saccharomyces pastorianus
gaccatgtctggaggttcaattgaa

SEQ ID NO: 194285 - DNA, 25 bp, Saccharomyces pastorianus
gaagctgtgagattgaccatgtctg

SEQ ID NO: 194286 - DNA, 25 bp, Saccharomyces pastorianus
taacgtatgctatccatctcttttc

SEQ ID NO: 194287 - DNA, 25 bp, Saccharomyces pastorianus
aaacgactgcttagtaggagtgtca

SEQ ID NO: 194288 - DNA, 25 bp, Saccharomyces pastorianus
attcttcgaagcttttatgagttaa

SEQ ID NO: 194289 - DNA, 25 bp, Saccharomyces pastorianus
gtcatatatccctcctttaaatttt

SEQ ID NO: 194290 - DNA, 25 bp, Saccharomyces pastorianus
atgctatccatctcttttccttttt

SEQ ID NO: 194291 - DNA, 25 bp, Saccharomyces pastorianus
ctgcttagtaggagtgtcatatatc

SEQ ID NO: 194292 - DNA, 25 bp, Saccharomyces pastorianus
tagaaaaggtgcatctctctctctc

SEQ ID NO: 194293 - DNA, 25 bp, Saccharomyces pastorianus
tctctatctctatctctaaggtttt

SEQ ID NO: 194294 - DNA, 25 bp, Saccharomyces pastorianus
tactcagttagattcatactactat

SEQ ID NO: 194295 - DNA, 25 bp, Saccharomyces pastorianus
ggttttattactttcataacgtatg

SEQ ID NO: 194296 - DNA, 25 bp, Saccharomyces pastorianus
atttacatattcttcgaagctttta

SEQ ID NO: 194297 - DNA, 25 bp, Saccharomyces pastorianus
gcacgcgatagctcatttcgtactt

SEQ ID NO: 194298 - DNA, 25 bp, Saccharomyces pastorianus
agtcgttcaatatttgatcattggg

SEQ ID NO: 194299 - DNA, 25 bp, Saccharomyces pastorianus
atcttcacagacaacgtcgacgcac

SEQ ID NO: 194300 - DNA, 25 bp, Saccharomyces pastorianus
gcatgtctattttatagtcgttcaa

SEQ ID NO: 194301 - DNA, 25 bp, Saccharomyces pastorianus
ttgccatcttcacagacaacgtcga

SEQ ID NO: 194302 - DNA, 25 bp, Saccharomyces pastorianus
gacgcacgcgatagctcatttcgta

SEQ ID NO: 194303 - DNA, 25 bp, Saccharomyces pastorianus
atagctcatttcgtacttcctgcat

SEQ ID NO: 194304 - DNA, 25 bp, Saccharomyces pastorianus
gtacttcctgcatgtctattttata

SEQ ID NO: 194305 - DNA, 25 bp, Saccharomyces pastorianus
acagacaacgtcgacgcacgcgata

SEQ ID NO: 194306 - DNA, 25 bp, Saccharomyces pastorianus
atttcgtacttcctgcatgtctatt

SEQ ID NO: 194307 - DNA, 25 bp, Saccharomyces pastorianus
ctgccgttgccatcttcacagacaa

SEQ ID NO: 194308 - DNA, 25 bp, Saccharomyces pastorianus
aaaatatcgcccaactgcggagcgc

SEQ ID NO: 194309 - DNA, 25 bp, Saccharomyces pastorianus
tagagggtcctttactactgacggt

SEQ ID NO: 194310 - DNA, 25 bp, Saccharomyces pastorianus
tggagcacctgccatttcaacaatt

SEQ ID NO: 194311 - DNA, 25 bp, Saccharomyces pastorianus
gggcacttctatcattggtctcagc

SEQ ID NO: 194312 - DNA, 25 bp, Saccharomyces pastorianus
acggttgtgcgctttttagtcgtat

SEQ ID NO: 194313 - DNA, 25 bp, Saccharomyces pastorianus
catcacagattttgccggtttagga

SEQ ID NO: 194314 - DNA, 25 bp, Saccharomyces pastorianus
tggtaggcttcttcaacaaacggtt

SEQ ID NO: 194315 - DNA, 25 bp, Saccharomyces pastorianus
tggtctcagctttctttagtttcat

SEQ ID NO: 194316 - DNA, 25 bp, Saccharomyces pastorianus
tttaacttcggtatacctccagcta

SEQ ID NO: 194317 - DNA, 25 bp, Saccharomyces pastorianus
gtaccagaacttcctgaggccgatg

SEQ ID NO: 194318 - DNA, 25 bp, Saccharomyces pastorianus
aggagcactaccacctaatgctggt

SEQ ID NO: 194319 - DNA, 25 bp, Saccharomyces pastorianus
tagccgtatcttaccttatggaaaa

SEQ ID NO: 194320 - DNA, 25 bp, Saccharomyces pastorianus
gagcttcccggaaattacactatat

SEQ ID NO: 194321 - DNA, 25 bp, Saccharomyces pastorianus
aaattacactatattatgcatccgt

SEQ ID NO: 194322 - DNA, 25 bp, Saccharomyces pastorianus
ggtaagatttgttgaaactcgaaat

SEQ ID NO: 194323 - DNA, 25 bp, Saccharomyces pastorianus
ttgaaactcgaaatactaacattat

SEQ ID NO: 194324 - DNA, 25 bp, Saccharomyces pastorianus
atgtttttctaaatcgagcttcccg

SEQ ID NO: 194325 - DNA, 25 bp, Saccharomyces pastorianus
tgttcaatttatctagccgtatctt

SEQ ID NO: 194326 - DNA, 25 bp, Saccharomyces pastorianus
aagtctcacgacatgaaaaaatcat

SEQ ID NO: 194327 - DNA, 25 bp, Saccharomyces pastorianus
ttctaaatcgagcttcccggaaatt

SEQ ID NO: 194328 - DNA, 25 bp, Saccharomyces pastorianus
tatctagccgtatcttaccttatgg

SEQ ID NO: 194329 - DNA, 25 bp, Saccharomyces pastorianus
ttattgttcaatttatctagccgta

SEQ ID NO: 194330 - DNA, 25 bp, Saccharomyces pastorianus
gaatccattactctcaagttctcaa

SEQ ID NO: 194331 - DNA, 25 bp, Saccharomyces pastorianus
gagacaggccaaaaaaaattcggat

SEQ ID NO: 194332 - DNA, 25 bp, Saccharomyces pastorianus
gggaatccattactctcaagttctc

SEQ ID NO: 194333 - DNA, 25 bp, Saccharomyces pastorianus
gagggaatccattactctcaagttc

SEQ ID NO: 194334 - DNA, 25 bp, Saccharomyces pastorianus
gatcaacagataatggacaaatttc

SEQ ID NO: 194335 - DNA, 25 bp, Saccharomyces pastorianus
ggaatccattactctcaagttctca

SEQ ID NO: 194336 - DNA, 25 bp, Saccharomyces pastorianus
aaacgaggagggaatccattactct

SEQ ID NO: 194337 - DNA, 25 bp, Saccharomyces pastorianus
acgaggagggaatccattactctca

SEQ ID NO: 194338 - DNA, 25 bp, Saccharomyces pastorianus
gaggagggaatccattactctcaag

SEQ ID NO: 194339 - DNA, 25 bp, Saccharomyces pastorianus
agggaatccattactctcaagttct

SEQ ID NO: 194340 - DNA, 25 bp, Saccharomyces pastorianus
ggagggaatccattactctcaagtt

SEQ ID NO: 194341 - DNA, 25 bp, Saccharomyces pastorianus
ccagctttattggacaagttgatga

SEQ ID NO: 194342 - DNA, 25 bp, Saccharomyces pastorianus
tggaccctgtctccgctaagaagga

SEQ ID NO: 194343 - DNA, 25 bp, Saccharomyces pastorianus
cttgaatgaagacgctatggccact

SEQ ID NO: 194344 - DNA, 25 bp, Saccharomyces pastorianus
aacaatttctccagctttattggac

SEQ ID NO: 194345 - DNA, 25 bp, Saccharomyces pastorianus
tctctgccgatattgttactctatt

SEQ ID NO: 194346 - DNA, 25 bp, Saccharomyces pastorianus
tgaagacgctatggccactgaaaaa

SEQ ID NO: 194347 - DNA, 25 bp, Saccharomyces pastorianus
gacaagatttcttacatcagcgacg

SEQ ID NO: 194348 - DNA, 25 bp, Saccharomyces pastorianus
ttacatcagcgacgaatctaaattc

SEQ ID NO: 194349 - DNA, 25 bp, Saccharomyces pastorianus
ggaagccggcgacaagatttcttac

SEQ ID NO: 194350 - DNA, 25 bp, Saccharomyces pastorianus
agaaaattctctgccgatattgtta

SEQ ID NO: 194351 - DNA, 25 bp, Saccharomyces pastorianus
ttcccaagagttttggaccctgtct

SEQ ID NO: 194352 - DNA, 25 bp, Saccharomyces pastorianus
ggttcacttccaagaaacgaacagg

SEQ ID NO: 194353 - DNA, 25 bp, Saccharomyces pastorianus
atatttccagttatccgccagctgg

SEQ ID NO: 194354 - DNA, 25 bp, Saccharomyces pastorianus
gagaattgcgttccaaaaagttgtt

SEQ ID NO: 194355 - DNA, 25 bp, Saccharomyces pastorianus
tgaagcaaaaggcactcttgaggag

SEQ ID NO: 194356 - DNA, 25 bp, Saccharomyces pastorianus
gatcaaatctcatccatatttccag

SEQ ID NO: 194357 - DNA, 25 bp, Saccharomyces pastorianus
tcgtttttgatattggttcacttcc

SEQ ID NO: 194358 - DNA, 25 bp, Saccharomyces pastorianus
gtagcagaaacttaccaacgatagt

SEQ ID NO: 194359 - DNA, 25 bp, Saccharomyces pastorianus
gaatgtacaggacaaagttttcgtt

SEQ ID NO: 194360 - DNA, 25 bp, Saccharomyces pastorianus
gggtactgagagtcaattgcataga

SEQ ID NO: 194361 - DNA, 25 bp, Saccharomyces pastorianus
tggtgccccgactgcgtctatgcta

SEQ ID NO: 194362 - DNA, 25 bp, Saccharomyces pastorianus
gcgtctatgctaattccatttggaa

SEQ ID NO: 194363 - DNA, 25 bp, Saccharomyces pastorianus
ggtcatcgagcaatcaaagcttttc

SEQ ID NO: 194364 - DNA, 25 bp, Saccharomyces pastorianus
ttggtcatcgagcaatcaaagcttt

SEQ ID NO: 194365 - DNA, 25 bp, Saccharomyces pastorianus
gagcaatcaaagcttttcttcaaag

SEQ ID NO: 194366 - DNA, 25 bp, Saccharomyces pastorianus
tggtcatcgagcaatcaaagctttt

SEQ ID NO: 194367 - DNA, 25 bp, Saccharomyces pastorianus
gtcatcgagcaatcaaagcttttct

SEQ ID NO: 194368 - DNA, 25 bp, Saccharomyces pastorianus
catcgagcaatcaaagcttttcttc

SEQ ID NO: 194369 - DNA, 25 bp, Saccharomyces pastorianus
gttggtcatcgagcaatcaaagctt

SEQ ID NO: 194370 - DNA, 25 bp, Saccharomyces pastorianus
aaaattctccctgttggtcatcgag

SEQ ID NO: 194371 - DNA, 25 bp, Saccharomyces pastorianus
gcaatcaaagcttttcttcaaagaa

SEQ ID NO: 194372 - DNA, 25 bp, Saccharomyces pastorianus
tcgagcaatcaaagcttttcttcaa

SEQ ID NO: 194373 - DNA, 25 bp, Saccharomyces pastorianus
caatcaaagcttttcttcaaagaaa

SEQ ID NO: 194374 - DNA, 25 bp, Saccharomyces pastorianus
aaaggaaggtcatcctatcgcggaa

SEQ ID NO: 194375 - DNA, 25 bp, Saccharomyces pastorianus
gtcaaaagactggttaacgaaactg

SEQ ID NO: 194376 - DNA, 25 bp, Saccharomyces pastorianus
tcgcggaagggttagtcaaaagact

SEQ ID NO: 194377 - DNA, 25 bp, Saccharomyces pastorianus
actgatgtggctgcgattaccttac

SEQ ID NO: 194378 - DNA, 25 bp, Saccharomyces pastorianus
catcctatcgcggaagggttagtca

SEQ ID NO: 194379 - DNA, 25 bp, Saccharomyces pastorianus
aaactgatgtggctgcgattacctt

SEQ ID NO: 194380 - DNA, 25 bp, Saccharomyces pastorianus
tcctatcgcggaagggttagtcaaa

SEQ ID NO: 194381 - DNA, 25 bp, Saccharomyces pastorianus
aggtcatcctatcgcggaagggtta

SEQ ID NO: 194382 - DNA, 25 bp, Saccharomyces pastorianus
gaaggtcatcctatcgcggaagggt

SEQ ID NO: 194383 - DNA, 25 bp, Saccharomyces pastorianus
taacgaaactgatgtggctgcgatt

SEQ ID NO: 194384 - DNA, 25 bp, Saccharomyces pastorianus
acgaaactgatgtggctgcgattac

SEQ ID NO: 194385 - DNA, 25 bp, Saccharomyces pastorianus
catcccgtgtactattacccgacag

SEQ ID NO: 194386 - DNA, 25 bp, Saccharomyces pastorianus
gcttgtcggcattaagtctcttcat

SEQ ID NO: 194387 - DNA, 25 bp, Saccharomyces pastorianus
gcacgggctttctgtatattgaact

SEQ ID NO: 194388 - DNA, 25 bp, Saccharomyces pastorianus
gcttttcggagctacaattccccta

SEQ ID NO: 194389 - DNA, 25 bp, Saccharomyces pastorianus
gcattaagtctcttcatcccgtgta

SEQ ID NO: 194390 - DNA, 25 bp, Saccharomyces pastorianus
tgtatattgaactttccgtcgcttt

SEQ ID NO: 194391 - DNA, 25 bp, Saccharomyces pastorianus
ggtgcacgggctttctgtatattga

SEQ ID NO: 194392 - DNA, 25 bp, Saccharomyces pastorianus
aagtctcttcatcccgtgtactatt

SEQ ID NO: 194393 - DNA, 25 bp, Saccharomyces pastorianus
atattgaactttccgtcgcttttcg

SEQ ID NO: 194394 - DNA, 25 bp, Saccharomyces pastorianus
tacccggcttgtcggcattaagtct

SEQ ID NO: 194395 - DNA, 25 bp, Saccharomyces pastorianus
tttccgtcgcttttcggagctacaa

SEQ ID NO: 194396 - DNA, 25 bp, Saccharomyces pastorianus
aaccaaccatattacaagtcacaaa

SEQ ID NO: 194397 - DNA, 25 bp, Saccharomyces pastorianus
gtaaccaaccatattacaagtcaca

SEQ ID NO: 194398 - DNA, 25 bp, Saccharomyces pastorianus
tggtaaccaaccatattacaagtca

SEQ ID NO: 194399 - DNA, 25 bp, Saccharomyces pastorianus
atggtaaccaaccatattacaagtc

SEQ ID NO: 194400 - DNA, 25 bp, Saccharomyces pastorianus
tatggtaaccaaccatattacaagt

SEQ ID NO: 194401 - DNA, 25 bp, Saccharomyces pastorianus
accaaccatattacaagtcacaaat

SEQ ID NO: 194402 - DNA, 25 bp, Saccharomyces pastorianus
ggtaaccaaccatattacaagtcac

SEQ ID NO: 194403 - DNA, 25 bp, Saccharomyces pastorianus
taaccaaccatattacaagtcacaa

SEQ ID NO: 194404 - DNA, 25 bp, Saccharomyces pastorianus
agaaggtcctatcatgctgtacatt

SEQ ID NO: 194405 - DNA, 25 bp, Saccharomyces pastorianus
tcgccagaggagtacgttgtcaaat

SEQ ID NO: 194406 - DNA, 25 bp, Saccharomyces pastorianus
atcagcccagggtacagtgagttat

SEQ ID NO: 194407 - DNA, 25 bp, Saccharomyces pastorianus
ctgttttgcgcttgtggtggtagct

SEQ ID NO: 194408 - DNA, 25 bp, Saccharomyces pastorianus
gaacgagccagaagacgacctgtta

SEQ ID NO: 194409 - DNA, 25 bp, Saccharomyces pastorianus
aaatttgctggttcttgcatcggct

SEQ ID NO: 194410 - DNA, 25 bp, Saccharomyces pastorianus
ggtggtagctcaatggcttactcgt

SEQ ID NO: 194411 - DNA, 25 bp, Saccharomyces pastorianus
aacgccagtggatttgtacccaact

SEQ ID NO: 194412 - DNA, 25 bp, Saccharomyces pastorianus
aacctctaggctcattgggtgctaa

SEQ ID NO: 194413 - DNA, 25 bp, Saccharomyces pastorianus
ataggtgctatcgttggtcgtttca

SEQ ID NO: 194414 - DNA, 25 bp, Saccharomyces pastorianus
gcatttagctagttactcgccagag

SEQ ID NO: 194415 - DNA, 25 bp, Saccharomyces pastorianus
cccaccgtgcctcagctgagaaggt

SEQ ID NO: 194416 - DNA, 25 bp, Saccharomyces pastorianus
ttctcgaaacgaaggcaaggcaaaa

SEQ ID NO: 194417 - DNA, 25 bp, Saccharomyces pastorianus
atggacactattacaaaccccaccg

SEQ ID NO: 194418 - DNA, 25 bp, Saccharomyces pastorianus
gcatttgtgccagaatggacactat

SEQ ID NO: 194419 - DNA, 25 bp, Saccharomyces pastorianus
tgccagaatggacactattacaaac

SEQ ID NO: 194420 - DNA, 25 bp, Saccharomyces pastorianus
gtgcctcagctgagaaggtccctta

SEQ ID NO: 194421 - DNA, 25 bp, Saccharomyces pastorianus
atgcatttgtgccagaatggacact

SEQ ID NO: 194422 - DNA, 25 bp, Saccharomyces pastorianus
tcagctgagaaggtcccttacctaa

SEQ ID NO: 194423 - DNA, 25 bp, Saccharomyces pastorianus
ggacactattacaaaccccaccgtg

SEQ ID NO: 194424 - DNA, 25 bp, Saccharomyces pastorianus
agaattctcgaaacgaaggcaaggc

SEQ ID NO: 194425 - DNA, 25 bp, Saccharomyces pastorianus
agctgagaaggtcccttacctaaag

SEQ ID NO: 194426 - DNA, 25 bp, Saccharomyces pastorianus
gaacatactatcgtcacagcgacca

SEQ ID NO: 194427 - DNA, 25 bp, Saccharomyces pastorianus
agcaccgaagtttaagtcctgccaa

SEQ ID NO: 194428 - DNA, 25 bp, Saccharomyces pastorianus
agcgaccacacttatggctggcaaa

SEQ ID NO: 194429 - DNA, 25 bp, Saccharomyces pastorianus
ttcattacttgcagactaacgctcc

SEQ ID NO: 194430 - DNA, 25 bp, Saccharomyces pastorianus
gtcctgccaaatactcaccgatttt

SEQ ID NO: 194431 - DNA, 25 bp, Saccharomyces pastorianus
aagggatgtcgttgtttccctgtat

SEQ ID NO: 194432 - DNA, 25 bp, Saccharomyces pastorianus
ccatgctcctttggatttaactgag

SEQ ID NO: 194433 - DNA, 25 bp, Saccharomyces pastorianus
gatggttttgcaacattcattccaa

SEQ ID NO: 194434 - DNA, 25 bp, Saccharomyces pastorianus
ggtcacaccatctgatatagactat

SEQ ID NO: 194435 - DNA, 25 bp, Saccharomyces pastorianus
aaaaccctggatcaattccttctct

SEQ ID NO: 194436 - DNA, 25 bp, Saccharomyces pastorianus
ggaggattttcctgcgacgtaccaa

SEQ ID NO: 194437 - DNA, 25 bp, Saccharomyces pastorianus
gcataatcacatccttcttcttaat

SEQ ID NO: 194438 - DNA, 25 bp, Saccharomyces pastorianus
tgctactaagtagacgttccgtggt

SEQ ID NO: 194439 - DNA, 25 bp, Saccharomyces pastorianus
attgggctttatttcctgttggata

SEQ ID NO: 194440 - DNA, 25 bp, Saccharomyces pastorianus
agcacaatctttagcgtcatcctta

SEQ ID NO: 194441 - DNA, 25 bp, Saccharomyces pastorianus
atggatttccggtcgattgtttaca

SEQ ID NO: 194442 - DNA, 25 bp, Saccharomyces pastorianus
ggctcttctccattttatggcctaa

SEQ ID NO: 194443 - DNA, 25 bp, Saccharomyces pastorianus
acatgtatgtcccagcagtgaaagc

SEQ ID NO: 194444 - DNA, 25 bp, Saccharomyces pastorianus
gatgtcattatttctggctcttctc

SEQ ID NO: 194445 - DNA, 25 bp, Saccharomyces pastorianus
gtagcaagtcacacgctgttcaaaa

SEQ ID NO: 194446 - DNA, 25 bp, Saccharomyces pastorianus
ggctcggactttaaaccttatatgg

SEQ ID NO: 194447 - DNA, 25 bp, Saccharomyces pastorianus
gtccttgtatttctctgcattgcat

SEQ ID NO: 194448 - DNA, 25 bp, Saccharomyces pastorianus
gtgatttacatcacgatatgtcaat

SEQ ID NO: 194449 - DNA, 25 bp, Saccharomyces pastorianus
catgcccaccatcaattgtgcaaga

SEQ ID NO: 194450 - DNA, 25 bp, Saccharomyces pastorianus
gccatgcccaccatcaattgtgcaa

SEQ ID NO: 194451 - DNA, 25 bp, Saccharomyces pastorianus
gtgctgaatcagcacacgccatgcc

SEQ ID NO: 194452 - DNA, 25 bp, Saccharomyces pastorianus
aaaccttgtgctgaatcagcacacg

SEQ ID NO: 194453 - DNA, 25 bp, Saccharomyces pastorianus
agtaaacgagtagtatactaactat

SEQ ID NO: 194454 - DNA, 25 bp, Saccharomyces pastorianus
atactaactatatatgtgatttaca

SEQ ID NO: 194455 - DNA, 25 bp, Saccharomyces pastorianus
atgcccaccatcaattgtgcaagaa

SEQ ID NO: 194456 - DNA, 25 bp, Saccharomyces pastorianus
gcccaccatcaattgtgcaagaaaa

SEQ ID NO: 194457 - DNA, 25 bp, Saccharomyces pastorianus
acatcacgatatgtcaattataggc

SEQ ID NO: 194458 - DNA, 25 bp, Saccharomyces pastorianus
gatttacatcacgatatgtcaatta

SEQ ID NO: 194459 - DNA, 25 bp, Saccharomyces pastorianus
ggaaacattactttaccagccgact

SEQ ID NO: 194460 - DNA, 25 bp, Saccharomyces pastorianus
aagattaatgatggacaaattcgcc

SEQ ID NO: 194461 - DNA, 25 bp, Saccharomyces pastorianus
gttcctcatatcctaaaagacatca

SEQ ID NO: 194462 - DNA, 25 bp, Saccharomyces pastorianus
gacaaattcgccatattccagtaag

SEQ ID NO: 194463 - DNA, 25 bp, Saccharomyces pastorianus
acaggatgctacaattgttgaatta

SEQ ID NO: 194464 - DNA, 25 bp, Saccharomyces pastorianus
ggctatattcaataggtggccatga

SEQ ID NO: 194465 - DNA, 25 bp, Saccharomyces pastorianus
attactttaccagccgactcagaag

SEQ ID NO: 194466 - DNA, 25 bp, Saccharomyces pastorianus
ttaccagccgactcagaagctagga

SEQ ID NO: 194467 - DNA, 25 bp, Saccharomyces pastorianus
gctttgtgatgttcctcatatccta

SEQ ID NO: 194468 - DNA, 25 bp, Saccharomyces pastorianus
aacgggctttgtgatgttcctcata

SEQ ID NO: 194469 - DNA, 25 bp, Saccharomyces pastorianus
gactcagaagctaggaaagctgcaa

SEQ ID NO: 194470 - DNA, 25 bp, Saccharomyces pastorianus
tcacttggcccaatactacatgttc

SEQ ID NO: 194471 - DNA, 25 bp, Saccharomyces pastorianus
ttccgcaaccaccactatagctcaa

SEQ ID NO: 194472 - DNA, 25 bp, Saccharomyces pastorianus
aagccagctatctccaaggctctat

SEQ ID NO: 194473 - DNA, 25 bp, Saccharomyces pastorianus
gccagctatctccaaggctctatcc

SEQ ID NO: 194474 - DNA, 25 bp, Saccharomyces pastorianus
tgcttccgcaaccaccactatagct

SEQ ID NO: 194475 - DNA, 25 bp, Saccharomyces pastorianus
gcttccgcaaccaccactatagctc

SEQ ID NO: 194476 - DNA, 25 bp, Saccharomyces pastorianus
aaagccagctatctccaaggctcta

SEQ ID NO: 194477 - DNA, 25 bp, Saccharomyces pastorianus
agccagctatctccaaggctctatc

SEQ ID NO: 194478 - DNA, 25 bp, Saccharomyces pastorianus
cgccgctggtgtcgctgccatcgct

SEQ ID NO: 194479 - DNA, 25 bp, Saccharomyces pastorianus
gtactccagcagattaaagccagct

SEQ ID NO: 194480 - DNA, 25 bp, Saccharomyces pastorianus
agtgaccagaatgatcaccggtgtt

SEQ ID NO: 194481 - DNA, 25 bp, Saccharomyces pastorianus
aagggtatcgtaatcctttctattg

SEQ ID NO: 194482 - DNA, 25 bp, Saccharomyces pastorianus
catctacgtgtaggctgccaaattg

SEQ ID NO: 194483 - DNA, 25 bp, Saccharomyces pastorianus
tctacgtgtaggctgccaaattgta

SEQ ID NO: 194484 - DNA, 25 bp, Saccharomyces pastorianus
tcatctacgtgtaggctgccaaatt

SEQ ID NO: 194485 - DNA, 25 bp, Saccharomyces pastorianus
ctacgtgtaggctgccaaattgtac

SEQ ID NO: 194486 - DNA, 25 bp, Saccharomyces pastorianus
tacgtgtaggctgccaaattgtacc

SEQ ID NO: 194487 - DNA, 25 bp, Saccharomyces pastorianus
atctacgtgtaggctgccaaattgt

SEQ ID NO: 194488 - DNA, 25 bp, Saccharomyces pastorianus
ctcatctacgtgtaggctgccaaat

SEQ ID NO: 194489 - DNA, 25 bp, Saccharomyces pastorianus
gctggcatatggaagcagttgttca

SEQ ID NO: 194490 - DNA, 25 bp, Saccharomyces pastorianus
tggcatatggaagcagttgttcaac

SEQ ID NO: 194491 - DNA, 25 bp, Saccharomyces pastorianus
aggctggcatatggaagcagttgtt

SEQ ID NO: 194492 - DNA, 25 bp, Saccharomyces pastorianus
cgcaaaatgaggctggcatatggaa

SEQ ID NO: 194493 - DNA, 25 bp, Saccharomyces pastorianus
tacgcaaaatgaggctggcatatgg

SEQ ID NO: 194494 - DNA, 25 bp, Saccharomyces pastorianus
caaaatgaggctggcatatggaagc

SEQ ID NO: 194495 - DNA, 25 bp, Saccharomyces pastorianus
ggctggcatatggaagcagttgttc

SEQ ID NO: 194496 - DNA, 25 bp, Saccharomyces pastorianus
aatgaggctggcatatggaagcagt

SEQ ID NO: 194497 - DNA, 25 bp, Saccharomyces pastorianus
caactctccccaaagttttccacat

SEQ ID NO: 194498 - DNA, 25 bp, Saccharomyces pastorianus
ttacgcaaaatgaggctggcatatg

SEQ ID NO: 194499 - DNA, 25 bp, Saccharomyces pastorianus
atgaggctggcatatggaagcagtt

SEQ ID NO: 194500 - DNA, 25 bp, Saccharomyces pastorianus
atctgtcgatagattcttttcagca

SEQ ID NO: 194501 - DNA, 25 bp, Saccharomyces pastorianus
gctcgattaacacagcttggccaat

SEQ ID NO: 194502 - DNA, 25 bp, Saccharomyces pastorianus
gcttggccaattgttttcgagttac

SEQ ID NO: 194503 - DNA, 25 bp, Saccharomyces pastorianus
ggtctaggcttactacacatttcaa

SEQ ID NO: 194504 - DNA, 25 bp, Saccharomyces pastorianus
aagaccgttgttattcaatggaaga

SEQ ID NO: 194505 - DNA, 25 bp, Saccharomyces pastorianus
tatattgcacattcatcctgctcga

SEQ ID NO: 194506 - DNA, 25 bp, Saccharomyces pastorianus
gaataatgtgatccatgccttaaat

SEQ ID NO: 194507 - DNA, 25 bp, Saccharomyces pastorianus
gggcggctgattttatcatactatt

SEQ ID NO: 194508 - DNA, 25 bp, Saccharomyces pastorianus
agaacgctcgctcctggtgatgatc

SEQ ID NO: 194509 - DNA, 25 bp, Saccharomyces pastorianus
gtacctaacgactacttacagtgtt

SEQ ID NO: 194510 - DNA, 25 bp, Saccharomyces pastorianus
acatgctatgccaaatctgtcgata

SEQ ID NO: 194511 - DNA, 25 bp, Saccharomyces pastorianus
aaataatctaagttacctgatacaa

SEQ ID NO: 194512 - DNA, 25 bp, Saccharomyces pastorianus
atctaagttacctgatacaagaact

SEQ ID NO: 194513 - DNA, 25 bp, Saccharomyces pastorianus
aatctaagttacctgatacaagaac

SEQ ID NO: 194514 - DNA, 25 bp, Saccharomyces pastorianus
ttattaaataatctaagttacctga

SEQ ID NO: 194515 - DNA, 25 bp, Saccharomyces pastorianus
ataatctaagttacctgatacaaga

SEQ ID NO: 194516 - DNA, 25 bp, Saccharomyces pastorianus
taatctaagttacctgatacaagaa

SEQ ID NO: 194517 - DNA, 25 bp, Saccharomyces pastorianus
tattaaataatctaagttacctgat

SEQ ID NO: 194518 - DNA, 25 bp, Saccharomyces pastorianus
aataatctaagttacctgatacaag

SEQ ID NO: 194519 - DNA, 25 bp, Saccharomyces pastorianus
ttaaataatctaagttacctgatac

SEQ ID NO: 194520 - DNA, 25 bp, Saccharomyces pastorianus
attaaataatctaagttacctgata

SEQ ID NO: 194521 - DNA, 25 bp, Saccharomyces pastorianus
taaataatctaagttacctgataca

SEQ ID NO: 194522 - DNA, 25 bp, Saccharomyces pastorianus
ttcaatgtcgaatactttgctaagg

SEQ ID NO: 194523 - DNA, 25 bp, Saccharomyces pastorianus
gcccacgttacagtttcaaatcgct

SEQ ID NO: 194524 - DNA, 25 bp, Saccharomyces pastorianus
ggtttctgtcgaaggtgtcaacgtt

SEQ ID NO: 194525 - DNA, 25 bp, Saccharomyces pastorianus
acattagtcgtttgatatttctttt

SEQ ID NO: 194526 - DNA, 25 bp, Saccharomyces pastorianus
aaatcgctaggcataatctctccct

SEQ ID NO: 194527 - DNA, 25 bp, Saccharomyces pastorianus
ggttgtcgacaaggctttgattgct

SEQ ID NO: 194528 - DNA, 25 bp, Saccharomyces pastorianus
aggcataatctctccctataaaaat

SEQ ID NO: 194529 - DNA, 25 bp, Saccharomyces pastorianus
tacagtttcaaatcgctaggcataa

SEQ ID NO: 194530 - DNA, 25 bp, Saccharomyces pastorianus
ttttttccatttaggctccaaagtg

SEQ ID NO: 194531 - DNA, 25 bp, Saccharomyces pastorianus
attgctacctctactaaggtttctg

SEQ ID NO: 194532 - DNA, 25 bp, Saccharomyces pastorianus
aatttatcaccattcgcaaatcaag

SEQ ID NO: 194533 - DNA, 25 bp, Saccharomyces pastorianus
tgcaatatccgtttgaacctttttt

SEQ ID NO: 194534 - DNA, 25 bp, Saccharomyces pastorianus
aagagtatggcctttgcgttaagac

SEQ ID NO: 194535 - DNA, 25 bp, Saccharomyces pastorianus
cctggattatgtactgggtatgcag

SEQ ID NO: 194536 - DNA, 25 bp, Saccharomyces pastorianus
gcgggagatcacataagcaaagaat

SEQ ID NO: 194537 - DNA, 25 bp, Saccharomyces pastorianus
ttcatgttccgaccgttgtagcccc

SEQ ID NO: 194538 - DNA, 25 bp, Saccharomyces pastorianus
aatgtgctgatcatgtattatttgc

SEQ ID NO: 194539 - DNA, 25 bp, Saccharomyces pastorianus
gaaatgctgaaatcctttaatgtag

SEQ ID NO: 194540 - DNA, 25 bp, Saccharomyces pastorianus
atggcctttgcgttaagactatata

SEQ ID NO: 194541 - DNA, 25 bp, Saccharomyces pastorianus
gccatgtggaatgccttgatgcatt

SEQ ID NO: 194542 - DNA, 25 bp, Saccharomyces pastorianus
aagactatatatggcgggagatcac

SEQ ID NO: 194543 - DNA, 25 bp, Saccharomyces pastorianus
gtattatttgcaatatccgtttgaa

SEQ ID NO: 194544 - DNA, 25 bp, Saccharomyces pastorianus
actaacattgaatttcctcgtaact

SEQ ID NO: 194545 - DNA, 25 bp, Saccharomyces pastorianus
ttctctcaatgaaataattgttact

SEQ ID NO: 194546 - DNA, 25 bp, Saccharomyces pastorianus
gcattacttctttagacttttggta

SEQ ID NO: 194547 - DNA, 25 bp, Saccharomyces pastorianus
taattgcattacttctttagacttt

SEQ ID NO: 194548 - DNA, 25 bp, Saccharomyces pastorianus
gaatttcctcgtaactaattgcatt

SEQ ID NO: 194549 - DNA, 25 bp, Saccharomyces pastorianus
aaatattctcatttttctctcaatg

SEQ ID NO: 194550 - DNA, 25 bp, Saccharomyces pastorianus
aacattgaatttcctcgtaactaat

SEQ ID NO: 194551 - DNA, 25 bp, Saccharomyces pastorianus
tttcctcgtaactaattgcattact

SEQ ID NO: 194552 - DNA, 25 bp, Saccharomyces pastorianus
tgttactaacattgaatttcctcgt

SEQ ID NO: 194553 - DNA, 25 bp, Saccharomyces pastorianus
gtaactaattgcattacttctttag

SEQ ID NO: 194554 - DNA, 25 bp, Saccharomyces pastorianus
attgaatttcctcgtaactaattgc

SEQ ID NO: 194555 - DNA, 25 bp, Saccharomyces pastorianus
atctaagacttccatccgtgcttta

SEQ ID NO: 194556 - DNA, 25 bp, Saccharomyces pastorianus
taagacttccatccgtgctttatta

SEQ ID NO: 194557 - DNA, 25 bp, Saccharomyces pastorianus
gctttattacgtttgtatgatgcat

SEQ ID NO: 194558 - DNA, 25 bp, Saccharomyces pastorianus
atgatgccaaatcagcttgatgctg

SEQ ID NO: 194559 - DNA, 25 bp, Saccharomyces pastorianus
gccaaatcagcttgatgctgttggt

SEQ ID NO: 194560 - DNA, 25 bp, Saccharomyces pastorianus
acttccatccgtgctttattacgtt

SEQ ID NO: 194561 - DNA, 25 bp, Saccharomyces pastorianus
atatctaagacttccatccgtgctt

SEQ ID NO: 194562 - DNA, 25 bp, Saccharomyces pastorianus
ccatccgtgctttattacgtttgta

SEQ ID NO: 194563 - DNA, 25 bp, Saccharomyces pastorianus
tagcgaattttcttctacgaatata

SEQ ID NO: 194564 - DNA, 25 bp, Saccharomyces pastorianus
tgtatgatgcatacaatgatgccaa

SEQ ID NO: 194565 - DNA, 25 bp, Saccharomyces pastorianus
gtcatatctaagacttccatccgtg

SEQ ID NO: 194566 - DNA, 25 bp, Saccharomyces pastorianus
tcatttactttacagtttccggagt

SEQ ID NO: 194567 - DNA, 25 bp, Saccharomyces pastorianus
tgtttgaacttttgagtccttatag

SEQ ID NO: 194568 - DNA, 25 bp, Saccharomyces pastorianus
ccgtattattgcaaaaggaccacaa

SEQ ID NO: 194569 - DNA, 25 bp, Saccharomyces pastorianus
gagtccttatagaaatgctaatatt

SEQ ID NO: 194570 - DNA, 25 bp, Saccharomyces pastorianus
ttgcaaaaggaccacaaacaattga

SEQ ID NO: 194571 - DNA, 25 bp, Saccharomyces pastorianus
tgaacttttgagtccttatagaaat

SEQ ID NO: 194572 - DNA, 25 bp, Saccharomyces pastorianus
agcgattatatcatttactttacag

SEQ ID NO: 194573 - DNA, 25 bp, Saccharomyces pastorianus
tgctaatattatgatcaaagcgatt

SEQ ID NO: 194574 - DNA, 25 bp, Saccharomyces pastorianus
cttttgagtccttatagaaatgcta

SEQ ID NO: 194575 - DNA, 25 bp, Saccharomyces pastorianus
atatcatttactttacagtttccgg

SEQ ID NO: 194576 - DNA, 25 bp, Saccharomyces pastorianus
tttccggagtttccgtattattgca

SEQ ID NO: 194577 - DNA, 25 bp, Saccharomyces pastorianus
taatggccttgttatttaatggtaa

SEQ ID NO: 194578 - DNA, 25 bp, Saccharomyces pastorianus
aagtgccaagctattgagtggaata

SEQ ID NO: 194579 - DNA, 25 bp, Saccharomyces pastorianus
ggccaatctgccttcacgtacacaa

SEQ ID NO: 194580 - DNA, 25 bp, Saccharomyces pastorianus
agagccttctgaggccaatctgcct

SEQ ID NO: 194581 - DNA, 25 bp, Saccharomyces pastorianus
ggtaagagccttctgaggccaatct

SEQ ID NO: 194582 - DNA, 25 bp, Saccharomyces pastorianus
atgtgcaagtgccaagctattgagt

SEQ ID NO: 194583 - DNA, 25 bp, Saccharomyces pastorianus
ttgagtggaataatggccttgttat

SEQ ID NO: 194584 - DNA, 25 bp, Saccharomyces pastorianus
tcacgtacacaaccaccttgttagt

SEQ ID NO: 194585 - DNA, 25 bp, Saccharomyces pastorianus
tgaggccaatctgccttcacgtaca

SEQ ID NO: 194586 - DNA, 25 bp, Saccharomyces pastorianus
tttaatggtaagagccttctgaggc

SEQ ID NO: 194587 - DNA, 25 bp, Saccharomyces pastorianus
cacacaaatgtgcaagtgccaagct

SEQ ID NO: 194588 - DNA, 25 bp, Saccharomyces pastorianus
gacccatactggtaaagcacaagag

SEQ ID NO: 194589 - DNA, 25 bp, Saccharomyces pastorianus
aaaggctatttgatggacatctgaa

SEQ ID NO: 194590 - DNA, 25 bp, Saccharomyces pastorianus
cctggcgggaatgatggcgaagcat

SEQ ID NO: 194591 - DNA, 25 bp, Saccharomyces pastorianus
tggtttgaaaagacccatactggta

SEQ ID NO: 194592 - DNA, 25 bp, Saccharomyces pastorianus
gaatatctgatatcatatggttgga

SEQ ID NO: 194593 - DNA, 25 bp, Saccharomyces pastorianus
cctggatgtaagcactgattcgaat

SEQ ID NO: 194594 - DNA, 25 bp, Saccharomyces pastorianus
gagaaggtggtttgaaaagacccat

SEQ ID NO: 194595 - DNA, 25 bp, Saccharomyces pastorianus
tactggtaaagcacaagagagataa

SEQ ID NO: 194596 - DNA, 25 bp, Saccharomyces pastorianus
agcatggtgggaaaggctatttgat

SEQ ID NO: 194597 - DNA, 25 bp, Saccharomyces pastorianus
gaagaacctggatgtaagcactgat

SEQ ID NO: 194598 - DNA, 25 bp, Saccharomyces pastorianus
attgggtaatgctcctggcgggaat

SEQ ID NO: 194599 - DNA, 25 bp, Saccharomyces pastorianus
gaggcatgcatctttatagattctg

SEQ ID NO: 194600 - DNA, 25 bp, Saccharomyces pastorianus
gtgatacttccatttttggtgtagc

SEQ ID NO: 194601 - DNA, 25 bp, Saccharomyces pastorianus
aaacgaggcatgcatctttatagat

SEQ ID NO: 194602 - DNA, 25 bp, Saccharomyces pastorianus
ttttccgttcctgtgatacttccat

SEQ ID NO: 194603 - DNA, 25 bp, Saccharomyces pastorianus
gatgttcttgtttttaaacgaggca

SEQ ID NO: 194604 - DNA, 25 bp, Saccharomyces pastorianus
atttttggtgtagcagaatgtctga

SEQ ID NO: 194605 - DNA, 25 bp, Saccharomyces pastorianus
gttcctgtgatacttccatttttgg

SEQ ID NO: 194606 - DNA, 25 bp, Saccharomyces pastorianus
gtttttaaacgaggcatgcatcttt

SEQ ID NO: 194607 - DNA, 25 bp, Saccharomyces pastorianus
catctttatagattctgtatgcgaa

SEQ ID NO: 194608 - DNA, 25 bp, Saccharomyces pastorianus
atagattctgtatgcgaaggtattg

SEQ ID NO: 194609 - DNA, 25 bp, Saccharomyces pastorianus
acttccatttttggtgtagcagaat

SEQ ID NO: 194610 - DNA, 25 bp, Saccharomyces pastorianus
ttccagctgaacaagtcaccagagt

SEQ ID NO: 194611 - DNA, 25 bp, Saccharomyces pastorianus
tattccagctgaacaagtcaccaga

SEQ ID NO: 194612 - DNA, 25 bp, Saccharomyces pastorianus
gttgactggtattccagctgaacaa

SEQ ID NO: 194613 - DNA, 25 bp, Saccharomyces pastorianus
gtattccagctgaacaagtcaccag

SEQ ID NO: 194614 - DNA, 25 bp, Saccharomyces pastorianus
ctggtattccagctgaacaagtcac

SEQ ID NO: 194615 - DNA, 25 bp, Saccharomyces pastorianus
ttgactggtattccagctgaacaag

SEQ ID NO: 194616 - DNA, 25 bp, Saccharomyces pastorianus
tggtattccagctgaacaagtcacc

SEQ ID NO: 194617 - DNA, 25 bp, Saccharomyces pastorianus
tgactggtattccagctgaacaagt

SEQ ID NO: 194618 - DNA, 25 bp, Saccharomyces pastorianus
actggtattccagctgaacaagtca

SEQ ID NO: 194619 - DNA, 25 bp, Saccharomyces pastorianus
ggtattccagctgaacaagtcacca

SEQ ID NO: 194620 - DNA, 25 bp, Saccharomyces pastorianus
attccagctgaacaagtcaccagag

SEQ ID NO: 194621 - DNA, 25 bp, Saccharomyces pastorianus
taaactcaactcttctgaggagtca

SEQ ID NO: 194622 - DNA, 25 bp, Saccharomyces pastorianus
aacagcgtatgatcgataaactcaa

SEQ ID NO: 194623 - DNA, 25 bp, Saccharomyces pastorianus
atcaagcctaccaggcactagcttc

SEQ ID NO: 194624 - DNA, 25 bp, Saccharomyces pastorianus
gaaaatgtccaaggtcaagctgcat

SEQ ID NO: 194625 - DNA, 25 bp, Saccharomyces pastorianus
gcttcaccccaacgtctacaaaggt

SEQ ID NO: 194626 - DNA, 25 bp, Saccharomyces pastorianus
atgaatcttattctggagacgtaga

SEQ ID NO: 194627 - DNA, 25 bp, Saccharomyces pastorianus
gacgatcttaacaaaccatcttatg

SEQ ID NO: 194628 - DNA, 25 bp, Saccharomyces pastorianus
ttcttattccacacgcggtaacata

SEQ ID NO: 194629 - DNA, 25 bp, Saccharomyces pastorianus
tcaccttttaagtcgacattcgtta

SEQ ID NO: 194630 - DNA, 25 bp, Saccharomyces pastorianus
ggaatctcttacttcatcaagccta

SEQ ID NO: 194631 - DNA, 25 bp, Saccharomyces pastorianus
gatttggacgtatctaagcagaatt

SEQ ID NO: 194632 - DNA, 25 bp, Saccharomyces pastorianus
gaaaacggtattgttatcccacacg

SEQ ID NO: 194633 - DNA, 25 bp, Saccharomyces pastorianus
ttgttatcccacacgcccatggaga

SEQ ID NO: 194634 - DNA, 25 bp, Saccharomyces pastorianus
ttgtgcctcctaccatttaaagatg

SEQ ID NO: 194635 - DNA, 25 bp, Saccharomyces pastorianus
acacgcccatggagacgaggtcgtc

SEQ ID NO: 194636 - DNA, 25 bp, Saccharomyces pastorianus
tagcaacatgttatactcctgtggt

SEQ ID NO: 194637 - DNA, 25 bp, Saccharomyces pastorianus
gactcattgcaaccggtaaaaccca

SEQ ID NO: 194638 - DNA, 25 bp, Saccharomyces pastorianus
gacgaggtcgtcagagatattttta

SEQ ID NO: 194639 - DNA, 25 bp, Saccharomyces pastorianus
gatatttaccctggactcattgcaa

SEQ ID NO: 194640 - DNA, 25 bp, Saccharomyces pastorianus
tttataccagcacaacatagcaaca

SEQ ID NO: 194641 - DNA, 25 bp, Saccharomyces pastorianus
gagatatttttataccagcacaaca

SEQ ID NO: 194642 - DNA, 25 bp, Saccharomyces pastorianus
ttgtggagagttgtgcctcctacca

SEQ ID NO: 194643 - DNA, 25 bp, Saccharomyces pastorianus
aaccaaccatattacaagtcacaaa

SEQ ID NO: 194644 - DNA, 25 bp, Saccharomyces pastorianus
gtaaccaaccatattacaagtcaca

SEQ ID NO: 194645 - DNA, 25 bp, Saccharomyces pastorianus
tggtaaccaaccatattacaagtca

SEQ ID NO: 194646 - DNA, 25 bp, Saccharomyces pastorianus
atggtaaccaaccatattacaagtc

SEQ ID NO: 194647 - DNA, 25 bp, Saccharomyces pastorianus
tatggtaaccaaccatattacaagt

SEQ ID NO: 194648 - DNA, 25 bp, Saccharomyces pastorianus
accaaccatattacaagtcacaaat

SEQ ID NO: 194649 - DNA, 25 bp, Saccharomyces pastorianus
ggtaaccaaccatattacaagtcac

SEQ ID NO: 194650 - DNA, 25 bp, Saccharomyces pastorianus
taaccaaccatattacaagtcacaa

SEQ ID NO: 194651 - DNA, 25 bp, Saccharomyces pastorianus
ggctgtggcaggtgcaaccaatgtt

SEQ ID NO: 194652 - DNA, 25 bp, Saccharomyces pastorianus
actgctagtaagttaatcacttctg

SEQ ID NO: 194653 - DNA, 25 bp, Saccharomyces pastorianus
catccactcgaaggcccaagataaa

SEQ ID NO: 194654 - DNA, 25 bp, Saccharomyces pastorianus
gaagtggccgcatccacaatacaat

SEQ ID NO: 194655 - DNA, 25 bp, Saccharomyces pastorianus
caatgttttaatcactactgctagt

SEQ ID NO: 194656 - DNA, 25 bp, Saccharomyces pastorianus
cactgttccaaagatgttaccgatg

SEQ ID NO: 194657 - DNA, 25 bp, Saccharomyces pastorianus
gtaaccacgtcatgggtatgattga

SEQ ID NO: 194658 - DNA, 25 bp, Saccharomyces pastorianus
tgaaaacacatcacctgaacaattt

SEQ ID NO: 194659 - DNA, 25 bp, Saccharomyces pastorianus
gcagaagtttgggtaaccacgtcat

SEQ ID NO: 194660 - DNA, 25 bp, Saccharomyces pastorianus
gatgttaccgatgcatgcagaagtt

SEQ ID NO: 194661 - DNA, 25 bp, Saccharomyces pastorianus
gtgaaaacttccatccactcgaagg

SEQ ID NO: 194662 - DNA, 25 bp, Saccharomyces pastorianus
atcaccgaagtattgccaagagcag

SEQ ID NO: 194663 - DNA, 25 bp, Saccharomyces pastorianus
aagagcagtgggttcgctaacattc

SEQ ID NO: 194664 - DNA, 25 bp, Saccharomyces pastorianus
aatcaccgaagtattgccaagagca

SEQ ID NO: 194665 - DNA, 25 bp, Saccharomyces pastorianus
tccaatcaccgaagtattgccaaga

SEQ ID NO: 194666 - DNA, 25 bp, Saccharomyces pastorianus
caccgaagtattgccaagagcagtg

SEQ ID NO: 194667 - DNA, 25 bp, Saccharomyces pastorianus
caagagcagtgggttcgctaacatt

SEQ ID NO: 194668 - DNA, 25 bp, Saccharomyces pastorianus
attgccaagagcagtgggttcgcta

SEQ ID NO: 194669 - DNA, 25 bp, Saccharomyces pastorianus
gtattgccaagagcagtgggttcgc

SEQ ID NO: 194670 - DNA, 25 bp, Saccharomyces pastorianus
tgccaagagcagtgggttcgctaac

SEQ ID NO: 194671 - DNA, 25 bp, Saccharomyces pastorianus
aagtattgccaagagcagtgggttc

SEQ ID NO: 194672 - DNA, 25 bp, Saccharomyces pastorianus
gccaagagcagtgggttcgctaaca

SEQ ID NO: 194673 - DNA, 25 bp, Saccharomyces pastorianus
attctccaatccagctattcaggac

SEQ ID NO: 194674 - DNA, 25 bp, Saccharomyces pastorianus
atgcctaagtatgttttgccatcaa

SEQ ID NO: 194675 - DNA, 25 bp, Saccharomyces pastorianus
gttccgttacctgactggtgtagac

SEQ ID NO: 194676 - DNA, 25 bp, Saccharomyces pastorianus
ggaagttatcccattattgcctaaa

SEQ ID NO: 194677 - DNA, 25 bp, Saccharomyces pastorianus
agtatatccgtgttttgatgcgtga

SEQ ID NO: 194678 - DNA, 25 bp, Saccharomyces pastorianus
atgtgttgctggctggttccgttac

SEQ ID NO: 194679 - DNA, 25 bp, Saccharomyces pastorianus
gaagttgcgtctacttaacggtgga

SEQ ID NO: 194680 - DNA, 25 bp, Saccharomyces pastorianus
aggacactgtcgcacgtatttgttt

SEQ ID NO: 194681 - DNA, 25 bp, Saccharomyces pastorianus
aacggtggacattctgctatgggat

SEQ ID NO: 194682 - DNA, 25 bp, Saccharomyces pastorianus
ggatacttggcaggctacacctata

SEQ ID NO: 194683 - DNA, 25 bp, Saccharomyces pastorianus
aagtgccaggtgttgatttcgaaga

SEQ ID NO: 194684 - DNA, 25 bp, Saccharomyces pastorianus
accccttttgcgcgcctgcgaagtt

SEQ ID NO: 194685 - DNA, 25 bp, Saccharomyces pastorianus
gaaaaccccttttgcgcgcctgcga

SEQ ID NO: 194686 - DNA, 25 bp, Saccharomyces pastorianus
aaaccccttttgcgcgcctgcgaag

SEQ ID NO: 194687 - DNA, 25 bp, Saccharomyces pastorianus
tgaaaaccccttttgcgcgcctgcg

SEQ ID NO: 194688 - DNA, 25 bp, Saccharomyces pastorianus
cttttgcgcgcctgcgaagtttccg

SEQ ID NO: 194689 - DNA, 25 bp, Saccharomyces pastorianus
aaccccttttgcgcgcctgcgaagt

SEQ ID NO: 194690 - DNA, 25 bp, Saccharomyces pastorianus
ccccttttgcgcgcctgcgaagttt

SEQ ID NO: 194691 - DNA, 25 bp, Saccharomyces pastorianus
taggggtgccgaggtgccttgaaaa

SEQ ID NO: 194692 - DNA, 25 bp, Saccharomyces pastorianus
tgccaattataggggtgccgaggtg

SEQ ID NO: 194693 - DNA, 25 bp, Saccharomyces pastorianus
ttgaaaaccccttttgcgcgcctgc

SEQ ID NO: 194694 - DNA, 25 bp, Saccharomyces pastorianus
atgccaattataggggtgccgaggt

SEQ ID NO: 194695 - DNA, 25 bp, Saccharomyces pastorianus
acttatttcaatatacccacaaaat

SEQ ID NO: 194696 - DNA, 25 bp, Saccharomyces pastorianus
ttatttcaatatacccacaaaatca

SEQ ID NO: 194697 - DNA, 25 bp, Saccharomyces pastorianus
aatatacccacaaaatcaccaccaa

SEQ ID NO: 194698 - DNA, 25 bp, Saccharomyces pastorianus
tcaatatacccacaaaatcaccacc

SEQ ID NO: 194699 - DNA, 25 bp, Saccharomyces pastorianus
tatttcaatatacccacaaaatcac

SEQ ID NO: 194700 - DNA, 25 bp, Saccharomyces pastorianus
cacttatttcaatatacccacaaaa

SEQ ID NO: 194701 - DNA, 25 bp, Saccharomyces pastorianus
atatacccacaaaatcaccaccaaa

SEQ ID NO: 194702 - DNA, 25 bp, Saccharomyces pastorianus
tttcaatatacccacaaaatcacca

SEQ ID NO: 194703 - DNA, 25 bp, Saccharomyces pastorianus
atacccacaaaatcaccaccaaaat

SEQ ID NO: 194704 - DNA, 25 bp, Saccharomyces pastorianus
cttatttcaatatacccacaaaatc

SEQ ID NO: 194705 - DNA, 25 bp, Saccharomyces pastorianus
ttcaatatacccacaaaatcaccac

SEQ ID NO: 194706 - DNA, 25 bp, Saccharomyces pastorianus
ggtccttcctgaggaaagcggctac

SEQ ID NO: 194707 - DNA, 25 bp, Saccharomyces pastorianus
ccttcctgaggaaagcggctacaac

SEQ ID NO: 194708 - DNA, 25 bp, Saccharomyces pastorianus
cttcctgaggaaagcggctacaaca

SEQ ID NO: 194709 - DNA, 25 bp, Saccharomyces pastorianus
atacatggggtccttcctgaggaaa

SEQ ID NO: 194710 - DNA, 25 bp, Saccharomyces pastorianus
gtccttcctgaggaaagcggctaca

SEQ ID NO: 194711 - DNA, 25 bp, Saccharomyces pastorianus
gggtccttcctgaggaaagcggcta

SEQ ID NO: 194712 - DNA, 25 bp, Saccharomyces pastorianus
ctgaggaaagcggctacaacaaatt

SEQ ID NO: 194713 - DNA, 25 bp, Saccharomyces pastorianus
ttcctgaggaaagcggctacaacaa

SEQ ID NO: 194714 - DNA, 25 bp, Saccharomyces pastorianus
tccttcctgaggaaagcggctacaa

SEQ ID NO: 194715 - DNA, 25 bp, Saccharomyces pastorianus
aatacatggggtccttcctgaggaa

SEQ ID NO: 194716 - DNA, 25 bp, Saccharomyces pastorianus
cctgaggaaagcggctacaacaaat

SEQ ID NO: 194717 - DNA, 25 bp, Saccharomyces pastorianus
tacacctttggtttcatggcgaaat

SEQ ID NO: 194718 - DNA, 25 bp, Saccharomyces pastorianus
gaaatcgacctcttcagacgtgaaa

SEQ ID NO: 194719 - DNA, 25 bp, Saccharomyces pastorianus
aatacggagtaccattgcttgataa

SEQ ID NO: 194720 - DNA, 25 bp, Saccharomyces pastorianus
tagagatattatccggtcatgacat

SEQ ID NO: 194721 - DNA, 25 bp, Saccharomyces pastorianus
gggactcacatgcattacacctttg

SEQ ID NO: 194722 - DNA, 25 bp, Saccharomyces pastorianus
acgcatcggccaataagtatacggg

SEQ ID NO: 194723 - DNA, 25 bp, Saccharomyces pastorianus
cgacgatttactgaaccgcattggt

SEQ ID NO: 194724 - DNA, 25 bp, Saccharomyces pastorianus
ttaccattgtttccatcatccaaga

SEQ ID NO: 194725 - DNA, 25 bp, Saccharomyces pastorianus
agggatagttcgcacacttggtata

SEQ ID NO: 194726 - DNA, 25 bp, Saccharomyces pastorianus
agatggcaattcacccacgttaaat

SEQ ID NO: 194727 - DNA, 25 bp, Saccharomyces pastorianus
ggaaacagccgatttatttgagatt

SEQ ID NO: 194728 - DNA, 25 bp, Saccharomyces pastorianus
tgatttctggtacggctttttacca

SEQ ID NO: 194729 - DNA, 25 bp, Saccharomyces pastorianus
gcggcatctataatttacgttacca

SEQ ID NO: 194730 - DNA, 25 bp, Saccharomyces pastorianus
accaggttccctgaatcattgttca

SEQ ID NO: 194731 - DNA, 25 bp, Saccharomyces pastorianus
gagtaccttttccatctcttgattt

SEQ ID NO: 194732 - DNA, 25 bp, Saccharomyces pastorianus
accattttttcattttgattcaatc

SEQ ID NO: 194733 - DNA, 25 bp, Saccharomyces pastorianus
gaaggttggaatcattccgagtacc

SEQ ID NO: 194734 - DNA, 25 bp, Saccharomyces pastorianus
catctcttgatttctggtacggctt

SEQ ID NO: 194735 - DNA, 25 bp, Saccharomyces pastorianus
ggtagcggcatctataatttacgtt

SEQ ID NO: 194736 - DNA, 25 bp, Saccharomyces pastorianus
ttacgttaccaggttccctgaatca

SEQ ID NO: 194737 - DNA, 25 bp, Saccharomyces pastorianus
gaatcattccgagtaccttttccat

SEQ ID NO: 194738 - DNA, 25 bp, Saccharomyces pastorianus
ggttccctgaatcattgttcagacg

SEQ ID NO: 194739 - DNA, 25 bp, Saccharomyces pastorianus
aaataatctaagttacctgatacaa

SEQ ID NO: 194740 - DNA, 25 bp, Saccharomyces pastorianus
atctaagttacctgatacaagaact

SEQ ID NO: 194741 - DNA, 25 bp, Saccharomyces pastorianus
ttattaaataatctaagttacctga

SEQ ID NO: 194742 - DNA, 25 bp, Saccharomyces pastorianus
taatctaagttacctgatacaagaa

SEQ ID NO: 194743 - DNA, 25 bp, Saccharomyces pastorianus
ataatctaagttacctgatacaaga

SEQ ID NO: 194744 - DNA, 25 bp, Saccharomyces pastorianus
tattaaataatctaagttacctgat

SEQ ID NO: 194745 - DNA, 25 bp, Saccharomyces pastorianus
aataatctaagttacctgatacaag

SEQ ID NO: 194746 - DNA, 25 bp, Saccharomyces pastorianus
ttaaataatctaagttacctgatac

SEQ ID NO: 194747 - DNA, 25 bp, Saccharomyces pastorianus
attaaataatctaagttacctgata

SEQ ID NO: 194748 - DNA, 25 bp, Saccharomyces pastorianus
taaataatctaagttacctgataca

SEQ ID NO: 194749 - DNA, 25 bp, Saccharomyces pastorianus
aatctaagttacctgatacaagaac

SEQ ID NO: 194750 - DNA, 25 bp, Saccharomyces pastorianus
tggagttctttttggtttggcactt

SEQ ID NO: 194751 - DNA, 25 bp, Saccharomyces pastorianus
atttatgcgaaaagcgatgccccac

SEQ ID NO: 194752 - DNA, 25 bp, Saccharomyces pastorianus
ttcttgcagttcttcgcttttggaa

SEQ ID NO: 194753 - DNA, 25 bp, Saccharomyces pastorianus
atgttcgtgcaagcaggtctcatca

SEQ ID NO: 194754 - DNA, 25 bp, Saccharomyces pastorianus
gaacgttttggccacatacctgact

SEQ ID NO: 194755 - DNA, 25 bp, Saccharomyces pastorianus
ggtctcatcatatcctcaaacattt

SEQ ID NO: 194756 - DNA, 25 bp, Saccharomyces pastorianus
gtatccttgtgttctagaaactccc

SEQ ID NO: 194757 - DNA, 25 bp, Saccharomyces pastorianus
aacctgctagctattcctaactttg

SEQ ID NO: 194758 - DNA, 25 bp, Saccharomyces pastorianus
gatgccccactctatcgtaagggaa

SEQ ID NO: 194759 - DNA, 25 bp, Saccharomyces pastorianus
ttacaaccgttgtacactgttcctc

SEQ ID NO: 194760 - DNA, 25 bp, Saccharomyces pastorianus
aactttgttcttcatattctcctgc

SEQ ID NO: 194761 - DNA, 25 bp, Saccharomyces pastorianus
gtgcatacttcttgatggtaccctc

SEQ ID NO: 194762 - DNA, 25 bp, Saccharomyces pastorianus
gatttggttctctggatgtcgtact

SEQ ID NO: 194763 - DNA, 25 bp, Saccharomyces pastorianus
tctgggtgacactatctctaacaca

SEQ ID NO: 194764 - DNA, 25 bp, Saccharomyces pastorianus
gtagagcacttatgggcctatttga

SEQ ID NO: 194765 - DNA, 25 bp, Saccharomyces pastorianus
ctttagtcatcggtatcagtgcata

SEQ ID NO: 194766 - DNA, 25 bp, Saccharomyces pastorianus
tccctagtggctacgttgcaatgca

SEQ ID NO: 194767 - DNA, 25 bp, Saccharomyces pastorianus
tgatggtaccctccgtagttcaaac

SEQ ID NO: 194768 - DNA, 25 bp, Saccharomyces pastorianus
atgtcgtacttctacagctcttcag

SEQ ID NO: 194769 - DNA, 25 bp, Saccharomyces pastorianus
tcatcacttcaattgtggccttcgg

SEQ ID NO: 194770 - DNA, 25 bp, Saccharomyces pastorianus
taagactgtcgttcttctgggtgac

SEQ ID NO: 194771 - DNA, 25 bp, Saccharomyces pastorianus
atgatagcgtggtccctagtggcta

SEQ ID NO: 194772 - DNA, 25 bp, Saccharomyces pastorianus
acatcattccatacattattgcata

SEQ ID NO: 194773 - DNA, 25 bp, Saccharomyces pastorianus
tacattgctatcacatcattccata

SEQ ID NO: 194774 - DNA, 25 bp, Saccharomyces pastorianus
tatcgcggtcttacttacgttacca

SEQ ID NO: 194775 - DNA, 25 bp, Saccharomyces pastorianus
aagccgactacattggcaattataa

SEQ ID NO: 194776 - DNA, 25 bp, Saccharomyces pastorianus
aaattcctttaagccgactacattg

SEQ ID NO: 194777 - DNA, 25 bp, Saccharomyces pastorianus
attgcataaattcctttaagccgac

SEQ ID NO: 194778 - DNA, 25 bp, Saccharomyces pastorianus
tgtttgctaagctttatcgcggtct

SEQ ID NO: 194779 - DNA, 25 bp, Saccharomyces pastorianus
agctttatcgcggtcttacttacgt

SEQ ID NO: 194780 - DNA, 25 bp, Saccharomyces pastorianus
tctacacccctgttgccgttgtaat

SEQ ID NO: 194781 - DNA, 25 bp, Saccharomyces pastorianus
acattggcaattataattcttctac

SEQ ID NO: 194782 - DNA, 25 bp, Saccharomyces pastorianus
aattctatctacattgctatcacat

SEQ ID NO: 194783 - DNA, 25 bp, Saccharomyces pastorianus
atcactctcgaaaactgtgccctga

SEQ ID NO: 194784 - DNA, 25 bp, Saccharomyces pastorianus
aacgcttaccttgtaggcgccatgg

SEQ ID NO: 194785 - DNA, 25 bp, Saccharomyces pastorianus
gacccaaataaccatcaagctcgtg

SEQ ID NO: 194786 - DNA, 25 bp, Saccharomyces pastorianus
atgctgtattggcacgggcttataa

SEQ ID NO: 194787 - DNA, 25 bp, Saccharomyces pastorianus
atgttttttgactttcttgctgtga

SEQ ID NO: 194788 - DNA, 25 bp, Saccharomyces pastorianus
tgagctctgtgctgacgcattggaa

SEQ ID NO: 194789 - DNA, 25 bp, Saccharomyces pastorianus
aagttgtttgacgacttcgaccagt

SEQ ID NO: 194790 - DNA, 25 bp, Saccharomyces pastorianus
atgaacggttcgtgatcactctcga

SEQ ID NO: 194791 - DNA, 25 bp, Saccharomyces pastorianus
gtttcgttgggttgcaagcgttgtt

SEQ ID NO: 194792 - DNA, 25 bp, Saccharomyces pastorianus
atggagttgcgccaaggtgtaccaa

SEQ ID NO: 194793 - DNA, 25 bp, Saccharomyces pastorianus
gacctacattcagggctggcagaca

SEQ ID NO: 194794 - DNA, 25 bp, Saccharomyces pastorianus
ttaaggctctcagtatcgatctaac

SEQ ID NO: 194795 - DNA, 25 bp, Saccharomyces pastorianus
attaaggctctcagtatcgatctaa

SEQ ID NO: 194796 - DNA, 25 bp, Saccharomyces pastorianus
cattaaggctctcagtatcgatcta

SEQ ID NO: 194797 - DNA, 25 bp, Saccharomyces pastorianus
aaggctctcagtatcgatctaacgc

SEQ ID NO: 194798 - DNA, 25 bp, Saccharomyces pastorianus
gaacattaaggctctcagtatcgat

SEQ ID NO: 194799 - DNA, 25 bp, Saccharomyces pastorianus
aggaggaaaaattgaggatctcaaa

SEQ ID NO: 194800 - DNA, 25 bp, Saccharomyces pastorianus
taaggctctcagtatcgatctaacg

SEQ ID NO: 194801 - DNA, 25 bp, Saccharomyces pastorianus
aacattaaggctctcagtatcgatc

SEQ ID NO: 194802 - DNA, 25 bp, Saccharomyces pastorianus
aggctctcagtatcgatctaacgcc

SEQ ID NO: 194803 - DNA, 25 bp, Saccharomyces pastorianus
gatctcaaagagaacattaaggctc

SEQ ID NO: 194804 - DNA, 25 bp, Saccharomyces pastorianus
acattaaggctctcagtatcgatct

SEQ ID NO: 194805 - DNA, 25 bp, Saccharomyces pastorianus
aggcatattaacgtagcccgcacgc

SEQ ID NO: 194806 - DNA, 25 bp, Saccharomyces pastorianus
gaaaatcccggcgatattacagata

SEQ ID NO: 194807 - DNA, 25 bp, Saccharomyces pastorianus
gcacgccctggttaagacttgatat

SEQ ID NO: 194808 - DNA, 25 bp, Saccharomyces pastorianus
gaatattactgcatagtggcccaat

SEQ ID NO: 194809 - DNA, 25 bp, Saccharomyces pastorianus
gctttcatccctttgacgaaggtga

SEQ ID NO: 194810 - DNA, 25 bp, Saccharomyces pastorianus
agtacatccgcgcatattcttccta

SEQ ID NO: 194811 - DNA, 25 bp, Saccharomyces pastorianus
gcatattcttcctagcggaaggcat

SEQ ID NO: 194812 - DNA, 25 bp, Saccharomyces pastorianus
tatttagagatgctttcatcccttt

SEQ ID NO: 194813 - DNA, 25 bp, Saccharomyces pastorianus
tgttctgtatagtacatccgcgcat

SEQ ID NO: 194814 - DNA, 25 bp, Saccharomyces pastorianus
tacagataaacattacacccgcatg

SEQ ID NO: 194815 - DNA, 25 bp, Saccharomyces pastorianus
tagtggcccaattgcaggatttagc

SEQ ID NO: 194816 - DNA, 25 bp, Saccharomyces pastorianus
ataaattccatgattatctacattt

SEQ ID NO: 194817 - DNA, 25 bp, Saccharomyces pastorianus
cataaattccatgattatctacatt

SEQ ID NO: 194818 - DNA, 25 bp, Saccharomyces pastorianus
attccatgattatctacattttaat

SEQ ID NO: 194819 - DNA, 25 bp, Saccharomyces pastorianus
ttccatgattatctacattttaata

SEQ ID NO: 194820 - DNA, 25 bp, Saccharomyces pastorianus
aattccatgattatctacattttaa

SEQ ID NO: 194821 - DNA, 25 bp, Saccharomyces pastorianus
aaattccatgattatctacatttta

SEQ ID NO: 194822 - DNA, 25 bp, Saccharomyces pastorianus
tggcggcccaaaatattgtataact

SEQ ID NO: 194823 - DNA, 25 bp, Saccharomyces pastorianus
cccataaattccatgattatctaca

SEQ ID NO: 194824 - DNA, 25 bp, Saccharomyces pastorianus
catttggcggcccaaaatattgtat

SEQ ID NO: 194825 - DNA, 25 bp, Saccharomyces pastorianus
ccataaattccatgattatctacat

SEQ ID NO: 194826 - DNA, 25 bp, Saccharomyces pastorianus
taaattccatgattatctacatttt

SEQ ID NO: 194827 - DNA, 25 bp, Saccharomyces pastorianus
gcagctccgatagttgacattctca

SEQ ID NO: 194828 - DNA, 25 bp, Saccharomyces pastorianus
tctgtttcctattatatttgcgcac

SEQ ID NO: 194829 - DNA, 25 bp, Saccharomyces pastorianus
ggactctttttccgcggaaagatat

SEQ ID NO: 194830 - DNA, 25 bp, Saccharomyces pastorianus
gttgacattctcattagtaaccgaa

SEQ ID NO: 194831 - DNA, 25 bp, Saccharomyces pastorianus
agttgtggcagctccgatagttgac

SEQ ID NO: 194832 - DNA, 25 bp, Saccharomyces pastorianus
gaaagatatggtctccgtcggtcct

SEQ ID NO: 194833 - DNA, 25 bp, Saccharomyces pastorianus
gtcctctgtttcctattatatttgc

SEQ ID NO: 194834 - DNA, 25 bp, Saccharomyces pastorianus
gtcggtcctctgtttcctattatat

SEQ ID NO: 194835 - DNA, 25 bp, Saccharomyces pastorianus
cattctcattagtaaccgaacttct

SEQ ID NO: 194836 - DNA, 25 bp, Saccharomyces pastorianus
cgttgcctagtagttgtggcagctc

SEQ ID NO: 194837 - DNA, 25 bp, Saccharomyces pastorianus
cctagtagttgtggcagctccgata

SEQ ID NO: 194838 - DNA, 25 bp, Saccharomyces pastorianus
agcggtgtcgtccatgcatatatca

SEQ ID NO: 194839 - DNA, 25 bp, Saccharomyces pastorianus
gatcatgctatacgcagtaaggttc

SEQ ID NO: 194840 - DNA, 25 bp, Saccharomyces pastorianus
tatagatcgacgttgctggtggtaa

SEQ ID NO: 194841 - DNA, 25 bp, Saccharomyces pastorianus
atcggtccaagttctaagcggtgtc

SEQ ID NO: 194842 - DNA, 25 bp, Saccharomyces pastorianus
gggaacgatttactagatcatgcta

SEQ ID NO: 194843 - DNA, 25 bp, Saccharomyces pastorianus
acgcagtaaggttctgatagttaat

SEQ ID NO: 194844 - DNA, 25 bp, Saccharomyces pastorianus
gttactggcgtcaactcttcaaata

SEQ ID NO: 194845 - DNA, 25 bp, Saccharomyces pastorianus
ggtgtcgtccatgcatatatcattt

SEQ ID NO: 194846 - DNA, 25 bp, Saccharomyces pastorianus
gcggtgtcgtccatgcatatatcat

SEQ ID NO: 194847 - DNA, 25 bp, Saccharomyces pastorianus
taagcggtgtcgtccatgcatatat

SEQ ID NO: 194848 - DNA, 25 bp, Saccharomyces pastorianus
gatagttaattacaatcggtccaag

SEQ ID NO: 194849 - DNA, 25 bp, Saccharomyces pastorianus
ttatgtactcgataattctttgacc

SEQ ID NO: 194850 - DNA, 25 bp, Saccharomyces pastorianus
tcaacgtagacgaggccttttatag

SEQ ID NO: 194851 - DNA, 25 bp, Saccharomyces pastorianus
gagattcggagctaacctcatctgc

SEQ ID NO: 194852 - DNA, 25 bp, Saccharomyces pastorianus
gtcagccgttaaccataacggtgaa

SEQ ID NO: 194853 - DNA, 25 bp, Saccharomyces pastorianus
agacgaggccttttatagccttatt

SEQ ID NO: 194854 - DNA, 25 bp, Saccharomyces pastorianus
acgggtcttatgtactcgataattc

SEQ ID NO: 194855 - DNA, 25 bp, Saccharomyces pastorianus
gctccagttcaaagtcagccgttaa

SEQ ID NO: 194856 - DNA, 25 bp, Saccharomyces pastorianus
taacctcatctgcaacagcggatag

SEQ ID NO: 194857 - DNA, 25 bp, Saccharomyces pastorianus
caatagcatgaatcgtcaactggat

SEQ ID NO: 194858 - DNA, 25 bp, Saccharomyces pastorianus
tgcgaaacaagccatcaacgtagac

SEQ ID NO: 194859 - DNA, 25 bp, Saccharomyces pastorianus
gtcgtggtaatcaaaataatgcctt

SEQ ID NO: 194860 - DNA, 25 bp, Saccharomyces pastorianus
aaccaaccatattacaagtcacaaa

SEQ ID NO: 194861 - DNA, 25 bp, Saccharomyces pastorianus
gtaaccaaccatattacaagtcaca

SEQ ID NO: 194862 - DNA, 25 bp, Saccharomyces pastorianus
tggtaaccaaccatattacaagtca

SEQ ID NO: 194863 - DNA, 25 bp, Saccharomyces pastorianus
atggtaaccaaccatattacaagtc

SEQ ID NO: 194864 - DNA, 25 bp, Saccharomyces pastorianus
tatggtaaccaaccatattacaagt

SEQ ID NO: 194865 - DNA, 25 bp, Saccharomyces pastorianus
accaaccatattacaagtcacaaat

SEQ ID NO: 194866 - DNA, 25 bp, Saccharomyces pastorianus
ggtaaccaaccatattacaagtcac

SEQ ID NO: 194867 - DNA, 25 bp, Saccharomyces pastorianus
taaccaaccatattacaagtcacaa

SEQ ID NO: 194868 - DNA, 25 bp, Saccharomyces pastorianus
cgattggtcatattaatcatgacca

SEQ ID NO: 194869 - DNA, 25 bp, Saccharomyces pastorianus
acacgccgattggtcatattaatca

SEQ ID NO: 194870 - DNA, 25 bp, Saccharomyces pastorianus
acgccgattggtcatattaatcatg

SEQ ID NO: 194871 - DNA, 25 bp, Saccharomyces pastorianus
gattggtcatattaatcatgaccaa

SEQ ID NO: 194872 - DNA, 25 bp, Saccharomyces pastorianus
gtcatattaatcatgaccaatataa

SEQ ID NO: 194873 - DNA, 25 bp, Saccharomyces pastorianus
cgccgattggtcatattaatcatga

SEQ ID NO: 194874 - DNA, 25 bp, Saccharomyces pastorianus
gccgattggtcatattaatcatgac

SEQ ID NO: 194875 - DNA, 25 bp, Saccharomyces pastorianus
cacacgccgattggtcatattaatc

SEQ ID NO: 194876 - DNA, 25 bp, Saccharomyces pastorianus
cacgccgattggtcatattaatcat

SEQ ID NO: 194877 - DNA, 25 bp, Saccharomyces pastorianus
ccgattggtcatattaatcatgacc

SEQ ID NO: 194878 - DNA, 25 bp, Saccharomyces pastorianus
tcatattaatcatgaccaatataat

SEQ ID NO: 194879 - DNA, 25 bp, Saccharomyces pastorianus
atattatcgtatcgcctctctttca

SEQ ID NO: 194880 - DNA, 25 bp, Saccharomyces pastorianus
atcatattatcgtatcgcctctctt

SEQ ID NO: 194881 - DNA, 25 bp, Saccharomyces pastorianus
atcgcctctctttcaatgcaaaacg

SEQ ID NO: 194882 - DNA, 25 bp, Saccharomyces pastorianus
ctttgttttgtagtccttgattgcc

SEQ ID NO: 194883 - DNA, 25 bp, Saccharomyces pastorianus
tcctctttgttttgtagtccttgat

SEQ ID NO: 194884 - DNA, 25 bp, Saccharomyces pastorianus
cgcctctctttcaatgcaaaacgga

SEQ ID NO: 194885 - DNA, 25 bp, Saccharomyces pastorianus
gttcctctttgttttgtagtccttg

SEQ ID NO: 194886 - DNA, 25 bp, Saccharomyces pastorianus
tgttttgtagtccttgattgccgcc

SEQ ID NO: 194887 - DNA, 25 bp, Saccharomyces pastorianus
gtatcgcctctctttcaatgcaaaa

SEQ ID NO: 194888 - DNA, 25 bp, Saccharomyces pastorianus
ttatcgtatcgcctctctttcaatg

SEQ ID NO: 194889 - DNA, 25 bp, Saccharomyces pastorianus
ctctctttcaatgcaaaacggaggg

SEQ ID NO: 194890 - DNA, 25 bp, Saccharomyces pastorianus
cataccttttactattaaccctgat

SEQ ID NO: 194891 - DNA, 25 bp, Saccharomyces pastorianus
ggcgaaggcaaatcctgaaaatttt

SEQ ID NO: 194892 - DNA, 25 bp, Saccharomyces pastorianus
ttctgctgtcaattagatttagtac

SEQ ID NO: 194893 - DNA, 25 bp, Saccharomyces pastorianus
tttttcttttcacatacagcgcctt

SEQ ID NO: 194894 - DNA, 25 bp, Saccharomyces pastorianus
ataaaggctttgtattctgctgtca

SEQ ID NO: 194895 - DNA, 25 bp, Saccharomyces pastorianus
atgggtttatacaggccgtcaaaat

SEQ ID NO: 194896 - DNA, 25 bp, Saccharomyces pastorianus
ccccaccagacatatataaaggctt

SEQ ID NO: 194897 - DNA, 25 bp, Saccharomyces pastorianus
ttttcacatacagcgccttaaggcg

SEQ ID NO: 194898 - DNA, 25 bp, Saccharomyces pastorianus
gtatgtaatataccccaaacatttt

SEQ ID NO: 194899 - DNA, 25 bp, Saccharomyces pastorianus
cataccccacataccttttactatt

SEQ ID NO: 194900 - DNA, 25 bp, Saccharomyces pastorianus
gatttagtacatcttttctcttatg

SEQ ID NO: 194901 - DNA, 25 bp, Saccharomyces pastorianus
aaccaaccatattacaagtcacaaa

SEQ ID NO: 194902 - DNA, 25 bp, Saccharomyces pastorianus
gtaaccaaccatattacaagtcaca

SEQ ID NO: 194903 - DNA, 25 bp, Saccharomyces pastorianus
tggtaaccaaccatattacaagtca

SEQ ID NO: 194904 - DNA, 25 bp, Saccharomyces pastorianus
atggtaaccaaccatattacaagtc

SEQ ID NO: 194905 - DNA, 25 bp, Saccharomyces pastorianus
tatggtaaccaaccatattacaagt

SEQ ID NO: 194906 - DNA, 25 bp, Saccharomyces pastorianus
accaaccatattacaagtcacaaat

SEQ ID NO: 194907 - DNA, 25 bp, Saccharomyces pastorianus
ggtaaccaaccatattacaagtcac

SEQ ID NO: 194908 - DNA, 25 bp, Saccharomyces pastorianus
taaccaaccatattacaagtcacaa

SEQ ID NO: 194909 - DNA, 25 bp, Saccharomyces pastorianus
gaaacctggaaagtagagctgttaa

SEQ ID NO: 194910 - DNA, 25 bp, Saccharomyces pastorianus
gtcaacagagccgaagtccttagat

SEQ ID NO: 194911 - DNA, 25 bp, Saccharomyces pastorianus
atttctcgggaaaaaagcagcttcg

SEQ ID NO: 194912 - DNA, 25 bp, Saccharomyces pastorianus
gtatatgcatcaaatggtactggga

SEQ ID NO: 194913 - DNA, 25 bp, Saccharomyces pastorianus
cgatgcagaaaactgtgagtcttta

SEQ ID NO: 194914 - DNA, 25 bp, Saccharomyces pastorianus
gcgtgtatttgtcggaagattgcta

SEQ ID NO: 194915 - DNA, 25 bp, Saccharomyces pastorianus
gtactgggaatagagtcgatgcgtt

SEQ ID NO: 194916 - DNA, 25 bp, Saccharomyces pastorianus
tttcgctcataattgtttgtgcttc

SEQ ID NO: 194917 - DNA, 25 bp, Saccharomyces pastorianus
gtcgatgcgttgttcagtagtgtaa

SEQ ID NO: 194918 - DNA, 25 bp, Saccharomyces pastorianus
gtgagtctttagcacaagtcaacag

SEQ ID NO: 194919 - DNA, 25 bp, Saccharomyces pastorianus
gccgaagtccttagatattctttag

SEQ ID NO: 194920 - DNA, 25 bp, Saccharomyces pastorianus
aagcgcttatctttaaggaccaaca

SEQ ID NO: 194921 - DNA, 25 bp, Saccharomyces pastorianus
gcttatctttaaggaccaacatatt

SEQ ID NO: 194922 - DNA, 25 bp, Saccharomyces pastorianus
aagacaacaggcaaaataatttcgt

SEQ ID NO: 194923 - DNA, 25 bp, Saccharomyces pastorianus
ggaccaacatattagatgaattctt

SEQ ID NO: 194924 - DNA, 25 bp, Saccharomyces pastorianus
gtagcattaccatcacaagacaaaa

SEQ ID NO: 194925 - DNA, 25 bp, Saccharomyces pastorianus
gcaaaagcgcttatctttaaggacc

SEQ ID NO: 194926 - DNA, 25 bp, Saccharomyces pastorianus
agatgaattcttaagggttgccaaa

SEQ ID NO: 194927 - DNA, 25 bp, Saccharomyces pastorianus
ttcttaagggttgccaaaacgcaag

SEQ ID NO: 194928 - DNA, 25 bp, Saccharomyces pastorianus
tcagaattttacaagcaaaagcgct

SEQ ID NO: 194929 - DNA, 25 bp, Saccharomyces pastorianus
atgttcaatgtagcattaccatcac

SEQ ID NO: 194930 - DNA, 25 bp, Saccharomyces pastorianus
gggttgccaaaacgcaagacaacag

SEQ ID NO: 194931 - DNA, 25 bp, Saccharomyces pastorianus
tgacaaacggttcaggttcatcaac

SEQ ID NO: 194932 - DNA, 25 bp, Saccharomyces pastorianus
tacagttatgactgccgtctcggca

SEQ ID NO: 194933 - DNA, 25 bp, Saccharomyces pastorianus
tcctgctgcattccaaggagcaagt

SEQ ID NO: 194934 - DNA, 25 bp, Saccharomyces pastorianus
ctaaggtcgttaccgacaccgctga

SEQ ID NO: 194935 - DNA, 25 bp, Saccharomyces pastorianus
actcaagccgtcgaatcatctacat

SEQ ID NO: 194936 - DNA, 25 bp, Saccharomyces pastorianus
gaaggaccagataccacctctgaaa

SEQ ID NO: 194937 - DNA, 25 bp, Saccharomyces pastorianus
aaggttgtcaccgaaggaccagata

SEQ ID NO: 194938 - DNA, 25 bp, Saccharomyces pastorianus
gaccactaagactattactgctact

SEQ ID NO: 194939 - DNA, 25 bp, Saccharomyces pastorianus
ttcatcaaccaacctttacaccaag

SEQ ID NO: 194940 - DNA, 25 bp, Saccharomyces pastorianus
ctattttcggagctactacagttat

SEQ ID NO: 194941 - DNA, 25 bp, Saccharomyces pastorianus
cggcagcagctgtgtcgagtgtaat

SEQ ID NO: 194942 - DNA, 25 bp, Saccharomyces pastorianus
aattatctagttacaccggtgctgc

SEQ ID NO: 194943 - DNA, 25 bp, Saccharomyces pastorianus
aggttctggttctagtatcactacc

SEQ ID NO: 194944 - DNA, 25 bp, Saccharomyces pastorianus
acacctggtctccaagtagtacttc

SEQ ID NO: 194945 - DNA, 25 bp, Saccharomyces pastorianus
atgaaattctcttccgctttggttc

SEQ ID NO: 194946 - DNA, 25 bp, Saccharomyces pastorianus
tgaaggcagcagcaacacctggtct

SEQ ID NO: 194947 - DNA, 25 bp, Saccharomyces pastorianus
aagtagtacttctaccagctcagaa

SEQ ID NO: 194948 - DNA, 25 bp, Saccharomyces pastorianus
acatcctctagcaccgctgaattat

SEQ ID NO: 194949 - DNA, 25 bp, Saccharomyces pastorianus
actgctgaaacttcttcctctgcta

SEQ ID NO: 194950 - DNA, 25 bp, Saccharomyces pastorianus
ggtcacgtctacactaagactgtca

SEQ ID NO: 194951 - DNA, 25 bp, Saccharomyces pastorianus
ttgctgagagtatcaccaccaccat

SEQ ID NO: 194952 - DNA, 25 bp, Saccharomyces pastorianus
ggtgaagactcttacgccagcagca

SEQ ID NO: 194953 - DNA, 25 bp, Saccharomyces pastorianus
cctggacctctgtcgatggcaataa

SEQ ID NO: 194954 - DNA, 25 bp, Saccharomyces pastorianus
gaaagcctcctgtttattgccggag

SEQ ID NO: 194955 - DNA, 25 bp, Saccharomyces pastorianus
atttgttcgaaagcctcctgtttat

SEQ ID NO: 194956 - DNA, 25 bp, Saccharomyces pastorianus
aggcaggtcgccaggtcaaaagcaa

SEQ ID NO: 194957 - DNA, 25 bp, Saccharomyces pastorianus
cacttgttgcgggtcagagggcttt

SEQ ID NO: 194958 - DNA, 25 bp, Saccharomyces pastorianus
atggacaaagcacgcgaacacattt

SEQ ID NO: 194959 - DNA, 25 bp, Saccharomyces pastorianus
aatctttgttggtcacttgttgcgg

SEQ ID NO: 194960 - DNA, 25 bp, Saccharomyces pastorianus
gcgagtactagcagaaggaccttat

SEQ ID NO: 194961 - DNA, 25 bp, Saccharomyces pastorianus
ggcagactgctgacgacatcgaaat

SEQ ID NO: 194962 - DNA, 25 bp, Saccharomyces pastorianus
ggtcaaaagcaacgattctcatcaa

SEQ ID NO: 194963 - DNA, 25 bp, Saccharomyces pastorianus
gtgtacgtaaccttgatctcttaga

SEQ ID NO: 194964 - DNA, 25 bp, Saccharomyces pastorianus
aagccagactctcttggtatcacga

SEQ ID NO: 194965 - DNA, 25 bp, Saccharomyces pastorianus
atccacgtcaaaatgctccaatctt

SEQ ID NO: 194966 - DNA, 25 bp, Saccharomyces pastorianus
agtaaggctccagatttcgtaattg

SEQ ID NO: 194967 - DNA, 25 bp, Saccharomyces pastorianus
gaactttttccgatatactccctag

SEQ ID NO: 194968 - DNA, 25 bp, Saccharomyces pastorianus
gcctgtcagggagctttaatccatt

SEQ ID NO: 194969 - DNA, 25 bp, Saccharomyces pastorianus
ggacggtatgcgttttcgttggcat

SEQ ID NO: 194970 - DNA, 25 bp, Saccharomyces pastorianus
aaaattactcggagctcgccggatt

SEQ ID NO: 194971 - DNA, 25 bp, Saccharomyces pastorianus
agctcgccggatttctatatctaca

SEQ ID NO: 194972 - DNA, 25 bp, Saccharomyces pastorianus
ttctatccttctaaaacgcagccgg

SEQ ID NO: 194973 - DNA, 25 bp, Saccharomyces pastorianus
gatccgcctttatactctgattgta

SEQ ID NO: 194974 - DNA, 25 bp, Saccharomyces pastorianus
gtatcacgaccgttcctgatttgac

SEQ ID NO: 194975 - DNA, 25 bp, Saccharomyces pastorianus
ggtaatacaggcattcccatagtcg

SEQ ID NO: 194976 - DNA, 25 bp, Saccharomyces pastorianus
atttcttccgaaaataagcgtccag

SEQ ID NO: 194977 - DNA, 25 bp, Saccharomyces pastorianus
gggagaataaccctgtagcatttga

SEQ ID NO: 194978 - DNA, 25 bp, Saccharomyces pastorianus
gggaatgccttatcgattggacact

SEQ ID NO: 194979 - DNA, 25 bp, Saccharomyces pastorianus
gtacaggaattgatgcccaaccata

SEQ ID NO: 194980 - DNA, 25 bp, Saccharomyces pastorianus
atattcgtcaaacaatgggttcccg

SEQ ID NO: 194981 - DNA, 25 bp, Saccharomyces pastorianus
tgtgcaactggccatatacctcaat

SEQ ID NO: 194982 - DNA, 25 bp, Saccharomyces pastorianus
acggtgattcgtcttcaaatgttgg

SEQ ID NO: 194983 - DNA, 25 bp, Saccharomyces pastorianus
attcccatagtcgatgccataatga

SEQ ID NO: 194984 - DNA, 25 bp, Saccharomyces pastorianus
attcgtccacccaaaatttcatcaa

SEQ ID NO: 194985 - DNA, 25 bp, Saccharomyces pastorianus
tgggttcccgaattgatttcttccg

SEQ ID NO: 194986 - DNA, 25 bp, Saccharomyces pastorianus
ttattgtaccgccatccagttgaag

SEQ ID NO: 194987 - DNA, 25 bp, Saccharomyces pastorianus
actctactcagtatggcgttcaagt

SEQ ID NO: 194988 - DNA, 25 bp, Saccharomyces pastorianus
gctggtgccgacgttttaactgaaa

SEQ ID NO: 194989 - DNA, 25 bp, Saccharomyces pastorianus
ttcgctgcgaatgagacattaccag

SEQ ID NO: 194990 - DNA, 25 bp, Saccharomyces pastorianus
accccaactgtgaacattttcgctg

SEQ ID NO: 194991 - DNA, 25 bp, Saccharomyces pastorianus
atctacgtttgctggtgccgacgtt

SEQ ID NO: 194992 - DNA, 25 bp, Saccharomyces pastorianus
aaccaattgtttaactctactcagt

SEQ ID NO: 194993 - DNA, 25 bp, Saccharomyces pastorianus
aactgtgaacattttcgctgcgaat

SEQ ID NO: 194994 - DNA, 25 bp, Saccharomyces pastorianus
ttgctagcaatgatacgaagaactt

SEQ ID NO: 194995 - DNA, 25 bp, Saccharomyces pastorianus
ataacctacatggacctcactgtgg

SEQ ID NO: 194996 - DNA, 25 bp, Saccharomyces pastorianus
gactaacgtcacttgtaataaccta

SEQ ID NO: 194997 - DNA, 25 bp, Saccharomyces pastorianus
attcggtagcgggaaagactttgct

SEQ ID NO: 194998 - DNA, 25 bp, Saccharomyces pastorianus
gagcctgcaagcaacaacagtgatg

SEQ ID NO: 194999 - DNA, 25 bp, Saccharomyces pastorianus
cggagaaattgttgatgccatttat

SEQ ID NO: 195000 - DNA, 25 bp, Saccharomyces pastorianus
gaatgatttattgatacccgaagtc

SEQ ID NO: 195001 - DNA, 25 bp, Saccharomyces pastorianus
aacagtgatgaattcggtagcggga

SEQ ID NO: 195002 - DNA, 25 bp, Saccharomyces pastorianus
taaggtttgagcctgcaagcaacaa

SEQ ID NO: 195003 - DNA, 25 bp, Saccharomyces pastorianus
gaagtctactcttttatgacagata

SEQ ID NO: 195004 - DNA, 25 bp, Saccharomyces pastorianus
gatacccgaagtctactcttttatg

SEQ ID NO: 195005 - DNA, 25 bp, Saccharomyces pastorianus
gggaaagactttgctgtctaccaat

SEQ ID NO: 195006 - DNA, 25 bp, Saccharomyces pastorianus
aagactttgctgtctaccaatatgt

SEQ ID NO: 195007 - DNA, 25 bp, Saccharomyces pastorianus
cttttgtttaaggtttgagcctgca

SEQ ID NO: 195008 - DNA, 25 bp, Saccharomyces pastorianus
aggtgcagtggttcaagaggctata

SEQ ID NO: 195009 - DNA, 25 bp, Saccharomyces pastorianus
gtatttttagcacctcgaatgccct

SEQ ID NO: 195010 - DNA, 25 bp, Saccharomyces pastorianus
acgagtcgacgataactattccgta

SEQ ID NO: 195011 - DNA, 25 bp, Saccharomyces pastorianus
gataactattccgtaatggcctttt

SEQ ID NO: 195012 - DNA, 25 bp, Saccharomyces pastorianus
acctcgaatgcccttttagatgcat

SEQ ID NO: 195013 - DNA, 25 bp, Saccharomyces pastorianus
gtccaattctgggagcaaccggcag

SEQ ID NO: 195014 - DNA, 25 bp, Saccharomyces pastorianus
gagtttattggtttacgagtcgacg

SEQ ID NO: 195015 - DNA, 25 bp, Saccharomyces pastorianus
gatgcattagttatggtccaattct

SEQ ID NO: 195016 - DNA, 25 bp, Saccharomyces pastorianus
cgtaatggccttttttggaggtgca

SEQ ID NO: 195017 - DNA, 25 bp, Saccharomyces pastorianus
ggctataaagcttatcacacaccat

SEQ ID NO: 195018 - DNA, 25 bp, Saccharomyces pastorianus
cacacaccattacgttcctattgat

SEQ ID NO: 195019 - DNA, 25 bp, Saccharomyces pastorianus
ttctttttgactttgttttgcggag

SEQ ID NO: 195020 - DNA, 25 bp, Saccharomyces pastorianus
gagtgtattgaccttttctatctat

SEQ ID NO: 195021 - DNA, 25 bp, Saccharomyces pastorianus
gttgaggcaaaagtttggctcgcca

SEQ ID NO: 195022 - DNA, 25 bp, Saccharomyces pastorianus
tcttctttccaattacctccgggag

SEQ ID NO: 195023 - DNA, 25 bp, Saccharomyces pastorianus
aaaatgccggtcctgtcaaagttga

SEQ ID NO: 195024 - DNA, 25 bp, Saccharomyces pastorianus
gttaagtgtaaccacattgctgagt

SEQ ID NO: 195025 - DNA, 25 bp, Saccharomyces pastorianus
agctgatctgttggcctatgtatat

SEQ ID NO: 195026 - DNA, 25 bp, Saccharomyces pastorianus
tttggatgcacctgtgggacctatt

SEQ ID NO: 195027 - DNA, 25 bp, Saccharomyces pastorianus
gccgaatttccacaactagctgatc

SEQ ID NO: 195028 - DNA, 25 bp, Saccharomyces pastorianus
ggaaatgatccatactccgacgata

SEQ ID NO: 195029 - DNA, 25 bp, Saccharomyces pastorianus
gacgatacagacagtgcctcttctt

SEQ ID NO: 195030 - DNA, 25 bp, Saccharomyces pastorianus
atttgactttggcatcgcaacctgc

SEQ ID NO: 195031 - DNA, 25 bp, Saccharomyces pastorianus
agtagtgataaaatattcggctggg

SEQ ID NO: 195032 - DNA, 25 bp, Saccharomyces pastorianus
actatcgcggatatttgactttggc

SEQ ID NO: 195033 - DNA, 25 bp, Saccharomyces pastorianus
gaaacaactttgaaacccaagctag

SEQ ID NO: 195034 - DNA, 25 bp, Saccharomyces pastorianus
gcaacctgccacaaatgctacattg

SEQ ID NO: 195035 - DNA, 25 bp, Saccharomyces pastorianus
cccgcgaaagggaggttgtatcaga

SEQ ID NO: 195036 - DNA, 25 bp, Saccharomyces pastorianus
aatgtttattcatagacagcaatgg

SEQ ID NO: 195037 - DNA, 25 bp, Saccharomyces pastorianus
ggaggttgtatcagaaggcattcgt

SEQ ID NO: 195038 - DNA, 25 bp, Saccharomyces pastorianus
ctgccacaaatgctacattgagtag

SEQ ID NO: 195039 - DNA, 25 bp, Saccharomyces pastorianus
tttggcatcgcaacctgccacaaat

SEQ ID NO: 195040 - DNA, 25 bp, Saccharomyces pastorianus
aggcattcgtagaaatgtttattca

SEQ ID NO: 195041 - DNA, 25 bp, Saccharomyces pastorianus
gttcctgcagatttcactaactgaa

SEQ ID NO: 195042 - DNA, 25 bp, Saccharomyces pastorianus
tatattatgtccacgtctcaagcct

SEQ ID NO: 195043 - DNA, 25 bp, Saccharomyces pastorianus
ttggtccattggtattttttgtgta

SEQ ID NO: 195044 - DNA, 25 bp, Saccharomyces pastorianus
tagccggtgccgttttcgccgttga

SEQ ID NO: 195045 - DNA, 25 bp, Saccharomyces pastorianus
gttaatttttgtcactagagctgct

SEQ ID NO: 195046 - DNA, 25 bp, Saccharomyces pastorianus
tcgccgttgatattattgctaccat

SEQ ID NO: 195047 - DNA, 25 bp, Saccharomyces pastorianus
ttccattccatcgtggcagttagcc

SEQ ID NO: 195048 - DNA, 25 bp, Saccharomyces pastorianus
agtcgttcgtgtctggatttggtcc

SEQ ID NO: 195049 - DNA, 25 bp, Saccharomyces pastorianus
aatggtgtcatgttcctgcagattt

SEQ ID NO: 195050 - DNA, 25 bp, Saccharomyces pastorianus
gatattgtgtcagtcgttcgtgtct

SEQ ID NO: 195051 - DNA, 25 bp, Saccharomyces pastorianus
acgtctcaagcctttgataggttga

SEQ ID NO: 195052 - DNA, 25 bp, Saccharomyces pastorianus
ttgggaatcttacgactatgcaaag

SEQ ID NO: 195053 - DNA, 25 bp, Saccharomyces pastorianus
gggcctgggataagccagtttccgt

SEQ ID NO: 195054 - DNA, 25 bp, Saccharomyces pastorianus
agaattcatcaataacatgtgggcc

SEQ ID NO: 195055 - DNA, 25 bp, Saccharomyces pastorianus
tacgactatgcaaagttggatccaa

SEQ ID NO: 195056 - DNA, 25 bp, Saccharomyces pastorianus
ataagccagtttccgtcaatggcga

SEQ ID NO: 195057 - DNA, 25 bp, Saccharomyces pastorianus
tgaattgactttgactttcatgtcc

SEQ ID NO: 195058 - DNA, 25 bp, Saccharomyces pastorianus
caagattacgttccagctttcgatg

SEQ ID NO: 195059 - DNA, 25 bp, Saccharomyces pastorianus
ttccagctttcgatgtcgcaccaga

SEQ ID NO: 195060 - DNA, 25 bp, Saccharomyces pastorianus
gggccaagattacgttccagctttc

SEQ ID NO: 195061 - DNA, 25 bp, Saccharomyces pastorianus
gtcacctacaagtacaacgatgaat

SEQ ID NO: 195062 - DNA, 25 bp, Saccharomyces pastorianus
ttggatccaactaacgacgacgaca

SEQ ID NO: 195063 - DNA, 25 bp, Saccharomyces pastorianus
cttacaataattaccaccaccgtga

SEQ ID NO: 195064 - DNA, 25 bp, Saccharomyces pastorianus
tagcagcaccagcaacgggcttccg

SEQ ID NO: 195065 - DNA, 25 bp, Saccharomyces pastorianus
atggctattatgcaaagggttaccc

SEQ ID NO: 195066 - DNA, 25 bp, Saccharomyces pastorianus
acagcagtgcttatccatattccag

SEQ ID NO: 195067 - DNA, 25 bp, Saccharomyces pastorianus
catattccagcagccatacttacaa

SEQ ID NO: 195068 - DNA, 25 bp, Saccharomyces pastorianus
caatagatcatatcacagcagtgct

SEQ ID NO: 195069 - DNA, 25 bp, Saccharomyces pastorianus
atgagcgttggcagcaccagcagca

SEQ ID NO: 195070 - DNA, 25 bp, Saccharomyces pastorianus
gggaacagcagcactagcagcacca

SEQ ID NO: 195071 - DNA, 25 bp, Saccharomyces pastorianus
gctctagcagcagcgtcgtcaagaa

SEQ ID NO: 195072 - DNA, 25 bp, Saccharomyces pastorianus
ccaccttcagtatcgtctataacca

SEQ ID NO: 195073 - DNA, 25 bp, Saccharomyces pastorianus
gaagtaacagcgacggctctagcag

SEQ ID NO: 195074 - DNA, 25 bp, Saccharomyces pastorianus
gaacttgcatcgactgaaatatcca

SEQ ID NO: 195075 - DNA, 25 bp, Saccharomyces pastorianus
gataataaaccaattactcgcctgg

SEQ ID NO: 195076 - DNA, 25 bp, Saccharomyces pastorianus
aagtccacagaattccatcgattat

SEQ ID NO: 195077 - DNA, 25 bp, Saccharomyces pastorianus
aaagatgagtcaatgcacaacgcaa

SEQ ID NO: 195078 - DNA, 25 bp, Saccharomyces pastorianus
gatatcaccgatgaatctattacta

SEQ ID NO: 195079 - DNA, 25 bp, Saccharomyces pastorianus
gggacttggattacgtattttctga

SEQ ID NO: 195080 - DNA, 25 bp, Saccharomyces pastorianus
actggactcagtagatgtgtagata

SEQ ID NO: 195081 - DNA, 25 bp, Saccharomyces pastorianus
tactcgcctggaagatttgttcaca

SEQ ID NO: 195082 - DNA, 25 bp, Saccharomyces pastorianus
aaacccgaactaattcaggagcagt

SEQ ID NO: 195083 - DNA, 25 bp, Saccharomyces pastorianus
aaacgcaaaatacccatctcctagt

SEQ ID NO: 195084 - DNA, 25 bp, Saccharomyces pastorianus
aatctccgacagaattcgtagtaaa

SEQ ID NO: 195085 - DNA, 25 bp, Saccharomyces pastorianus
gtaaagctttggacacttcctcttt

SEQ ID NO: 195086 - DNA, 25 bp, Saccharomyces pastorianus
ggaattcccgaagtgttaccaaatg

SEQ ID NO: 195087 - DNA, 25 bp, Saccharomyces pastorianus
gaggccgcatcttgtaatttgctaa

SEQ ID NO: 195088 - DNA, 25 bp, Saccharomyces pastorianus
gtttatgcagaacagacatccgttt

SEQ ID NO: 195089 - DNA, 25 bp, Saccharomyces pastorianus
tccgtttctgaccttgttcaagcaa

SEQ ID NO: 195090 - DNA, 25 bp, Saccharomyces pastorianus
tacaattctagttgaggccgcatct

SEQ ID NO: 195091 - DNA, 25 bp, Saccharomyces pastorianus
cttcctcttttcatgatagcgtgtc

SEQ ID NO: 195092 - DNA, 25 bp, Saccharomyces pastorianus
ttaggctctgttccacatgagaaag

SEQ ID NO: 195093 - DNA, 25 bp, Saccharomyces pastorianus
ttttttcctcttagagtggctatac

SEQ ID NO: 195094 - DNA, 25 bp, Saccharomyces pastorianus
ggtgacatatatttacacgctagtt

SEQ ID NO: 195095 - DNA, 25 bp, Saccharomyces pastorianus
aaacgtgtgcaactcttaggctctg

SEQ ID NO: 195096 - DNA, 25 bp, Saccharomyces pastorianus
ggaagatgggctgggtctaacacaa

SEQ ID NO: 195097 - DNA, 25 bp, Saccharomyces pastorianus
tggcctgtccacgtaatgagagcaa

SEQ ID NO: 195098 - DNA, 25 bp, Saccharomyces pastorianus
gaggtttcatgcagcaatatcgata

SEQ ID NO: 195099 - DNA, 25 bp, Saccharomyces pastorianus
gggaaaagcgttaccagctgcagat

SEQ ID NO: 195100 - DNA, 25 bp, Saccharomyces pastorianus
aaagggcagacaccactgtgacatg

SEQ ID NO: 195101 - DNA, 25 bp, Saccharomyces pastorianus
ccagctgcagatgatgaggtttcat

SEQ ID NO: 195102 - DNA, 25 bp, Saccharomyces pastorianus
gaattcccagaatgacacaagtaat

SEQ ID NO: 195103 - DNA, 25 bp, Saccharomyces pastorianus
ccacccaacaatctacatttgcaaa

SEQ ID NO: 195104 - DNA, 25 bp, Saccharomyces pastorianus
gtaatgaaactgaagaccccaccca

SEQ ID NO: 195105 - DNA, 25 bp, Saccharomyces pastorianus
gtacgactcatgaagtggcctgtcc

SEQ ID NO: 195106 - DNA, 25 bp, Saccharomyces pastorianus
atatgcaaggtctgttgaattccca

SEQ ID NO: 195107 - DNA, 25 bp, Saccharomyces pastorianus
tagtagagtaggatgggtaaccgta

SEQ ID NO: 195108 - DNA, 25 bp, Saccharomyces pastorianus
gttcatagccttaaccaatttattg

SEQ ID NO: 195109 - DNA, 25 bp, Saccharomyces pastorianus
acctctcttgtagaccaattgtcta

SEQ ID NO: 195110 - DNA, 25 bp, Saccharomyces pastorianus
ggcttcgatgatagcattgtcggac

SEQ ID NO: 195111 - DNA, 25 bp, Saccharomyces pastorianus
aatcgtcaatggacaagataccata

SEQ ID NO: 195112 - DNA, 25 bp, Saccharomyces pastorianus
ttgccacacggaataatgttagttc

SEQ ID NO: 195113 - DNA, 25 bp, Saccharomyces pastorianus
acccaagttggcttcgatgatagca

SEQ ID NO: 195114 - DNA, 25 bp, Saccharomyces pastorianus
aatgttagttcatagccttaaccaa

SEQ ID NO: 195115 - DNA, 25 bp, Saccharomyces pastorianus
atacttacccaagttggcttcgatg

SEQ ID NO: 195116 - DNA, 25 bp, Saccharomyces pastorianus
gataccatacttacccaagttggct

SEQ ID NO: 195117 - DNA, 25 bp, Saccharomyces pastorianus
atacattgagattattgccacacgg

SEQ ID NO: 195118 - DNA, 25 bp, Saccharomyces pastorianus
aaataatctaagttacctgatacaa

SEQ ID NO: 195119 - DNA, 25 bp, Saccharomyces pastorianus
atctaagttacctgatacaagaact

SEQ ID NO: 195120 - DNA, 25 bp, Saccharomyces pastorianus
ttattaaataatctaagttacctga

SEQ ID NO: 195121 - DNA, 25 bp, Saccharomyces pastorianus
taatctaagttacctgatacaagaa

SEQ ID NO: 195122 - DNA, 25 bp, Saccharomyces pastorianus
ataatctaagttacctgatacaaga

SEQ ID NO: 195123 - DNA, 25 bp, Saccharomyces pastorianus
tattaaataatctaagttacctgat

SEQ ID NO: 195124 - DNA, 25 bp, Saccharomyces pastorianus
aataatctaagttacctgatacaag

SEQ ID NO: 195125 - DNA, 25 bp, Saccharomyces pastorianus
ttaaataatctaagttacctgatac

SEQ ID NO: 195126 - DNA, 25 bp, Saccharomyces pastorianus
attaaataatctaagttacctgata

SEQ ID NO: 195127 - DNA, 25 bp, Saccharomyces pastorianus
taaataatctaagttacctgataca

SEQ ID NO: 195128 - DNA, 25 bp, Saccharomyces pastorianus
aatctaagttacctgatacaagaac

SEQ ID NO: 195129 - DNA, 25 bp, Saccharomyces pastorianus
ataggaatcctcaaaatggaatcta

SEQ ID NO: 195130 - DNA, 25 bp, Saccharomyces pastorianus
cgaggatataggaatcctcaaaatg

SEQ ID NO: 195131 - DNA, 25 bp, Saccharomyces pastorianus
gaaggctataatattaggtatacag

SEQ ID NO: 195132 - DNA, 25 bp, Saccharomyces pastorianus
aaggctataatattaggtatacaga

SEQ ID NO: 195133 - DNA, 25 bp, Saccharomyces pastorianus
aggctataatattaggtatacagaa

SEQ ID NO: 195134 - DNA, 25 bp, Saccharomyces pastorianus
acatactaatattacgaatattcct

SEQ ID NO: 195135 - DNA, 25 bp, Saccharomyces pastorianus
tataggaatcctcaaaatggaatct

SEQ ID NO: 195136 - DNA, 25 bp, Saccharomyces pastorianus
gaggatataggaatcctcaaaatgg

SEQ ID NO: 195137 - DNA, 25 bp, Saccharomyces pastorianus
ggatataggaatcctcaaaatggaa

SEQ ID NO: 195138 - DNA, 25 bp, Saccharomyces pastorianus
ggctataatattaggtatacagaat

SEQ ID NO: 195139 - DNA, 25 bp, Saccharomyces pastorianus
aggatataggaatcctcaaaatgga

SEQ ID NO: 195140 - DNA, 25 bp, Saccharomyces pastorianus
agcgtcaccaccaagtcaattactg

SEQ ID NO: 195141 - DNA, 25 bp, Saccharomyces pastorianus
gacatctcccggtgcattgaacaat

SEQ ID NO: 195142 - DNA, 25 bp, Saccharomyces pastorianus
aaatagcatgatctctacgccttcc

SEQ ID NO: 195143 - DNA, 25 bp, Saccharomyces pastorianus
aggaatgaccttccagatacctctc

SEQ ID NO: 195144 - DNA, 25 bp, Saccharomyces pastorianus
gttcctcagtcaataaactctccga

SEQ ID NO: 195145 - DNA, 25 bp, Saccharomyces pastorianus
tgatggacccttcaaacctagctga

SEQ ID NO: 195146 - DNA, 25 bp, Saccharomyces pastorianus
tatggcaccaacaaccgtagcgaca

SEQ ID NO: 195147 - DNA, 25 bp, Saccharomyces pastorianus
atcgccatcatccaattacattact

SEQ ID NO: 195148 - DNA, 25 bp, Saccharomyces pastorianus
taaactctcagccatcatcgatagc

SEQ ID NO: 195149 - DNA, 25 bp, Saccharomyces pastorianus
agttctattcattcagttcctcagt

SEQ ID NO: 195150 - DNA, 25 bp, Saccharomyces pastorianus
attactgacagacctttcactcgaa

SEQ ID NO: 195151 - DNA, 25 bp, Saccharomyces pastorianus
gccgctcttcagtttccgaagtaaa

SEQ ID NO: 195152 - DNA, 25 bp, Saccharomyces pastorianus
tcatttttctatcctcaaaggaaaa

SEQ ID NO: 195153 - DNA, 25 bp, Saccharomyces pastorianus
tatcctcaaaggaaaatcttttctg

SEQ ID NO: 195154 - DNA, 25 bp, Saccharomyces pastorianus
aaacaactttatttgcccacacgct

SEQ ID NO: 195155 - DNA, 25 bp, Saccharomyces pastorianus
ttctgcgaaatttctagccgctctt

SEQ ID NO: 195156 - DNA, 25 bp, Saccharomyces pastorianus
gcgaaatttctagccgctcttcagt

SEQ ID NO: 195157 - DNA, 25 bp, Saccharomyces pastorianus
tagccgctcttcagtttccgaagta

SEQ ID NO: 195158 - DNA, 25 bp, Saccharomyces pastorianus
tttatttgcccacacgctgttatag

SEQ ID NO: 195159 - DNA, 25 bp, Saccharomyces pastorianus
ttcagtttccgaagtaaagtcgctg

SEQ ID NO: 195160 - DNA, 25 bp, Saccharomyces pastorianus
atcttttctgcgaaatttctagccg

SEQ ID NO: 195161 - DNA, 25 bp, Saccharomyces pastorianus
tttgcccacacgctgttataggctt

SEQ ID NO: 195162 - DNA, 25 bp, Saccharomyces pastorianus
gatgacacacaactcttgacctact

SEQ ID NO: 195163 - DNA, 25 bp, Saccharomyces pastorianus
gattccattctactggtttttgaaa

SEQ ID NO: 195164 - DNA, 25 bp, Saccharomyces pastorianus
acctactggattgtcttttcatttt

SEQ ID NO: 195165 - DNA, 25 bp, Saccharomyces pastorianus
attctggtccaaggcaattctatat

SEQ ID NO: 195166 - DNA, 25 bp, Saccharomyces pastorianus
acattgccttgcctcaaactggtgg

SEQ ID NO: 195167 - DNA, 25 bp, Saccharomyces pastorianus
ttaatctacattgccttgcctcaaa

SEQ ID NO: 195168 - DNA, 25 bp, Saccharomyces pastorianus
acacaactcttgacctactggattg

SEQ ID NO: 195169 - DNA, 25 bp, Saccharomyces pastorianus
tgaaaaccgttttcttaatctacat

SEQ ID NO: 195170 - DNA, 25 bp, Saccharomyces pastorianus
gtcttttcatttttgagtgtcattg

SEQ ID NO: 195171 - DNA, 25 bp, Saccharomyces pastorianus
ggtggcgctagaatgatctatcaaa

SEQ ID NO: 195172 - DNA, 25 bp, Saccharomyces pastorianus
cttgcctcaaactggtggcgctaga

SEQ ID NO: 195173 - DNA, 25 bp, Saccharomyces pastorianus
ggatcactgtaattcgatagggtac

SEQ ID NO: 195174 - DNA, 25 bp, Saccharomyces pastorianus
ctcgacctatttagaatttccttca

SEQ ID NO: 195175 - DNA, 25 bp, Saccharomyces pastorianus
ttcgaaacactaaacctcgacctat

SEQ ID NO: 195176 - DNA, 25 bp, Saccharomyces pastorianus
atgcttgtataatcaccaattcgaa

SEQ ID NO: 195177 - DNA, 25 bp, Saccharomyces pastorianus
gacagaattccacagacttttacga

SEQ ID NO: 195178 - DNA, 25 bp, Saccharomyces pastorianus
tagtcttacgaaactgttcagtgca

SEQ ID NO: 195179 - DNA, 25 bp, Saccharomyces pastorianus
gggaactttcattcatatacctgaa

SEQ ID NO: 195180 - DNA, 25 bp, Saccharomyces pastorianus
aaatgtctgctttatgggaactttc

SEQ ID NO: 195181 - DNA, 25 bp, Saccharomyces pastorianus
gaatttccttcaagatttactaaca

SEQ ID NO: 195182 - DNA, 25 bp, Saccharomyces pastorianus
acatgaagttgaacaccatatctca

SEQ ID NO: 195183 - DNA, 25 bp, Saccharomyces pastorianus
gaaggtggcaaactagtcttacgaa

SEQ ID NO: 195184 - DNA, 25 bp, Saccharomyces pastorianus
actacattgcacgattgcaagaggg

SEQ ID NO: 195185 - DNA, 25 bp, Saccharomyces pastorianus
aataaacctatgattcttgtcggac

SEQ ID NO: 195186 - DNA, 25 bp, Saccharomyces pastorianus
gcactaactacattgcacgattgca

SEQ ID NO: 195187 - DNA, 25 bp, Saccharomyces pastorianus
gaattaacagttgcgatagtaaaat

SEQ ID NO: 195188 - DNA, 25 bp, Saccharomyces pastorianus
ttcgaagaggaatttgcactaacta

SEQ ID NO: 195189 - DNA, 25 bp, Saccharomyces pastorianus
gaatttgcactaactacattgcacg

SEQ ID NO: 195190 - DNA, 25 bp, Saccharomyces pastorianus
gggatcctaatattgaattaacagt

SEQ ID NO: 195191 - DNA, 25 bp, Saccharomyces pastorianus
ggccctggggatcctaatattgaat

SEQ ID NO: 195192 - DNA, 25 bp, Saccharomyces pastorianus
taaacctatgattcttgtcggaccg

SEQ ID NO: 195193 - DNA, 25 bp, Saccharomyces pastorianus
agaggaatttgcactaactacattg

SEQ ID NO: 195194 - DNA, 25 bp, Saccharomyces pastorianus
tactctatatctagcggccctgggg

SEQ ID NO: 195195 - DNA, 25 bp, Saccharomyces pastorianus
gcctttagcccataccgaattgttt

SEQ ID NO: 195196 - DNA, 25 bp, Saccharomyces pastorianus
gttttgccatttgttgcatttgtgg

SEQ ID NO: 195197 - DNA, 25 bp, Saccharomyces pastorianus
atattcaaatggtggcctttagccc

SEQ ID NO: 195198 - DNA, 25 bp, Saccharomyces pastorianus
ataccaggcatattcggcataccag

SEQ ID NO: 195199 - DNA, 25 bp, Saccharomyces pastorianus
ttttgcttcagcttttgttgtgcct

SEQ ID NO: 195200 - DNA, 25 bp, Saccharomyces pastorianus
ggagtcacttttggcataccaggca

SEQ ID NO: 195201 - DNA, 25 bp, Saccharomyces pastorianus
tccgccaccaaacatgttcatcata

SEQ ID NO: 195202 - DNA, 25 bp, Saccharomyces pastorianus
tgctgcatcatttgtggagtcactt

SEQ ID NO: 195203 - DNA, 25 bp, Saccharomyces pastorianus
attagacctggattttgcttcagct

SEQ ID NO: 195204 - DNA, 25 bp, Saccharomyces pastorianus
gtgcctgctgcatcatttgtggagt

SEQ ID NO: 195205 - DNA, 25 bp, Saccharomyces pastorianus
cggcataccaggcatgtttggcata

SEQ ID NO: 195206 - DNA, 25 bp, Saccharomyces pastorianus
gtcccgccatcagtttgatctaata

SEQ ID NO: 195207 - DNA, 25 bp, Saccharomyces pastorianus
gtgtacagacaggtcttctttgtga

SEQ ID NO: 195208 - DNA, 25 bp, Saccharomyces pastorianus
cagtttgatctaataatgtgcctaa

SEQ ID NO: 195209 - DNA, 25 bp, Saccharomyces pastorianus
gcagcctggtgtacagacaggtctt

SEQ ID NO: 195210 - DNA, 25 bp, Saccharomyces pastorianus
taatgtgcctaaagcagcctggtgt

SEQ ID NO: 195211 - DNA, 25 bp, Saccharomyces pastorianus
gcctaaagcagcctggtgtacagac

SEQ ID NO: 195212 - DNA, 25 bp, Saccharomyces pastorianus
tgtgcctaaagcagcctggtgtaca

SEQ ID NO: 195213 - DNA, 25 bp, Saccharomyces pastorianus
cagacaggtcttctttgtgaaaaat

SEQ ID NO: 195214 - DNA, 25 bp, Saccharomyces pastorianus
caggtcttctttgtgaaaaatgtga

SEQ ID NO: 195215 - DNA, 25 bp, Saccharomyces pastorianus
atgtcccgccatcagtttgatctaa

SEQ ID NO: 195216 - DNA, 25 bp, Saccharomyces pastorianus
gcctggtgtacagacaggtcttctt

SEQ ID NO: 195217 - DNA, 25 bp, Saccharomyces pastorianus
tgtttcggttgcgttcttggataac

SEQ ID NO: 195218 - DNA, 25 bp, Saccharomyces pastorianus
gtttcggttgcgttcttggataacg

SEQ ID NO: 195219 - DNA, 25 bp, Saccharomyces pastorianus
ttcggttgcgttcttggataacgac

SEQ ID NO: 195220 - DNA, 25 bp, Saccharomyces pastorianus
aaattgtgtcattgatagagttaat

SEQ ID NO: 195221 - DNA, 25 bp, Saccharomyces pastorianus
gcgcatttggtgtttcggttgcgtt

SEQ ID NO: 195222 - DNA, 25 bp, Saccharomyces pastorianus
tttcggttgcgttcttggataacga

SEQ ID NO: 195223 - DNA, 25 bp, Saccharomyces pastorianus
cattgatagagttaatgggatcgta

SEQ ID NO: 195224 - DNA, 25 bp, Saccharomyces pastorianus
ggtgtttcggttgcgttcttggata

SEQ ID NO: 195225 - DNA, 25 bp, Saccharomyces pastorianus
cgcatttggtgtttcggttgcgttc

SEQ ID NO: 195226 - DNA, 25 bp, Saccharomyces pastorianus
atagagttaatgggatcgtagagac

SEQ ID NO: 195227 - DNA, 25 bp, Saccharomyces pastorianus
ataagcaactaaattgtgtcattga

SEQ ID NO: 195228 - DNA, 25 bp, Saccharomyces pastorianus
aaccaaccatattacaagtcacaaa

SEQ ID NO: 195229 - DNA, 25 bp, Saccharomyces pastorianus
gtaaccaaccatattacaagtcaca

SEQ ID NO: 195230 - DNA, 25 bp, Saccharomyces pastorianus
tggtaaccaaccatattacaagtca

SEQ ID NO: 195231 - DNA, 25 bp, Saccharomyces pastorianus
atggtaaccaaccatattacaagtc

SEQ ID NO: 195232 - DNA, 25 bp, Saccharomyces pastorianus
tatggtaaccaaccatattacaagt

SEQ ID NO: 195233 - DNA, 25 bp, Saccharomyces pastorianus
accaaccatattacaagtcacaaat

SEQ ID NO: 195234 - DNA, 25 bp, Saccharomyces pastorianus
ggtaaccaaccatattacaagtcac

SEQ ID NO: 195235 - DNA, 25 bp, Saccharomyces pastorianus
taaccaaccatattacaagtcacaa

SEQ ID NO: 195236 - DNA, 25 bp, Saccharomyces pastorianus
gtgatcatcatcaaggctcgagacc

SEQ ID NO: 195237 - DNA, 25 bp, Saccharomyces pastorianus
aaaactcgccaaatgactctagata

SEQ ID NO: 195238 - DNA, 25 bp, Saccharomyces pastorianus
cagcagcccctgcaggagttaatag

SEQ ID NO: 195239 - DNA, 25 bp, Saccharomyces pastorianus
ggtaattcaaatgagtcccggtaca

SEQ ID NO: 195240 - DNA, 25 bp, Saccharomyces pastorianus
atcccgtaaatcgatttcatcctga

SEQ ID NO: 195241 - DNA, 25 bp, Saccharomyces pastorianus
atatgctaaaactgcgattccaccg

SEQ ID NO: 195242 - DNA, 25 bp, Saccharomyces pastorianus
aatcctagaccgtatcatgtgaaca

SEQ ID NO: 195243 - DNA, 25 bp, Saccharomyces pastorianus
gggcctcagtcaagataccagggta

SEQ ID NO: 195244 - DNA, 25 bp, Saccharomyces pastorianus
gttctcgcaatatggctggtgatca

SEQ ID NO: 195245 - DNA, 25 bp, Saccharomyces pastorianus
ataatccttcaaacggttctcgcaa

SEQ ID NO: 195246 - DNA, 25 bp, Saccharomyces pastorianus
gccaagaatccaatgcgccaatcaa

SEQ ID NO: 195247 - DNA, 25 bp, Saccharomyces pastorianus
taatgcgaccgcagcattttacgct

SEQ ID NO: 195248 - DNA, 25 bp, Saccharomyces pastorianus
ggaaggctccaatctttatccgatt

SEQ ID NO: 195249 - DNA, 25 bp, Saccharomyces pastorianus
gcaattatcaatttcagggcaccat

SEQ ID NO: 195250 - DNA, 25 bp, Saccharomyces pastorianus
atctcagccgctagggttgccttaa

SEQ ID NO: 195251 - DNA, 25 bp, Saccharomyces pastorianus
aagctatcaactccagaattcccac

SEQ ID NO: 195252 - DNA, 25 bp, Saccharomyces pastorianus
accatgatcccgtttgacttgagaa

SEQ ID NO: 195253 - DNA, 25 bp, Saccharomyces pastorianus
aaaattttggttcactctgcactgc

SEQ ID NO: 195254 - DNA, 25 bp, Saccharomyces pastorianus
accagatgcagatcattcttcagga

SEQ ID NO: 195255 - DNA, 25 bp, Saccharomyces pastorianus
accgtggctcctactacaaatgtgg

SEQ ID NO: 195256 - DNA, 25 bp, Saccharomyces pastorianus
aaaatcgtgttcttttcttgacata

SEQ ID NO: 195257 - DNA, 25 bp, Saccharomyces pastorianus
agttagccattttgatctcagccgc

SEQ ID NO: 195258 - DNA, 25 bp, Saccharomyces pastorianus
aggctctaactttcaaagctcctcg

SEQ ID NO: 195259 - DNA, 25 bp, Saccharomyces pastorianus
ctccaatttccaaggctcttccaga

SEQ ID NO: 195260 - DNA, 25 bp, Saccharomyces pastorianus
tgactggagtgcagccagaggttcc

SEQ ID NO: 195261 - DNA, 25 bp, Saccharomyces pastorianus
tgactggagtgcagctagaggctct

SEQ ID NO: 195262 - DNA, 25 bp, Saccharomyces pastorianus
acaaggataggtctctaactaacaa

SEQ ID NO: 195263 - DNA, 25 bp, Saccharomyces pastorianus
tgctcagtttggtaagcctcaacaa

SEQ ID NO: 195264 - DNA, 25 bp, Saccharomyces pastorianus
gaggttccaatttccaaggctcttc

SEQ ID NO: 195265 - DNA, 25 bp, Saccharomyces pastorianus
aagactactgatgagcaaccaaaaa

SEQ ID NO: 195266 - DNA, 25 bp, Saccharomyces pastorianus
gctgccagaggtgctcagtttggta

SEQ ID NO: 195267 - DNA, 25 bp, Saccharomyces pastorianus
gatgcggcagttgaaaagctacagg

SEQ ID NO: 195268 - DNA, 25 bp, Saccharomyces pastorianus
ggataaaactgctcaattgactgtt

SEQ ID NO: 195269 - DNA, 25 bp, Saccharomyces pastorianus
acaggttgccttgccaggacgaata

SEQ ID NO: 195270 - DNA, 25 bp, Saccharomyces pastorianus
acaggcagcctaccagatgaatatg

SEQ ID NO: 195271 - DNA, 25 bp, Saccharomyces pastorianus
tactcttttggcgaaaccactcttc

SEQ ID NO: 195272 - DNA, 25 bp, Saccharomyces pastorianus
tgcggtagcattggacaagcctatt

SEQ ID NO: 195273 - DNA, 25 bp, Saccharomyces pastorianus
aagactatctccctataatgcggta

SEQ ID NO: 195274 - DNA, 25 bp, Saccharomyces pastorianus
gccgagccgccactatagtatatga

SEQ ID NO: 195275 - DNA, 25 bp, Saccharomyces pastorianus
ggcactatggctttgtatgatgttt

SEQ ID NO: 195276 - DNA, 25 bp, Saccharomyces pastorianus
gttacgatcccgcagtacaaacttt

SEQ ID NO: 195277 - DNA, 25 bp, Saccharomyces pastorianus
acatattcgaggttgactttcctga

SEQ ID NO: 195278 - DNA, 25 bp, Saccharomyces pastorianus
acgaagcagaggttgccctaaggca

SEQ ID NO: 195279 - DNA, 25 bp, Saccharomyces pastorianus
agttaaatctgacctcatctgtgag

SEQ ID NO: 195280 - DNA, 25 bp, Saccharomyces pastorianus
atcgatcttccagattctttagaga

SEQ ID NO: 195281 - DNA, 25 bp, Saccharomyces pastorianus
ggcgcaaccggatactacgaatgtt

SEQ ID NO: 195282 - DNA, 25 bp, Saccharomyces pastorianus
gaaggtcaacaacccgttacatcac

SEQ ID NO: 195283 - DNA, 25 bp, Saccharomyces pastorianus
cgttacatcacaggagggacaatct

SEQ ID NO: 195284 - DNA, 25 bp, Saccharomyces pastorianus
agattggcgcaaccggatactacga

SEQ ID NO: 195285 - DNA, 25 bp, Saccharomyces pastorianus
cgaatgttcggccaagactggttat

SEQ ID NO: 195286 - DNA, 25 bp, Saccharomyces pastorianus
gaagtctacgtaccaactgtctttg

SEQ ID NO: 195287 - DNA, 25 bp, Saccharomyces pastorianus
gtagcagaccagattggcgcaaccg

SEQ ID NO: 195288 - DNA, 25 bp, Saccharomyces pastorianus
ggccaagactggttatggtgtcaga

SEQ ID NO: 195289 - DNA, 25 bp, Saccharomyces pastorianus
tttctctatcgatcttccagattct

SEQ ID NO: 195290 - DNA, 25 bp, Saccharomyces pastorianus
acaggagggacaatctgtagcagac

SEQ ID NO: 195291 - DNA, 25 bp, Saccharomyces pastorianus
atgctcgcatacttagggataactt

SEQ ID NO: 195292 - DNA, 25 bp, Saccharomyces pastorianus
tggacatgcaagatttgttctaagt

SEQ ID NO: 195293 - DNA, 25 bp, Saccharomyces pastorianus
caccagggtttatcaatgctcgcat

SEQ ID NO: 195294 - DNA, 25 bp, Saccharomyces pastorianus
gaggttggaggctcagttaaaacta

SEQ ID NO: 195295 - DNA, 25 bp, Saccharomyces pastorianus
gaatgaaatccttgttaaatctttg

SEQ ID NO: 195296 - DNA, 25 bp, Saccharomyces pastorianus
aaataggtgcgtggactctggacat

SEQ ID NO: 195297 - DNA, 25 bp, Saccharomyces pastorianus
atcgctagaaatatgaaccttccaa

SEQ ID NO: 195298 - DNA, 25 bp, Saccharomyces pastorianus
aaatctttgaaattcatcgctagaa

SEQ ID NO: 195299 - DNA, 25 bp, Saccharomyces pastorianus
tgcattgccaaactacatgagatct

SEQ ID NO: 195300 - DNA, 25 bp, Saccharomyces pastorianus
gcgtggactctggacatgcaagatt

SEQ ID NO: 195301 - DNA, 25 bp, Saccharomyces pastorianus
tataaaaaccaagctaccaccaggg

SEQ ID NO: 195302 - DNA, 25 bp, Saccharomyces pastorianus
actggcttggttactatcgatatgt

SEQ ID NO: 195303 - DNA, 25 bp, Saccharomyces pastorianus
tacaacgaacttttggaccttggat

SEQ ID NO: 195304 - DNA, 25 bp, Saccharomyces pastorianus
aaagtggaacctgcacatcgtgcct

SEQ ID NO: 195305 - DNA, 25 bp, Saccharomyces pastorianus
ccgctcccaactgtcgattattgaa

SEQ ID NO: 195306 - DNA, 25 bp, Saccharomyces pastorianus
gacaagtacgattatctggccaaag

SEQ ID NO: 195307 - DNA, 25 bp, Saccharomyces pastorianus
gatcaattggacgttcgagcaggtt

SEQ ID NO: 195308 - DNA, 25 bp, Saccharomyces pastorianus
ggccaagaccgagtgtggaattcat

SEQ ID NO: 195309 - DNA, 25 bp, Saccharomyces pastorianus
atcgtgcctacaaagagctacatat

SEQ ID NO: 195310 - DNA, 25 bp, Saccharomyces pastorianus
ataagtgctgtgtttactggtagaa

SEQ ID NO: 195311 - DNA, 25 bp, Saccharomyces pastorianus
ggcagattttgcctcgaaatacggg

SEQ ID NO: 195312 - DNA, 25 bp, Saccharomyces pastorianus
attcacgtatataagccggatggat

SEQ ID NO: 195313 - DNA, 25 bp, Saccharomyces pastorianus
ttaagagattcacttgctgacaaga

SEQ ID NO: 195314 - DNA, 25 bp, Saccharomyces pastorianus
gcttgtctaaggtggacattccctt

SEQ ID NO: 195315 - DNA, 25 bp, Saccharomyces pastorianus
gattttcctggtactccagaagcca

SEQ ID NO: 195316 - DNA, 25 bp, Saccharomyces pastorianus
actactcaagaccaagtggcttcga

SEQ ID NO: 195317 - DNA, 25 bp, Saccharomyces pastorianus
ggtgtctcgatatatgattttcctg

SEQ ID NO: 195318 - DNA, 25 bp, Saccharomyces pastorianus
gcaagaactggccactactcaagac

SEQ ID NO: 195319 - DNA, 25 bp, Saccharomyces pastorianus
gagaagcaacgatcctcaatccagc

SEQ ID NO: 195320 - DNA, 25 bp, Saccharomyces pastorianus
gatcctcaatccagcttgtctaagg

SEQ ID NO: 195321 - DNA, 25 bp, Saccharomyces pastorianus
agtggcttcgattattgagtccttc

SEQ ID NO: 195322 - DNA, 25 bp, Saccharomyces pastorianus
tgagtccttcgttgaattaggtgtc

SEQ ID NO: 195323 - DNA, 25 bp, Saccharomyces pastorianus
agaaatgtggatcgcttgtacaagc

SEQ ID NO: 195324 - DNA, 25 bp, Saccharomyces pastorianus
gtcctatcggcatttggtgtagtaa

SEQ ID NO: 195325 - DNA, 25 bp, Saccharomyces pastorianus
gtcattgctcatctcttcaacacaa

SEQ ID NO: 195326 - DNA, 25 bp, Saccharomyces pastorianus
atcggcatttggtgtagtaattctt

SEQ ID NO: 195327 - DNA, 25 bp, Saccharomyces pastorianus
ggtgtagtaattctttccgtcattg

SEQ ID NO: 195328 - DNA, 25 bp, Saccharomyces pastorianus
tttggtgtagtaattctttccgtca

SEQ ID NO: 195329 - DNA, 25 bp, Saccharomyces pastorianus
gtagtaattctttccgtcattgctc

SEQ ID NO: 195330 - DNA, 25 bp, Saccharomyces pastorianus
gagacccgttgtatccactggtaag

SEQ ID NO: 195331 - DNA, 25 bp, Saccharomyces pastorianus
gacccgttgtatccactggtaaggc

SEQ ID NO: 195332 - DNA, 25 bp, Saccharomyces pastorianus
atgagacccgttgtatccactggta

SEQ ID NO: 195333 - DNA, 25 bp, Saccharomyces pastorianus
taattctttccgtcattgctcatct

SEQ ID NO: 195334 - DNA, 25 bp, Saccharomyces pastorianus
tttccgtcattgctcatctcttcaa

SEQ ID NO: 195335 - DNA, 25 bp, Saccharomyces pastorianus
tgttaccgtctggaaaccgaataag

SEQ ID NO: 195336 - DNA, 25 bp, Saccharomyces pastorianus
cgcttgtcgggctctcaaaggaaga

SEQ ID NO: 195337 - DNA, 25 bp, Saccharomyces pastorianus
gatcccgaagtagcagatacccttt

SEQ ID NO: 195338 - DNA, 25 bp, Saccharomyces pastorianus
atacccttttgtgtgggatgggcga

SEQ ID NO: 195339 - DNA, 25 bp, Saccharomyces pastorianus
tagagtccgatagcgacgaacccct

SEQ ID NO: 195340 - DNA, 25 bp, Saccharomyces pastorianus
gatctagattttgaataccgtgttg

SEQ ID NO: 195341 - DNA, 25 bp, Saccharomyces pastorianus
atgggcgagggtattgttaccgtct

SEQ ID NO: 195342 - DNA, 25 bp, Saccharomyces pastorianus
ggttgtttcgtcgatcccgaagtag

SEQ ID NO: 195343 - DNA, 25 bp, Saccharomyces pastorianus
ctctcccactctgatgaggatctaa

SEQ ID NO: 195344 - DNA, 25 bp, Saccharomyces pastorianus
gatgaaacgacgcttgtcgggctct

SEQ ID NO: 195345 - DNA, 25 bp, Saccharomyces pastorianus
aggacctcaaggaagatcatcaaga

SEQ ID NO: 195346 - DNA, 25 bp, Saccharomyces pastorianus
ttttttgcggtgtttgcttctagct

SEQ ID NO: 195347 - DNA, 25 bp, Saccharomyces pastorianus
taccagtggatacaacgggtctcat

SEQ ID NO: 195348 - DNA, 25 bp, Saccharomyces pastorianus
gagtcgcgtgcaaagcgataagcaa

SEQ ID NO: 195349 - DNA, 25 bp, Saccharomyces pastorianus
gatgcagtttctaactcaattagtt

SEQ ID NO: 195350 - DNA, 25 bp, Saccharomyces pastorianus
gaattactacaccaaatgccgatag

SEQ ID NO: 195351 - DNA, 25 bp, Saccharomyces pastorianus
gcagcatctttattatgcagcgttg

SEQ ID NO: 195352 - DNA, 25 bp, Saccharomyces pastorianus
gcttctagctttgtcctttatcgta

SEQ ID NO: 195353 - DNA, 25 bp, Saccharomyces pastorianus
ttatcgtagaggttcttgctttgaa

SEQ ID NO: 195354 - DNA, 25 bp, Saccharomyces pastorianus
gcagcgttgatgcagtttctaactc

SEQ ID NO: 195355 - DNA, 25 bp, Saccharomyces pastorianus
gctttgaaagctacctattcttttc

SEQ ID NO: 195356 - DNA, 25 bp, Saccharomyces pastorianus
aatgatcctgaacagcagcatcttt

SEQ ID NO: 195357 - DNA, 25 bp, Saccharomyces pastorianus
atttggctgccttggtatacctcgt

SEQ ID NO: 195358 - DNA, 25 bp, Saccharomyces pastorianus
gtttatagtgttgcacatactgttt

SEQ ID NO: 195359 - DNA, 25 bp, Saccharomyces pastorianus
gctgccttggtatacctcgtgtttt

SEQ ID NO: 195360 - DNA, 25 bp, Saccharomyces pastorianus
tctcctccttactaacaattatatt

SEQ ID NO: 195361 - DNA, 25 bp, Saccharomyces pastorianus
ggctgccttggtatacctcgtgttt

SEQ ID NO: 195362 - DNA, 25 bp, Saccharomyces pastorianus
tatttggctgccttggtatacctcg

SEQ ID NO: 195363 - DNA, 25 bp, Saccharomyces pastorianus
ccctattgtttatagtgttgcacat

SEQ ID NO: 195364 - DNA, 25 bp, Saccharomyces pastorianus
taacaattatattttaaccctattg

SEQ ID NO: 195365 - DNA, 25 bp, Saccharomyces pastorianus
aaccctattgtttatagtgttgcac

SEQ ID NO: 195366 - DNA, 25 bp, Saccharomyces pastorianus
tatagtgttgcacatactgtttatt

SEQ ID NO: 195367 - DNA, 25 bp, Saccharomyces pastorianus
ttggctgccttggtatacctcgtgt

SEQ ID NO: 195368 - DNA, 25 bp, Saccharomyces pastorianus
gatttgcccaagttacgatccagca

SEQ ID NO: 195369 - DNA, 25 bp, Saccharomyces pastorianus
gtagaaacttctccaacaaagcaga

SEQ ID NO: 195370 - DNA, 25 bp, Saccharomyces pastorianus
atagtattacctgagctacgtcccg

SEQ ID NO: 195371 - DNA, 25 bp, Saccharomyces pastorianus
gaagctctatcattgcggaataacc

SEQ ID NO: 195372 - DNA, 25 bp, Saccharomyces pastorianus
aaccgagcctgttttagagtcctca

SEQ ID NO: 195373 - DNA, 25 bp, Saccharomyces pastorianus
gagcatctaatactctaccagaact

SEQ ID NO: 195374 - DNA, 25 bp, Saccharomyces pastorianus
gaataacctgaagaaacggccacca

SEQ ID NO: 195375 - DNA, 25 bp, Saccharomyces pastorianus
ggaggacagtattccagaagcaata

SEQ ID NO: 195376 - DNA, 25 bp, Saccharomyces pastorianus
taccagaacttagcggtgttaacac

SEQ ID NO: 195377 - DNA, 25 bp, Saccharomyces pastorianus
gaaaactcaatcgatttgcccaagt

SEQ ID NO: 195378 - DNA, 25 bp, Saccharomyces pastorianus
agaagcctgcaatccctcagaaaaa

SEQ ID NO: 195379 - DNA, 25 bp, Saccharomyces pastorianus
ggactagtacattaccagcgcatct

SEQ ID NO: 195380 - DNA, 25 bp, Saccharomyces pastorianus
aggaaagcatctctgggactccgac

SEQ ID NO: 195381 - DNA, 25 bp, Saccharomyces pastorianus
cgccctgttgtttcacgattggatc

SEQ ID NO: 195382 - DNA, 25 bp, Saccharomyces pastorianus
gctaatcctgatgcgaaagctttta

SEQ ID NO: 195383 - DNA, 25 bp, Saccharomyces pastorianus
gtggccacctgttctaaagactgca

SEQ ID NO: 195384 - DNA, 25 bp, Saccharomyces pastorianus
cagcgcatctactgaacctgatcaa

SEQ ID NO: 195385 - DNA, 25 bp, Saccharomyces pastorianus
ttatatttgtttctcctcaggacac

SEQ ID NO: 195386 - DNA, 25 bp, Saccharomyces pastorianus
ggcgaaaccgaaattgtcaatcctg

SEQ ID NO: 195387 - DNA, 25 bp, Saccharomyces pastorianus
caaatatgttcacgtggccacctgt

SEQ ID NO: 195388 - DNA, 25 bp, Saccharomyces pastorianus
tgagcgcatctattggtggcgaaac

SEQ ID NO: 195389 - DNA, 25 bp, Saccharomyces pastorianus
ggagaaccctaaggtcgccctgttg

SEQ ID NO: 195390 - DNA, 25 bp, Saccharomyces pastorianus
ggatgcgctaacaggtaccagagga

SEQ ID NO: 195391 - DNA, 25 bp, Saccharomyces pastorianus
ggcgcaacaaatatcccatggcaac

SEQ ID NO: 195392 - DNA, 25 bp, Saccharomyces pastorianus
agaaaactaacaccatgctctccag

SEQ ID NO: 195393 - DNA, 25 bp, Saccharomyces pastorianus
ttggcggcaagaaccaccatgttcg

SEQ ID NO: 195394 - DNA, 25 bp, Saccharomyces pastorianus
aggtgttttggtccttggcgcaaca

SEQ ID NO: 195395 - DNA, 25 bp, Saccharomyces pastorianus
attccgggagtgatattgctgtagt

SEQ ID NO: 195396 - DNA, 25 bp, Saccharomyces pastorianus
atgctctccaggtgatgatggcgcc

SEQ ID NO: 195397 - DNA, 25 bp, Saccharomyces pastorianus
aatcgacgagacctaccgtgaatga

SEQ ID NO: 195398 - DNA, 25 bp, Saccharomyces pastorianus
ataccattaccagatttggcggcaa

SEQ ID NO: 195399 - DNA, 25 bp, Saccharomyces pastorianus
gacactccatgcgtattgaccaagg

SEQ ID NO: 195400 - DNA, 25 bp, Saccharomyces pastorianus
attcaaagcgcgacacatttcaaag

SEQ ID NO: 195401 - DNA, 25 bp, Saccharomyces pastorianus
agcagctgcactctacacaaaagga

SEQ ID NO: 195402 - DNA, 25 bp, Saccharomyces pastorianus
aattctcaggattgtgtgcctctac

SEQ ID NO: 195403 - DNA, 25 bp, Saccharomyces pastorianus
gagggctcaacaacacgcgtttgga

SEQ ID NO: 195404 - DNA, 25 bp, Saccharomyces pastorianus
aagtatcctaagcttcctcaaacga

SEQ ID NO: 195405 - DNA, 25 bp, Saccharomyces pastorianus
aatttaccaccttcgccagtaagag

SEQ ID NO: 195406 - DNA, 25 bp, Saccharomyces pastorianus
caaattggtggttgtgcctcgcgaa

SEQ ID NO: 195407 - DNA, 25 bp, Saccharomyces pastorianus
aagtgtcatctgttgcagtcggtgt

SEQ ID NO: 195408 - DNA, 25 bp, Saccharomyces pastorianus
gactcttgccaagatccaagcgttt

SEQ ID NO: 195409 - DNA, 25 bp, Saccharomyces pastorianus
agaaagcgttgtcccattgtctaaa

SEQ ID NO: 195410 - DNA, 25 bp, Saccharomyces pastorianus
ttcaagtccgattcacatgtcgcca

SEQ ID NO: 195411 - DNA, 25 bp, Saccharomyces pastorianus
aagatacctggagtctcgtcgagac

SEQ ID NO: 195412 - DNA, 25 bp, Saccharomyces pastorianus
gaaccagaccagttaccacaaaagg

SEQ ID NO: 195413 - DNA, 25 bp, Saccharomyces pastorianus
atccaattcctagtgcgtttaccaa

SEQ ID NO: 195414 - DNA, 25 bp, Saccharomyces pastorianus
tatggagtacgttccatcctcaaag

SEQ ID NO: 195415 - DNA, 25 bp, Saccharomyces pastorianus
tagaccagggtcatttatcgccatt

SEQ ID NO: 195416 - DNA, 25 bp, Saccharomyces pastorianus
gacaatggttctttgcgacactact

SEQ ID NO: 195417 - DNA, 25 bp, Saccharomyces pastorianus
gacaccgtttggaattcccattcaa

SEQ ID NO: 195418 - DNA, 25 bp, Saccharomyces pastorianus
actttgcccaataccatcgacaatg

SEQ ID NO: 195419 - DNA, 25 bp, Saccharomyces pastorianus
gcgacactacttctgcacaatttga

SEQ ID NO: 195420 - DNA, 25 bp, Saccharomyces pastorianus
gatttggaccacactttgacacttt

SEQ ID NO: 195421 - DNA, 25 bp, Saccharomyces pastorianus
ggacattaccgcaagatccaattcc

SEQ ID NO: 195422 - DNA, 25 bp, Saccharomyces pastorianus
ttatcgccatttcttgattccttgc

SEQ ID NO: 195423 - DNA, 25 bp, Saccharomyces pastorianus
ctgcccgatgtttgctatagttggt

SEQ ID NO: 195424 - DNA, 25 bp, Saccharomyces pastorianus
ggatgtcttccatacagtttttggt

SEQ ID NO: 195425 - DNA, 25 bp, Saccharomyces pastorianus
gtcttggcgctttggcaattgctaa

SEQ ID NO: 195426 - DNA, 25 bp, Saccharomyces pastorianus
gtttatacagccttgagtgcactat

SEQ ID NO: 195427 - DNA, 25 bp, Saccharomyces pastorianus
gaccctgctgtagactttgtactca

SEQ ID NO: 195428 - DNA, 25 bp, Saccharomyces pastorianus
tttagtccccatagatcccatatat

SEQ ID NO: 195429 - DNA, 25 bp, Saccharomyces pastorianus
tatgtcctaatgctgaatcccatgc

SEQ ID NO: 195430 - DNA, 25 bp, Saccharomyces pastorianus
acgtctgaagttgttgaccctgctg

SEQ ID NO: 195431 - DNA, 25 bp, Saccharomyces pastorianus
gaagatggttcgttccagggtgaca

SEQ ID NO: 195432 - DNA, 25 bp, Saccharomyces pastorianus
tgcagctcaagcttttacctgtctt

SEQ ID NO: 195433 - DNA, 25 bp, Saccharomyces pastorianus
ggtggtggctttgcgaacgacaatt

SEQ ID NO: 195434 - DNA, 25 bp, Saccharomyces pastorianus
ttgaaagcaatcgtctcacctcaag

SEQ ID NO: 195435 - DNA, 25 bp, Saccharomyces pastorianus
gtttcagtatatcagcggtgctttc

SEQ ID NO: 195436 - DNA, 25 bp, Saccharomyces pastorianus
ttcttccccatttatgttttccatg

SEQ ID NO: 195437 - DNA, 25 bp, Saccharomyces pastorianus
gtattcttctttgttgtacatcttc

SEQ ID NO: 195438 - DNA, 25 bp, Saccharomyces pastorianus
aaatttcagccaaccgtattcttct

SEQ ID NO: 195439 - DNA, 25 bp, Saccharomyces pastorianus
aatcgttcatgtggcaactgtttca

SEQ ID NO: 195440 - DNA, 25 bp, Saccharomyces pastorianus
agtgaagaagtcctcatcgtcctct

SEQ ID NO: 195441 - DNA, 25 bp, Saccharomyces pastorianus
gtatcttctccaggacagcttgtaa

SEQ ID NO: 195442 - DNA, 25 bp, Saccharomyces pastorianus
ggtgctttcattttgtgtagctcct

SEQ ID NO: 195443 - DNA, 25 bp, Saccharomyces pastorianus
gtgtagctcctttatgttgcaaatc

SEQ ID NO: 195444 - DNA, 25 bp, Saccharomyces pastorianus
cacctcaagatcttcttctggtatc

SEQ ID NO: 195445 - DNA, 25 bp, Saccharomyces pastorianus
ggaagtttagcaggccacactgata

SEQ ID NO: 195446 - DNA, 25 bp, Saccharomyces pastorianus
tttacaccgtagcttggtcaccaaa

SEQ ID NO: 195447 - DNA, 25 bp, Saccharomyces pastorianus
gaaacttgtctcttgtggctatgat

SEQ ID NO: 195448 - DNA, 25 bp, Saccharomyces pastorianus
aggtagtgcctctcatgatatgact

SEQ ID NO: 195449 - DNA, 25 bp, Saccharomyces pastorianus
gactcgctttcaatgctatgggata

SEQ ID NO: 195450 - DNA, 25 bp, Saccharomyces pastorianus
tattggcgcatcgtaacatcgttac

SEQ ID NO: 195451 - DNA, 25 bp, Saccharomyces pastorianus
gagactttgggatgcgtcaacacat

SEQ ID NO: 195452 - DNA, 25 bp, Saccharomyces pastorianus
ggtgatgacactcgcaggacactca

SEQ ID NO: 195453 - DNA, 25 bp, Saccharomyces pastorianus
tagtctgtcttttcaatgcgatgga

SEQ ID NO: 195454 - DNA, 25 bp, Saccharomyces pastorianus
gatctcttgtttgtagcggtggcat

SEQ ID NO: 195455 - DNA, 25 bp, Saccharomyces pastorianus
gacactcaaagcctatttacaccgt

SEQ ID NO: 195456 - DNA, 25 bp, Saccharomyces pastorianus
gaaaacttaaataggtcgcatgaac

SEQ ID NO: 195457 - DNA, 25 bp, Saccharomyces pastorianus
gatggcccaaggtgaaacattatca

SEQ ID NO: 195458 - DNA, 25 bp, Saccharomyces pastorianus
atatgaaaccgtattgcgaaccaat

SEQ ID NO: 195459 - DNA, 25 bp, Saccharomyces pastorianus
atcgaagacgatggacaacttggaa

SEQ ID NO: 195460 - DNA, 25 bp, Saccharomyces pastorianus
aaagagccgttgatgctataaggga

SEQ ID NO: 195461 - DNA, 25 bp, Saccharomyces pastorianus
agacgctttcgttaaaacagacaat

SEQ ID NO: 195462 - DNA, 25 bp, Saccharomyces pastorianus
ttagtgggacagttatcgaagacga

SEQ ID NO: 195463 - DNA, 25 bp, Saccharomyces pastorianus
acaattccacgagttcgtactcaaa

SEQ ID NO: 195464 - DNA, 25 bp, Saccharomyces pastorianus
gaaaagtctgaaatctctacaaaag

SEQ ID NO: 195465 - DNA, 25 bp, Saccharomyces pastorianus
tgaggaggagacacacaaacttaat

SEQ ID NO: 195466 - DNA, 25 bp, Saccharomyces pastorianus
gaagttttcccaaatcgaaacactg

SEQ ID NO: 195467 - DNA, 25 bp, Saccharomyces pastorianus
gagtcactagtatcttgccgttaac

SEQ ID NO: 195468 - DNA, 25 bp, Saccharomyces pastorianus
gctggttctaatggattgttcgctt

SEQ ID NO: 195469 - DNA, 25 bp, Saccharomyces pastorianus
gttaaccctgtccttattgcaatat

SEQ ID NO: 195470 - DNA, 25 bp, Saccharomyces pastorianus
agaactgctataggccactgaacga

SEQ ID NO: 195471 - DNA, 25 bp, Saccharomyces pastorianus
gggcaaggccataagctttgaacaa

SEQ ID NO: 195472 - DNA, 25 bp, Saccharomyces pastorianus
aaggtatcgagtttgctcctgtcgc

SEQ ID NO: 195473 - DNA, 25 bp, Saccharomyces pastorianus
gatgcggccgtatggtgtgaaaatc

SEQ ID NO: 195474 - DNA, 25 bp, Saccharomyces pastorianus
ctaggtaaaaggctatctccattaa

SEQ ID NO: 195475 - DNA, 25 bp, Saccharomyces pastorianus
gctgtagcgcaggatgtcattaaca

SEQ ID NO: 195476 - DNA, 25 bp, Saccharomyces pastorianus
ccgttggtcccatttcaagcaatag

SEQ ID NO: 195477 - DNA, 25 bp, Saccharomyces pastorianus
gcaaagtgtaagacctaccaccgtt

SEQ ID NO: 195478 - DNA, 25 bp, Saccharomyces pastorianus
tttctcactgtatcctcaatttacc

SEQ ID NO: 195479 - DNA, 25 bp, Saccharomyces pastorianus
aggttggctccaaatttctcactgt

SEQ ID NO: 195480 - DNA, 25 bp, Saccharomyces pastorianus
gtgtctttaacaattctccggatga

SEQ ID NO: 195481 - DNA, 25 bp, Saccharomyces pastorianus
tattagactctatctccgtcaaacc

SEQ ID NO: 195482 - DNA, 25 bp, Saccharomyces pastorianus
ggcgcgcggaggatctacaattgtc

SEQ ID NO: 195483 - DNA, 25 bp, Saccharomyces pastorianus
gaggacgatccacaaccggtattat

SEQ ID NO: 195484 - DNA, 25 bp, Saccharomyces pastorianus
gacgatccacagtacgcagatttca

SEQ ID NO: 195485 - DNA, 25 bp, Saccharomyces pastorianus
gttcccgctaccaagattcattgat

SEQ ID NO: 195486 - DNA, 25 bp, Saccharomyces pastorianus
taactatcaagacatggcgcgcgga

SEQ ID NO: 195487 - DNA, 25 bp, Saccharomyces pastorianus
gatcctcaatctttcaggttggctc

SEQ ID NO: 195488 - DNA, 25 bp, Saccharomyces pastorianus
gattcaaccaactctaacttctttc

SEQ ID NO: 195489 - DNA, 25 bp, Saccharomyces pastorianus
tgtaggcgtcaagcttaagttcaac

SEQ ID NO: 195490 - DNA, 25 bp, Saccharomyces pastorianus
ggacaactactttaacctgcagctg

SEQ ID NO: 195491 - DNA, 25 bp, Saccharomyces pastorianus
aagccgttcctcaaaggcctggtca

SEQ ID NO: 195492 - DNA, 25 bp, Saccharomyces pastorianus
tgcagccggtgaacccgaagccgtt

SEQ ID NO: 195493 - DNA, 25 bp, Saccharomyces pastorianus
tggtcaaccatcgtgtaggcgtcaa

SEQ ID NO: 195494 - DNA, 25 bp, Saccharomyces pastorianus
tgatatcagcgcgatgcagccggtg

SEQ ID NO: 195495 - DNA, 25 bp, Saccharomyces pastorianus
gcttaagttcaacagcaccgaatat

SEQ ID NO: 195496 - DNA, 25 bp, Saccharomyces pastorianus
actttaacctgcagctgaacgaagc

SEQ ID NO: 195497 - DNA, 25 bp, Saccharomyces pastorianus
aatatagaggtacgctcgtgtccac

SEQ ID NO: 195498 - DNA, 25 bp, Saccharomyces pastorianus
ggcaccctgggcgagatattcatcc

SEQ ID NO: 195499 - DNA, 25 bp, Saccharomyces pastorianus
tttgttgcgggtgtctcgcacggca

SEQ ID NO: 195500 - DNA, 25 bp, Saccharomyces pastorianus
gggacatcaactcgcaaggtttcaa

SEQ ID NO: 195501 - DNA, 25 bp, Saccharomyces pastorianus
agaccctagagtggcgatcggcgaa

SEQ ID NO: 195502 - DNA, 25 bp, Saccharomyces pastorianus
gaatgatggccagacctttgaccat

SEQ ID NO: 195503 - DNA, 25 bp, Saccharomyces pastorianus
agagaccgtgcccaagttgttcgag

SEQ ID NO: 195504 - DNA, 25 bp, Saccharomyces pastorianus
aggtttcaagattgccctcgagctt

SEQ ID NO: 195505 - DNA, 25 bp, Saccharomyces pastorianus
gttgttcgagtctttgcacgatcac

SEQ ID NO: 195506 - DNA, 25 bp, Saccharomyces pastorianus
agtgccattcactttcggcgtgaga

SEQ ID NO: 195507 - DNA, 25 bp, Saccharomyces pastorianus
agtttggcgccaataaccttatcct

SEQ ID NO: 195508 - DNA, 25 bp, Saccharomyces pastorianus
tgagcgggttcttcggtctacaaaa

SEQ ID NO: 195509 - DNA, 25 bp, Saccharomyces pastorianus
ccttttcattactttctggtccatt

SEQ ID NO: 195510 - DNA, 25 bp, Saccharomyces pastorianus
caaatgaacgtggtctatcctccgc

SEQ ID NO: 195511 - DNA, 25 bp, Saccharomyces pastorianus
gcgattacaattaccgtccgtacta

SEQ ID NO: 195512 - DNA, 25 bp, Saccharomyces pastorianus
gattcggatgattttgccacctcaa

SEQ ID NO: 195513 - DNA, 25 bp, Saccharomyces pastorianus
cctggagttctgcttgtttgttaga

SEQ ID NO: 195514 - DNA, 25 bp, Saccharomyces pastorianus
gaaaccatcctcttatttgtatcaa

SEQ ID NO: 195515 - DNA, 25 bp, Saccharomyces pastorianus
gtgggtctggctttacggctacttt

SEQ ID NO: 195516 - DNA, 25 bp, Saccharomyces pastorianus
agaaactatcaccaaggccctgagt

SEQ ID NO: 195517 - DNA, 25 bp, Saccharomyces pastorianus
aagagcgttccatcatttccacttt

SEQ ID NO: 195518 - DNA, 25 bp, Saccharomyces pastorianus
gtatgcgtactttagacccaagcga

SEQ ID NO: 195519 - DNA, 25 bp, Saccharomyces pastorianus
ttatttgtgcctgagcatgccataa

SEQ ID NO: 195520 - DNA, 25 bp, Saccharomyces pastorianus
agtatgcaatgactcaagccccacg

SEQ ID NO: 195521 - DNA, 25 bp, Saccharomyces pastorianus
aaaccagtccacgttgtcagaatgc

SEQ ID NO: 195522 - DNA, 25 bp, Saccharomyces pastorianus
aggcgccaatgcaagccatttgatt

SEQ ID NO: 195523 - DNA, 25 bp, Saccharomyces pastorianus
gagtacttcatatcaccacgacaac

SEQ ID NO: 195524 - DNA, 25 bp, Saccharomyces pastorianus
gatacctatcagacaaccataccat

SEQ ID NO: 195525 - DNA, 25 bp, Saccharomyces pastorianus
aagcagggtatgtcaggcttacctc

SEQ ID NO: 195526 - DNA, 25 bp, Saccharomyces pastorianus
gagaatgaccgtttgctcaaccaaa

SEQ ID NO: 195527 - DNA, 25 bp, Saccharomyces pastorianus
ataccattactctcaaccaactact

SEQ ID NO: 195528 - DNA, 25 bp, Saccharomyces pastorianus
cgagaatgtctcaaggcgccaatgc

SEQ ID NO: 195529 - DNA, 25 bp, Saccharomyces pastorianus
gggaattcatctactagtgccttga

SEQ ID NO: 195530 - DNA, 25 bp, Saccharomyces pastorianus
attgccttcaatatccccttcgatg

SEQ ID NO: 195531 - DNA, 25 bp, Saccharomyces pastorianus
gccctttcaagctcaggcgaaattt

SEQ ID NO: 195532 - DNA, 25 bp, Saccharomyces pastorianus
caggcttacctcctatttttggtgg

SEQ ID NO: 195533 - DNA, 25 bp, Saccharomyces pastorianus
gaaaacatgatcttctcacgcatta

SEQ ID NO: 195534 - DNA, 25 bp, Saccharomyces pastorianus
gattattcatgacgactcactagta

SEQ ID NO: 195535 - DNA, 25 bp, Saccharomyces pastorianus
atgtcctgatatgtctttttctaga

SEQ ID NO: 195536 - DNA, 25 bp, Saccharomyces pastorianus
aaaacgctagtggaccagaaccata

SEQ ID NO: 195537 - DNA, 25 bp, Saccharomyces pastorianus
aacttgtccaagaccacggagttca

SEQ ID NO: 195538 - DNA, 25 bp, Saccharomyces pastorianus
atgtcctatttgtagcaaaccatgt

SEQ ID NO: 195539 - DNA, 25 bp, Saccharomyces pastorianus
tctcacgcattatgggtctattcat

SEQ ID NO: 195540 - DNA, 25 bp, Saccharomyces pastorianus
acttgagtctggtgaaaatgggcta

SEQ ID NO: 195541 - DNA, 25 bp, Saccharomyces pastorianus
ggaagtgtcatatatgtcctgatat

SEQ ID NO: 195542 - DNA, 25 bp, Saccharomyces pastorianus
ggaatagcaaacactcgaatgagca

SEQ ID NO: 195543 - DNA, 25 bp, Saccharomyces pastorianus
ggaagaagatatcccactggaacta

SEQ ID NO: 195544 - DNA, 25 bp, Saccharomyces pastorianus
gatggtgaaacaaccgatgccaacg

SEQ ID NO: 195545 - DNA, 25 bp, Saccharomyces pastorianus
catcgttactggtggtaatggccca

SEQ ID NO: 195546 - DNA, 25 bp, Saccharomyces pastorianus
gaatgcgccagtttttgtagattta

SEQ ID NO: 195547 - DNA, 25 bp, Saccharomyces pastorianus
cgaggaggcgtatgtgcattcatat

SEQ ID NO: 195548 - DNA, 25 bp, Saccharomyces pastorianus
ttaccagatggttcctttgaggact

SEQ ID NO: 195549 - DNA, 25 bp, Saccharomyces pastorianus
agagcatttttctgatgaggagact

SEQ ID NO: 195550 - DNA, 25 bp, Saccharomyces pastorianus
aaggccatcccaaaagaccaaagag

SEQ ID NO: 195551 - DNA, 25 bp, Saccharomyces pastorianus
aatggcccagaagattttcaacagc

SEQ ID NO: 195552 - DNA, 25 bp, Saccharomyces pastorianus
aagagcaactactccatacatgacc

SEQ ID NO: 195553 - DNA, 25 bp, Saccharomyces pastorianus
gatgccaacggtaagaccatcgtta

SEQ ID NO: 195554 - DNA, 25 bp, Saccharomyces pastorianus
gagaaattgcgtgctttagttttaa

SEQ ID NO: 195555 - DNA, 25 bp, Saccharomyces pastorianus
aagatgctttccaaatgctggatga

SEQ ID NO: 195556 - DNA, 25 bp, Saccharomyces pastorianus
aaatggtacctgacaatgacaccag

SEQ ID NO: 195557 - DNA, 25 bp, Saccharomyces pastorianus
aatgacaccagtaccgcggaagttg

SEQ ID NO: 195558 - DNA, 25 bp, Saccharomyces pastorianus
tgaatcgctaacgtttaaccaactt

SEQ ID NO: 195559 - DNA, 25 bp, Saccharomyces pastorianus
cacgatttaaacgttcccttgaatg

SEQ ID NO: 195560 - DNA, 25 bp, Saccharomyces pastorianus
cgcagtttcccgagcgtgaagaatt

SEQ ID NO: 195561 - DNA, 25 bp, Saccharomyces pastorianus
aagaacttatcgcagtttcccgagc

SEQ ID NO: 195562 - DNA, 25 bp, Saccharomyces pastorianus
aaccaacttacgcaggactacataa

SEQ ID NO: 195563 - DNA, 25 bp, Saccharomyces pastorianus
gaagaaggtgtaagctttcccatat

SEQ ID NO: 195564 - DNA, 25 bp, Saccharomyces pastorianus
aagccattggaagaggacacgattt

SEQ ID NO: 195565 - DNA, 25 bp, Saccharomyces pastorianus
agctttcccatattcttatctatca

SEQ ID NO: 195566 - DNA, 25 bp, Saccharomyces pastorianus
aagcggcgcagacttgttagtaaca

SEQ ID NO: 195567 - DNA, 25 bp, Saccharomyces pastorianus
gaggtatgtttttgtgcccttggaa

SEQ ID NO: 195568 - DNA, 25 bp, Saccharomyces pastorianus
acgactttgatcagactttgaacca

SEQ ID NO: 195569 - DNA, 25 bp, Saccharomyces pastorianus
ggattctaagcacctagttgtttta

SEQ ID NO: 195570 - DNA, 25 bp, Saccharomyces pastorianus
agataagcacaaagacgcaccatat

SEQ ID NO: 195571 - DNA, 25 bp, Saccharomyces pastorianus
gcaaaggagtgcgtactttttccct

SEQ ID NO: 195572 - DNA, 25 bp, Saccharomyces pastorianus
ggaaattgctttacaggaactaaca

SEQ ID NO: 195573 - DNA, 25 bp, Saccharomyces pastorianus
caattccaagaactgctaagcattt

SEQ ID NO: 195574 - DNA, 25 bp, Saccharomyces pastorianus
gaaagctttgccattatccaaacaa

SEQ ID NO: 195575 - DNA, 25 bp, Saccharomyces pastorianus
taacagaatatatagccacaagcgg

SEQ ID NO: 195576 - DNA, 25 bp, Saccharomyces pastorianus
aaatatccaatcacatttgcttagg

SEQ ID NO: 195577 - DNA, 25 bp, Saccharomyces pastorianus
atgttatcgcgtctacgttgggacc

SEQ ID NO: 195578 - DNA, 25 bp, Saccharomyces pastorianus
agcatcatcaaatttcccctttttg

SEQ ID NO: 195579 - DNA, 25 bp, Saccharomyces pastorianus
accaggtgtttactatgttccatat

SEQ ID NO: 195580 - DNA, 25 bp, Saccharomyces pastorianus
taaatgttttcgctcgtttatcgag

SEQ ID NO: 195581 - DNA, 25 bp, Saccharomyces pastorianus
gatcctcactcagcttctttgataa

SEQ ID NO: 195582 - DNA, 25 bp, Saccharomyces pastorianus
aaacgcattcctataatttcatgag

SEQ ID NO: 195583 - DNA, 25 bp, Saccharomyces pastorianus
gatagatcagcatcaagggcagttt

SEQ ID NO: 195584 - DNA, 25 bp, Saccharomyces pastorianus
gaacgaactactattaccaagcgaa

SEQ ID NO: 195585 - DNA, 25 bp, Saccharomyces pastorianus
gttccaagaacagccgatagatcag

SEQ ID NO: 195586 - DNA, 25 bp, Saccharomyces pastorianus
cagcaatgcgtttaagccgttgtat

SEQ ID NO: 195587 - DNA, 25 bp, Saccharomyces pastorianus
ttgggaccctcagcaatgcgtttaa

SEQ ID NO: 195588 - DNA, 1799 bp, Saccharomyces cerevisiae
atctggttgatcctgccagtagtcatatgcttgtctcaaagattaagccatgcatgtctaagtataagcaatttatacagtgaaactgcgaatggctcattaaatcagttatcgtttatttgatagttcctttactacatggtataactgtggtaattctagagctaatacatgcttaaaatctcgaccctttggaagagatgtatttattagataaaaaatcaatgtcttcggactctttgatgattcataataacttttcgaatcgcatggccttgtgctggcgatggttcattcaaatttctgccctatcaactttcgatggtaggatagtggcctaccatggtttcaacgggtaacggggaataagggttcgattccggagagggagcctgagaaacggctaccacatccaaggaaggcagcaggcgcgcaaattacccaatcctaattcagggaggtagtgacaataaataacgatacagggcccattcgggtcttgtaattggaatgagtacaatgtaaataccttaacgaggaacaattggagggcaagtctggtgccagcagccgcggtaattccagctccaatagcgtatattaaagttgttgcagttaaaaagctcgtagttgaactttgggcccggttggccggtccgattttttcgtgtactggatttccaacggggcctttccttctggctaaccttgagtccttgtggctcttggcgaaccaggacttttactttgaaaaaattagagtgttcaaagcaggcgtattgctcgaatatattagcatggaataatagaataggacgtttggttctattttgttggtttctaggaccatcgtaatgattaatagggacggtcgggggcatcagtattcaattgtcagaggtgaaattcttggatttattgaagactaactactgcgaaagcatttgccaaggacgttttcattaatcaagaacgaaagttaggggatcgaagatgatcagataccgtcgtagtcttaaccataaactatgccgactagggatcgggtggtgtttttttaatgacccactcggcaccttacgagaaatcaaagtctttgggttctggggggagtatggtcgcaaggctgaaacttaaaggaattgacggaagggcaccaccaggagtggagcctgcggcttaatttgactcaacacggggaaactcaccaggtccagacacaataaggattgacagattgagagctctttcttgattttgtgggtggtggtgcatggccgttcttagttggtggagtgatttgtctgcttaattgcgataacgaacgagaccttaacctactaaatagtggtgctagcatttgctggttatccacttcttagagggactatcggtttcaagccgatggaagtttgaggcaataacaggtctgtgatgcccttagacgttctgggccgcacgcgcgctacactgacggagccagcgagtctaaccttggccgagaggtcttggtaatcttgtgaaactccgtcgtgctggggatagagcattgtaattattgctcttcaacgaggaattcctagtaagcgcaagtcatcagcttgcgttgattacgtccctgccctttgtacacaccgcccgtcgctagtaccgattgaatggcttagtgaggcctcaggatctgcttagagaagggggcaactccatctcagagcggagaatttggacaaacttggtcatttagaggaactaaaagtcgtaacaaggtttccgtaggtgaacctgcggaaggatcatta

SEQ ID NO: 195589 - DNA, 1799 bp, Saccharomyces cerevisiae; identical to SEQ ID NO: 195588

SEQ ID NO: 195590 - DNA, 1799 bp, Saccharomyces cerevisiae; identical to SEQ ID NO: 195588

SEQ ID NO: 195591 - DNA, 1799 bp, Saccharomyces cerevisiae; identical to SEQ ID NO: 195588

SEQ ID NO: 195592 - DNA, 1799 bp, Saccharomyces cerevisiae; identical to SEQ ID NO: 195588

SEQ ID NO: 195593 - DNA, 3394 bp, Saccharomyces cerevisiae
tttgacctcaaatcaggtaggagtacccgctgaacttaagcatatcaataagcggaggaaaagaaaccaaccgggattgccttagtaacggcgagtgaagcggcaaaagctcaaatttgaaatctggtaccttcggtgcccgagttgtaatttggagagggcaactttggggccgttccttgtctatgttccttggaacaggacgtcatagagggtgagaatcccgtgtggcgaggagtgcggttctttgtaaagtgccttcgaagagtcgagttgtttgggaatgcagctctaagtgggtggtaaattccatctaaagctaaatattggcgagagaccgatagcgaacaagtacagtgatggaaagatgaaaagaactttgaaaagagagtgaaaaagtacgtgaaattgttgaaagggaagggcatttgatcagacatggtgttttgtgccctctgctccttgtgggtaggggaatctcgcatttcactgggccagcatcagttttggtggcaggataaatccataggaatgtagcttgcctcggtaagtattatagcctgtgggaatactgccagctgggactgaggactgcgacgtaagtcaaggatgctggcataatggttatatgccgcccgtcttgaaacacggaccaaggagtctaacgtctatgcgagtgtttgggtgtaaaacccatacgcgtaatgaaagtgaacgtaggttggggcctcgcaagaggtgcacaatcgaccgatcctgatgtcttcggatggatttgagtaagagcatagctgttgggacccgaaagatggtgaactatgcctgaatagggtgaagccagaggaaactctggtggaggctcgtagcggttctgacgtgcaaatcgatcgtcgaatttgggtataggggcgaaagactaatcgaaccatctagtagctggttcctgccgaagtttccctcaggatagcagaagctcgtatcagttttatgaggtaaagcgaatgattagaggttccggggtcgaaatgaccttgacctattctcaaactttaaatatgtaagaagtccttgttacttaattgaacgtggacatttgaatgaagagcttttagtgggccatttttggtaagcagaactggcgatgcgggatgaaccgaacgtagagttaaggtgccggaatacacgctcatcagacaccacaaaaggtgttagttcatctagacagccggacggtggccatggaagtcggaatccgctaaggagtgtgtaacaactcaccggccgaatgaactagccctgaaaatggatggcgctcaagcgtgttacctatactctaccgtcagggttgatatgatgccctgacgagtaggcaggcgtggaggtcagtgacgaagcctagaccgtaaggtcgggtcgaacggcctctagtgcagatcttggtggtagtagcaaatattcaaatgagaactttgaagactgaagtggggaaaggttccacgtcaacagcagttggacgtgggttagtcgatcctaagagatggggaagctccgtttcaaaggcctgattttatgcaggccaccatcgaaagggaatccggttaagattccggaacctggatatggattcttcacggtaacgtaactgaatgtggagacgtcggcgcgagccctgggaggagttatcttttcttcttaacagcttatcaccccggaattggtttatccggagatggggtcttatggctggaagaggccagcacctttgctggctccggtgcgcttgtgacggcccgtgaaaatccacaggaaggaatagttttcatgccaggtcgtactgataaccgcagcaggtctccaaggtgaacagcctctagttgatagaataatgtagataagggaagtcggcaaaatagatccgtaacttcgggataaggattggctctaagggtcgggtagtgagggccttggtcagacgcagcgggcgtgcttgtggactgcttggtggggcttgctctgctaggcggactacttgcgtgccttgttgtagacggccttggtaggtctcttgtagaccgtcgcttgctacaattaacgatcaacttagaactggtacggacaaggggaatctgactgtctaattaaaacatagcattgcgatggtcagaaagtgatgttgacgcaatgtgatttctgcccagtgctctgaatgtcaaagtgaagaaattcaaccaagcgcgggtaaacggcgggagtaactatgactctcttaaggtagccaaatgcctcgtcatctaattagtgacgcgcatgaatggattaacgagattcccactgtccctatctactatctagcgaaaccacagccaagggaacgggcttggcagaatcagcggggaaagaagaccctgttgagcttgactctagtttgacattgtgaagagacatagagggtgtagaataagtgggagcttcggcgccagtgaaataccactacctttatagtttctttacttattcaatgaagcggagctggaattcattttccacgttctagcattcaaggtcccattcggggctgatccgggttgaagacattgtcaggtggggagtttggctggggcggcacatctgttaaacgataacgcagatgtcctaaggggggctcatggagaacagaaatctccagtagaacaaaagggtaaaagcccccttgattttgattttcagtgtgaatacaaaccatgaaagtgtggcctatcgatcctttagtccctcggaatttgaggctagaggtgccagaaaagttaccacagggataactggcttgtggcagtcaagcgttcatagcgacattgctttttgattcttcgatgtcggctcttcctatcataccgaagcagaattcggtaagcgttggattgttcacccactaatagggaacgtgagctgggtttagaccgtcgtgagacaggttagttttaccctactgatgaatgttaccgcaatagtaattgaacttagtacgagaggaacagttcattcggataattggtttttgcggctgtctgatcaggcattgccgcgaagctaccatccgctggattatggctgaacgcctctaagtcagaatccatgctagaacgcggtgatttctttgctccacacaatatagatggatacgaataaggcgtccttgtggcgtcgctgaaccatagcaggctagcaacggtgcacttggcggaaaggccttgggtgcttgctggcgaattgcaatgtcattttgcgtggggataaatcatttgtatacgacttagatgtacaacggggtattgtaagcagtagagtagccttgttgttacgatctgctgagattaagcctttgttgtctgatttg

SEQ ID NO: 195594 - DNA, 3394 bp, Saccharomyces cerevisiae; identical to SEQ ID NO: 195593

SEQ ID NO: 195595 - DNA, 3394 bp, Saccharomyces cerevisiae; identical to SEQ ID NO: 195593

SEQ ID NO: 195596 - DNA, 3394 bp, Saccharomyces cerevisiae; identical to SEQ ID NO: 195593

SEQ ID NO: 195597 - DNA, 3394 bp, Saccharomyces cerevisiae; identical to SEQ ID NO: 195593

SEQ ID NO: 195598 - DNA, 1049 bp, Escherichia coli
atggctcaccgcccacgctggacattgtcgcaagtcacagaattatttgaaaaaccgttgctggatctgctgtttgaagcgcagcaggtgcatcgccagcatttcgatcctcgtcaggtgcaggtcagcacgttgctgtcgattaagaccggagcttgtccggaagattgcaaatactgcccgcaaacgtcgcgctacaaaaccgggctggaagccgagcggttgatggaagttgaacaggtgctggagtcggcgcgcaaagcgaaagcggcaggatcgacgcgcttctgtatgggcgcggcgtggaagaatccccacgaacgcgatatgccgtacctggaacaaatggtgcagggggtaaaagcgatggggctggaggcgtgtatgacgctgggcacgttgagtgaatctcaggcgcagcgcctcgcgaacgccgggctggattactacaaccacaacctggacacctcgccggagttttacggcaatatcatcaccacacgcacttatcaggaacgcctcgatacgctggaaaaagtgcgcgatgccgggatcaaagtctgttctggcggcattgtgggcttaggcgaaacggtaaaagatcgcgccggattattgctgcaactggcaaacctgccgacgccgccggaaagcgtgccaatcaacatgctggtgaaggtgaaaggcacgccgcttgccgataacgatgatgtcgatgcctttgattttattcgcaccattgcggtcgcgcggatcatgatgccaacctcttacgtgcgcctttctgccggacgcgagcagatgaacgaacagactcaggcgatgtgctttatggcaggcgcaaactcgattttctacggttgcaaactgctgaccacgccgaatccggaagaagataaagacctgcaactgttccgcaaactggggctaaatccgcagcaaactgccgtgctggcaggggataacgaacaacagcaacgtcttgaacaggcgctgatgaccccggacaccgacgaatattacaacgcggcagcattatgagctggcag

SEQ ID NO: 195599 - DNA, 1049 bp, Escherichia coli; identical to SEQ ID NO: 195598

SEQ ID NO: 195600 - DNA, 1049 bp, Escherichia coli; identical to SEQ ID NO: 195598

SEQ ID NO: 195601 - DNA, 748 bp, Escherichia coli
atggcaacggttaataaacaagccattgcagcggcatttggtcgggcagccgcacactatgagcaacatgcagatctacagcgccagagtgctgacgccttactggcaatgcttccacagcgtaaatacacccacgtactggacgcgggttgtggacctggctggatgagccgccactggcgggaacgtcacgcgcaggtgacggccttagatctctcgccgccaatgcttgttcaggcacgccagaaggatgccgcagaccattatctggcgggagatatcgaatccctgccgttagcgactgcgacgttcgatcttgcatggagcaatctcgcagtgcagtggtgcggtaatttatccacggcactccgcgagctgtatcgggtggtgcgccccaaaggcgtggtcgcgtttaccacgctggtgcagggatcgttacccgaacgtcatcaggcgtggcaggcggtggacgagcgtccgcatgctaatcgctttttaccgccagatgaaatcgaacagtcgctgaacggcgtgcattatcaacatcatattcagcccatcacgctgtggtttgatgatgcgctcagtgccatgcgttcgctgaaaggcatcggtgccacgcatcttcatgaagggcgcgacccgcgaatattaacgcgttcgcagttgcagcgattgcaactggcctggccgcaacagcaggggcgatatcctctgacgtatcatctttttttgggagtgattgctc

SEQ ID NO: 195602 - DNA, 748 bp, Escherichia coli; identical to SEQ ID NO: 195601

SEQ ID NO: 195603 - DNA, 652 bp, Escherichia coli
aaacgttattttgtcaccggaacggataccgaagtggggaaaactgtcgccagttgtgcacttttacaagccgcaaaggcagcaggctaccggacggcaggttataaaccggtcgcctctggcagcgaaaagaccccggaaggtttacgcaatagcgacgcgctggcgttacagcgcaacagcagcctgcagctggattacgcaacagtaaatccttacaccttcgcagaacccacttcgccgcacatcatcagcgcgcaagagggcagaccgatagaatcattggtaatgagcgccggattacgcgcgcttgaacaacaggctgactgggtgttagtggaaggtgctggcggctggtttacgccgctttctgacactttcacttttgcagattgggtaacacaggaacaactgccggtgatactggtagttggtgtgaaactcggctgtattaatcacgcgatgttgactgcacaggtaatacaacacgccggactgactctggcgggttgggtggcgaacgatgttacgcctccgggaaaacgtcacgctgaatatatgaccacgctcacccgcatgattcccgcgccgctgctgggagagatcccctggcttgcagaaaatccagaaaatgcggcaaccggaaagtaca

SEQ ID NO: 195604 - DNA, 652 bp, Escherichia coli; identical to SEQ ID NO: 195603

SEQ ID NO: 195605 - DNA, 1032 bp, Bacteriophage P1
atgtccaatttactgaccgtacaccaaaatttgcctgcattaccggtcgatgcaacgagtgatgaggttcgcaagaacctgatggacatgttcagggatcgccaggcgttttctgagcatacctggaaaatgcttctgtccgtttgccggtcgtgggcggcatggtgcaagttgaataaccggaaatggtttcccgcagaacctgaagatgttcgcgattatcttctatatcttcaggcgcgcggtctggcagtaaaaactatccagcaacatttgggccagctaaacatgcttcatcgtcggtccgggctgccacgaccaagtgacagcaatgctgtttcactggttatgcggcggatccgaaaagaaaacgttgatgccggtgaacgtgcaaaacaggctctagcgttcgaacgcactgatttcgaccaggttcgttcactcatggaaaatagcgatcgctgccaggatatacgtaatctggcatttctggggattgcttataacaccctgttacgtatagccgaaattgccaggatcagggttaaagatatctcacgtactgacggtgggagaatgttaatccatattggcagaacgaaaacgctggttagcaccgcaggtgtagagaaggcacttagcctgggggtaactaaactggtcgagcgatggatttccgtctctggtgtagctgatgatccgaataactacctgttttgccgggtcagaaaaaatggtgttgccgcgccatctgccaccagccagctatcaactcgcgccctggaagggatttttgaagcaactcatcgattgatttacggcgctaaggatgactctggtcagagatacctggcctggtctggacacagtgcccgtgtcggagccgcgcgagatatggcccgcgctggagtttcaataccggagatcatgcaagctggtggctggaccaatgtaaatattgtcatgaactatatccgtaacctggatagtgaaacaggggcaatggtgcgcctgctggaagatggcgattag

SEQ ID NO: 195606 - DNA, 1032 bp, Bacteriophage P1; identical to SEQ ID NO: 195605

SEQ ID NO: 195607 - DNA, 6540 bp, Bacillus subtilis
gggactaccctaaataaggatgaggggcggcggtcagccgccttttttctattacatgtcagcgcggaagcggatttttattttcatcaagcgtaaatccttctccgagcacatcgtgaacatcgcttaccgctacaaaggcatggggatcaatggagttaatcacgcttttcagcatcaccaattcatttttcggcaccacacaataaagtacatctatatcctcttttgtgtaggaaccttgtcctttcaaaatggtgacgccccgttccatttcttcaagaatctttttctgaatcaggtcgtttttcgaagagatgatcgtagcgcctttagcagcgtatccgccttcctgaataaaatcgattaatcttgccgctacaaatacagctaccagcgtatacatcgcttctttataggagagataagtaagcaaagacaaaatgatgacgcaggcatcgaaagcaaacatcgttctgcccatcggaatcccaaaatacttattcactaaacgtgcgatgatatcaacaccgcctgtcgtaccgccgaacttaaaaataatacccagtccggctccgatgaatacgccggcaaataaagcggcgagcgctaagtcgtgctgaaggggcatatggatttcatatcgctgaaagatgctgaggaacaaagacaaggctacagtgccgacaagggtataaacaaacattgtcctgccgagcatgtggaaaagggcataaagcaaaagtgtaatacctgtaaaaccgccctcagccagattgttctgcatattgaaatgaaccaagccaaatgaaaaaattgccgctccgattaaaataaaaaatatgttttttaatctaatttctccaagcatcacacaaaaccccttttccttccattagatagcgtttatattatagtggatgaaaaagaaaacagcaaacgtgcttaaacatttgtcaaacgtatctgaattagctaacatgtaagaggatgataggaggtttcgttcagtgagtgataaaacaatgaaagacatacaggctgaagtagaccgttacataggccaatttaaagaaggatattttagcccgctggccatgatggcgaggctgactgaagaactgggcgagcttgccagagaagtgaatcaccgttatggagaaaaaccaaaaaaagcgactgaagatgataaaagcatggaagaggaaataggcgatgtgctatttgtattggtttgtttagccaactctcttgatatctctttagaggaagctcacgaccgagtcatgcataaatttaatacaagagataaagatcgctggaccagaaaagaagaaggaaagtagaggagatcaagatgtcaaacgaaacaattaaattagtcattgcgggaccgcgtggaagaatggggcaggaagctgttaaattggcagaacgaacaccacattttgaccttgtaggggccatagaccatacatacgatcagcaaaaattatctgatgtgatgcctgttgagtcagatgctttcatttacacagatatccatgcctgttttacagaaacacaaccggatgtcttgattgatttaacaacgcccgaaatcggaaaagtacatacaaaaattgcattagagcacggagtccgtccagttgtcggaacaaccggtttctcagaagctgatttaaaagagctcacatctttaacagaagaaaaagggatcggagccatcatcgcgccaaattttgcgctcggtgcgatactgatgatgaaattttcaaaaatggctgccaactattttgaggatgttgagattattgagcttcatcatgaccagaagcttgacgcaccaagcggaactgcgcttaaaacagcggaaatgatttcagaagtccgtaaagaaaagcagcaaggacatccggatgaaaaagaaattctcccaggagcaagaggagcggagcaaaacggtattcgcttgcacaggcttcagatacgccatgattcttataaccgtgcttctttcatgtcaggcgttaaactgtcagtcgaacaagtcatgaagattgatcagcttgtgtatggtttagaaaatatcattgattagacggggggataaacaatgaaaattgctttgatcgcgcatgacaagaaaaaacaggatatggttcaatttacgactgcctatcgggatattttaaagaatcatgatctatacgcaaccggaaccacagggttgaaaattcatgaggcgacaggtcttcaaattgaacgttttcaatccggccctttagggggagaccagcaaatcggtgcactgatcgctgccaatgcactcgatcttgtcatttttttgcgcgacccgctgaccgcgcagccgcatgaaccggatgtctcggcattaatccgtttatgtgatgtgtattccattccgctcgccacaaatatgggtactgcggaaattcttgtgcgcacacttgatgaaggtgttttcgaattccgtgaccttcttcggggagaagagccgaatgtataatgctgacgttcttgcttttggcgcccacagtgatgatgtcgagatcggaatgggcggcacaatagcgaagtttgtcaaacaggaaaaaaaagtaatgatatgcgatttgacagaagcggaactctcttctaacggtacggtcagtttgcgtaaagaagaagcagctgaagcagcccgcatattaggcgcagataaaagaattcagctaacgcttccagaccgcggcctaataatgagtgatcaggcaattcggtcaattgtcactgtcatcagaatctgtcggccaaaagcggtttttatgccgtataaaaaggatcgccatccggatcacggcaatgcggctgcactggtggaagaagcgatcttttccgccggaatccataaatataaagacgaaaaaagccttccggcgcataaagtcagcaaggtttactattatatgataaatggttttcatcagccggattttgttattgatatctcggatacaatagaggcaaagaaacaaagcctcaacgcctacaaaagccagtttatcccgtcaaaggattccgtttctactcctctgacgaatgggtatattgaaatcgttgaagcgagagaaaagctttacggtaaagaagcgggcgtggagtatgccgaagtttcttttccaaacggatgctgatgcttgatcatgatgtgcttgggggcgaacaatgagaaaactagggaagcagcttgctgaaaagggacatgaaatccatttcatcacatcaagcattccgtttagactgaatacatatcatcccaatattcattttcatgaagttgaggttaatcaatatgctgtttttaagtatcctccgtatgatttgacattggcaagcaaaatcgctgaggtggcggaacgggagaatttagacattatccatgctcactatgctctcccgcatgccgtttgcgcctatcttgcaaaacaaatgctgaaacgcaatatcggcattgttaccactttgcatggcacggatatcacggtgttaggttatgatccgtctctaaaagatctgatccgttttgctattgagtcatcagacagggtgacggccgtctcctcagcgcttgcggctgaaacatacgatttaattaaaccggagaaaaaaattgaaacgatttataactttatagacgagcgcgtgtatctgaagaaaaacacagcggcaattaaagagaaacatggaattttaccagatgaaaaagtcgtcatccatgtgtccaacttcagaaaagttaaacgcgtgcaggatgtcatccgtgtgttccgcaatatcgctggcaaaacgaaagcgaagctgcttttagtcggagacggtccggagaaatcgacagcctgcgagcttatcagaaaatatggcttggaagaccaagtcttaatgcttggaaatcaagaccgtgttgaagatctttattctattagcgatttgaagctgctgctatctgaaaaagaaagctttggccttgtcctgcttgaagcgatggcttgcggagtgccttgtattggaacaaacattggcggtatccctgaggttataaaaaacaatgtgagcggatttttggtggatgtcggtgatgttacggccgcaacagcccgcgcgatgagcattttagaagatgaacagctaagcaatcgttttacaaaggcggcaatagagatgcttgaaaatgaattttcttctaaaaaaattgtcagccagtatgaacagatttatgccgatttagcagaaccggagtgatcacatggaaaaagtttttatcaaagcacttcccgtgctccgcatcttaatcgaagcgggccatcaggcttattttgtcgggggcgcagttcgtgacagctatatgaaacgaacgatcggagatgtcgatatcgcgacagatgcggcacctgatcaagtagaacggctgtttcagcggactgttgatgtaggcaaagatgaatctgattatgttgatttcagaagaccgtcagaagtgcaatttatctcatcattagaagaggatctaaaacgcagagatttaacgatcaatgcgatggccatgacagcggacgggaaggtgcttgattattttggcggcaagaaagatattgatcagaaagtgattcgaaccgttggaaagcctgaggatagatttcaagaggatgcgcttcgtatgctgagagccgtacgctttatgagccagcttggctttacgctttcaccggaaacagaagaagccattgcgaaagaaaaatcactcctctcccatgtttcagtcgaacgaaaaactatagagtttgagaaattgctgcagggaagagcttctcgccaggcgcttcaaacactcattcaaacgagattgtatgaagagcttcctggtttttatcataaacgagaaaacctgatttcaacgagtgagtttccattcttctctttaacatcccgtgaggagctttgggctgctcttttaattaaccttggcatagttttgaaagacgcgccccttttcctgaaagcctggaagctcccgggaaaagtgatcaaggaagccattcacattgccgatacgtttggccagagccttgacgcaatgacaatgtacagagctgggaaaaaagcactgctctcagcggccaaaatatcgcagcttcggcaaaacgaaaaactggatgaaaagaaactgaaggacattcagtacgcttatcaaaacctgccgatcaaaagccttaaggatcttgatatcacgggtaaggacttgcttgcgcttcgaaaccggccggccggaaaatgggtgtcagaagaattacagtggatcgagcaggctgttgtgacagggaagctctccaatcaaaagaaacacatagaggagtggctgaagacatgcggtcaacattaagaaaagaccttattgaattattttctcaggccggcaatgaatttatttccggccaaaaaatcagtgatgctctcggctgttcaagaactgctgtgtggaagcatattgaagagcttcggaaagagggttatgaagtagaagccgttagaagaaaaggatatcggctcatcaaaaaacccggaaaactcagtgaaagcgaaattcgttttggattaaaaacggaagtgatgggccagcatcttatttaccatgacgttctttcaagcacgcaaaaaacggctcatgagctcgcgaataataacgcaccggaaggcacccttgaaggaaacggtgtttggatgagcctgattttgcggcctgacattccgctccaaaaaacaccgcagctgactctgcttgctgcagtagctgttgtgcagggaatagaagaggcagcaggcatccaaacggatattaaatggccaaatgatattttgattaacggaaaaaaaacagtcggtatcctaacggaaatgcaggctgaagaagaccgcgtacgttcagtgatcattgggatcggcattaacgttaaccagcagcctaatgattttccagatgaattgaaggacatcgcgacaagcctcagccaagctgctggggaaaaaattgatcgggccggcgtcatccagcatattttactatgctttgagaaacggtaccgggattatatgacgcacggatttacgccgattaagcttttatgggaaagctatgcgctcggtattggcactaatatgagagccagaacgttaaacggaaccttttacggtaaggcgttaggtatagatgatgaaggcgttctgcttttagaaacgaacgaaggcattaaaaaaatctattctgccgatatcgaattgggctaatgtgttggtacaagcccgttgattttggtatacttccattgggcagtatcgcctgcgaactgcacctattattaaaatagatagacattgcagcagtctgccttgatccaaaaaaggactgggacagagggatgaaactcgccgaactttagaaagtgaagaatccttctcgttgtaacggaaggttttttggcttgc

SEQ ID NO: 195608 - DNA, 6540 bp, Bacillus subtilis; identical to SEQ ID NO: 195607

SEQ ID NO: 195609 - DNA, 6540 bp, Bacillus subtilis; identical to SEQ ID NO: 195607

SEQ ID NO: 195610 - DNA, 1612 bp, Bacillus subtilis
aagcttggcaacaaatgagccgtcttgtcctcatgatactcgttgctttatttcatataaaagggctcgtcatcggatttacagtgctaattatgccatggcaagcatcaaatcccttcagacaccgtacttatggccgctgattccctttaacggaaaggcgctgtggcaggtgcttgtcccgacagcgaaacctggcgcaaaagtaagacccagcatcgttcaccccaaaaatcgcttaaggcagcctaccaattcataatcgcattgaaactgactgaagagtatgataatgtatgtcttaattatgaagggacagtccataaaactgtcctttcatccataagcggagaaagagggaatgacattgttcttacacggcacaagcagacaaaatcaacatggtcatttagaaatcggaggtgtggatgctctctatttagcggagaaatatggtacacctctttacgtatatgatgtggctttaatacgtgagcgtgctaaaagctttaagcaggcgtttatttctgcagggctgaaagcacaggtggcatatgcgagcaaagcattctcatcagtcgcaatgattcagctcgctgaggaagagggactttctttagatgtcgtatccggaggagagctatatacggctgttgcagcaggctttccggcagaacgcatccactttcatggaaacaataagagcagggaagaactgcggatggcgcttgagcaccgcatcggctgcattgtggtggataatttctatgaaatcgcgcttcttgaagacctatgtaaagaaacgggtcactccatcgatgttcttcttcggatcacgcccggagtagaagcgcatacgcatgactacattacaacgggccaggaagattcaaagtttggtttcgatcttcataacggacaaactgaacgggccattgaacaagtattacaatcggaacacattcagctgctgggtgtccattgccatatcggctcgcaaatctttgatacggccggttttgtgttagcagcggaaaaaatcttcaaaaaactagacgaatggagagattcatattcatttgtatccaaggtgctgaatcttggaggaggtttcggtattcgttatacggaagatgatgaaccgcttcatgccactgaatacgttgaaaaaattatcgaagctgtgaaagaaaatgcttcccgttacggttttgacattccggaaatttggatcgaaccgggccgttctctcgtgggagacgcaggcacaactctttatacggttggctctcaaaaagaagtggataagctgtacaatcgtttcatcattcggcgtgcgaattaagaaaggtctcattgcgcctgtaaagcttacgcgtatttctgctccttcaagcacctttagtgcatccagcatatattttggactaaaagagatatttaattcctcaccttcaatttgatccgcaacaattgcttccacaactttaccgatttctggcgaattggaagaaatttcaatggattcagccggttttgcggacagttttacaacgttgttgcgtccctctctagctaaaagagatgcacgatcaatggcctgaaggaattc

SEQ ID NO: 195611 - DNA, 1612 bp, Bacillus subtilis; identical to SEQ ID NO: 195610

SEQ ID NO: 195612 - DNA, 1612 bp, Bacillus subtilis; identical to SEQ ID NO: 195610

SEQ ID NO: 195613 - DNA, 3360 bp, Bacillus subtilis
  modified_base (2982)..(2982): a, c, g, t, unknown, or other
ataatacacacttatacagactcctaaataagaaattaaatgattgggagtgcgaaaatgaaggatgtttcaaaaaatcaagaagaaaatataagcgacacggcattaacaaacgaactgattcatctgcttggccattcccggcatgattggatgaataagctgcagctgattaaaggaaacttaagcttacagaagtatgaccgtgtctttgaaatgattgaagaaatggttatagacgcaaagcacgaatcaaagctctcaaacctgaaaacaccgcatttggcgtttgattttcttacgtttaattggaaaacccattatatgacgcttgaatatgaagttctcggagaaattaaggatttgtcggcttatgatcaaaagctggcgaaactgatgagaaagctgtttcatctgtttgatcaagcagtcagcagagagagtgaaaatcatttaacggtttcgcttcaaacggatcatcctgacagacagctgattctgtaccttgattttcacggcgcctttgccgatccatctgcttttgatgatattcggcagaatggatatgaggacgttgatatcatgcgttttgaaatcacgagtcacgaatgtctgattgaaattgggttggactagcggagtttttaacggtttagaacggaggacattatgtttgtagatcaggtcaaagtatatgtaaaaggcggcgacggcggcaacggtatggttgcgtttcgccgtgaaaaatatgtgccgaaaggcggccctgccggcggtgacggaggaaagggaggagacgtcgtttttgaagtagatgaaggtctccgcaccctgatggattttagatacaaaaaacactttaaagcgattcgcggcgagcatggcatgtccaaaaaccagcacgggcgaaatgctgatgatatggtcattaaagttccgccgggcaccgttgtgacagacgatgatacaaaacaggtcatcgctgatttaacagagcacggacagcgggctgtcattgcaagaggcggaagaggcggaagaggaaatagccgctttgctacaccggctaatcccgcgcctcagctttcagaaaacggcgagccgggaaaagaacgctacattgttcttgaattaaaagtgcttgcagatgtcggacttgtcgggttcccgagtgtgggaaaatctactttgctgtctgttgtctcatctgcaaaaccgaaaattgcggactatcactttacaacgcttgtcccgaatctcggcatggttgaaacggatgacggacgcagctttgtcatggctgatttgccagggctgattgaaggcgcacaccaaggcgtcggactgggccaccagtttttgcgccatattgaacggacgagggttattgttcatgtcattgacatgtcaggcttagaaggccgtgatccatatgatgattatcttacgattaaccaggagctgagcgagtacaatctgcgtctcactgagcgtccgcaaattatcgttgcaaataaaatggacatgccggaggctgcggaaaatctcgaagcctttaaagaaaagctgacggatgattatccggtattcccgatcagtgcggtgacaagagaaggtctgcgtgagcttctgtttgaggttgccaatcagcttgagaacacaccggaattcccgctgtatgacgaggaagagcttacacaaaaccgtgtcatgtacacgatggaaaatgaagaagtgccatttaacattacacgcgatccagacggtgtatttgtgctttcaggagacagccttgagcggttattcaagatgactgatttctcacgtgatgaatcggttaaacggtttgcaagacagatgcgcggaatgggtgttgatgaagcactcagagaacgcggagccaaggatggagatataatcaggcttctggaatttgaatttgaatttattgattaatcaatgttggctgaaaagagagcctggtgccaggctctctattttaaaggggggatgcaaatgaaagaggagacattttatcttgtccgtgaagatgtattgcccgatgcaatgagaaaaacattagaagtcaaaaagctgcttgatcgacaaaaagcagattcagtagcagatgccgttcaaaaggtcgatttaagtagaagtgcgttttataaatacagggatgctgtttttccattctacaccatggtaaaagaacaaattatcacacttttctttcatttggaggataggtcaggtgcgttatctcagcttcttcaggcggtagctgattctggaagcaacgttctttccattcaccagaccattccgcttcaaggcagagcaaatgtgacactgtctatcagtacgtcggcaatggaagaagacattcatacattaatgaataagctcaggaagtttgattttgtagaaaaggttgaaatattaggttcaggtgcataagggagagaaaatcgtcatgaaagtcggttatttaggtccagcagctacatttacacatctagcagtcagttcttgttttcaaaacggcgccgaacatgttgcttaccgcaccattccggagtgtatagatgcagccgttgcaggcgaagttgattttgcttttgttcctttggaaaatgctttagaaggatctgttaatctaacaatagactatttaatacatgaacagcctttgccaatcgtgggtgaaatgacgttgccgattcaccagcacttgctcgtccatccctcaagagagaatgcatggaaagagctcgacaaaatttactcacattcacacgcgattgcgcaatgccataaatttcttcatcgacattttccttccgttccatatgaatacgccaattctaccggggcggcagcaaagtttgtcagtgaccatcccgagctgaatatcggggtcattgccaatgatatggcagcttctacatacgaattaaaaatcgtgaaacgggatatacnggattatagggacaatcatacaagatttattatcctgtctcccgatgaaaacatatcttttgaagtgaattcaaaattgagctctaggcccaaaacgaccttaatggtcatgctgccgcaggatgatcagtccggggcgctgcatagagtgctgtctgcattttcttggagaaatttaaacctgtcaaaaattgagtcacgtccgactaaaaccggattaggccattatttctttattattgatattgagaaagcgtttgatgatgtattgattccaggggccatgcaggagcttgaagcactcggctgcaaagtgaggcttctgggtgcataccagtcttaccaattataaaaaaagcccactagagggcttttttt

SEQ ID NO: 195614 - DNA, 3360 bp, Bacillus subtilis; identical to SEQ ID NO: 195613
  modified_base (2982)..(2982): a, c, g, t, unknown, or other

SEQ ID NO: 195615 - DNA, 3360 bp, Bacillus subtilis; identical to SEQ ID NO: 195613
  modified_base (2982)..(2982): a, c, g, t, unknown, or other

SEQ ID NO: 195616 - DNA, 2403 bp, Bacillus subtilis
gaattcatgtaaaagatgaggttggttcattctcgaaaattacatctgtgttctcagagcggggcgtgacgtttgaaaaaatccttcagctgccaattaaaggccatgatgagttagctgaaatcgtaattgtcacacatcatacatcagaagctgatttcagtgatatcctgcaaaacctaaatgatttggaagtcgttcaagaagtcaaaagcacatatcgtgtagaagggaacggttggagctaatgtggaaaggacttatccatcaatataaagaatttttacctgtaacagatcaaacaccggcgctaactttacatgaaggaaacacacctcttattcacctgccgaagctgtctgagcagctcggaattgagcttcatgtcaaaacggaaggcgtcaatcctacgggatcatttaaagatcgcggaatggttatggctgtggcaaaggcaaaagaagaaggcaatgacacgattatgtgcgcgtcaacaggtaacacttccgctgctgcggcagcatatgcagcccgtgctaacatgaaatgcattgtcatcatcccgaacggaaaaattgcatttggaaaactcgctcaagctgtcatgtacggagccgagattatcgcaattgacggaaactttgacgatgcgcttaaaattgtccgttccatctgtgagaaatcaccgattgcccttgtcaactcagtcaacccttaccgcattgaaggccaaaaaactgctgccttcgaagtgtgcgaacagctgggggaagcgcctgatgttttagcgatcccggtcggaaatgctggaaacatcactgcgtactggaagggcttcaaggaatatcatgagaaaaacggcacaggccttccgaaaatgcgcggctttgaagctgagggtgcggcggcaatcgtgcgcaatgaagtgattgaaaatccggaaacaatagcgacagccattcgtatcggaaacccggcaagctgggacaaagctgtaaaggcagccgaggaatccaatgggaaaattgacgaagtcactgatgatgaaatccttcacgcatatcagctgatcgcccgtgtagaaggcgtgtttgcagaaccaggttcttgcgcgtctatcgcaggagtgctgaaacaggtgaaatccggagaaattccgaaaggcagcaaggtcgtagctgtgttaacaggaaacggactgaaagatccgaacacagcggtcgacatttcagaaatcaagcctgtcacattgccgactgatgaagacagcatccttgaatatgtaaaaggagcggcccgtgtatgaacgaagccgacatgctgttctctgtcactgttcccggaagcacagctaacctaggccccggctttgattcagtcggaatggcgctcagcagatatttgaagctgaccgtctttgaaagcgacaaatggtcttttgaggctgaaacagaaacagtcgccggaattccgggcggtacagataacctgatctaccaagtggctaaacggaccgcagatttgtacggaaaagaaatgcctcctgtccatgtgaaggtgtggagcgacatcccgcttgcacgcggccttggcagcagcgccgcagcgattgtagcggccattgaactggctgatgaattatgcggcttaaagctgtctgaagcggacaagctgcatttagcgagtctagaagaaggacacccggacaatgctggcgcttctctcgtcggcggacttgtgatcggcctgcatgaggatgacgagacccaaatgatccgcgtcccgaatgctgacattgacgtagtcgttgtcattcctttttatgaagtgctgacaagagacgcgagagacgtgcttccgaaggagtttccatatgccgatgccgtaaaagcaagtgctgtcagcaatatcctcattgctgcgatcatgtccaaggattggccgcttgtcgggaaaatcatgaagaaggatatgttccatcagccgtaccgggcgatgcttgtgcctgagctgtcaaaagtagagcacgtcgccgagatgaagggcgcatatggaacggctctcagcggagcaggcccaacgattctcgtcatgaccgaaaaaggaaagggagaagagctaaaagaacagctcgcgcttcatttccctcattgtgaagtagacgctttgaccgttccgaaagagggaagtataatagagcgaaatcctttatatcaagtaaaaagtgtatagatcatgccaagcgttcctcagcgtcagcggagggcgcctttttttgctggagataaaggagttttattagaaacgaatacatgtaaaggaggagatgaatatgaaaagctgataaccgcagacgacatcacagcgattgtctctgtgaccagtcctcaatacgccccagac

SEQ ID NO: 195617 - DNA, 2403 bp, Bacillus subtilis; identical to SEQ ID NO: 195616

SEQ ID NO: 195618 - DNA, 2403 bp, Bacillus subtilis; identical to SEQ ID NO: 195616

SEQ ID NO: 195619 - DNA, 2525 bp, Bacillus subtilis
ctcgagccaacaccgagagagacatacggcgggtgtattgcctacattgggtttgacgggaatatcgactcttgtattacgattcgcacgatgagtgtaaagaacggtgttgcatcgatacaggcaggtgctggcattgttgctgattctgttccggaagccgaatacgaagaaagctgtaataaagccggtgcgctgctgaaaacgattcatattgcagaagacatgtttcatagcaaggaggataaagctgatgaacagatttctacaattgtgcgttgacggaaaaacccttactgccggtgaggctgaaacgctgatgaatatgatgatggcagcggaaatgactccttctgaaatgggggggatattgtcaattcttgctcatcggggggagacgccagaagagcttgcgggttttgtgaaggcaatgcgggcacacgctcttacagtcgatggacttcctgatattgttgatacatgcggaacagggggagacggtatttccacttttaatatctcaacggcctcggcaattgttgcctcggcagctggtgcgaaaatcgctaagcatggcaatcgctctgtctcttctaaaagcggaagcgctgatgttttagaggagctagaggtttctattcaaaccactcccgaaaaggtcaaaagcagcattgaaacaaacaacatgggatttctttttgcgccgctttaccattcgtctatgaaacatgtagcaggtactagaaaagagctaggtttcagaacggtatttaatctgcttgggccgctcagcaatcctttacaggcgaagcgtcaggtgattggggtctattctgttgaaaaagctggactgatggcaagcgcactggagacgtttcagccgaagcacgtcatgtttgtatcaagccgtgacggtttagatgagctttcaattacagcaccgaccgacgtgattgaattaaaggacggagagcgccgggaatataccgtttcacccgaagatttcggtttcacaaatggcagacttgaagatttacaggtgcagtcaccgaaagagagcgcctatctcattcagaatatttttgaaaataaaagcagcagttccgctttatctattacggcttttaatgcgggagctgcgatttacacggcgggaattaccgcctcactgaaggaaggaacggagctggcgttagagacgattacaagcggaggcgctgccgcgcagcttgaacgactaaagcagaaagaggaagagatctatgcttgaaaaaatcatcaaacaaaagaaagaagaagtgaaaacactggttttgccggtagagcagcctttcgagaaacgttcatttaaggaggcgctggcaagcccgaatcggtttatcgggttgattgccgaagtgaagaaagcatcgccgtcaaaagggcttattaaagaggattttgtgcctgtgcagattgcaatagactatgaggctgcgaaggcagatgcgatttccgttttaacagacaccccgttttttcaaggggaaaacagttatttatcagacgtaaagcgtgctgtttcgattcctgtacttagaaaagattttattcttgattctcttcaagtagaggaatcaagaagaatcggagcggatgccatattgttaatcggcgaggtgcttgatcccttacaccttcatgaattatatcttgaagcaggtgaaaaggggatggacgtgttagtggaggttcatgatgcatcaacgctagaacaaatattgaaagtgttcacacccgacattctcggcgtaaataatcgaaacctaaaaacgtttgaaacatctgtaaagcagacagaacaaatcgcatctctcgttccgaaagaatccttgcttgtcagcgaaagcggaatcggttctttagaacatttaacatttgtcaatgaacatggggcgcgagctgtacttatcggtgaatcattgatgagacaaacttctcagcgtaaagcaatccatgctttgtttagggagtgaggttgtgaagaaaccggcattaaaatattgcggtattcggtcactaaaggatttgcagcttgcggcggaatcacaggctgattacctaggatttatttttgctaaaagcaaacgaaaagtatctccggaagatgtgaaaaaatggctgaaccaagttcgtgtcgaaaaacaggttgcaggtgtttttgttaatgaatcaatagagacgatgtcacgtattgccaagagcttgaagctcgacgtcattcagcttcacggtgatgaaaaaccggcggatgctgctgctcttcgcaagctgacaggctgtgaaatatggaaggcgcttcaccatcaagataacacaactcaagaaatagcccgctttaaagataatgttgacggctttgtgattgattcatctgtaaaagggtctagaggcggaactggtgttgcattttcttgggaatgtgtgccggaatatcagcaggcggctattggtaaacgctgttttatcgcaggcggcgtggatcc

SEQ ID NO: 195620 - DNA, 2525 bp, Bacillus subtilis; identical to SEQ ID NO: 195619

SEQ ID NO: 195621 - DNA, 2525 bp, Bacillus subtilis; identical to SEQ ID NO: 195619

SEQ ID NO: 195622 - DNA, 2064 bp, Saccharomyces cerevisiae
atgacaacggaagatccagattcaaatcacttaagttccgaaactggcattaaattggcattggacccgaacttaattacattggcactaagttctaatccaaactctagccttcattcaccaacgtctgatgaacccgtacctgaatctgcaggaaaagcagatactagtattcgactagaaggtgatgagttagagaataaaactaagaaagacaatgataagaacttaaaatttttgaagaataaagattctctagtcagtaatccacacgaaatttatggctccatgccgttggagcaattgatcccaatcatcttaagacagcgtggtccaggctttaaattcgttgatttaaatgaaaaagaattgcaaaatgagattaagcagcttggtagtgatagtagtgacggtcataacagcgagaagaaggacactgatggcgctgatgagaatgtacaaattggagaagatttcatggaagtggattatgaagataaagataatccagtggattcacgaaatgaaacagaccacaaaacgaatgaaaatggcgagaccgatgataatattgaaacggtaatgacacaggaacagtttgttaaaagaaggagggatatgctagagcatataaatctggccatgaacgaatcgtctttggctttggaattcgtttctttgctactgtcgagtgttaaagagtctacaggtatgtcatcaatgtcaccatttcttaggaaagttgttaaaccttctagtttaaacagtgataaaattccatatgttgcacctacaaaaaaagaatatatcgagttggatatattgaataagggatggaagttacaaagtttaaacgaatctaaagatctcctacgcgcaagttttaataaactgagttccatattacagaacgaacatgactattggaataagataatgcagagtattagcaacaaggatgttatttttaagattagggacaggactagtggtcaaaagctgttggcaattaagtatggttacgaagactctggatctacctataagcatgacagaggtattgctaatataaggaataatatagaatcacaaaatttggatttgataccccacagtagttcagtgttcaaaggcactgatttcgtacattcagtaaagaaattcttaagggttcgtatcttcacaaaaatcgaatcagaagatgattacatattgagtggcgaaagtgtgatggatagggatagtgaaagtgaagaagctgaaacgaaagatatcagaaagcaaatccaacttttgaaaaagatcatttttgaaaaagaactgatgtaccaaataaagaaagaatgcgctttgttgatttcctatggtgtcagtattgaaaacgaaaacaaggtaataattgaactacctaacgaaaaatttgaaatcgagttgttgtcccttgacgatgactccattgtcaatcatgaacaagacttaccaaaaatcaacgacaagagagcaaatttaatgcttgttatgttgagactattattagtcgttatattcaagaaaacattacgatcgagaataagctcaccccacggactgatcaatttgaatgttgacgatgatatcttaataatacgtcccattcttggtaaagttcggtttgctaattacaaactgttactaaaaaaaatcataaaggattacgtgctcgatatagttcctggctcaagtataacagaaacggaagttgagagagaacaacctcaagaaaataaaaacattgatgatgaaaatataactaaattaaataaagagatccgtgccttcgataaactattgaatatacctagacgtgaactcaaaataaatctaccattaactgagcacaaaagccctaatctaagtttaatgctcgaaagtcctaactattgtaacgcactcattcacatcaagttttcagctggtacggaagccaacgcagtgtcctttgacacaacattttctgattttaaagaagtagaggacttcctacattttattgtcgctgagtacatccagcaaaagaaggtgtaa

SEQ ID NO: 195623 - DNA, 2064 bp, Saccharomyces cerevisiae; identical to SEQ ID NO: 195622

SEQ ID NO: 195624 - DNA, 2064 bp, Saccharomyces cerevisiae; identical to SEQ ID NO: 195622

SEQ ID NO: 195625 - DNA, 723 bp, Saccharomyces cerevisiae
atggccgatgaggaacgtttaaaggagtttaaagaggcaaacaagatagtgtttgatccaaataccagacaagtatgggaaaaccagaatcgagatggtacaaaaccagcaactactttccagagtgaagaggacataaaaagagctgccccagaatctgaaaaagacacctccgccacatcaggtattgttccaacactacaaaacattgtggcaactgtgactttggggtgcaggttagatctgaaaacagttgcgctacatgcccgtaatgcagaatataaccccaagcgttttgctgctgtcatcatgcgtattagagagccaaaaactacagctttaatttttgcctcagggaaaatggttgttaccggtgcaaaaagtgaggatgactcaaagctggccagtagaaaatatgcaagaattatccaaaaaatcgggtttgctgctaaattcacagacttcaaaatacaaaatattgtcggttcgtgtgacgttaaattccctatacgtctagaagggttagcattcagtcatggtactttctcctcctatgagccagaattgtttcctggtttgatctatagaatggtgaagccgaaaattgtgttgttaatttttgtttcaggaaagattgttcttactggtgcaaagcaaagggaagaaatttaccaagcttttgaagctatataccctgtgctaagtgaatttagaaaaatgtga

SEQ ID NO: 195626 - DNA, 723 bp, Saccharomyces cerevisiae; identical to SEQ ID NO: 195625

SEQ ID NO: 195627 - DNA, 723 bp, Saccharomyces cerevisiae; identical to SEQ ID NO: 195625

SEQ ID NO: 195628 - DNA, 1118 bp, Saccharomyces cerevisiae
aggttgctgctttggttattgataacggttctggtatgtgtaaagccggttttgccggtgacgacgctcctcgtgctgtcttcccatctatcgtcggtagaccaagacaccaaggtatcatggtcggtatgggtcaaaaagactcctacgttggtgatgaagctcaatccaagagaggtatcttgactttacgttacccaattgaacacggtattgtcaccaactgggacgatatggaaaagatctggcatcataccttctacaacgaattgagagttgccccagaagaacaccctgttcttttgactgaagctccaatgaaccctaaatcaaacagagaaaagatgactcaaattatgtttgaaactttcaacgttccagccttctacgtttccatccaagccgttttgtccttgtactcttccggtagaactactggtattgttttggattccggtgatggtgttactcacgtcgttccaatttacgctggtttctctctacctcacgccattttgagaatcgatttggccggtagagatttgactgactacttgatgaagatcttgagtgaacgtggttactctttctccaccactgctgaaagagaaattgtccgtgacatcaaggaaaaactatgttacgtcgccttggacttcgaacaagaaatgcaaaccgctgctcaatcttcttcaattgaaaaatcctacgaacttccagatggtcaagtcatcactattggtaacgaaagattcagagccccagaagctttgttccatccttctgttttgggtttggaatctgccggtattgaccaaactacttacaactccatcatgaagtgtgatgtcgatgtccgtaaggaattatacggtaacatcgttatgtccggtggtaccaccatgttcccaggtattgccgaaagaatgcaaaaggaaatcaccgctttggctccatcttccatgaaggtcaagatcattgctcctccagaaagaaagtactccgtctggattggtggttctatcttggcttctttgactaccttccaacaaatgtggatctcaaaacaagaatacgacgaaagtggtccatctatcgttcaccacaagtgtttctaa

SEQ ID NO: 195629 - DNA, 1118 bp, Saccharomyces cerevisiae; identical to SEQ ID NO: 195628

SEQ ID NO: 195630 - DNA, 1118 bp, Saccharomyces cerevisiae; identical to SEQ ID NO: 195628

SEQ ID NO: 195631 - DNA, 6540 bp, Bacillus subtilis; identical to SEQ ID NO: 195607

SEQ ID NO: 195632 - DNA, 6540 bp, Bacillus subtilis; identical to SEQ ID NO: 195607

SEQ ID NO: 195633 - DNA, 6540 bp, Bacillus subtilis; identical to SEQ ID NO: 195607

SEQ ID NO: 195634 - DNA, 1612 bp, Bacillus subtilis; identical to SEQ ID NO: 195610

SEQ ID NO: 195635 - DNA, 1612 bp, Bacillus subtilis; identical to SEQ ID NO: 195610

SEQ ID NO: 195636 - DNA, 1612 bp, Bacillus subtilis; identical to SEQ ID NO: 195610

SEQ ID NO: 195637 - DNA, 3360 bp, Bacillus subtilis; identical to SEQ ID NO: 195613
  modified_base (2982)..(2982): a, c, g, t, unknown, or other

SEQ ID NO: 195638 - DNA, 3360 bp, Bacillus subtilis; identical to SEQ ID NO: 195613
  modified_base (2982)..(2982): a, c, g, t, unknown, or other

SEQ ID NO: 195639 - DNA, 3360 bp, Bacillus subtilis; identical to SEQ ID NO: 195613
  modified_base (2982)..(2982): a, c, g, t, unknown, or other

SEQ ID NO: 195640 - DNA, 2403 bp, Bacillus subtilis; identical to SEQ ID NO: 195616

SEQ ID NO: 195641 - DNA, 2403 bp, Bacillus subtilis; identical to SEQ ID NO: 195616

SEQ ID NO: 195642 - DNA, 2403 bp, Bacillus subtilis; identical to SEQ ID NO: 195616

SEQ ID NO: 195643 - DNA, 1049 bp, Escherichia coli; identical to SEQ ID NO: 195598

SEQ ID NO: 195644 - DNA, 1049 bp, Escherichia coli; identical to SEQ ID NO: 195598

SEQ ID NO: 195645 - DNA, 1049 bp, Escherichia coli; identical to SEQ ID NO: 195598

SEQ ID NO: 195646 - DNA, 748 bp, Escherichia coli; identical to SEQ ID NO: 195601

SEQ ID NO: 195647 - DNA, 748 bp, Escherichia coli; identical to SEQ ID NO: 195601

SEQ ID NO: 195648 - DNA, 652 bp, Escherichia coli; identical to SEQ ID NO: 195603

SEQ ID NO: 195649 - DNA, 652 bp, Escherichia coli; identical to SEQ ID NO: 195603

SEQ ID NO: 195650 - DNA, 1032 bp, Bacteriophage P1; identical to SEQ ID NO: 195605

SEQ ID NO: 195651 - DNA, 1032 bp, Bacteriophage P1; identical to SEQ ID NO: 195605

SEQ ID NO: 195652 - DNA, 25 bp, Saccharomyces cerevisiae
attaagccatgcatgtctaagtata

SEQ ID NO: 195653 - DNA, 25 bp, Saccharomyces cerevisiae
attcaaatttctgccctatcaactt

SEQ ID NO: 195654 - DNA, 25 bp, Saccharomyces cerevisiae
tcaatgtcttcggactctttgatga

SEQ ID NO: 195655 - DNA, 25 bp, Saccharomyces cerevisiae
taggatagtggcctaccatggtttc

SEQ ID NO: 195656 - DNA, 25 bp, Saccharomyces cerevisiae
gactctttgatgattcataataact

SEQ ID NO: 195657 - DNA, 25 bp, Saccharomyces cerevisiae
tcttcggactctttgatgattcata

SEQ ID NO: 195658 - DNA, 25 bp, Saccharomyces cerevisiae
ttttcgaatcgcatggccttgtgct

SEQ ID NO: 195659 - DNA, 25 bp, Saccharomyces cerevisiae
aatctcgaccctttggaagagatgt

SEQ ID NO: 195660 - DNA, 25 bp, Saccharomyces cerevisiae
atttctgccctatcaactttcgatg

SEQ ID NO: 195661 - DNA, 25 bp, Saccharomyces cerevisiae
catatgcttgtctcaaagattaagc

SEQ ID NO: 195662 - DNA, 25 bp, Saccharomyces cerevisiae
aactgcgaatggctcattaaatcag

SEQ ID NO: 195663 - DNA, 25 bp, Saccharomyces cerevisiae
atacatgcttaaaatctcgaccctt

SEQ ID NO: 195664 - DNA, 25 bp, Saccharomyces cerevisiae
tcaactttcgatggtaggatagtgg

SEQ ID NO: 195665 - DNA, 25 bp, Saccharomyces cerevisiae
ataactgtggtaattctagagctaa

SEQ ID NO: 195666 - DNA, 25 bp, Saccharomyces cerevisiae
aaatcagttatcgtttatttgatag

SEQ ID NO: 195667 - DNA, 25 bp, Saccharomyces cerevisiae
cttgtctcaaagattaagccatgca

SEQ ID NO: 195668 - DNA, 25 bp, Saccharomyces cerevisiae
atggccttgtgctggcgatggttca

SEQ ID NO: 195669 - DNA, 25 bp, Saccharomyces cerevisiae
ccatgcatgtctaagtataagcaat

SEQ ID NO: 195670 - DNA, 25 bp, Saccharomyces cerevisiae
tttatacagtgaaactgcgaatggc

SEQ ID NO: 195671 - DNA, 25 bp, Saccharomyces cerevisiae
agtagtcatatgcttgtctcaaaga

SEQ ID NO: 195672 - DNA, 25 bp, Saccharomyces cerevisiae
gaatggctcattaaatcagttatcg

SEQ ID NO: 195673 - DNA, 25 bp, Saccharomyces cerevisiae
ctaccacatccaaggaaggcagcag

SEQ ID NO: 195674 - DNA, 25 bp, Saccharomyces cerevisiae
cgcggtaattccagctccaatagcg

SEQ ID NO: 195675 - DNA, 25 bp, Saccharomyces cerevisiae
gcaggcgcgcaaattacccaatcct

SEQ ID NO: 195676 - DNA, 25 bp, Saccharomyces cerevisiae
tctggtgccagcagccgcggtaatt

SEQ ID NO: 195677 - DNA, 25 bp, Saccharomyces cerevisiae
ccaaggaaggcagcaggcgcgcaaa

SEQ ID NO: 195678 - DNA, 25 bp, Saccharomyces cerevisiae
catccaaggaaggcagcaggcgcgc

SEQ ID NO: 195679 - DNA, 25 bp, Saccharomyces cerevisiae
gagggcaagtctggtgccagcagcc

SEQ ID NO: 195680 - DNA, 25 bp, Saccharomyces cerevisiae
ggtgccagcagccgcggtaattcca

SEQ ID NO: 195681 - DNA, 25 bp, Saccharomyces cerevisiae
caattggagggcaagtctggtgcca

SEQ ID NO: 195682 - DNA, 25 bp, Saccharomyces cerevisiae
aattccagctccaatagcgtatatt

SEQ ID NO: 195683 - DNA, 25 bp, Saccharomyces cerevisiae
taattcagggaggtagtgacaataa

SEQ ID NO: 195684 - DNA, 25 bp, Saccharomyces cerevisiae
gcagcaggcgcgcaaattacccaat

SEQ ID NO: 195685 - DNA, 25 bp, Saccharomyces cerevisiae
aagtctggtgccagcagccgcggta

SEQ ID NO: 195686 - DNA, 25 bp, Saccharomyces cerevisiae
ttggagggcaagtctggtgccagca

SEQ ID NO: 195687 - DNA, 25 bp, Saccharomyces cerevisiae
cggctaccacatccaaggaaggcag

SEQ ID NO: 195688 - DNA, 25 bp, Saccharomyces cerevisiae
tcctaattcagggaggtagtgacaa

SEQ ID NO: 195689 - DNA, 25 bp, Saccharomyces cerevisiae
aggaaggcagcaggcgcgcaaatta

SEQ ID NO: 195690 - DNA, 25 bp, Saccharomyces cerevisiae
agcagccgcggtaattccagctcca

SEQ ID NO: 195691 - DNA, 25 bp, Saccharomyces cerevisiae
agccgcggtaattccagctccaata

SEQ ID NO: 195692 - DNA, 25 bp, Saccharomyces cerevisiae
ggcgcgcaaattacccaatcctaat

SEQ ID NO: 195693 - DNA, 25 bp, Saccharomyces cerevisiae
atcagtattcaattgtcagaggtga

SEQ ID NO: 195694 - DNA, 25 bp, Saccharomyces cerevisiae
ctaaccttgagtccttgtggctctt

SEQ ID NO: 195695 - DNA, 25 bp, Saccharomyces cerevisiae
agtccttgtggctcttggcgaacca

SEQ ID NO: 195696 - DNA, 25 bp, Saccharomyces cerevisiae
tgtggctcttggcgaaccaggactt

SEQ ID NO: 195697 - DNA, 25 bp, Saccharomyces cerevisiae
agtattcaattgtcagaggtgaaat

SEQ ID NO: 195698 - DNA, 25 bp, Saccharomyces cerevisiae
cttaaccataaactatgccgactag

SEQ ID NO: 195699 - DNA, 25 bp, Saccharomyces cerevisiae
aactactgcgaaagcatttgccaag

SEQ ID NO: 195700 - DNA, 25 bp, Saccharomyces cerevisiae
aagactaactactgcgaaagcattt

SEQ ID NO: 195701 - DNA, 25 bp, Saccharomyces cerevisiae
ttgaagactaactactgcgaaagca

SEQ ID NO: 195702 - DNA, 25 bp, Saccharomyces cerevisiae
tggtttctaggaccatcgtaatgat

SEQ ID NO: 195703 - DNA, 25 bp, Saccharomyces cerevisiae
ccttgtggctcttggcgaaccagga

SEQ ID NO: 195704 - DNA, 25 bp, Saccharomyces cerevisiae
agcatttgccaaggacgttttcatt

SEQ ID NO: 195705 - DNA, 25 bp, Saccharomyces cerevisiae
tgccaaggacgttttcattaatcaa

SEQ ID NO: 195706 - DNA, 25 bp, Saccharomyces cerevisiae
tgcgaaagcatttgccaaggacgtt

SEQ ID NO: 195707 - DNA, 25 bp, Saccharomyces cerevisiae
atgatcagataccgtcgtagtctta

SEQ ID NO: 195708 - DNA, 25 bp, Saccharomyces cerevisiae
actatgccgactagggatcgggtgg

SEQ ID NO: 195709 - DNA, 25 bp, Saccharomyces cerevisiae
aagatgatcagataccgtcgtagtc

SEQ ID NO: 195710 - DNA, 25 bp, Saccharomyces cerevisiae
tgttggtttctaggaccatcgtaat

SEQ ID NO: 195711 - DNA, 25 bp, Saccharomyces cerevisiae
tgttcaaagcaggcgtattgctcga

SEQ ID NO: 195712 - DNA, 25 bp, Saccharomyces cerevisiae
gagtgttcaaagcaggcgtattgct

SEQ ID NO: 195713 - DNA, 25 bp, Saccharomyces cerevisiae
tttctaggaccatcgtaatgattaa

SEQ ID NO: 195714 - DNA, 25 bp, Saccharomyces cerevisiae
ggtggtgcatggccgttcttagttg

SEQ ID NO: 195715 - DNA, 25 bp, Saccharomyces cerevisiae
gcatggccgttcttagttggtggag

SEQ ID NO: 195716 - DNA, 25 bp, Saccharomyces cerevisiae
caccaggagtggagcctgcggctta

SEQ ID NO: 195717 - DNA, 25 bp, Saccharomyces cerevisiae
caccaggtccagacacaataaggat

SEQ ID NO: 195718 - DNA, 25 bp, Saccharomyces cerevisiae
ggtgctagcatttgctggttatcca

SEQ ID NO: 195719 - DNA, 25 bp, Saccharomyces cerevisiae
aatagtggtgctagcatttgctggt

SEQ ID NO: 195720 - DNA, 25 bp, Saccharomyces cerevisiae
gagtggagcctgcggcttaatttga

SEQ ID NO: 195721 - DNA, 25 bp, Saccharomyces cerevisiae
gattgagagctctttcttgattttg

SEQ ID NO: 195722 - DNA, 25 bp, Saccharomyces cerevisiae
gaaactcaccaggtccagacacaat

SEQ ID NO: 195723 - DNA, 25 bp, Saccharomyces cerevisiae
tgctggttatccacttcttagaggg

SEQ ID NO: 195724 - DNA, 25 bp, Saccharomyces cerevisiae
agcctgcggcttaatttgactcaac

SEQ ID NO: 195725 - DNA, 25 bp, Saccharomyces cerevisiae
ctactaaatagtggtgctagcattt

SEQ ID NO: 195726 - DNA, 25 bp, Saccharomyces cerevisiae
agcatttgctggttatccacttctt

SEQ ID NO: 195727 - DNA, 25 bp, Saccharomyces cerevisiae
ttagttggtggagtgatttgtctgc

SEQ ID NO: 195728 - DNA, 25 bp, Saccharomyces cerevisiae
gagctctttcttgattttgtgggtg

SEQ ID NO: 195729 - DNA, 25 bp, Saccharomyces cerevisiae
gtccagacacaataaggattgacag

SEQ ID NO: 195730 - DNA, 25 bp, Saccharomyces cerevisiae
gtgatttgtctgcttaattgcgata

SEQ ID NO: 195731 - DNA, 25 bp, Saccharomyces cerevisiae
tgtctgcttaattgcgataacgaac

SEQ ID NO: 195732 - DNA, 25 bp, Saccharomyces cerevisiae
tggtcgcaaggctgaaacttaaagg

SEQ ID NO: 195733 - DNA, 25 bp, Saccharomyces cerevisiae
ttatccacttcttagagggactatc

SEQ ID NO: 195734 - DNA, 25 bp, Saccharomyces cerevisiae
tagacgttctgggccgcacgcgcgc

SEQ ID NO: 195735 - DNA, 25 bp, Saccharomyces cerevisiae
cgcgcgctacactgacggagccagc

SEQ ID NO: 195736 - DNA, 25 bp, Saccharomyces cerevisiae
gggggcaactccatctcagagcgga

SEQ ID NO: 195737 - DNA, 25 bp, Saccharomyces cerevisiae
gccgcacgcgcgctacactgacgga

SEQ ID NO: 195738 - DNA, 25 bp, Saccharomyces cerevisiae
ctgtgatgcccttagacgttctggg

SEQ ID NO: 195739 - DNA, 25 bp, Saccharomyces cerevisiae
ttagtgaggcctcaggatctgctta

SEQ ID NO: 195740 - DNA, 25 bp, Saccharomyces cerevisiae
aatggcttagtgaggcctcaggatc

SEQ ID NO: 195741 - DNA, 25 bp, Saccharomyces cerevisiae
cgtcgctagtaccgattgaatggct

SEQ ID NO: 195742 - DNA, 25 bp, Saccharomyces cerevisiae
ctagtaagcgcaagtcatcagcttg

SEQ ID NO: 195743 - DNA, 25 bp, Saccharomyces cerevisiae
tgacggagccagcgagtctaacctt

SEQ ID NO: 195744 - DNA, 25 bp, Saccharomyces cerevisiae
ttctgggccgcacgcgcgctacact

SEQ ID NO: 195745 - DNA, 25 bp, Saccharomyces cerevisiae
aactccatctcagagcggagaattt

SEQ ID NO: 195746 - DNA, 25 bp, Saccharomyces cerevisiae
aatcttgtgaaactccgtcgtgctg

SEQ ID NO: 195747 - DNA, 25 bp, Saccharomyces cerevisiae
cagcttgcgttgattacgtccctgc

SEQ ID NO: 195748 - DNA, 25 bp, Saccharomyces cerevisiae
gaattcctagtaagcgcaagtcatc

SEQ ID NO: 195749 - DNA, 25 bp, Saccharomyces cerevisiae
aggcctcaggatctgcttagagaag

SEQ ID NO: 195750 - DNA, 25 bp, Saccharomyces cerevisiae
cgattgaatggcttagtgaggcctc

SEQ ID NO: 195751 - DNA, 25 bp, Saccharomyces cerevisiae
tggacaaacttggtcatttagagga

SEQ ID NO: 195752 - DNA, 25 bp, Saccharomyces cerevisiae
ttgtaattattgctcttcaacgagg

SEQ ID NO: 195753 - DNA, 25 bp, Saccharomyces cerevisiae
agtcatcagcttgcgttgattacgt

SEQ ID NO: 195754 - DNA, 25 bp, Saccharomyces cerevisiae
atcaggtaggagtacccgctgaact

SEQ ID NO: 195755 - DNA, 25 bp, Saccharomyces cerevisiae
gtgccttcgaagagtcgagttgttt

SEQ ID NO: 195756 - DNA, 25 bp, Saccharomyces cerevisiae
aagagtcgagttgtttgggaatgca

SEQ ID NO: 195757 - DNA, 25 bp, Saccharomyces cerevisiae
ttgtctatgttccttggaacaggac

SEQ ID NO: 195758 - DNA, 25 bp, Saccharomyces cerevisiae
ggtgcccgagttgtaatttggagag

SEQ ID NO: 195759 - DNA, 25 bp, Saccharomyces cerevisiae
aacggcgagtgaagcggcaaaagct

SEQ ID NO: 195760 - DNA, 25 bp, Saccharomyces cerevisiae
attggcgagagaccgatagcgaaca

SEQ ID NO: 195761 - DNA, 25 bp, Saccharomyces cerevisiae
taggagtacccgctgaacttaagca

SEQ ID NO: 195762 - DNA, 25 bp, Saccharomyces cerevisiae
cgagttgtttgggaatgcagctcta

SEQ ID NO: 195763 - DNA, 25 bp, Saccharomyces cerevisiae
agctcaaatttgaaatctggtacct

SEQ ID NO: 195764 - DNA, 25 bp, Saccharomyces cerevisiae
ctgaacttaagcatatcaataagcg

SEQ ID NO: 195765 - DNA, 25 bp, Saccharomyces cerevisiae
acaggacgtcatagagggtgagaat

SEQ ID NO: 195766 - DNA, 25 bp, Saccharomyces cerevisiae
cttggaacaggacgtcatagagggt

SEQ ID NO: 195767 - DNA, 25 bp, Saccharomyces cerevisiae
agcatatcaataagcggaggaaaag

SEQ ID NO: 195768 - DNA, 25 bp, Saccharomyces cerevisiae
aaagtgccttcgaagagtcgagttg

SEQ ID NO: 195769 - DNA, 25 bp, Saccharomyces cerevisiae
gtaaattccatctaaagctaaatat

SEQ ID NO: 195770 - DNA, 25 bp, Saccharomyces cerevisiae
tacccgctgaacttaagcatatcaa

SEQ ID NO: 195771 - DNA, 25 bp, Saccharomyces cerevisiae
gattgccttagtaacggcgagtgaa

SEQ ID NO: 195772 - DNA, 25 bp, Saccharomyces cerevisiae
atattggcgagagaccgatagcgaa

SEQ ID NO: 195773 - DNA, 25 bp, Saccharomyces cerevisiae
tctggtaccttcggtgcccgagttg

SEQ ID NO: 195774 - DNA, 25 bp, Saccharomyces cerevisiae
tgacctcaaatcaggtaggagtacc

SEQ ID NO: 195775 - DNA, 25 bp, Saccharomyces cerevisiae
agcggttctgacgtgcaaatcgatc

SEQ ID NO: 195776 - DNA, 25 bp, Saccharomyces cerevisiae
accatctagtagctggttcctgccg

SEQ ID NO: 195777 - DNA, 25 bp, Saccharomyces cerevisiae
tagtagctggttcctgccgaagttt

SEQ ID NO: 195778 - DNA, 25 bp, Saccharomyces cerevisiae
ctatgcctgaatagggtgaagccag

SEQ ID NO: 195779 - DNA, 25 bp, Saccharomyces cerevisiae
cctgccgaagtttccctcaggatag

SEQ ID NO: 195780 - DNA, 25 bp, Saccharomyces cerevisiae
ctgatgtcttcggatggatttgagt

SEQ ID NO: 195781 - DNA, 25 bp, Saccharomyces cerevisiae
gctcgtagcggttctgacgtgcaaa

SEQ ID NO: 195782 - DNA, 25 bp, Saccharomyces cerevisiae
gctcgtatcagttttatgaggtaaa

SEQ ID NO: 195783 - DNA, 25 bp, Saccharomyces cerevisiae
aagactaatcgaaccatctagtagc

SEQ ID NO: 195784 - DNA, 25 bp, Saccharomyces cerevisiae
tccctcaggatagcagaagctcgta

SEQ ID NO: 195785 - DNA, 25 bp, Saccharomyces cerevisiae
gaagtttccctcaggatagcagaag

SEQ ID NO: 195786 - DNA, 25 bp, Saccharomyces cerevisiae
aatcgaaccatctagtagctggttc

SEQ ID NO: 195787 - DNA, 25 bp, Saccharomyces cerevisiae
taagagcatagctgttgggacccga

SEQ ID NO: 195788 - DNA, 25 bp, Saccharomyces cerevisiae
tgaccttgacctattctcaaacttt

SEQ ID NO: 195789 - DNA, 25 bp, Saccharomyces cerevisiae
gcagaagctcgtatcagttttatga

SEQ ID NO: 195790 - DNA, 25 bp, Saccharomyces cerevisiae
tcttcggatggatttgagtaagagc

SEQ ID NO: 195791 - DNA, 25 bp, Saccharomyces cerevisiae
ccgatcctgatgtcttcggatggat

SEQ ID NO: 195792 - DNA, 25 bp, Saccharomyces cerevisiae
gtgcaaatcgatcgtcgaatttggg

SEQ ID NO: 195793 - DNA, 25 bp, Saccharomyces cerevisiae
aatcgaccgatcctgatgtcttcgg

SEQ ID NO: 195794 - DNA, 25 bp, Saccharomyces cerevisiae
atcgatcgtcgaatttgggtatagg

SEQ ID NO: 195795 - DNA, 25 bp, Saccharomyces cerevisiae
cgatcctaagagatggggaagctcc

SEQ ID NO: 195796 - DNA, 25 bp, Saccharomyces cerevisiae
ggatatggattcttcacggtaacgt

SEQ ID NO: 195797 - DNA, 25 bp, Saccharomyces cerevisiae
taacagcttatcaccccggaattgg

SEQ ID NO: 195798 - DNA, 25 bp, Saccharomyces cerevisiae
aaaggcctgattttatgcaggccac

SEQ ID NO: 195799 - DNA, 25 bp, Saccharomyces cerevisiae
gttaagattccggaacctggatatg

SEQ ID NO: 195800 - DNA, 25 bp, Saccharomyces cerevisiae
ctgattttatgcaggccaccatcga

SEQ ID NO: 195801 - DNA, 25 bp, Saccharomyces cerevisiae
gtttatccggagatggggtcttatg

SEQ ID NO: 195802 - DNA, 25 bp, Saccharomyces cerevisiae
gtaacgtaactgaatgtggagacgt

SEQ ID NO: 195803 - DNA, 25 bp, Saccharomyces cerevisiae
tcttcttaacagcttatcaccccgg

SEQ ID NO: 195804 - DNA, 25 bp, Saccharomyces cerevisiae
gttagtcgatcctaagagatgggga

SEQ ID NO: 195805 - DNA, 25 bp, Saccharomyces cerevisiae
atcttttcttcttaacagcttatca

SEQ ID NO: 195806 - DNA, 25 bp, Saccharomyces cerevisiae
cctttgctggctccggtgcgcttgt

SEQ ID NO: 195807 - DNA, 25 bp, Saccharomyces cerevisiae
ccggtgcgcttgtgacggcccgtga

SEQ ID NO: 195808 - DNA, 25 bp, Saccharomyces cerevisiae
aatgtggagacgtcggcgcgagccc

SEQ ID NO: 195809 - DNA, 25 bp, Saccharomyces cerevisiae
ttatgcaggccaccatcgaaaggga

SEQ ID NO: 195810 - DNA, 25 bp, Saccharomyces cerevisiae
tgacggcccgtgaaaatccacagga

SEQ ID NO: 195811 - DNA, 25 bp, Saccharomyces cerevisiae
attccggaacctggatatggattct

SEQ ID NO: 195812 - DNA, 25 bp, Saccharomyces cerevisiae
cgtttcaaaggcctgattttatgca

SEQ ID NO: 195813 - DNA, 25 bp, Saccharomyces cerevisiae
cgtgaaaatccacaggaaggaatag

SEQ ID NO: 195814 - DNA, 25 bp, Saccharomyces cerevisiae
ctggctccggtgcgcttgtgacggc

SEQ ID NO: 195815 - DNA, 25 bp, Saccharomyces cerevisiae
tcttatggctggaagaggccagcac

SEQ ID NO: 195816 - DNA, 25 bp, Saccharomyces cerevisiae
tctttacttattcaatgaagcggag

SEQ ID NO: 195817 - DNA, 25 bp, Saccharomyces cerevisiae
caatgaagcggagctggaattcatt

SEQ ID NO: 195818 - DNA, 25 bp, Saccharomyces cerevisiae
tggcagaatcagcggggaaagaaga

SEQ ID NO: 195819 - DNA, 25 bp, Saccharomyces cerevisiae
ctagtttgacattgtgaagagacat

SEQ ID NO: 195820 - DNA, 25 bp, Saccharomyces cerevisiae
ttgactctagtttgacattgtgaag

SEQ ID NO: 195821 - DNA, 25 bp, Saccharomyces cerevisiae
taactatgactctcttaaggtagcc

SEQ ID NO: 195822 - DNA, 25 bp, Saccharomyces cerevisiae
cttattcaatgaagcggagctggaa

SEQ ID NO: 195823 - DNA, 25 bp, Saccharomyces cerevisiae
catctaattagtgacgcgcatgaat

SEQ ID NO: 195824 - DNA, 25 bp, Saccharomyces cerevisiae
cttcggcgccagtgaaataccacta

SEQ ID NO: 195825 - DNA, 25 bp, Saccharomyces cerevisiae
attagtgacgcgcatgaatggatta

SEQ ID NO: 195826 - DNA, 25 bp, Saccharomyces cerevisiae
tgggagcttcggcgccagtgaaata

SEQ ID NO: 195827 - DNA, 25 bp, Saccharomyces cerevisiae
actgtccctatctactatctagcga

SEQ ID NO: 195828 - DNA, 25 bp, Saccharomyces cerevisiae
ttgagcttgactctagtttgacatt

SEQ ID NO: 195829 - DNA, 25 bp, Saccharomyces cerevisiae
accctgttgagcttgactctagttt

SEQ ID NO: 195830 - DNA, 25 bp, Saccharomyces cerevisiae
agggaacgggcttggcagaatcagc

SEQ ID NO: 195831 - DNA, 25 bp, Saccharomyces cerevisiae
cctatctactatctagcgaaaccac

SEQ ID NO: 195832 - DNA, 25 bp, Saccharomyces cerevisiae
cctcgtcatctaattagtgacgcgc

SEQ ID NO: 195833 - DNA, 25 bp, Saccharomyces cerevisiae
tgactctcttaaggtagccaaatgc

SEQ ID NO: 195834 - DNA, 25 bp, Saccharomyces cerevisiae
tactatctagcgaaaccacagccaa

SEQ ID NO: 195835 - DNA, 25 bp, Saccharomyces cerevisiae
ggtagccaaatgcctcgtcatctaa

SEQ ID NO: 195836 - DNA, 25 bp, Saccharomyces cerevisiae
gtctgatcaggcattgccgcgaagc

SEQ ID NO: 195837 - DNA, 25 bp, Saccharomyces cerevisiae
cgcggtgatttctttgctccacaca

SEQ ID NO: 195838 - DNA, 25 bp, Saccharomyces cerevisiae
aggccttgggtgcttgctggcgaat

SEQ ID NO: 195839 - DNA, 25 bp, Saccharomyces cerevisiae
tccatgctagaacgcggtgatttct

SEQ ID NO: 195840 - DNA, 25 bp, Saccharomyces cerevisiae
attgccgcgaagctaccatccgctg

SEQ ID NO: 195841 - DNA, 25 bp, Saccharomyces cerevisiae
gtccttgtggcgtcgctgaaccata

SEQ ID NO: 195842 - DNA, 25 bp, Saccharomyces cerevisiae
tgctggcgaattgcaatgtcatttt

SEQ ID NO: 195843 - DNA, 25 bp, Saccharomyces cerevisiae
ggattatggctgaacgcctctaagt

SEQ ID NO: 195844 - DNA, 25 bp, Saccharomyces cerevisiae
tcagaatccatgctagaacgcggtg

SEQ ID NO: 195845 - DNA, 25 bp, Saccharomyces cerevisiae
aacgcctctaagtcagaatccatgc

SEQ ID NO: 195846 - DNA, 25 bp, Saccharomyces cerevisiae
agcaggctagcaacggtgcacttgg

SEQ ID NO: 195847 - DNA, 25 bp, Saccharomyces cerevisiae
gcgaagctaccatccgctggattat

SEQ ID NO: 195848 - DNA, 25 bp, Saccharomyces cerevisiae
tttgctccacacaatatagatggat

SEQ ID NO: 195849 - DNA, 25 bp, Saccharomyces cerevisiae
taaggcgtccttgtggcgtcgctga

SEQ ID NO: 195850 - DNA, 25 bp, Saccharomyces cerevisiae
taattggtttttgcggctgtctgat

SEQ ID NO: 195851 - DNA, 25 bp, Saccharomyces cerevisiae
tgggtgcttgctggcgaattgcaat

SEQ ID NO: 195852 - DNA, 25 bp, Saccharomyces cerevisiae
cttgctggcgaattgcaatgtcatt

SEQ ID NO: 195853 - DNA, 25 bp, Saccharomyces cerevisiae
tggctgaacgcctctaagtcagaat

SEQ ID NO: 195854 - DNA, 25 bp, Saccharomyces cerevisiae
tcaggcattgccgcgaagctaccat

SEQ ID NO: 195855 - DNA, 25 bp, Saccharomyces cerevisiae
tcgctgaaccatagcaggctagcaa

SEQ ID NO: 195856 - DNA, 25 bp, Saccharomyces cerevisiae
gtggcgtcgctgaaccatagcaggc

SEQ ID NO: 195857 - DNA, 25 bp, Escherichia coli
gggctaaatccgcagcaaactgccg

SEQ ID NO: 195858 - DNA, 25 bp, Escherichia coli
cgcagcaaactgccgtgctggcagg

SEQ ID NO: 195859 - DNA, 25 bp, Escherichia coli
acagcaacgtcttgaacaggcgctg

SEQ ID NO: 195860 - DNA, 25 bp, Escherichia coli
cgtcttgaacaggcgctgatgaccc

SEQ ID NO: 195861 - DNA, 25 bp, Escherichia coli
ggtcgcgcggatcatgatgccaacc

SEQ ID NO: 195862 - DNA, 25 bp, Escherichia coli
acaggcgctgatgaccccggacacc

SEQ ID NO: 195863 - DNA, 25 bp, Escherichia coli
ggatcatgatgccaacctcttacgt

SEQ ID NO: 195864 - DNA, 25 bp, Escherichia coli
atattacaacgcggcagcattatga

SEQ ID NO: 195865 - DNA, 25 bp, Escherichia coli
tgccaacctcttacgtgcgcctttc

SEQ ID NO: 195866 - DNA, 25 bp, Escherichia coli
gcgcctttctgccggacgcgagcag

SEQ ID NO: 195867 - DNA, 25 bp, Escherichia coli
gccggacgcgagcagatgaacgaac

SEQ ID NO: 195868 - DNA, 25 bp, Escherichia coli
cgagcagatgaacgaacagactcag

SEQ ID NO: 195869 - DNA, 25 bp, Escherichia coli
gatgaacgaacagactcaggcgatg

SEQ ID NO: 195870 - DNA, 25 bp, Escherichia coli
aacagactcaggcgatgtgctttat

SEQ ID NO: 195871 - DNA, 25 bp, Escherichia coli
tcaggcgatgtgctttatggcaggc

SEQ ID NO: 195872 - DNA, 25 bp, Escherichia coli
gtgctttatggcaggcgcaaactcg

SEQ ID NO: 195873 - DNA, 25 bp, Escherichia coli
atggcaggcgcaaactcgattttct

SEQ ID NO: 195874 - DNA, 25 bp, Escherichia coli
tacggttgcaaactgctgaccacgc

SEQ ID NO: 195875 - DNA, 25 bp, Escherichia coli
caaactgctgaccacgccgaatccg

SEQ ID NO: 195876 - DNA, 25 bp, Escherichia coli
gacctgcaactgttccgcaaactgg

SEQ ID NO: 195877 - DNA, 25 bp, Escherichia coli
gacattgtcgcaagtcacagaatta

SEQ ID NO: 195878 - DNA, 25 bp, Escherichia coli
caaagcgaaagcggcaggatcgacg

SEQ ID NO: 195879 - DNA, 25 bp, Escherichia coli
attgtcgcaagtcacagaattattt

SEQ ID NO: 195880 - DNA, 25 bp, Escherichia coli
ggcaggatcgacgcgcttctgtatg

SEQ ID NO: 195881 - DNA, 25 bp, Escherichia coli
gttgctggatctgctgtttgaagcg

SEQ ID NO: 195882 - DNA, 25 bp, Escherichia coli
ggatctgctgtttgaagcgcagcag

SEQ ID NO: 195883 - DNA, 25 bp, Escherichia coli
gcgcagcaggtgcatcgccagcatt

SEQ ID NO: 195884 - DNA, 25 bp, Escherichia coli
gcaggtgcatcgccagcatttcgat

SEQ ID NO: 195885 - DNA, 25 bp, Escherichia coli
gcatcgccagcatttcgatcctcgt

SEQ ID NO: 195886 - DNA, 25 bp, Escherichia coli
gcatttcgatcctcgtcaggtgcag

SEQ ID NO: 195887 - DNA, 25 bp, Escherichia coli
cgatcctcgtcaggtgcaggtcagc

SEQ ID NO: 195888 - DNA, 25 bp, Escherichia coli
tcgtcaggtgcaggtcagcacgttg

SEQ ID NO: 195889 - DNA, 25 bp, Escherichia coli
gcaggtcagcacgttgctgtcgatt

SEQ ID NO: 195890 - DNA, 25 bp, Escherichia coli
cagcacgttgctgtcgattaagacc

SEQ ID NO: 195891 - DNA, 25 bp, Escherichia coli
gctgtcgattaagaccggagcttgt

SEQ ID NO: 195892 - DNA, 25 bp, Escherichia coli
agcttgtccggaagattgcaaatac

SEQ ID NO: 195893 - DNA, 25 bp, Escherichia coli
agattgcaaatactgcccgcaaacg

SEQ ID NO: 195894 - DNA, 25 bp, Escherichia coli
caaatactgcccgcaaacgtcgcgc

SEQ ID NO: 195895 - DNA, 25 bp, Escherichia coli
tgaacaggtgctggagtcggcgcgc

SEQ ID NO: 195896 - DNA, 25 bp, Escherichia coli
ggagtcggcgcgcaaagcgaaagcg

SEQ ID NO: 195897 - DNA, 25 bp, Escherichia coli
tggtgaaggtgaaaggcacgccgct

SEQ ID NO: 195898 - DNA, 25 bp, Escherichia coli
acgccgcttgccgataacgatgatg

SEQ ID NO: 195899 - DNA, 25 bp, Escherichia coli
gccggagttttacggcaatatcatc

SEQ ID NO: 195900 - DNA, 25 bp, Escherichia coli
ttgccgataacgatgatgtcgatgc

SEQ ID NO: 195901 - DNA, 25 bp, Escherichia coli
gttttacggcaatatcatcaccaca

SEQ ID NO: 195902 - DNA, 25 bp, Escherichia coli
acgatgatgtcgatgcctttgattt

SEQ ID NO: 195903 - DNA, 25 bp, Escherichia coli
gcaatatcatcaccacacgcactta

SEQ ID NO: 195904 - DNA, 25 bp, Escherichia coli
atcaccacacgcacttatcaggaac

SEQ ID NO: 195905 - DNA, 25 bp, Escherichia coli
acgcacttatcaggaacgcctcgat

SEQ ID NO: 195906 - DNA, 25 bp, Escherichia coli
atacgctggaaaaagtgcgcgatgc

SEQ ID NO: 195907 - DNA, 25 bp, Escherichia coli
ggaaaaagtgcgcgatgccgggatc

SEQ ID NO: 195908 - DNA, 25 bp, Escherichia coli
agtgcgcgatgccgggatcaaagtc

SEQ ID NO: 195909 - DNA, 25 bp, Escherichia coli
gccgggatcaaagtctgttctggcg

SEQ ID NO: 195910 - DNA, 25 bp, Escherichia coli
aagtctgttctggcggcattgtggg

SEQ ID NO: 195911 - DNA, 25 bp, Escherichia coli
aagatcgcgccggattattgctgca

SEQ ID NO: 195912 - DNA, 25 bp, Escherichia coli
gccggattattgctgcaactggcaa

SEQ ID NO: 195913 - DNA, 25 bp, Escherichia coli
attgctgcaactggcaaacctgccg

SEQ ID NO: 195914 - DNA, 25 bp, Escherichia coli
cgccggaaagcgtgccaatcaacat

SEQ ID NO: 195915 - DNA, 25 bp, Escherichia coli
aagcgtgccaatcaacatgctggtg

SEQ ID NO: 195916 - DNA, 25 bp, Escherichia coli
caatcaacatgctggtgaaggtgaa

SEQ ID NO: 195917 - DNA, 25 bp, Escherichia coli
atgatgcgctcagtgccatgcgttc

SEQ ID NO: 195918 - DNA, 25 bp, Escherichia coli
ctcagtgccatgcgttcgctgaaag

SEQ ID NO: 195919 - DNA, 25 bp, Escherichia coli
catgcgttcgctgaaaggcatcggt

SEQ ID NO: 195920 - DNA, 25 bp, Escherichia coli
ctgaaaggcatcggtgccacgcatc

SEQ ID NO: 195921 - DNA, 25 bp, Escherichia coli
ggcatcggtgccacgcatcttcatg

SEQ ID NO: 195922 - DNA, 25 bp, Escherichia coli
tgccacgcatcttcatgaagggcgc

SEQ ID NO: 195923 - DNA, 25 bp, Escherichia coli
atcttcatgaagggcgcgacccgcg

SEQ ID NO: 195924 - DNA, 25 bp, Escherichia coli
attaacgcgttcgcagttgcagcga

SEQ ID NO: 195925 - DNA, 25 bp, Escherichia coli
tacccgaacgtcatcaggcgtggca

SEQ ID NO: 195926 - DNA, 25 bp, Escherichia coli
gcgttcgcagttgcagcgattgcaa

SEQ ID NO: 195927 - DNA, 25 bp, Escherichia coli
ggtggacgagcgtccgcatgctaat

SEQ ID NO: 195928 - DNA, 25 bp, Escherichia coli
agttgcagcgattgcaactggcctg

SEQ ID NO: 195929 - DNA, 25 bp, Escherichia coli
cgtccgcatgctaatcgctttttac

SEQ ID NO: 195930 - DNA, 25 bp, Escherichia coli
tttaccgccagatgaaatcgaacag

SEQ ID NO: 195931 - DNA, 25 bp, Escherichia coli
gatgaaatcgaacagtcgctgaacg

SEQ ID NO: 195932 - DNA, 25 bp, Escherichia coli
aacagtcgctgaacggcgtgcatta

SEQ ID NO: 195933 - DNA, 25 bp, Escherichia coli
acatcatattcagcccatcacgctg

SEQ ID NO: 195934 - DNA, 25 bp, Escherichia coli
ttcagcccatcacgctgtggtttga

SEQ ID NO: 195935 - DNA, 25 bp, Escherichia coli
atcacgctgtggtttgatgatgcgc

SEQ ID NO: 195936 - DNA, 25 bp, Escherichia coli
ggtttgatgatgcgctcagtgccat

SEQ ID NO: 195937 - DNA, 25 bp, Escherichia coli
tgttcaggcacgccagaaggatgcc

SEQ ID NO: 195938 - DNA, 25 bp, Escherichia coli
agaaggatgccgcagaccattatct

SEQ ID NO: 195939 - DNA, 25 bp, Escherichia coli
gccgcagaccattatctggcgggag

SEQ ID NO: 195940 - DNA, 25 bp, Escherichia coli
cgttagcgactgcgacgttcgatct

SEQ ID NO: 195941 - DNA, 25 bp, Escherichia coli
cgacgttcgatcttgcatggagcaa

SEQ ID NO: 195942 - DNA, 25 bp, Escherichia coli
gatcttgcatggagcaatctcgcag

SEQ ID NO: 195943 - DNA, 25 bp, Escherichia coli
cagcggcatttggtcgggcagccgc

SEQ ID NO: 195944 - DNA, 25 bp, Escherichia coli
caatctcgcagtgcagtggtgcggt

SEQ ID NO: 195945 - DNA, 25 bp, Escherichia coli
gtcgggcagccgcacactatgagca

SEQ ID NO: 195946 - DNA, 25 bp, Escherichia coli
atttatccacggcactccgcgagct

SEQ ID NO: 195947 - DNA, 25 bp, Escherichia coli
cgcacactatgagcaacatgcagat

SEQ ID NO: 195948 - DNA, 25 bp, Escherichia coli
aacatgcagatctacagcgccagag

SEQ ID NO: 195949 - DNA, 25 bp, Escherichia coli
tacagcgccagagtgctgacgcctt

SEQ ID NO: 195950 - DNA, 25 bp, Escherichia coli
gagtgctgacgccttactggcaatg

SEQ ID NO: 195951 - DNA, 25 bp, Escherichia coli
tactggcaatgcttccacagcgtaa

SEQ ID NO: 195952 - DNA, 25 bp, Escherichia coli
gggttgtggacctggctggatgagc

SEQ ID NO: 195953 - DNA, 25 bp, Escherichia coli
tgagccgccactggcgggaacgtca

SEQ ID NO: 195954 - DNA, 25 bp, Escherichia coli
gcgcaggtgacggccttagatctct

SEQ ID NO: 195955 - DNA, 25 bp, Escherichia coli
gccttagatctctcgccgccaatgc

SEQ ID NO: 195956 - DNA, 25 bp, Escherichia coli
gccgccaatgcttgttcaggcacgc

SEQ ID NO: 195957 - DNA, 25 bp, Escherichia coli
cgtcacgctgaatatatgaccacgc

SEQ ID NO: 195958 - DNA, 25 bp, Escherichia coli
acgctgaatatatgaccacgctcac

SEQ ID NO: 195959 - DNA, 25 bp, Escherichia coli
ctgaatatatgaccacgctcacccg

SEQ ID NO: 195960 - DNA, 25 bp, Escherichia coli
gaatatatgaccacgctcacccgca

SEQ ID NO: 195961 - DNA, 25 bp, Escherichia coli
cccgcatgattcccgcgccgctgct

SEQ ID NO: 195962 - DNA, 25 bp, Escherichia coli
catgattcccgcgccgctgctggga

SEQ ID NO: 195963 - DNA, 25 bp, Escherichia coli
gattcccgcgccgctgctgggagag

SEQ ID NO: 195964 - DNA, 25 bp, Escherichia coli
cgcgccgctgctgggagagatcccc

SEQ ID NO: 195965 - DNA, 25 bp, Escherichia coli
ccgctgctgggagagatcccctggc

SEQ ID NO: 195966 - DNA, 25 bp, Escherichia coli
ctgctgggagagatcccctggcttg

SEQ ID NO: 195967 - DNA, 25 bp, Escherichia coli
gctgggagagatcccctggcttgca

SEQ ID NO: 195968 - DNA, 25 bp, Escherichia coli
ggagagatcccctggcttgcagaaa

SEQ ID NO: 195969 - DNA, 25 bp, Escherichia coli
ggtgctggcggctggtttacgccgc

SEQ ID NO: 195970 - DNA, 25 bp, Escherichia coli
gagatcccctggcttgcagaaaatc

SEQ ID NO: 195971 - DNA, 25 bp, Escherichia coli
ctttctgacactttcacttttgcag

SEQ ID NO: 195972 - DNA, 25 bp, Escherichia coli
atcccctggcttgcagaaaatccag

SEQ ID NO: 195973 - DNA, 25 bp, Escherichia coli
tgacactttcacttttgcagattgg

SEQ ID NO: 195974 - DNA, 25 bp, Escherichia coli
tttgcagattgggtaacacaggaac

SEQ ID NO: 195975 - DNA, 25 bp, Escherichia coli
gaaaacgtcacgctgaatatatgac

SEQ ID NO: 195976 - DNA, 25 bp, Escherichia coli
aaacgtcacgctgaatatatgacca

SEQ ID NO: 195977 - DNA, 25 bp, Escherichia coli
gcgctggcgttacagcgcaacagca

SEQ ID NO: 195978 - DNA, 25 bp, Escherichia coli
cgttacagcgcaacagcagcctgca

SEQ ID NO: 195979 - DNA, 25 bp, Escherichia coli
agcgcaacagcagcctgcagctgga

SEQ ID NO: 195980 - DNA, 25 bp, Escherichia coli
cagcagcctgcagctggattacgca

SEQ ID NO: 195981 - DNA, 25 bp, Escherichia coli
ctgcagctggattacgcaacagtaa

SEQ ID NO: 195982 - DNA, 25 bp, Escherichia coli
catcagcgcgcaagagggcagaccg

SEQ ID NO: 195983 - DNA, 25 bp, Escherichia coli
cgcaagagggcagaccgatagaatc

SEQ ID NO: 195984 - DNA, 25 bp, Escherichia coli
gggcagaccgatagaatcattggta

SEQ ID NO: 195985 - DNA, 25 bp, Escherichia coli
gaccgatagaatcattggtaatgag

SEQ ID NO: 195986 - DNA, 25 bp, Escherichia coli
agaatcattggtaatgagcgccgga

SEQ ID NO: 195987 - DNA, 25 bp, Escherichia coli
gggaaaactgtcgccagttgtgcac

SEQ ID NO: 195988 - DNA, 25 bp, Escherichia coli
ttggtaatgagcgccggattacgcg

SEQ ID NO: 195989 - DNA, 25 bp, Escherichia coli
cgccagttgtgcacttttacaagcc

SEQ ID NO: 195990 - DNA, 25 bp, Escherichia coli
atgagcgccggattacgcgcgcttg

SEQ ID NO: 195991 - DNA, 25 bp, Escherichia coli
cacttttacaagccgcaaaggcagc

SEQ ID NO: 195992 - DNA, 25 bp, Escherichia coli
caagccgcaaaggcagcaggctacc

SEQ ID NO: 195993 - DNA, 25 bp, Escherichia coli
gcaaaggcagcaggctaccggacgg

SEQ ID NO: 195994 - DNA, 25 bp, Escherichia coli
aggtttacgcaatagcgacgcgctg

SEQ ID NO: 195995 - DNA, 25 bp, Escherichia coli
cgcaatagcgacgcgctggcgttac

SEQ ID NO: 195996 - DNA, 25 bp, Escherichia coli
gcgacgcgctggcgttacagcgcaa

SEQ ID NO: 195997 - DNA, 25 bp, Bacteriophage P1
tggtcgagcgatggatttccgtctc

SEQ ID NO: 195998 - DNA, 25 bp, Bacteriophage P1
atggatttccgtctctggtgtagct

SEQ ID NO: 195999 - DNA, 25 bp, Bacteriophage P1
gtctctggtgtagctgatgatccga

SEQ ID NO: 196000 - DNA, 25 bp, Bacteriophage P1
tgtagctgatgatccgaataactac

SEQ ID NO: 196001 - DNA, 25 bp, Bacteriophage P1
accagccagctatcaactcgcgccc

SEQ ID NO: 196002 - DNA, 25 bp, Bacteriophage P1
gcaactcatcgattgatttacggcg

SEQ ID NO: 196003 - DNA, 25 bp, Bacteriophage P1
gattgatttacggcgctaaggatga

SEQ ID NO: 196004 - DNA, 25 bp, Bacteriophage P1
taaggatgactctggtcagagatac

SEQ ID NO: 196005 - DNA, 25 bp, Bacteriophage P1
tggtcagagatacctggcctggtct

SEQ ID NO: 196006 - DNA, 25 bp, Bacteriophage P1
ctggtctggacacagtgcccgtgtc

SEQ ID NO: 196007 - DNA, 25 bp, Bacteriophage P1
gtgcccgtgtcggagccgcgcgaga

SEQ ID NO: 196008 - DNA, 25 bp, Bacteriophage P1
cgagatatggcccgcgctggagttt

SEQ ID NO: 196009 - DNA, 25 bp, Bacteriophage P1
ggagtttcaataccggagatcatgc

SEQ ID NO: 196010 - DNA, 25 bp, Bacteriophage P1
ggagatcatgcaagctggtggctgg

SEQ ID NO: 196011 - DNA, 25 bp, Bacteriophage P1
ctggtggctggaccaatgtaaatat

SEQ ID NO: 196012 - DNA, 25 bp, Bacteriophage P1
ccaatgtaaatattgtcatgaacta

SEQ ID NO: 196013 - DNA, 25 bp, Bacteriophage P1
cgctggttagcaccgcaggtgtaga

SEQ ID NO: 196014 - DNA, 25 bp, Bacteriophage P1
ttgtcatgaactatatccgtaacct

SEQ ID NO: 196015 - DNA, 25 bp, Bacteriophage P1
caccgcaggtgtagagaaggcactt

SEQ ID NO: 196016 - DNA, 25 bp, Bacteriophage P1
tagtgaaacaggggcaatggtgcgc

SEQ ID NO: 196017 - DNA, 25 bp, Bacteriophage P1
gacatgttcagggatcgccaggcgt

SEQ ID NO: 196018 - DNA, 25 bp, Bacteriophage P1
gccaggcgttttctgagcatacctg

SEQ ID NO: 196019 - DNA, 25 bp, Bacteriophage P1
gcggcatggtgcaagttgaataacc

SEQ ID NO: 196020 - DNA, 25 bp, Bacteriophage P1
gaagatgttcgcgattatcttctat

SEQ ID NO: 196021 - DNA, 25 bp, Bacteriophage P1
tctatatcttcaggcgcgcggtctg

SEQ ID NO: 196022 - DNA, 25 bp, Bacteriophage P1
gcaacatttgggccagctaaacatg

SEQ ID NO: 196023 - DNA, 25 bp, Bacteriophage P1
ccagctaaacatgcttcatcgtcgg

SEQ ID NO: 196024 - DNA, 25 bp, Bacteriophage P1
ccgggctgccacgaccaagtgacag

SEQ ID NO: 196025 - DNA, 25 bp, Bacteriophage P1
gaccaagtgacagcaatgctgtttc

SEQ ID NO: 196026 - DNA, 25 bp, Bacteriophage P1
aatgctgtttcactggttatgcggc

SEQ ID NO: 196027 - DNA, 25 bp, Bacteriophage P1
atgccggtgaacgtgcaaaacaggc

SEQ ID NO: 196028 - DNA, 25 bp, Bacteriophage P1
acgtgcaaaacaggctctagcgttc

SEQ ID NO: 196029 - DNA, 25 bp, Bacteriophage P1
ctctagcgttcgaacgcactgattt

SEQ ID NO: 196030 - DNA, 25 bp, Bacteriophage P1
tcgttcactcatggaaaatagcgat

SEQ ID NO: 196031 - DNA, 25 bp, Bacteriophage P1
atttgcctgcattaccggtcgatgc

SEQ ID NO: 196032 - DNA, 25 bp, Bacteriophage P1
atggaaaatagcgatcgctgccagg

SEQ ID NO: 196033 - DNA, 25 bp, Bacteriophage P1
taccggtcgatgcaacgagtgatga

SEQ ID NO: 196034 - DNA, 25 bp, Bacteriophage P1
tcagggttaaagatatctcacgtac

SEQ ID NO: 196035 - DNA, 25 bp, Bacteriophage P1
gagtgatgaggttcgcaagaacctg

SEQ ID NO: 196036 - DNA, 25 bp, Bacteriophage P1
gcaagaacctgatggacatgttcag

SEQ ID NO: 196037 - DNA, 25 bp, Bacillus subtilis
aggatcgccatccggatcacggcaa

SEQ ID NO: 196038 - DNA, 25 bp, Bacillus subtilis
tgatcaggcaattcggtcaattgtc

SEQ ID NO: 196039 - DNA, 25 bp, Bacillus subtilis
ttgatatctcggatacaatagaggc

SEQ ID NO: 196040 - DNA, 25 bp, Bacillus subtilis
ctactcctctgacgaatgggtatat

SEQ ID NO: 196041 - DNA, 25 bp, Bacillus subtilis
ggcaatgcggctgcactggtggaag

SEQ ID NO: 196042 - DNA, 25 bp, Bacillus subtilis
gccttccggcgcataaagtcagcaa

SEQ ID NO: 196043 - DNA, 25 bp, Bacillus subtilis
gaagcagctgaagcagcccgcatat

SEQ ID NO: 196044 - DNA, 25 bp, Bacillus subtilis
aatgagtgatcaggcaattcggtca

SEQ ID NO: 196045 - DNA, 25 bp, Bacillus subtilis
aagaattcagctaacgcttccagac

SEQ ID NO: 196046 - DNA, 25 bp, Bacillus subtilis
attcggtcaattgtcactgtcatca

SEQ ID NO: 196047 - DNA, 25 bp, Bacillus subtilis
gtcactgtcatcagaatctgtcggc

SEQ ID NO: 196048 - DNA, 25 bp, Bacillus subtilis
gataaatggttttcatcagccggat

SEQ ID NO: 196049 - DNA, 25 bp, Bacillus subtilis
tccggatcacggcaatgcggctgca

SEQ ID NO: 196050 - DNA, 25 bp, Bacillus subtilis
agaagaagcagctgaagcagcccgc

SEQ ID NO: 196051 - DNA, 25 bp, Bacillus subtilis
gctgaagcagcccgcatattaggcg

SEQ ID NO: 196052 - DNA, 25 bp, Bacillus subtilis
gcagcccgcatattaggcgcagata

SEQ ID NO: 196053 - DNA, 25 bp, Bacillus subtilis
ttttgttattgatatctcggataca

SEQ ID NO: 196054 - DNA, 25 bp, Bacillus subtilis
tcaattgtcactgtcatcagaatct

SEQ ID NO: 196055 - DNA, 25 bp, Bacillus subtilis
ggtatattgaaatcgttgaagcgag

SEQ ID NO: 196056 - DNA, 25 bp, Bacillus subtilis
catcagaatctgtcggccaaaagcg

SEQ ID NO: 196057 - DNA, 25 bp, Bacillus subtilis
agcagcaaggacatccggatgaaaa

SEQ ID NO: 196058 - DNA, 25 bp, Bacillus subtilis
gagattattgagcttcatcatgacc

SEQ ID NO: 196059 - DNA, 25 bp, Bacillus subtilis
agggatcggagccatcatcgcgcca

SEQ ID NO: 196060 - DNA, 25 bp, Bacillus subtilis
gaagcttgacgcaccaagcggaact

SEQ ID NO: 196061 - DNA, 25 bp, Bacillus subtilis
gatatccatgcctgttttacagaaa

SEQ ID NO: 196062 - DNA, 25 bp, Bacillus subtilis
agcttcatcatgaccagaagcttga

SEQ ID NO: 196063 - DNA, 25 bp, Bacillus subtilis
tacacagatatccatgcctgtttta

SEQ ID NO: 196064 - DNA, 25 bp, Bacillus subtilis
tcatcgcgccaaattttgcgctcgg

SEQ ID NO: 196065 - DNA, 25 bp, Bacillus subtilis
catgaccagaagcttgacgcaccaa

SEQ ID NO: 196066 - DNA, 25 bp, Bacillus subtilis
cgctcggtgcgatactgatgatgaa

SEQ ID NO: 196067 - DNA, 25 bp, Bacillus subtilis
tggcagaacgaacaccacattttga

SEQ ID NO: 196068 - DNA, 25 bp, Bacillus subtilis
ttgagtcagatgctttcatttacac

SEQ ID NO: 196069 - DNA, 25 bp, Bacillus subtilis
aaattttgcgctcggtgcgatactg

SEQ ID NO: 196070 - DNA, 25 bp, Bacillus subtilis
caagcggaactgcgcttaaaacagc

SEQ ID NO: 196071 - DNA, 25 bp, Bacillus subtilis
tatctgatgtgatgcctgttgagtc

SEQ ID NO: 196072 - DNA, 25 bp, Bacillus subtilis
gtgatgcctgttgagtcagatgctt

SEQ ID NO: 196073 - DNA, 25 bp, Bacillus subtilis
aaaaattgcattagagcacggagtc

SEQ ID NO: 196074 - DNA, 25 bp, Bacillus subtilis
gagccatcatcgcgccaaattttgc

SEQ ID NO: 196075 - DNA, 25 bp, Bacillus subtilis
tgctttcatttacacagatatccat

SEQ ID NO: 196076 - DNA, 25 bp, Bacillus subtilis
tgccaactattttgaggatgttgag

SEQ ID NO: 196077 - DNA, 25 bp, Bacillus subtilis
atgaagattgatcagcttgtgtatg

SEQ ID NO: 196078 - DNA, 25 bp, Bacillus subtilis
aggatatggttcaatttacgactgc

SEQ ID NO: 196079 - DNA, 25 bp, Bacillus subtilis
catgtcaggcgttaaactgtcagtc

SEQ ID NO: 196080 - DNA, 25 bp, Bacillus subtilis
tcatgatctatacgcaaccggaacc

SEQ ID NO: 196081 - DNA, 25 bp, Bacillus subtilis
cattaatccgtttatgtgatgtgta

SEQ ID NO: 196082 - DNA, 25 bp, Bacillus subtilis
tgcactgatcgctgccaatgcactc

SEQ ID NO: 196083 - DNA, 25 bp, Bacillus subtilis
atgctgacgttcttgcttttggcgc

SEQ ID NO: 196084 - DNA, 25 bp, Bacillus subtilis
aaattcttgtgcgcacacttgatga

SEQ ID NO: 196085 - DNA, 25 bp, Bacillus subtilis
gatgtctcggcattaatccgtttat

SEQ ID NO: 196086 - DNA, 25 bp, Bacillus subtilis
cacagtgatgatgtcgagatcggaa

SEQ ID NO: 196087 - DNA, 25 bp, Bacillus subtilis
ttcatgaggcgacaggtcttcaaat

SEQ ID NO: 196088 - DNA, 25 bp, Bacillus subtilis
gctgccaatgcactcgatcttgtca

SEQ ID NO: 196089 - DNA, 25 bp, Bacillus subtilis
tgaaaattgctttgatcgcgcatga

SEQ ID NO: 196090 - DNA, 25 bp, Bacillus subtilis
gcttttggcgcccacagtgatgatg

SEQ ID NO: 196091 - DNA, 25 bp, Bacillus subtilis
tgatgtgtattccattccgctcgcc

SEQ ID NO: 196092 - DNA, 25 bp, Bacillus subtilis
cccgctgaccgcgcagccgcatgaa

SEQ ID NO: 196093 - DNA, 25 bp, Bacillus subtilis
agcaaatcggtgcactgatcgctgc

SEQ ID NO: 196094 - DNA, 25 bp, Bacillus subtilis
gcgcacacttgatgaaggtgttttc

SEQ ID NO: 196095 - DNA, 25 bp, Bacillus subtilis
gctcgccacaaatatgggtactgcg

SEQ ID NO: 196096 - DNA, 25 bp, Bacillus subtilis
tcaatttacgactgcctatcgggat

SEQ ID NO: 196097 - DNA, 25 bp, Bacillus subtilis
attcatattcatttgtatccaaggt

SEQ ID NO: 196098 - DNA, 25 bp, Bacillus subtilis
tacaatcgtttcatcattcggcgtg

SEQ ID NO: 196099 - DNA, 25 bp, Bacillus subtilis
tattcgttatacggaagatgatgaa

SEQ ID NO: 196100 - DNA, 25 bp, Bacillus subtilis
agctgtacaatcgtttcatcattcg

SEQ ID NO: 196101 - DNA, 25 bp, Bacillus subtilis
tggagagattcatattcatttgtat

SEQ ID NO: 196102 - DNA, 25 bp, Bacillus subtilis
catattcatttgtatccaaggtgct

SEQ ID NO: 196103 - DNA, 25 bp, Bacillus subtilis
tttgtatccaaggtgctgaatcttg

SEQ ID NO: 196104 - DNA, 25 bp, Bacillus subtilis
gcacaactctttatacggttggctc

SEQ ID NO: 196105 - DNA, 25 bp, Bacillus subtilis
atgatgaaccgcttcatgccactga

SEQ ID NO: 196106 - DNA, 25 bp, Bacillus subtilis
ctgtacaatcgtttcatcattcggc

SEQ ID NO: 196107 - DNA, 25 bp, Bacillus subtilis
tatccaaggtgctgaatcttggagg

SEQ ID NO: 196108 - DNA, 25 bp, Bacillus subtilis
gagacgcaggcacaactctttatac

SEQ ID NO: 196109 - DNA, 25 bp, Bacillus subtilis
aagatgatgaaccgcttcatgccac

SEQ ID NO: 196110 - DNA, 25 bp, Bacillus subtilis
aatcgtttcatcattcggcgtgcga

SEQ ID NO: 196111 - DNA, 25 bp, Bacillus subtilis
ataagctgtacaatcgtttcatcat

SEQ ID NO: 196112 - DNA, 25 bp, Bacillus subtilis
accgcttcatgccactgaatacgtt

SEQ ID NO: 196113 - DNA, 25 bp, Bacillus subtilis
tgggagacgcaggcacaactcttta

SEQ ID NO: 196114 - DNA, 25 bp, Bacillus subtilis
catttgtatccaaggtgctgaatct

SEQ ID NO: 196115 - DNA, 25 bp, Bacillus subtilis
cgtttcatcattcggcgtgcgaatt

SEQ ID NO: 196116 - DNA, 25 bp, Bacillus subtilis
tgaaccgcttcatgccactgaatac

SEQ ID NO: 196117 - DNA, 25 bp, Bacillus subtilis
ggcatatgcgagcaaagcattctca

SEQ ID NO: 196118 - DNA, 25 bp, Bacillus subtilis
aggtgtggatgctctctatttagcg

SEQ ID NO: 196119 - DNA, 25 bp, Bacillus subtilis
tggatgctctctatttagcggagaa

SEQ ID NO: 196120 - DNA, 25 bp, Bacillus subtilis
gggctgaaagcacaggtggcatatg

SEQ ID NO: 196121 - DNA, 25 bp, Bacillus subtilis
cacctctttacgtatatgatgtggc

SEQ ID NO: 196122 - DNA, 25 bp, Bacillus subtilis
gcaggcgtttatttctgcagggctg

SEQ ID NO: 196123 - DNA, 25 bp, Bacillus subtilis
tggtacacctctttacgtatatgat

SEQ ID NO: 196124 - DNA, 25 bp, Bacillus subtilis
gcagacaaaatcaacatggtcattt

SEQ ID NO: 196125 - DNA, 25 bp, Bacillus subtilis
cattctcatcagtcgcaatgattca

SEQ ID NO: 196126 - DNA, 25 bp, Bacillus subtilis
tctttagatgtcgtatccggaggag

SEQ ID NO: 196127 - DNA, 25 bp, Bacillus subtilis
gtatatgatgtggctttaatacgtg

SEQ ID NO: 196128 - DNA, 25 bp, Bacillus subtilis
gcaaagcattctcatcagtcgcaat

SEQ ID NO: 196129 - DNA, 25 bp, Bacillus subtilis
atgtcgtatccggaggagagctata

SEQ ID NO: 196130 - DNA, 25 bp, Bacillus subtilis
atgcgagcaaagcattctcatcagt

SEQ ID NO: 196131 - DNA, 25 bp, Bacillus subtilis
ggagagctatatacggctgttgcag

SEQ ID NO: 196132 - DNA, 25 bp, Bacillus subtilis
catcagtcgcaatgattcagctcgc

SEQ ID NO: 196133 - DNA, 25 bp, Bacillus subtilis
tttatttctgcagggctgaaagcac

SEQ ID NO: 196134 - DNA, 25 bp, Bacillus subtilis
tcgcaatgattcagctcgctgagga

SEQ ID NO: 196135 - DNA, 25 bp, Bacillus subtilis
tagaaatcggaggtgtggatgctct

SEQ ID NO: 196136 - DNA, 25 bp, Bacillus subtilis
tttaagcaggcgtttatttctgcag

SEQ ID NO: 196137 - DNA, 25 bp, Bacillus subtilis
tagaagcgcatacgcatgactacat

SEQ ID NO: 196138 - DNA, 25 bp, Bacillus subtilis
aacacattcagctgctgggtgtcca

SEQ ID NO: 196139 - DNA, 25 bp, Bacillus subtilis
ggataatttctatgaaatcgcgctt

SEQ ID NO: 196140 - DNA, 25 bp, Bacillus subtilis
gtcactccatcgatgttcttcttcg

SEQ ID NO: 196141 - DNA, 25 bp, Bacillus subtilis
agctgctgggtgtccattgccatat

SEQ ID NO: 196142 - DNA, 25 bp, Bacillus subtilis
atacgcatgactacattacaacggg

SEQ ID NO: 196143 - DNA, 25 bp, Bacillus subtilis
cgcttgagcaccgcatcggctgcat

SEQ ID NO: 196144 - DNA, 25 bp, Bacillus subtilis
agcgcatacgcatgactacattaca

SEQ ID NO: 196145 - DNA, 25 bp, Bacillus subtilis
cattcagctgctgggtgtccattgc

SEQ ID NO: 196146 - DNA, 25 bp, Bacillus subtilis
gcaccgcatcggctgcattgtggtg

SEQ ID NO: 196147 - DNA, 25 bp, Bacillus subtilis
aatcgcgcttcttgaagacctatgt

SEQ ID NO: 196148 - DNA, 25 bp, Bacillus subtilis
gcatcggctgcattgtggtggataa

SEQ ID NO: 196149 - DNA, 25 bp, Bacillus subtilis
aatcggaacacattcagctgctggg

SEQ ID NO: 196150 - DNA, 25 bp, Bacillus subtilis
gatggcgcttgagcaccgcatcggc

SEQ ID NO: 196151 - DNA, 25 bp, Bacillus subtilis
atttctatgaaatcgcgcttcttga

SEQ ID NO: 196152 - DNA, 25 bp, Bacillus subtilis
gatcacgcccggagtagaagcgcat

SEQ ID NO: 196153 - DNA, 25 bp, Bacillus subtilis
tcgatcttcataacggacaaactga

SEQ ID NO: 196154 - DNA, 25 bp, Bacillus subtilis
ttcggatcacgcccggagtagaagc

SEQ ID NO: 196155 - DNA, 25 bp, Bacillus subtilis
attacaatcggaacacattcagctg

SEQ ID NO: 196156 - DNA, 25 bp, Bacillus subtilis
ctatgaaatcgcgcttcttgaagac

SEQ ID NO: 196157 - DNA, 25 bp, Bacillus subtilis
ccatcccgagctgaatatcggggtc

SEQ ID NO: 196158 - DNA, 25 bp, Bacillus subtilis
agtgaggcttctgggtgcataccag

SEQ ID NO: 196159 - DNA, 25 bp, Bacillus subtilis
ctgcatagagtgctgtctgcatttt

SEQ ID NO: 196160 - DNA, 25 bp, Bacillus subtilis
gccaatgatatggcagcttctacat

SEQ ID NO: 196161 - DNA, 25 bp, Bacillus subtilis
gaattcaaaattgagctctaggccc

SEQ ID NO: 196162 - DNA, 25 bp, Bacillus subtilis
gtattgattccaggggccatgcagg

SEQ ID NO: 196163 - DNA, 25 bp, Bacillus subtilis
gagctgaatatcggggtcattgcca

SEQ ID NO: 196164 - DNA, 25 bp, Bacillus subtilis
ttaatggtcatgctgccgcaggatg

SEQ ID NO: 196165 - DNA, 25 bp, Bacillus subtilis
aggggccatgcaggagcttgaagca

SEQ ID NO: 196166 - DNA, 25 bp, Bacillus subtilis
tatcggggtcattgccaatgatatg

SEQ ID NO: 196167 - DNA, 25 bp, Bacillus subtilis
ctgtctcccgatgaaaacatatctt

SEQ ID NO: 196168 - DNA, 25 bp, Bacillus subtilis
atggcagcttctacatacgaattaa

SEQ ID NO: 196169 - DNA, 25 bp, Bacillus subtilis
cttctgggtgcataccagtcttacc

SEQ ID NO: 196170 - DNA, 25 bp, Bacillus subtilis
tgatgatgtattgattccaggggcc

SEQ ID NO: 196171 - DNA, 25 bp, Bacillus subtilis
catgctgccgcaggatgatcagtcc

SEQ ID NO: 196172 - DNA, 25 bp, Bacillus subtilis
gtcagtgaccatcccgagctgaata

SEQ ID NO: 196173 - DNA, 25 bp, Bacillus subtilis
cggggcgctgcatagagtgctgtct

SEQ ID NO: 196174 - DNA, 25 bp, Bacillus subtilis
ggatgatcagtccggggcgctgcat

SEQ ID NO: 196175 - DNA, 25 bp, Bacillus subtilis
gtgctgtctgcattttcttggagaa

SEQ ID NO: 196176 - DNA, 25 bp, Bacillus subtilis
aagtttgtcagtgaccatcccgagc

SEQ ID NO: 196177 - DNA, 25 bp, Bacillus subtilis
cagtagcagatgccgttcaaaaggt

SEQ ID NO: 196178 - DNA, 25 bp, Bacillus subtilis
tctttccattcaccagaccattccg

SEQ ID NO: 196179 - DNA, 25 bp, Bacillus subtilis
atcttgtccgtgaagatgtattgcc

SEQ ID NO: 196180 - DNA, 25 bp, Bacillus subtilis
ctgattctggaagcaacgttctttc

SEQ ID NO: 196181 - DNA, 25 bp, Bacillus subtilis
gcaaatgtgacactgtctatcagta

SEQ ID NO: 196182 - DNA, 25 bp, Bacillus subtilis
tacagggatgctgtttttccattct

SEQ ID NO: 196183 - DNA, 25 bp, Bacillus subtilis
accagaccattccgcttcaaggcag

SEQ ID NO: 196184 - DNA, 25 bp, Bacillus subtilis
gacattttatcttgtccgtgaagat

SEQ ID NO: 196185 - DNA, 25 bp, Bacillus subtilis
cgcttcaaggcagagcaaatgtgac

SEQ ID NO: 196186 - DNA, 25 bp, Bacillus subtilis
gcgttatctcagcttcttcaggcgg

SEQ ID NO: 196187 - DNA, 25 bp, Bacillus subtilis
ggcggtagctgattctggaagcaac

SEQ ID NO: 196188 - DNA, 25 bp, Bacillus subtilis
ctcagcttcttcaggcggtagctga

SEQ ID NO: 196189 - DNA, 25 bp, Bacillus subtilis
taggtcaggtgcgttatctcagctt

SEQ ID NO: 196190 - DNA, 25 bp, Bacillus subtilis
tcttcaggcggtagctgattctgga

SEQ ID NO: 196191 - DNA, 25 bp, Bacillus subtilis
cactgtctatcagtacgtcggcaat

SEQ ID NO: 196192 - DNA, 25 bp, Bacillus subtilis
gtattgcccgatgcaatgagaaaaa

SEQ ID NO: 196193 - DNA, 25 bp, Bacillus subtilis
aagatgtattgcccgatgcaatgag

SEQ ID NO: 196194 - DNA, 25 bp, Bacillus subtilis
ccattccgcttcaaggcagagcaaa

SEQ ID NO: 196195 - DNA, 25 bp, Bacillus subtilis
agcagattcagtagcagatgccgtt

SEQ ID NO: 196196 - DNA, 25 bp, Bacillus subtilis
ggaggataggtcaggtgcgttatct

SEQ ID NO: 196197 - DNA, 25 bp, Bacillus subtilis
gtgtatagatgcagccgttgcaggc

SEQ ID NO: 196198 - DNA, 25 bp, Bacillus subtilis
aggtccagcagctacatttacacat

SEQ ID NO: 196199 - DNA, 25 bp, Bacillus subtilis
ctatttaatacatgaacagcctttg

SEQ ID NO: 196200 - DNA, 25 bp, Bacillus subtilis
tcaaaacggcgccgaacatgttgct

SEQ ID NO: 196201 - DNA, 25 bp, Bacillus subtilis
gaaatattaggttcaggtgcataag

SEQ ID NO: 196202 - DNA, 25 bp, Bacillus subtilis
ccgcaccattccggagtgtatagat

SEQ ID NO: 196203 - DNA, 25 bp, Bacillus subtilis
cgaacatgttgcttaccgcaccatt

SEQ ID NO: 196204 - DNA, 25 bp, Bacillus subtilis
gggtgaaatgacgttgccgattcac

SEQ ID NO: 196205 - DNA, 25 bp, Bacillus subtilis
tacacatctagcagtcagttcttgt

SEQ ID NO: 196206 - DNA, 25 bp, Bacillus subtilis
ttatttaggtccagcagctacattt

SEQ ID NO: 196207 - DNA, 25 bp, Bacillus subtilis
gctacatttacacatctagcagtca

SEQ ID NO: 196208 - DNA, 25 bp, Bacillus subtilis
gagctcgacaaaatttactcacatt

SEQ ID NO: 196209 - DNA, 25 bp, Bacillus subtilis
aatttactcacattcacacgcgatt

SEQ ID NO: 196210 - DNA, 25 bp, Bacillus subtilis
attgcgcaatgccataaatttcttc

SEQ ID NO: 196211 - DNA, 25 bp, Bacillus subtilis
gatgcagccgttgcaggcgaagttg

SEQ ID NO: 196212 - DNA, 25 bp, Bacillus subtilis
cacttgctcgtccatccctcaagag

SEQ ID NO: 196213 - DNA, 25 bp, Bacillus subtilis
gacgttgccgattcaccagcacttg

SEQ ID NO: 196214 - DNA, 25 bp, Bacillus subtilis
tcacattcacacgcgattgcgcaat

SEQ ID NO: 196215 - DNA, 25 bp, Bacillus subtilis
catgaacagcctttgccaatcgtgg

SEQ ID NO: 196216 - DNA, 25 bp, Bacillus subtilis
acacgcgattgcgcaatgccataaa

SEQ ID NO: 196217 - DNA, 25 bp, Bacillus subtilis
ccaaatgatccgcgtcccgaatgct

SEQ ID NO: 196218 - DNA, 25 bp, Bacillus subtilis
catgtccaaggattggccgcttgtc

SEQ ID NO: 196219 - DNA, 25 bp, Bacillus subtilis
cccgaatgctgacattgacgtagtc

SEQ ID NO: 196220 - DNA, 25 bp, Bacillus subtilis
gttccatcagccgtaccgggcgatg

SEQ ID NO: 196221 - DNA, 25 bp, Bacillus subtilis
tgctgtcagcaatatcctcattgct

SEQ ID NO: 196222 - DNA, 25 bp, Bacillus subtilis
tgaagtgctgacaagagacgcgaga

SEQ ID NO: 196223 - DNA, 25 bp, Bacillus subtilis
gctcgcgcttcatttccctcattgt

SEQ ID NO: 196224 - DNA, 25 bp, Bacillus subtilis
cggagcaggcccaacgattctcgtc

SEQ ID NO: 196225 - DNA, 25 bp, Bacillus subtilis
agacgcgagagacgtgcttccgaag

SEQ ID NO: 196226 - DNA, 25 bp, Bacillus subtilis
tgccgatgccgtaaaagcaagtgct

SEQ ID NO: 196227 - DNA, 25 bp, Bacillus subtilis
gaaggagtttccatatgccgatgcc

SEQ ID NO: 196228 - DNA, 25 bp, Bacillus subtilis
cgcttctctcgtcggcggacttgtg

SEQ ID NO: 196229 - DNA, 25 bp, Bacillus subtilis
gtaccgggcgatgcttgtgcctgag

SEQ ID NO: 196230 - DNA, 25 bp, Bacillus subtilis
agaaggacacccggacaatgctggc

SEQ ID NO: 196231 - DNA, 25 bp, Bacillus subtilis
agtagagcacgtcgccgagatgaag

SEQ ID NO: 196232 - DNA, 25 bp, Bacillus subtilis
cctcattgctgcgatcatgtccaag

SEQ ID NO: 196233 - DNA, 25 bp, Bacillus subtilis
atatggaacggctctcagcggagca

SEQ ID NO: 196234 - DNA, 25 bp, Bacillus subtilis
cggcggacttgtgatcggcctgcat

SEQ ID NO: 196235 - DNA, 25 bp, Bacillus subtilis
tgtcattcctttttatgaagtgctg

SEQ ID NO: 196236 - DNA, 25 bp, Bacillus subtilis
cggcctgcatgaggatgacgagacc

SEQ ID NO: 196237 - DNA, 25 bp, Bacillus subtilis
acacctcttattcacctgccgaagc

SEQ ID NO: 196238 - DNA, 25 bp, Bacillus subtilis
gggatcatttaaagatcgcggaatg

SEQ ID NO: 196239 - DNA, 25 bp, Bacillus subtilis
gctggaaacatcactgcgtactgga

SEQ ID NO: 196240 - DNA, 25 bp, Bacillus subtilis
cagcccgtgctaacatgaaatgcat

SEQ ID NO: 196241 - DNA, 25 bp, Bacillus subtilis
gcgtcaacaggtaacacttccgctg

SEQ ID NO: 196242 - DNA, 25 bp, Bacillus subtilis
tgcattgtcatcatcccgaacggaa

SEQ ID NO: 196243 - DNA, 25 bp, Bacillus subtilis
ggaaaactcgctcaagctgtcatgt

SEQ ID NO: 196244 - DNA, 25 bp, Bacillus subtilis
gcggcggcaatcgtgcgcaatgaag

SEQ ID NO: 196245 - DNA, 25 bp, Bacillus subtilis
gaattgagcttcatgtcaaaacgga

SEQ ID NO: 196246 - DNA, 25 bp, Bacillus subtilis
acacgattatgtgcgcgtcaacagg

SEQ ID NO: 196247 - DNA, 25 bp, Bacillus subtilis
cacttccgctgctgcggcagcatat

SEQ ID NO: 196248 - DNA, 25 bp, Bacillus subtilis
gaaggcaatgacacgattatgtgcg

SEQ ID NO: 196249 - DNA, 25 bp, Bacillus subtilis
tgtgagaaatcaccgattgcccttg

SEQ ID NO: 196250 - DNA, 25 bp, Bacillus subtilis
catgagaaaaacggcacaggccttc

SEQ ID NO: 196251 - DNA, 25 bp, Bacillus subtilis
ctgtaacagatcaaacaccggcgct

SEQ ID NO: 196252 - DNA, 25 bp, Bacillus subtilis
gtccgttccatctgtgagaaatcac

SEQ ID NO: 196253 - DNA, 25 bp, Bacillus subtilis
ctgctgccttcgaagtgtgcgaaca

SEQ ID NO: 196254 - DNA, 25 bp, Bacillus subtilis
cggcagcatatgcagcccgtgctaa

SEQ ID NO: 196255 - DNA, 25 bp, Bacillus subtilis
tcagtcaacccttaccgcattgaag

SEQ ID NO: 196256 - DNA, 25 bp, Bacillus subtilis
gcaatcgtgcgcaatgaagtgattg

SEQ ID NO: 196257 - DNA, 25 bp, Bacillus subtilis
tatcagctgatcgcccgtgtagaag

SEQ ID NO: 196258 - DNA, 25 bp, Bacillus subtilis
actgatgatgaaatccttcacgcat

SEQ ID NO: 196259 - DNA, 25 bp, Bacillus subtilis
gtaaaggcagccgaggaatccaatg

SEQ ID NO: 196260 - DNA, 25 bp, Bacillus subtilis
tgcgcgtctatcgcaggagtgctga

SEQ ID NO: 196261 - DNA, 25 bp, Bacillus subtilis
gcggtcgacatttcagaaatcaagc

SEQ ID NO: 196262 - DNA, 25 bp, Bacillus subtilis
acgaagccgacatgctgttctctgt

SEQ ID NO: 196263 - DNA, 25 bp, Bacillus subtilis
tgaccgtctttgaaagcgacaaatg

SEQ ID NO: 196264 - DNA, 25 bp, Bacillus subtilis
cagataacctgatctaccaagtggc

SEQ ID NO: 196265 - DNA, 25 bp, Bacillus subtilis
gctttgattcagtcggaatggcgct

SEQ ID NO: 196266 - DNA, 25 bp, Bacillus subtilis
cctgtcacattgccgactgatgaag

SEQ ID NO: 196267 - DNA, 25 bp, Bacillus subtilis
atccttcacgcatatcagctgatcg

SEQ ID NO: 196268 - DNA, 25 bp, Bacillus subtilis
tgctgttctctgtcactgttcccgg

SEQ ID NO: 196269 - DNA, 25 bp, Bacillus subtilis
tcggaatggcgctcagcagatattt

SEQ ID NO: 196270 - DNA, 25 bp, Bacillus subtilis
aaggcagcaaggtcgtagctgtgtt

SEQ ID NO: 196271 - DNA, 25 bp, Bacillus subtilis
aagatccgaacacagcggtcgacat

SEQ ID NO: 196272 - DNA, 25 bp, Bacillus subtilis
cagatatttgaagctgaccgtcttt

SEQ ID NO: 196273 - DNA, 25 bp, Bacillus subtilis
tcagaaatcaagcctgtcacattgc

SEQ ID NO: 196274 - DNA, 25 bp, Bacillus subtilis
ctcctgtccatgtgaaggtgtggag

SEQ ID NO: 196275 - DNA, 25 bp, Bacillus subtilis
cagaaccaggttcttgcgcgtctat

SEQ ID NO: 196276 - DNA, 25 bp, Bacillus subtilis
gacagcatccttgaatatgtaaaag

SEQ ID NO: 196277 - DNA, 25 bp, Bacillus subtilis
tgggaatgtgtgccggaatatcagc

SEQ ID NO: 196278 - DNA, 25 bp, Bacillus subtilis
tctcagcgtaaagcaatccatgctt

SEQ ID NO: 196279 - DNA, 25 bp, Bacillus subtilis
ctcgacgtcattcagcttcacggtg

SEQ ID NO: 196280 - DNA, 25 bp, Bacillus subtilis
gcgagctgtacttatcggtgaatca

SEQ ID NO: 196281 - DNA, 25 bp, Bacillus subtilis
acgatgtcacgtattgccaagagct

SEQ ID NO: 196282 - DNA, 25 bp, Bacillus subtilis
agctgacaggctgtgaaatatggaa

SEQ ID NO: 196283 - DNA, 25 bp, Bacillus subtilis
ttaacatttgtcaatgaacatgggg

SEQ ID NO: 196284 - DNA, 25 bp, Bacillus subtilis
atgttgacggctttgtgattgattc

SEQ ID NO: 196285 - DNA, 25 bp, Bacillus subtilis
ggatgctgctgctcttcgcaagctg

SEQ ID NO: 196286 - DNA, 25 bp, Bacillus subtilis
atcaatagagacgatgtcacgtatt

SEQ ID NO: 196287 - DNA, 25 bp, Bacillus subtilis
atgagacaaacttctcagcgtaaag

SEQ ID NO: 196288 - DNA, 25 bp, Bacillus subtilis
gcgcttcaccatcaagataacacaa

SEQ ID NO: 196289 - DNA, 25 bp, Bacillus subtilis
gtattgccaagagcttgaagctcga

SEQ ID NO: 196290 - DNA, 25 bp, Bacillus subtilis
tttgcagcttgcggcggaatcacag

SEQ ID NO: 196291 - DNA, 25 bp, Bacillus subtilis
gtcactaaaggatttgcagcttgcg

SEQ ID NO: 196292 - DNA, 25 bp, Bacillus subtilis
gagcttgaagctcgacgtcattcag

SEQ ID NO: 196293 - DNA, 25 bp, Bacillus subtilis
gcggcggaatcacaggctgattacc

SEQ ID NO: 196294 - DNA, 25 bp, Bacillus subtilis
tgccggaatatcagcaggcggctat

SEQ ID NO: 196295 - DNA, 25 bp, Bacillus subtilis
ttcagcttcacggtgatgaaaaacc

SEQ ID NO: 196296 - DNA, 25 bp, Bacillus subtilis
ttgattcatctgtaaaagggtctag

SEQ ID NO: 196297 - DNA, 25 bp, Bacillus subtilis
gaaaacgattcatattgcagaagac

SEQ ID NO: 196298 - DNA, 25 bp, Bacillus subtilis
gatattgtcaattcttgctcatcgg

SEQ ID NO: 196299 - DNA, 25 bp, Bacillus subtilis
acacgctcttacagtcgatggactt

SEQ ID NO: 196300 - DNA, 25 bp, Bacillus subtilis
tatgatgatggcagcggaaatgact

SEQ ID NO: 196301 - DNA, 25 bp, Bacillus subtilis
tactgccggtgaggctgaaacgctg

SEQ ID NO: 196302 - DNA, 25 bp, Bacillus subtilis
gttttgtgaaggcaatgcgggcaca

SEQ ID NO: 196303 - DNA, 25 bp, Bacillus subtilis
gattcgcacgatgagtgtaaagaac

SEQ ID NO: 196304 - DNA, 25 bp, Bacillus subtilis
ctgatgaacagatttctacaattgt

SEQ ID NO: 196305 - DNA, 25 bp, Bacillus subtilis
gttgcctcggcagctggtgcgaaaa

SEQ ID NO: 196306 - DNA, 25 bp, Bacillus subtilis
cttgtattacgattcgcacgatgag

SEQ ID NO: 196307 - DNA, 25 bp, Bacillus subtilis
caatgcgggcacacgctcttacagt

SEQ ID NO: 196308 - DNA, 25 bp, Bacillus subtilis
cggtgttgcatcgatacaggcaggt

SEQ ID NO: 196309 - DNA, 25 bp, Bacillus subtilis
tacaggcaggtgctggcattgttgc

SEQ ID NO: 196310 - DNA, 25 bp, Bacillus subtilis
ctcggcaattgttgcctcggcagct

SEQ ID NO: 196311 - DNA, 25 bp, Bacillus subtilis
aagccggtgcgctgctgaaaacgat

SEQ ID NO: 196312 - DNA, 25 bp, Bacillus subtilis
tggacttcctgatattgttgataca

SEQ ID NO: 196313 - DNA, 25 bp, Bacillus subtilis
caatcgctctgtctcttctaaaagc

SEQ ID NO: 196314 - DNA, 25 bp, Bacillus subtilis
tatctcaacggcctcggcaattgtt

SEQ ID NO: 196315 - DNA, 25 bp, Bacillus subtilis
cgctaagcatggcaatcgctctgtc

SEQ ID NO: 196316 - DNA, 25 bp, Bacillus subtilis
cattgttgctgattctgttccggaa

SEQ ID NO: 196317 - DNA, 25 bp, Bacillus subtilis
gcagattgcaatagactatgaggct

SEQ ID NO: 196318 - DNA, 25 bp, Bacillus subtilis
ccgcgcagcttgaacgactaaagca

SEQ ID NO: 196319 - DNA, 25 bp, Bacillus subtilis
caccgaaagagagcgcctatctcat

SEQ ID NO: 196320 - DNA, 25 bp, Bacillus subtilis
gcagcttgaacgactaaagcagaaa

SEQ ID NO: 196321 - DNA, 25 bp, Bacillus subtilis
gatttcggtttcacaaatggcagac

SEQ ID NO: 196322 - DNA, 25 bp, Bacillus subtilis
atagactatgaggctgcgaaggcag

SEQ ID NO: 196323 - DNA, 25 bp, Bacillus subtilis
gcttttaatgcgggagctgcgattt

SEQ ID NO: 196324 - DNA, 25 bp, Bacillus subtilis
gagcgcctatctcattcagaatatt

SEQ ID NO: 196325 - DNA, 25 bp, Bacillus subtilis
aagagagcgcctatctcattcagaa

SEQ ID NO: 196326 - DNA, 25 bp, Bacillus subtilis
agacgattacaagcggaggcgctgc

SEQ ID NO: 196327 - DNA, 25 bp, Bacillus subtilis
ttttgtgcctgtgcagattgcaata

SEQ ID NO: 196328 - DNA, 25 bp, Bacillus subtilis
gattacaagcggaggcgctgccgcg

SEQ ID NO: 196329 - DNA, 25 bp, Bacillus subtilis
actatgaggctgcgaaggcagatgc

SEQ ID NO: 196330 - DNA, 25 bp, Bacillus subtilis
gaggcgctggcaagcccgaatcggt

SEQ ID NO: 196331 - DNA, 25 bp, Bacillus subtilis
gagcagcctttcgagaaacgttcat

SEQ ID NO: 196332 - DNA, 25 bp, Bacillus subtilis
ttagagacgattacaagcggaggcg

SEQ ID NO: 196333 - DNA, 25 bp, Bacillus subtilis
tttcacaaatggcagacttgaagat

SEQ ID NO: 196334 - DNA, 25 bp, Bacillus subtilis
tttacaggtgcagtcaccgaaagag

SEQ ID NO: 196335 - DNA, 25 bp, Bacillus subtilis
ttaaagaggattttgtgcctgtgca

SEQ ID NO: 196336 - DNA, 25 bp, Bacillus subtilis
gcagcagttccgctttatctattac

SEQ ID NO: 196337 - DNA, 25 bp, Saccharomyces cerevisiae
tacggaagccaacgcagtgtccttt

SEQ ID NO: 196338 - DNA, 25 bp, Saccharomyces cerevisiae
gtagaggacttcctacattttattg

SEQ ID NO: 196339 - DNA, 25 bp, Saccharomyces cerevisiae
gatccgtgccttcgataaactattg

SEQ ID NO: 196340 - DNA, 25 bp, Saccharomyces cerevisiae
gtaacgcactcattcacatcaagtt

SEQ ID NO: 196341 - DNA, 25 bp, Saccharomyces cerevisiae
ttgtaacgcactcattcacatcaag

SEQ ID NO: 196342 - DNA, 25 bp, Saccharomyces cerevisiae
taaagagatccgtgccttcgataaa

SEQ ID NO: 196343 - DNA, 25 bp, Saccharomyces cerevisiae
tctaagtttaatgctcgaaagtcct

SEQ ID NO: 196344 - DNA, 25 bp, Saccharomyces cerevisiae
aacgcactcattcacatcaagtttt

SEQ ID NO: 196345 - DNA, 25 bp, Saccharomyces cerevisiae
actattgtaacgcactcattcacat

SEQ ID NO: 196346 - DNA, 25 bp, Saccharomyces cerevisiae
agccctaatctaagtttaatgctcg

SEQ ID NO: 196347 - DNA, 25 bp, Saccharomyces cerevisiae
gaatatacctagacgtgaactcaaa

SEQ ID NO: 196348 - DNA, 25 bp, Saccharomyces cerevisiae
attaactgagcacaaaagccctaat

SEQ ID NO: 196349 - DNA, 25 bp, Saccharomyces cerevisiae
ttcacatcaagttttcagctggtac

SEQ ID NO: 196350 - DNA, 25 bp, Saccharomyces cerevisiae
ctcattcacatcaagttttcagctg

SEQ ID NO: 196351 - DNA, 25 bp, Saccharomyces cerevisiae
ctggtacggaagccaacgcagtgtc

SEQ ID NO: 196352 - DNA, 25 bp, Saccharomyces cerevisiae
cgtgccttcgataaactattgaata

SEQ ID NO: 196353 - DNA, 25 bp, Saccharomyces cerevisiae
tgccttcgataaactattgaatata

SEQ ID NO: 196354 - DNA, 25 bp, Saccharomyces cerevisiae
gaagccaacgcagtgtcctttgaca

SEQ ID NO: 196355 - DNA, 25 bp, Saccharomyces cerevisiae
ggtacggaagccaacgcagtgtcct

SEQ ID NO: 196356 - DNA, 25 bp, Saccharomyces cerevisiae
ccaacgcagtgtcctttgacacaac

SEQ ID NO: 196357 - DNA, 25 bp, Saccharomyces cerevisiae
taaatctaccattaactgagcacaa

SEQ ID NO: 196358 - DNA, 25 bp, Saccharomyces cerevisiae
tcaagttttcagctggtacggaagc

SEQ ID NO: 196359 - DNA, 25 bp, Saccharomyces cerevisiae
aagagatccgtgccttcgataaact

SEQ ID NO: 196360 - DNA, 25 bp, Saccharomyces cerevisiae
cattcacatcaagttttcagctggt

SEQ ID NO: 196361 - DNA, 25 bp, Saccharomyces cerevisiae
gtcctaactattgtaacgcactcat

SEQ ID NO: 196362 - DNA, 25 bp, Saccharomyces cerevisiae
aaactattgaatatacctagacgtg

SEQ ID NO: 196363 - DNA, 25 bp, Saccharomyces cerevisiae
agctggtacggaagccaacgcagtg

SEQ ID NO: 196364 - DNA, 25 bp, Saccharomyces cerevisiae
cgcactcattcacatcaagttttca

SEQ ID NO: 196365 - DNA, 25 bp, Saccharomyces cerevisiae
atgctcgaaagtcctaactattgta

SEQ ID NO: 196366 - DNA, 25 bp, Saccharomyces cerevisiae
cacatcaagttttcagctggtacgg

SEQ ID NO: 196367 - DNA, 25 bp, Saccharomyces cerevisiae
tttcagctggtacggaagccaacgc

SEQ ID NO: 196368 - DNA, 25 bp, Saccharomyces cerevisiae
tgacacaacattttctgattttaaa

SEQ ID NO: 196369 - DNA, 25 bp, Saccharomyces cerevisiae
tctaccattaactgagcacaaaagc

SEQ ID NO: 196370 - DNA, 25 bp, Saccharomyces cerevisiae
tttgacacaacattttctgatttta

SEQ ID NO: 196371 - DNA, 25 bp, Saccharomyces cerevisiae
ccattaactgagcacaaaagcccta

SEQ ID NO: 196372 - DNA, 25 bp, Saccharomyces cerevisiae
tgagcacaaaagccctaatctaagt

SEQ ID NO: 196373 - DNA, 25 bp, Saccharomyces cerevisiae
gagatccgtgccttcgataaactat

SEQ ID NO: 196374 - DNA, 25 bp, Saccharomyces cerevisiae
taactattgtaacgcactcattcac

SEQ ID NO: 196375 - DNA, 25 bp, Saccharomyces cerevisiae
actgagcacaaaagccctaatctaa

SEQ ID NO: 196376 - DNA, 25 bp, Saccharomyces cerevisiae
cagtgtcctttgacacaacattttc

SEQ ID NO: 196377 - DNA, 25 bp, Saccharomyces cerevisiae
aacgcagtgtcctttgacacaacat

SEQ ID NO: 196378 - DNA, 25 bp, Saccharomyces cerevisiae
atatacctagacgtgaactcaaaat

SEQ ID NO: 196379 - DNA, 25 bp, Saccharomyces cerevisiae
cctaactattgtaacgcactcattc

SEQ ID NO: 196380 - DNA, 25 bp, Saccharomyces cerevisiae
gtcctttgacacaacattttctgat

SEQ ID NO: 196381 - DNA, 25 bp, Saccharomyces cerevisiae
tattgaatatacctagacgtgaact

SEQ ID NO: 196382 - DNA, 25 bp, Saccharomyces cerevisiae
cctttgacacaacattttctgattt

SEQ ID NO: 196383 - DNA, 25 bp, Saccharomyces cerevisiae
gtgtcctttgacacaacattttctg

SEQ ID NO: 196384 - DNA, 25 bp, Saccharomyces cerevisiae
taccattaactgagcacaaaagccc

SEQ ID NO: 196385 - DNA, 25 bp, Saccharomyces cerevisiae
agccaacgcagtgtcctttgacaca

SEQ ID NO: 196386 - DNA, 25 bp, Saccharomyces cerevisiae
tttaatgctcgaaagtcctaactat

SEQ ID NO: 196387 - DNA, 25 bp, Saccharomyces cerevisiae
ctctagtcagtaatccacacgaaat

SEQ ID NO: 196388 - DNA, 25 bp, Saccharomyces cerevisiae
agatccagattcaaatcacttaagt

SEQ ID NO: 196389 - DNA, 25 bp, Saccharomyces cerevisiae
tcagtaatccacacgaaatttatgg

SEQ ID NO: 196390 - DNA, 25 bp, Saccharomyces cerevisiae
agtcagtaatccacacgaaatttat

SEQ ID NO: 196391 - DNA, 25 bp, Saccharomyces cerevisiae
tacctgaatctgcaggaaaagcaga

SEQ ID NO: 196392 - DNA, 25 bp, Saccharomyces cerevisiae
atccaaactctagccttcattcacc

SEQ ID NO: 196393 - DNA, 25 bp, Saccharomyces cerevisiae
gtattcgactagaaggtgatgagtt

SEQ ID NO: 196394 - DNA, 25 bp, Saccharomyces cerevisiae
ccaaactctagccttcattcaccaa

SEQ ID NO: 196395 - DNA, 25 bp, Saccharomyces cerevisiae
cttaattacattggcactaagttct

SEQ ID NO: 196396 - DNA, 25 bp, Saccharomyces cerevisiae
acgtctgatgaacccgtacctgaat

SEQ ID NO: 196397 - DNA, 25 bp, Saccharomyces cerevisiae
caacgtctgatgaacccgtacctga

SEQ ID NO: 196398 - DNA, 25 bp, Saccharomyces cerevisiae
tgaacccgtacctgaatctgcagga

SEQ ID NO: 196399 - DNA, 25 bp, Saccharomyces cerevisiae
ccacacgaaatttatggctccatgc

SEQ ID NO: 196400 - DNA, 25 bp, Saccharomyces cerevisiae
agatactagtattcgactagaaggt

SEQ ID NO: 196401 - DNA, 25 bp, Saccharomyces cerevisiae
gccttcattcaccaacgtctgatga

SEQ ID NO: 196402 - DNA, 25 bp, Saccharomyces cerevisiae
ccgaaactggcattaaattggcatt

SEQ ID NO: 196403 - DNA, 25 bp, Saccharomyces cerevisiae
tcattcaccaacgtctgatgaaccc

SEQ ID NO: 196404 - DNA, 25 bp, Saccharomyces cerevisiae
cttcattcaccaacgtctgatgaac

SEQ ID NO: 196405 - DNA, 25 bp, Saccharomyces cerevisiae
agtaatccacacgaaatttatggct

SEQ ID NO: 196406 - DNA, 25 bp, Saccharomyces cerevisiae
atactagtattcgactagaaggtga

SEQ ID NO: 196407 - DNA, 25 bp, Saccharomyces cerevisiae
cctgaatctgcaggaaaagcagata

SEQ ID NO: 196408 - DNA, 25 bp, Saccharomyces cerevisiae
gaagatccagattcaaatcacttaa

SEQ ID NO: 196409 - DNA, 25 bp, Saccharomyces cerevisiae
aagattctctagtcagtaatccaca

SEQ ID NO: 196410 - DNA, 25 bp, Saccharomyces cerevisiae
actctagccttcattcaccaacgtc

SEQ ID NO: 196411 - DNA, 25 bp, Saccharomyces cerevisiae
gcattggacccgaacttaattacat

SEQ ID NO: 196412 - DNA, 25 bp, Saccharomyces cerevisiae
gttctaatccaaactctagccttca

SEQ ID NO: 196413 - DNA, 25 bp, Saccharomyces cerevisiae
atccagattcaaatcacttaagttc

SEQ ID NO: 196414 - DNA, 25 bp, Saccharomyces cerevisiae
tgaatctgcaggaaaagcagatact

SEQ ID NO: 196415 - DNA, 25 bp, Saccharomyces cerevisiae
cgtacctgaatctgcaggaaaagca

SEQ ID NO: 196416 - DNA, 25 bp, Saccharomyces cerevisiae
ggcactaagttctaatccaaactct

SEQ ID NO: 196417 - DNA, 25 bp, Saccharomyces cerevisiae
attcgactagaaggtgatgagttag

SEQ ID NO: 196418 - DNA, 25 bp, Saccharomyces cerevisiae
tagccttcattcaccaacgtctgat

SEQ ID NO: 196419 - DNA, 25 bp, Saccharomyces cerevisiae
cgaacttaattacattggcactaag

SEQ ID NO: 196420 - DNA, 25 bp, Saccharomyces cerevisiae
aaactctagccttcattcaccaacg

SEQ ID NO: 196421 - DNA, 25 bp, Saccharomyces cerevisiae
ttggcactaagttctaatccaaact

SEQ ID NO: 196422 - DNA, 25 bp, Saccharomyces cerevisiae
gaaatttatggctccatgccgttgg

SEQ ID NO: 196423 - DNA, 25 bp, Saccharomyces cerevisiae
tcaccaacgtctgatgaacccgtac

SEQ ID NO: 196424 - DNA, 25 bp, Saccharomyces cerevisiae
cattggcactaagttctaatccaaa

SEQ ID NO: 196425 - DNA, 25 bp, Saccharomyces cerevisiae
aatttatggctccatgccgttggag

SEQ ID NO: 196426 - DNA, 25 bp, Saccharomyces cerevisiae
tacattggcactaagttctaatcca

SEQ ID NO: 196427 - DNA, 25 bp, Saccharomyces cerevisiae
taatccacacgaaatttatggctcc

SEQ ID NO: 196428 - DNA, 25 bp, Saccharomyces cerevisiae
gatgaacccgtacctgaatctgcag

SEQ ID NO: 196429 - DNA, 25 bp, Saccharomyces cerevisiae
gattctctagtcagtaatccacacg

SEQ ID NO: 196430 - DNA, 25 bp, Saccharomyces cerevisiae
atttatggctccatgccgttggagc

SEQ ID NO: 196431 - DNA, 25 bp, Saccharomyces cerevisiae
tctaatccaaactctagccttcatt

SEQ ID NO: 196432 - DNA, 25 bp, Saccharomyces cerevisiae
tagtattcgactagaaggtgatgag

SEQ ID NO: 196433 - DNA, 25 bp, Saccharomyces cerevisiae
taattacattggcactaagttctaa

SEQ ID NO: 196434 - DNA, 25 bp, Saccharomyces cerevisiae
tcaaatcacttaagttccgaaactg

SEQ ID NO: 196435 - DNA, 25 bp, Saccharomyces cerevisiae
ttctctagtcagtaatccacacgaa

SEQ ID NO: 196436 - DNA, 25 bp, Saccharomyces cerevisiae
ctgatgaacccgtacctgaatctgc

SEQ ID NO: 196437 - DNA, 25 bp, Saccharomyces cerevisiae
acgaaatttatggctccatgccgtt

SEQ ID NO: 196438 - DNA, 25 bp, Saccharomyces cerevisiae
agtagttcagtgttcaaaggcactg

SEQ ID NO: 196439 - DNA, 25 bp, Saccharomyces cerevisiae
taccccacagtagttcagtgttcaa

SEQ ID NO: 196440 - DNA, 25 bp, Saccharomyces cerevisiae
cacagtagttcagtgttcaaaggca

SEQ ID NO: 196441 - DNA, 25 bp, Saccharomyces cerevisiae
ttggatttgataccccacagtagtt

SEQ ID NO: 196442 - DNA, 25 bp, Saccharomyces cerevisiae
gtggtcaaaagctgttggcaattaa

SEQ ID NO: 196443 - DNA, 25 bp, Saccharomyces cerevisiae
acctataagcatgacagaggtattg

SEQ ID NO: 196444 - DNA, 25 bp, Saccharomyces cerevisiae
tgataccccacagtagttcagtgtt

SEQ ID NO: 196445 - DNA, 25 bp, Saccharomyces cerevisiae
gttcagtgttcaaaggcactgattt

SEQ ID NO: 196446 - DNA, 25 bp, Saccharomyces cerevisiae
atggttacgaagactctggatctac

SEQ ID NO: 196447 - DNA, 25 bp, Saccharomyces cerevisiae
tctacctataagcatgacagaggta

SEQ ID NO: 196448 - DNA, 25 bp, Saccharomyces cerevisiae
ccccacagtagttcagtgttcaaag

SEQ ID NO: 196449 - DNA, 25 bp, Saccharomyces cerevisiae
agaacgaacatgactattggaataa

SEQ ID NO: 196450 - DNA, 25 bp, Saccharomyces cerevisiae
ctggatctacctataagcatgacag

SEQ ID NO: 196451 - DNA, 25 bp, Saccharomyces cerevisiae
ctgatttcgtacattcagtaaagaa

SEQ ID NO: 196452 - DNA, 25 bp, Saccharomyces cerevisiae
gtgttcaaaggcactgatttcgtac

SEQ ID NO: 196453 - DNA, 25 bp, Saccharomyces cerevisiae
gtattagcaacaaggatgttatttt

SEQ ID NO: 196454 - DNA, 25 bp, Saccharomyces cerevisiae
tacgaagactctggatctacctata

SEQ ID NO: 196455 - DNA, 25 bp, Saccharomyces cerevisiae
gcactgatttcgtacattcagtaaa

SEQ ID NO: 196456 - DNA, 25 bp, Saccharomyces cerevisiae
gttacgaagactctggatctaccta

SEQ ID NO: 196457 - DNA, 25 bp, Saccharomyces cerevisiae
cccacagtagttcagtgttcaaagg

SEQ ID NO: 196458 - DNA, 25 bp, Saccharomyces cerevisiae
aagactctggatctacctataagca

SEQ ID NO: 196459 - DNA, 25 bp, Saccharomyces cerevisiae
actgatttcgtacattcagtaaaga

SEQ ID NO: 196460 - DNA, 25 bp, Saccharomyces cerevisiae
gatctacctataagcatgacagagg

SEQ ID NO: 196461 - DNA, 25 bp, Saccharomyces cerevisiae
tgttcaaaggcactgatttcgtaca

SEQ ID NO: 196462 - DNA, 25 bp, Saccharomyces cerevisiae
gaagactctggatctacctataagc

SEQ ID NO: 196463 - DNA, 25 bp, Saccharomyces cerevisiae
aaaggcactgatttcgtacattcag

SEQ ID NO: 196464 - DNA, 25 bp, Saccharomyces cerevisiae
ctagtggtcaaaagctgttggcaat

SEQ ID NO: 196465 - DNA, 25 bp, Saccharomyces cerevisiae
atttgataccccacagtagttcagt

SEQ ID NO: 196466 - DNA, 25 bp, Saccharomyces cerevisiae
tctggatctacctataagcatgaca

SEQ ID NO: 196467 - DNA, 25 bp, Saccharomyces cerevisiae
tatggttacgaagactctggatcta

SEQ ID NO: 196468 - DNA, 25 bp, Saccharomyces cerevisiae
cagtgttcaaaggcactgatttcgt

SEQ ID NO: 196469 - DNA, 25 bp, Saccharomyces cerevisiae
ccatattacagaacgaacatgacta

SEQ ID NO: 196470 - DNA, 25 bp, Saccharomyces cerevisiae
actctggatctacctataagcatga

SEQ ID NO: 196471 - DNA, 25 bp, Saccharomyces cerevisiae
tcagtgttcaaaggcactgatttcg

SEQ ID NO: 196472 - DNA, 25 bp, Saccharomyces cerevisiae
ttcaaaggcactgatttcgtacatt

SEQ ID NO: 196473 - DNA, 25 bp, Saccharomyces cerevisiae
atattacagaacgaacatgactatt

SEQ ID NO: 196474 - DNA, 25 bp, Saccharomyces cerevisiae
gtagttcagtgttcaaaggcactga

SEQ ID NO: 196475 - DNA, 25 bp, Saccharomyces cerevisiae
aaggcactgatttcgtacattcagt

SEQ ID NO: 196476 - DNA, 25 bp, Saccharomyces cerevisiae
atatagaatcacaaaatttggattt

SEQ ID NO: 196477 - DNA, 25 bp, Saccharomyces cerevisiae
cctataagcatgacagaggtattgc

SEQ ID NO: 196478 - DNA, 25 bp, Saccharomyces cerevisiae
aacgaacatgactattggaataaga

SEQ ID NO: 196479 - DNA, 25 bp, Saccharomyces cerevisiae
ttcgtacattcagtaaagaaattct

SEQ ID NO: 196480 - DNA, 25 bp, Saccharomyces cerevisiae
ggatctacctataagcatgacagag

SEQ ID NO: 196481 - DNA, 25 bp, Saccharomyces cerevisiae
gttccatattacagaacgaacatga

SEQ ID NO: 196482 - DNA, 25 bp, Saccharomyces cerevisiae
ttacagaacgaacatgactattgga

SEQ ID NO: 196483 - DNA, 25 bp, Saccharomyces cerevisiae
gatttgataccccacagtagttcag

SEQ ID NO: 196484 - DNA, 25 bp, Saccharomyces cerevisiae
ggttacgaagactctggatctacct

SEQ ID NO: 196485 - DNA, 25 bp, Saccharomyces cerevisiae
atttggatttgataccccacagtag

SEQ ID NO: 196486 - DNA, 25 bp, Saccharomyces cerevisiae
ataccccacagtagttcagtgttca

SEQ ID NO: 196487 - DNA, 25 bp, Saccharomyces cerevisiae
tccatattacagaacgaacatgact

SEQ ID NO: 196488 - DNA, 25 bp, Saccharomyces cerevisiae
atacgtctagaagggttagcattca

SEQ ID NO: 196489 - DNA, 25 bp, Saccharomyces cerevisiae
ctttctcctcctatgagccagaatt

SEQ ID NO: 196490 - DNA, 25 bp, Saccharomyces cerevisiae
gtactttctcctcctatgagccaga

SEQ ID NO: 196491 - DNA, 25 bp, Saccharomyces cerevisiae
cctatacgtctagaagggttagcat

SEQ ID NO: 196492 - DNA, 25 bp, Saccharomyces cerevisiae
aagattgttcttactggtgcaaagc

SEQ ID NO: 196493 - DNA, 25 bp, Saccharomyces cerevisiae
ttactggtgcaaagcaaagggaaga

SEQ ID NO: 196494 - DNA, 25 bp, Saccharomyces cerevisiae
agtcatggtactttctcctcctatg

SEQ ID NO: 196495 - DNA, 25 bp, Saccharomyces cerevisiae
tataccctgtgctaagtgaatttag

SEQ ID NO: 196496 - DNA, 25 bp, Saccharomyces cerevisiae
gaaagattgttcttactggtgcaaa

SEQ ID NO: 196497 - DNA, 25 bp, Saccharomyces cerevisiae
ttcagtcatggtactttctcctcct

SEQ ID NO: 196498 - DNA, 25 bp, Saccharomyces cerevisiae
ggtactttctcctcctatgagccag

SEQ ID NO: 196499 - DNA, 25 bp, Saccharomyces cerevisiae
ctatataccctgtgctaagtgaatt

SEQ ID NO: 196500 - DNA, 25 bp, Saccharomyces cerevisiae
ttctcctcctatgagccagaattgt

SEQ ID NO: 196501 - DNA, 25 bp, Saccharomyces cerevisiae
tgtttcctggtttgatctatagaat

SEQ ID NO: 196502 - DNA, 25 bp, Saccharomyces cerevisiae
ttgaagctatataccctgtgctaag

SEQ ID NO: 196503 - DNA, 25 bp, Saccharomyces cerevisiae
taccctgtgctaagtgaatttagaa

SEQ ID NO: 196504 - DNA, 25 bp, Saccharomyces cerevisiae
ggttagcattcagtcatggtacttt

SEQ ID NO: 196505 - DNA, 25 bp, Saccharomyces cerevisiae
agccagaattgtttcctggtttgat

SEQ ID NO: 196506 - DNA, 25 bp, Saccharomyces cerevisiae
cagaattgtttcctggtttgatcta

SEQ ID NO: 196507 - DNA, 25 bp, Saccharomyces cerevisiae
tctcctcctatgagccagaattgtt

SEQ ID NO: 196508 - DNA, 25 bp, Saccharomyces cerevisiae
gagccagaattgtttcctggtttga

SEQ ID NO: 196509 - DNA, 25 bp, Saccharomyces cerevisiae
attgttcttactggtgcaaagcaaa

SEQ ID NO: 196510 - DNA, 25 bp, Saccharomyces cerevisiae
ccagaattgtttcctggtttgatct

SEQ ID NO: 196511 - DNA, 25 bp, Saccharomyces cerevisiae
tcctcctatgagccagaattgtttc

SEQ ID NO: 196512 - DNA, 25 bp, Saccharomyces cerevisiae
tttgaagctatataccctgtgctaa

SEQ ID NO: 196513 - DNA, 25 bp, Saccharomyces cerevisiae
cttactggtgcaaagcaaagggaag

SEQ ID NO: 196514 - DNA, 25 bp, Saccharomyces cerevisiae
cttttgaagctatataccctgtgct

SEQ ID NO: 196515 - DNA, 25 bp, Saccharomyces cerevisiae
tcagtcatggtactttctcctccta

SEQ ID NO: 196516 - DNA, 25 bp, Saccharomyces cerevisiae
ggaaagattgttcttactggtgcaa

SEQ ID NO: 196517 - DNA, 25 bp, Saccharomyces cerevisiae
tcctatgagccagaattgtttcctg

SEQ ID NO: 196518 - DNA, 25 bp, Saccharomyces cerevisiae
cctatgagccagaattgtttcctgg

SEQ ID NO: 196519 - DNA, 25 bp, Saccharomyces cerevisiae
gttcttactggtgcaaagcaaaggg

SEQ ID NO: 196520 - DNA, 25 bp, Saccharomyces cerevisiae
atggtactttctcctcctatgagcc

SEQ ID NO: 196521 - DNA, 25 bp, Saccharomyces cerevisiae
gctatataccctgtgctaagtgaat

SEQ ID NO: 196522 - DNA, 25 bp, Saccharomyces cerevisiae
gcattcagtcatggtactttctcct

SEQ ID NO: 196523 - DNA, 25 bp, Saccharomyces cerevisiae
tacgtctagaagggttagcattcag

SEQ ID NO: 196524 - DNA, 25 bp, Saccharomyces cerevisiae
aattgtttcctggtttgatctatag

SEQ ID NO: 196525 - DNA, 25 bp, Saccharomyces cerevisiae
gaagctatataccctgtgctaagtg

SEQ ID NO: 196526 - DNA, 25 bp, Saccharomyces cerevisiae
taccaagcttttgaagctatatacc

SEQ ID NO: 196527 - DNA, 25 bp, Saccharomyces cerevisiae
tttaccaagcttttgaagctatata

SEQ ID NO: 196528 - DNA, 25 bp, Saccharomyces cerevisiae
ttagcattcagtcatggtactttct

SEQ ID NO: 196529 - DNA, 25 bp, Saccharomyces cerevisiae
tagcattcagtcatggtactttctc

SEQ ID NO: 196530 - DNA, 25 bp, Saccharomyces cerevisiae
catggtactttctcctcctatgagc

SEQ ID NO: 196531 - DNA, 25 bp, Saccharomyces cerevisiae
gtcatggtactttctcctcctatga

SEQ ID NO: 196532 - DNA, 25 bp, Saccharomyces cerevisiae
ttgttcttactggtgcaaagcaaag

SEQ ID NO: 196533 - DNA, 25 bp, Saccharomyces cerevisiae
tttcctggtttgatctatagaatgg

SEQ ID NO: 196534 - DNA, 25 bp, Saccharomyces cerevisiae
aagctatataccctgtgctaagtga

SEQ ID NO: 196535 - DNA, 25 bp, Saccharomyces cerevisiae
atataccctgtgctaagtgaattta

SEQ ID NO: 196536 - DNA, 25 bp, Saccharomyces cerevisiae
ttcttactggtgcaaagcaaaggga

SEQ ID NO: 196537 - DNA, 25 bp, Saccharomyces cerevisiae
ttgtttcctggtttgatctatagaa

SEQ ID NO: 196538 - DNA, 25 bp, Saccharomyces cerevisiae
actactttccagagtgaagaggaca

SEQ ID NO: 196539 - DNA, 25 bp, Saccharomyces cerevisiae
cactacaaaacattgtggcaactgt

SEQ ID NO: 196540 - DNA, 25 bp, Saccharomyces cerevisiae
gatccaaataccagacaagtatggg

SEQ ID NO: 196541 - DNA, 25 bp, Saccharomyces cerevisiae
aaaccagcaactactttccagagtg

SEQ ID NO: 196542 - DNA, 25 bp, Saccharomyces cerevisiae
ttgatccaaataccagacaagtatg

SEQ ID NO: 196543 - DNA, 25 bp, Saccharomyces cerevisiae
agcaactactttccagagtgaagag

SEQ ID NO: 196544 - DNA, 25 bp, Saccharomyces cerevisiae
ccgccacatcaggtattgttccaac

SEQ ID NO: 196545 - DNA, 25 bp, Saccharomyces cerevisiae
acatcaggtattgttccaacactac

SEQ ID NO: 196546 - DNA, 25 bp, Saccharomyces cerevisiae
cattgtggcaactgtgactttgggg

SEQ ID NO: 196547 - DNA, 25 bp, Saccharomyces cerevisiae
tactttccagagtgaagaggacata

SEQ ID NO: 196548 - DNA, 25 bp, Saccharomyces cerevisiae
ccaacactacaaaacattgtggcaa

SEQ ID NO: 196549 - DNA, 25 bp, Saccharomyces cerevisiae
caactactttccagagtgaagagga

SEQ ID NO: 196550 - DNA, 25 bp, Saccharomyces cerevisiae
tttgatccaaataccagacaagtat

SEQ ID NO: 196551 - DNA, 25 bp, Saccharomyces cerevisiae
acataaaaagagctgccccagaatc

SEQ ID NO: 196552 - DNA, 25 bp, Saccharomyces cerevisiae
gctgccccagaatctgaaaaagaca

SEQ ID NO: 196553 - DNA, 25 bp, Saccharomyces cerevisiae
cacatcaggtattgttccaacacta

SEQ ID NO: 196554 - DNA, 25 bp, Saccharomyces cerevisiae
caacactacaaaacattgtggcaac

SEQ ID NO: 196555 - DNA, 25 bp, Saccharomyces cerevisiae
accagcaactactttccagagtgaa

SEQ ID NO: 196556 - DNA, 25 bp, Saccharomyces cerevisiae
ctactttccagagtgaagaggacat

SEQ ID NO: 196557 - DNA, 25 bp, Saccharomyces cerevisiae
gccacatcaggtattgttccaacac

SEQ ID NO: 196558 - DNA, 25 bp, Saccharomyces cerevisiae
gagctgccccagaatctgaaaaaga

SEQ ID NO: 196559 - DNA, 25 bp, Saccharomyces cerevisiae
agtgtttgatccaaataccagacaa

SEQ ID NO: 196560 - DNA, 25 bp, Saccharomyces cerevisiae
cagcaactactttccagagtgaaga

SEQ ID NO: 196561 - DNA, 25 bp, Saccharomyces cerevisiae
cataaaaagagctgccccagaatct

SEQ ID NO: 196562 - DNA, 25 bp, Saccharomyces cerevisiae
tttccagagtgaagaggacataaaa

SEQ ID NO: 196563 - DNA, 25 bp, Saccharomyces cerevisiae
agagctgccccagaatctgaaaaag

SEQ ID NO: 196564 - DNA, 25 bp, Saccharomyces cerevisiae
tacaaaaccagcaactactttccag

SEQ ID NO: 196565 - DNA, 25 bp, Saccharomyces cerevisiae
tccgccacatcaggtattgttccaa

SEQ ID NO: 196566 - DNA, 25 bp, Saccharomyces cerevisiae
agctgccccagaatctgaaaaagac

SEQ ID NO: 196567 - DNA, 25 bp, Saccharomyces cerevisiae
tccaacactacaaaacattgtggca

SEQ ID NO: 196568 - DNA, 25 bp, Saccharomyces cerevisiae
tgtttgatccaaataccagacaagt

SEQ ID NO: 196569 - DNA, 25 bp, Saccharomyces cerevisiae
aacattgtggcaactgtgactttgg

SEQ ID NO: 196570 - DNA, 25 bp, Saccharomyces cerevisiae
tgatccaaataccagacaagtatgg

SEQ ID NO: 196571 - DNA, 25 bp, Saccharomyces cerevisiae
gcaactactttccagagtgaagagg

SEQ ID NO: 196572 - DNA, 25 bp, Saccharomyces cerevisiae
gccccagaatctgaaaaagacacct

SEQ ID NO: 196573 - DNA, 25 bp, Saccharomyces cerevisiae
ttgttccaacactacaaaacattgt

SEQ ID NO: 196574 - DNA, 25 bp, Saccharomyces cerevisiae
aacactacaaaacattgtggcaact

SEQ ID NO: 196575 - DNA, 25 bp, Saccharomyces cerevisiae
actttccagagtgaagaggacataa

SEQ ID NO: 196576 - DNA, 25 bp, Saccharomyces cerevisiae
aaccagcaactactttccagagtga

SEQ ID NO: 196577 - DNA, 25 bp, Saccharomyces cerevisiae
tgttccaacactacaaaacattgtg

SEQ ID NO: 196578 - DNA, 25 bp, Saccharomyces cerevisiae
gtattgttccaacactacaaaacat

SEQ ID NO: 196579 - DNA, 25 bp, Saccharomyces cerevisiae
gttccaacactacaaaacattgtgg

SEQ ID NO: 196580 - DNA, 25 bp, Saccharomyces cerevisiae
atcaggtattgttccaacactacaa

SEQ ID NO: 196581 - DNA, 25 bp, Saccharomyces cerevisiae
actacaaaacattgtggcaactgtg

SEQ ID NO: 196582 - DNA, 25 bp, Saccharomyces cerevisiae
catcaggtattgttccaacactaca

SEQ ID NO: 196583 - DNA, 25 bp, Saccharomyces cerevisiae
ctacaaaacattgtggcaactgtga

SEQ ID NO: 196584 - DNA, 25 bp, Saccharomyces cerevisiae
attgttccaacactacaaaacattg

SEQ ID NO: 196585 - DNA, 25 bp, Saccharomyces cerevisiae
cgccacatcaggtattgttccaaca

SEQ ID NO: 196586 - DNA, 25 bp, Saccharomyces cerevisiae
tccaaataccagacaagtatgggaa

SEQ ID NO: 196587 - DNA, 25 bp, Saccharomyces cerevisiae
tgccccagaatctgaaaaagacacc

SEQ ID NO: 196588 - DNA, 25 bp, Saccharomyces cerevisiae
gtgtttgatccaaataccagacaag

SEQ ID NO: 196589 - DNA, 25 bp, Saccharomyces cerevisiae
ttgctgctaaattcacagacttcaa

SEQ ID NO: 196590 - DNA, 25 bp, Saccharomyces cerevisiae
caaagctggccagtagaaaatatgc

SEQ ID NO: 196591 - DNA, 25 bp, Saccharomyces cerevisiae
ctaaattcacagacttcaaaataca

SEQ ID NO: 196592 - DNA, 25 bp, Saccharomyces cerevisiae
ctgaaaacagttgcgctacatgccc

SEQ ID NO: 196593 - DNA, 25 bp, Saccharomyces cerevisiae
gttgcgctacatgcccgtaatgcag

SEQ ID NO: 196594 - DNA, 25 bp, Saccharomyces cerevisiae
cagttgcgctacatgcccgtaatgc

SEQ ID NO: 196595 - DNA, 25 bp, Saccharomyces cerevisiae
ctgctaaattcacagacttcaaaat

SEQ ID NO: 196596 - DNA, 25 bp, Saccharomyces cerevisiae
aaccccaagcgttttgctgctgtca

SEQ ID NO: 196597 - DNA, 25 bp, Saccharomyces cerevisiae
gcagaatataaccccaagcgttttg

SEQ ID NO: 196598 - DNA, 25 bp, Saccharomyces cerevisiae
tttgctgctaaattcacagacttca

SEQ ID NO: 196599 - DNA, 25 bp, Saccharomyces cerevisiae
aatgcagaatataaccccaagcgtt

SEQ ID NO: 196600 - DNA, 25 bp, Saccharomyces cerevisiae
cccaagcgttttgctgctgtcatca

SEQ ID NO: 196601 - DNA, 25 bp, Saccharomyces cerevisiae
tcgggtttgctgctaaattcacaga

SEQ ID NO: 196602 - DNA, 25 bp, Saccharomyces cerevisiae
atgcagaatataaccccaagcgttt

SEQ ID NO: 196603 - DNA, 25 bp, Saccharomyces cerevisiae
gcgctacatgcccgtaatgcagaat

SEQ ID NO: 196604 - DNA, 25 bp, Saccharomyces cerevisiae
tcaaagctggccagtagaaaatatg

SEQ ID NO: 196605 - DNA, 25 bp, Saccharomyces cerevisiae
accccaagcgttttgctgctgtcat

SEQ ID NO: 196606 - DNA, 25 bp, Saccharomyces cerevisiae
cgctacatgcccgtaatgcagaata

SEQ ID NO: 196607 - DNA, 25 bp, Saccharomyces cerevisiae
atgcccgtaatgcagaatataaccc

SEQ ID NO: 196608 - DNA, 25 bp, Saccharomyces cerevisiae
aagctggccagtagaaaatatgcaa

SEQ ID NO: 196609 - DNA, 25 bp, Saccharomyces cerevisiae
ataaccccaagcgttttgctgctgt

SEQ ID NO: 196610 - DNA, 25 bp, Saccharomyces cerevisiae
agcgttttgctgctgtcatcatgcg

SEQ ID NO: 196611 - DNA, 25 bp, Saccharomyces cerevisiae
atgactcaaagctggccagtagaaa

SEQ ID NO: 196612 - DNA, 25 bp, Saccharomyces cerevisiae
ggtttgctgctaaattcacagactt

SEQ ID NO: 196613 - DNA, 25 bp, Saccharomyces cerevisiae
atcgggtttgctgctaaattcacag

SEQ ID NO: 196614 - DNA, 25 bp, Saccharomyces cerevisiae
aggatgactcaaagctggccagtag

SEQ ID NO: 196615 - DNA, 25 bp, Saccharomyces cerevisiae
gctgctaaattcacagacttcaaaa

SEQ ID NO: 196616 - DNA, 25 bp, Saccharomyces cerevisiae
ctgctgtcatcatgcgtattagaga

SEQ ID NO: 196617 - DNA, 25 bp, Saccharomyces cerevisiae
catgcccgtaatgcagaatataacc

SEQ ID NO: 196618 - DNA, 25 bp, Saccharomyces cerevisiae
tttgctgctgtcatcatgcgtatta

SEQ ID NO: 196619 - DNA, 25 bp, Saccharomyces cerevisiae
gtcatcatgcgtattagagagccaa

SEQ ID NO: 196620 - DNA, 25 bp, Saccharomyces cerevisiae
gagagccaaaaactacagctttaat

SEQ ID NO: 196621 - DNA, 25 bp, Saccharomyces cerevisiae
gctgctgtcatcatgcgtattagag

SEQ ID NO: 196622 - DNA, 25 bp, Saccharomyces cerevisiae
ctgtcatcatgcgtattagagagcc

SEQ ID NO: 196623 - DNA, 25 bp, Saccharomyces cerevisiae
cgttttgctgctgtcatcatgcgta

SEQ ID NO: 196624 - DNA, 25 bp, Saccharomyces cerevisiae
ttgcgctacatgcccgtaatgcaga

SEQ ID NO: 196625 - DNA, 25 bp, Saccharomyces cerevisiae
acagttgcgctacatgcccgtaatg

SEQ ID NO: 196626 - DNA, 25 bp, Saccharomyces cerevisiae
atcatgcgtattagagagccaaaaa

SEQ ID NO: 196627 - DNA, 25 bp, Saccharomyces cerevisiae
ttgctgctgtcatcatgcgtattag

SEQ ID NO: 196628 - DNA, 25 bp, Saccharomyces cerevisiae
aagcgttttgctgctgtcatcatgc

SEQ ID NO: 196629 - DNA, 25 bp, Saccharomyces cerevisiae
gttaccggtgcaaaaagtgaggatg

SEQ ID NO: 196630 - DNA, 25 bp, Saccharomyces cerevisiae
cagacttcaaaatacaaaatattgt

SEQ ID NO: 196631 - DNA, 25 bp, Saccharomyces cerevisiae
gatgactcaaagctggccagtagaa

SEQ ID NO: 196632 - DNA, 25 bp, Saccharomyces cerevisiae
gacttcaaaatacaaaatattgtcg

SEQ ID NO: 196633 - DNA, 25 bp, Saccharomyces cerevisiae
ttaccggtgcaaaaagtgaggatga

SEQ ID NO: 196634 - DNA, 25 bp, Saccharomyces cerevisiae
gaatataaccccaagcgttttgctg

SEQ ID NO: 196635 - DNA, 25 bp, Saccharomyces cerevisiae
gactcaaagctggccagtagaaaat

SEQ ID NO: 196636 - DNA, 25 bp, Saccharomyces cerevisiae
gttttgctgctgtcatcatgcgtat

SEQ ID NO: 196637 - DNA, 25 bp, Saccharomyces cerevisiae
tacatgcccgtaatgcagaatataa

SEQ ID NO: 196638 - DNA, 25 bp, Saccharomyces cerevisiae
tcatcatgcgtattagagagccaaa

SEQ ID NO: 196639 - DNA, 25 bp, Saccharomyces cerevisiae
aagtgtgatgtcgatgtccgtaagg

SEQ ID NO: 196640 - DNA, 25 bp, Saccharomyces cerevisiae
aatcaccgctttggctccatcttcc

SEQ ID NO: 196641 - DNA, 25 bp, Saccharomyces cerevisiae
ctttggctccatcttccatgaaggt

SEQ ID NO: 196642 - DNA, 25 bp, Saccharomyces cerevisiae
gatcattgctcctccagaaagaaag

SEQ ID NO: 196643 - DNA, 25 bp, Saccharomyces cerevisiae
caggtattgccgaaagaatgcaaaa

SEQ ID NO: 196644 - DNA, 25 bp, Saccharomyces cerevisiae
gaaagtggtccatctatcgttcacc

SEQ ID NO: 196645 - DNA, 25 bp, Saccharomyces cerevisiae
tcgatgtccgtaaggaattatacgg

SEQ ID NO: 196646 - DNA, 25 bp, Saccharomyces cerevisiae
taccaccatgttcccaggtattgcc

SEQ ID NO: 196647 - DNA, 25 bp, Saccharomyces cerevisiae
tatgtccggtggtaccaccatgttc

SEQ ID NO: 196648 - DNA, 25 bp, Saccharomyces cerevisiae
gaattatacggtaacatcgttatgt

SEQ ID NO: 196649 - DNA, 25 bp, Saccharomyces cerevisiae
ccaacaaatgtggatctcaaaacaa

SEQ ID NO: 196650 - DNA, 25 bp, Saccharomyces cerevisiae
ttcccaggtattgccgaaagaatgc

SEQ ID NO: 196651 - DNA, 25 bp, Saccharomyces cerevisiae
tatacggtaacatcgttatgtccgg

SEQ ID NO: 196652 - DNA, 25 bp, Saccharomyces cerevisiae
gattggtggttctatcttggcttct

SEQ ID NO: 196653 - DNA, 25 bp, Saccharomyces cerevisiae
cgacgaaagtggtccatctatcgtt

SEQ ID NO: 196654 - DNA, 25 bp, Saccharomyces cerevisiae
gaaagtactccgtctggattggtgg

SEQ ID NO: 196655 - DNA, 25 bp, Saccharomyces cerevisiae
tccggtggtaccaccatgttcccag

SEQ ID NO: 196656 - DNA, 25 bp, Saccharomyces cerevisiae
ctatcgttcaccacaagtgtttcta

SEQ ID NO: 196657 - DNA, 25 bp, Saccharomyces cerevisiae
cgctttggctccatcttccatgaag

SEQ ID NO: 196658 - DNA, 25 bp, Saccharomyces cerevisiae
catctatcgttcaccacaagtgttt

SEQ ID NO: 196659 - DNA, 25 bp, Saccharomyces cerevisiae
gtactccgtctggattggtggttct

SEQ ID NO: 196660 - DNA, 25 bp, Saccharomyces cerevisiae
tcattgctcctccagaaagaaagta

SEQ ID NO: 196661 - DNA, 25 bp, Saccharomyces cerevisiae
tcttggcttctttgactaccttcca

SEQ ID NO: 196662 - DNA, 25 bp, Saccharomyces cerevisiae
atcttccatgaaggtcaagatcatt

SEQ ID NO: 196663 - DNA, 25 bp, Saccharomyces cerevisiae
ggtccatctatcgttcaccacaagt

SEQ ID NO: 196664 - DNA, 25 bp, Saccharomyces cerevisiae
ttccaacaaatgtggatctcaaaac

SEQ ID NO: 196665 - DNA, 25 bp, Saccharomyces cerevisiae
tgactaccttccaacaaatgtggat

SEQ ID NO: 196666 - DNA, 25 bp, Saccharomyces cerevisiae
cttccatgaaggtcaagatcattgc

SEQ ID NO: 196667 - DNA, 25 bp, Saccharomyces cerevisiae
tgttcccaggtattgccgaaagaat

SEQ ID NO: 196668 - DNA, 25 bp, Saccharomyces cerevisiae
gtgatgtcgatgtccgtaaggaatt

SEQ ID NO: 196669 - DNA, 25 bp, Saccharomyces cerevisiae
ggtggttctatcttggcttctttga

SEQ ID NO: 196670 - DNA, 25 bp, Saccharomyces cerevisiae
tcaccgctttggctccatcttccat

SEQ ID NO: 196671 - DNA, 25 bp, Saccharomyces cerevisiae
gatgtcgatgtccgtaaggaattat

SEQ ID NO: 196672 - DNA, 25 bp, Saccharomyces cerevisiae
tggattggtggttctatcttggctt

SEQ ID NO: 196673 - DNA, 25 bp, Saccharomyces cerevisiae
gttctatcttggcttctttgactac

SEQ ID NO: 196674 - DNA, 25 bp, Saccharomyces cerevisiae
ttggctccatcttccatgaaggtca

SEQ ID NO: 196675 - DNA, 25 bp, Saccharomyces cerevisiae
tacggtaacatcgttatgtccggtg

SEQ ID NO: 196676 - DNA, 25 bp, Saccharomyces cerevisiae
actccgtctggattggtggttctat

SEQ ID NO: 196677 - DNA, 25 bp, Saccharomyces cerevisiae
tccatctatcgttcaccacaagtgt

SEQ ID NO: 196678 - DNA, 25 bp, Saccharomyces cerevisiae
atcatgaagtgtgatgtcgatgtcc

SEQ ID NO: 196679 - DNA, 25 bp, Saccharomyces cerevisiae
gtggtccatctatcgttcaccacaa

SEQ ID NO: 196680 - DNA, 25 bp, Saccharomyces cerevisiae
tacgacgaaagtggtccatctatcg

SEQ ID NO: 196681 - DNA, 25 bp, Saccharomyces cerevisiae
actaccttccaacaaatgtggatct

SEQ ID NO: 196682 - DNA, 25 bp, Saccharomyces cerevisiae
taccttccaacaaatgtggatctca

SEQ ID NO: 196683 - DNA, 25 bp, Saccharomyces cerevisiae
aggaaatcaccgctttggctccatc

SEQ ID NO: 196684 - DNA, 25 bp, Saccharomyces cerevisiae
cgtctggattggtggttctatcttg

SEQ ID NO: 196685 - DNA, 25 bp, Saccharomyces cerevisiae
tgtcgatgtccgtaaggaattatac

SEQ ID NO: 196686 - DNA, 25 bp, Saccharomyces cerevisiae
ccatcttccatgaaggtcaagatca

SEQ ID NO: 196687 - DNA, 25 bp, Saccharomyces cerevisiae
tgctcctccagaaagaaagtactcc

SEQ ID NO: 196688 - DNA, 25 bp, Saccharomyces cerevisiae
gaaagaaagtactccgtctggattg

SEQ ID NO: 196689 - DNA, 25 bp, Saccharomyces cerevisiae
tttgactaccttccaacaaatgtgg

SEQ ID NO: 196690 - DNA, 25 bp, Saccharomyces cerevisiae
gctcaatccaagagaggtatcttga

SEQ ID NO: 196691 - DNA, 25 bp, Saccharomyces cerevisiae
gacgacgctcctcgtgctgtcttcc

SEQ ID NO: 196692 - DNA, 25 bp, Saccharomyces cerevisiae
ctacaacgaattgagagttgcccca

SEQ ID NO: 196693 - DNA, 25 bp, Saccharomyces cerevisiae
caccaaggtatcatggtcggtatgg

SEQ ID NO: 196694 - DNA, 25 bp, Saccharomyces cerevisiae
gtgatgaagctcaatccaagagagg

SEQ ID NO: 196695 - DNA, 25 bp, Saccharomyces cerevisiae
ttgagagttgccccagaagaacacc

SEQ ID NO: 196696 - DNA, 25 bp, Saccharomyces cerevisiae
gagttgccccagaagaacaccctgt

SEQ ID NO: 196697 - DNA, 25 bp, Saccharomyces cerevisiae
tctggtatgtgtaaagccggttttg

SEQ ID NO: 196698 - DNA, 25 bp, Saccharomyces cerevisiae
gaccaagacaccaaggtatcatggt

SEQ ID NO: 196699 - DNA, 25 bp, Saccharomyces cerevisiae
tcctcgtgctgtcttcccatctatc

SEQ ID NO: 196700 - DNA, 25 bp, Saccharomyces cerevisiae
ccaattgaacacggtattgtcacca

SEQ ID NO: 196701 - DNA, 25 bp, Saccharomyces cerevisiae
cttcccatctatcgtcggtagacca

SEQ ID NO: 196702 - DNA, 25 bp, Saccharomyces cerevisiae
gagagttgccccagaagaacaccct

SEQ ID NO: 196703 - DNA, 25 bp, Saccharomyces cerevisiae
ccaagacaccaaggtatcatggtcg

SEQ ID NO: 196704 - DNA, 25 bp, Saccharomyces cerevisiae
actcctacgttggtgatgaagctca

SEQ ID NO: 196705 - DNA, 25 bp, Saccharomyces cerevisiae
tcaaaaagactcctacgttggtgat

SEQ ID NO: 196706 - DNA, 25 bp, Saccharomyces cerevisiae
ttctacaacgaattgagagttgccc

SEQ ID NO: 196707 - DNA, 25 bp, Saccharomyces cerevisiae
agactcctacgttggtgatgaagct

SEQ ID NO: 196708 - DNA, 25 bp, Saccharomyces cerevisiae
tgataacggttctggtatgtgtaaa

SEQ ID NO: 196709 - DNA, 25 bp, Saccharomyces cerevisiae
ttgctgctttggttattgataacgg

SEQ ID NO: 196710 - DNA, 25 bp, Saccharomyces cerevisiae
tgccccagaagaacaccctgttctt

SEQ ID NO: 196711 - DNA, 25 bp, Saccharomyces cerevisiae
atcataccttctacaacgaattgag

SEQ ID NO: 196712 - DNA, 25 bp, Saccharomyces cerevisiae
ctcgtgctgtcttcccatctatcgt

SEQ ID NO: 196713 - DNA, 25 bp, Saccharomyces cerevisiae
ttgccggtgacgacgctcctcgtgc

SEQ ID NO: 196714 - DNA, 25 bp, Saccharomyces cerevisiae
gtgacgacgctcctcgtgctgtctt

SEQ ID NO: 196715 - DNA, 25 bp, Saccharomyces cerevisiae
ttttgccggtgacgacgctcctcgt

SEQ ID NO: 196716 - DNA, 25 bp, Saccharomyces cerevisiae
tgaagctcaatccaagagaggtatc

SEQ ID NO: 196717 - DNA, 25 bp, Saccharomyces cerevisiae
atcgtcggtagaccaagacaccaag

SEQ ID NO: 196718 - DNA, 25 bp, Saccharomyces cerevisiae
aagacaccaaggtatcatggtcggt

SEQ ID NO: 196719 - DNA, 25 bp, Saccharomyces cerevisiae
tcggtagaccaagacaccaaggtat

SEQ ID NO: 196720 - DNA, 25 bp, Saccharomyces cerevisiae
tcccatctatcgtcggtagaccaag

SEQ ID NO: 196721 - DNA, 25 bp, Saccharomyces cerevisiae
taccttctacaacgaattgagagtt

SEQ ID NO: 196722 - DNA, 25 bp, Saccharomyces cerevisiae
cgtgctgtcttcccatctatcgtcg

SEQ ID NO: 196723 - DNA, 25 bp, Saccharomyces cerevisiae
cataccttctacaacgaattgagag

SEQ ID NO: 196724 - DNA, 25 bp, Saccharomyces cerevisiae
ggtatcatggtcggtatgggtcaaa

SEQ ID NO: 196725 - DNA, 25 bp, Saccharomyces cerevisiae
attgataacggttctggtatgtgta

SEQ ID NO: 196726 - DNA, 25 bp, Saccharomyces cerevisiae
tcaatccaagagaggtatcttgact

SEQ ID NO: 196727 - DNA, 25 bp, Saccharomyces cerevisiae
aaggtatcatggtcggtatgggtca

SEQ ID NO: 196728 - DNA, 25 bp, Saccharomyces cerevisiae
tgctgtcttcccatctatcgtcggt

SEQ ID NO: 196729 - DNA, 25 bp, Saccharomyces cerevisiae
tcatggtcggtatgggtcaaaaaga

SEQ ID NO: 196730 - DNA, 25 bp, Saccharomyces cerevisiae
tcctacgttggtgatgaagctcaat

SEQ ID NO: 196731 - DNA, 25 bp, Saccharomyces cerevisiae
ccatctatcgtcggtagaccaagac

SEQ ID NO: 196732 - DNA, 25 bp, Saccharomyces cerevisiae
ccaaggtatcatggtcggtatgggt

SEQ ID NO: 196733 - DNA, 25 bp, Saccharomyces cerevisiae
ctatcgtcggtagaccaagacacca

SEQ ID NO: 196734 - DNA, 25 bp, Saccharomyces cerevisiae
aagctcaatccaagagaggtatctt

SEQ ID NO: 196735 - DNA, 25 bp, Saccharomyces cerevisiae
tagaccaagacaccaaggtatcatg

SEQ ID NO: 196736 - DNA, 25 bp, Saccharomyces cerevisiae
gatctggcatcataccttctacaac

SEQ ID NO: 196737 - DNA, 25 bp, Saccharomyces cerevisiae
ttgaacacggtattgtcaccaactg

SEQ ID NO: 196738 - DNA, 25 bp, Saccharomyces cerevisiae
gccggtgacgacgctcctcgtgctg

SEQ ID NO: 196739 - DNA, 25 bp, Saccharomyces cerevisiae
gcatcataccttctacaacgaattg

SEQ ID NO: 196740 - DNA, 25 bp, Saccharomyces cerevisiae
aattgagagttgccccagaagaaca

SEQ ID NO: 196741 - DNA, 25 bp, Saccharomyces cerevisiae
gatcttgagtgaacgtggttactct

SEQ ID NO: 196742 - DNA, 25 bp, Saccharomyces cerevisiae
gaaattgtccgtgacatcaaggaaa

SEQ ID NO: 196743 - DNA, 25 bp, Saccharomyces cerevisiae
tggtgttactcacgtcgttccaatt

SEQ ID NO: 196744 - DNA, 25 bp, Saccharomyces cerevisiae
ctacttgatgaagatcttgagtgaa

SEQ ID NO: 196745 - DNA, 25 bp, Saccharomyces cerevisiae
gctggtttctctctacctcacgcca

SEQ ID NO: 196746 - DNA, 25 bp, Saccharomyces cerevisiae
acctcacgccattttgagaatcgat

SEQ ID NO: 196747 - DNA, 25 bp, Saccharomyces cerevisiae
ttgtccgtgacatcaaggaaaaact

SEQ ID NO: 196748 - DNA, 25 bp, Saccharomyces cerevisiae
tggtttctctctacctcacgccatt

SEQ ID NO: 196749 - DNA, 25 bp, Saccharomyces cerevisiae
aagatcttgagtgaacgtggttact

SEQ ID NO: 196750 - DNA, 25 bp, Saccharomyces cerevisiae
agatttgactgactacttgatgaag

SEQ ID NO: 196751 - DNA, 25 bp, Saccharomyces cerevisiae
tccaccactgctgaaagagaaattg

SEQ ID NO: 196752 - DNA, 25 bp, Saccharomyces cerevisiae
ctgctcaatcttcttcaattgaaaa

SEQ ID NO: 196753 - DNA, 25 bp, Saccharomyces cerevisiae
ctgactacttgatgaagatcttgag

SEQ ID NO: 196754 - DNA, 25 bp, Saccharomyces cerevisiae
ggttactctttctccaccactgctg

SEQ ID NO: 196755 - DNA, 25 bp, Saccharomyces cerevisiae
ctcacgtcgttccaatttacgctgg

SEQ ID NO: 196756 - DNA, 25 bp, Saccharomyces cerevisiae
acgctggtttctctctacctcacgc

SEQ ID NO: 196757 - DNA, 25 bp, Saccharomyces cerevisiae
ctcacgccattttgagaatcgattt

SEQ ID NO: 196758 - DNA, 25 bp, Saccharomyces cerevisiae
aatcgatttggccggtagagatttg

SEQ ID NO: 196759 - DNA, 25 bp, Saccharomyces cerevisiae
caagaaatgcaaaccgctgctcaat

SEQ ID NO: 196760 - DNA, 25 bp, Saccharomyces cerevisiae
tttctccaccactgctgaaagagaa

SEQ ID NO: 196761 - DNA, 25 bp, Saccharomyces cerevisiae
tgagaatcgatttggccggtagaga

SEQ ID NO: 196762 - DNA, 25 bp, Saccharomyces cerevisiae
gctcaatcttcttcaattgaaaaat

SEQ ID NO: 196763 - DNA, 25 bp, Saccharomyces cerevisiae
tactcacgtcgttccaatttacgct

SEQ ID NO: 196764 - DNA, 25 bp, Saccharomyces cerevisiae
ttgactgactacttgatgaagatct

SEQ ID NO: 196765 - DNA, 25 bp, Saccharomyces cerevisiae
accgctgctcaatcttcttcaattg

SEQ ID NO: 196766 - DNA, 25 bp, Saccharomyces cerevisiae
cgctgctcaatcttcttcaattgaa

SEQ ID NO: 196767 - DNA, 25 bp, Saccharomyces cerevisiae
gcaaaccgctgctcaatcttcttca

SEQ ID NO: 196768 - DNA, 25 bp, Saccharomyces cerevisiae
tcaatcttcttcaattgaaaaatcc

SEQ ID NO: 196769 - DNA, 25 bp, Saccharomyces cerevisiae
ccattttgagaatcgatttggccgg

SEQ ID NO: 196770 - DNA, 25 bp, Saccharomyces cerevisiae
atgcaaaccgctgctcaatcttctt

SEQ ID NO: 196771 - DNA, 25 bp, Saccharomyces cerevisiae
agaatcgatttggccggtagagatt

SEQ ID NO: 196772 - DNA, 25 bp, Saccharomyces cerevisiae
gactgactacttgatgaagatcttg

SEQ ID NO: 196773 - DNA, 25 bp, Saccharomyces cerevisiae
aaaccgctgctcaatcttcttcaat

SEQ ID NO: 196774 - DNA, 25 bp, Saccharomyces cerevisiae
tttggccggtagagatttgactgac

SEQ ID NO: 196775 - DNA, 25 bp, Saccharomyces cerevisiae
aaatgcaaaccgctgctcaatcttc

SEQ ID NO: 196776 - DNA, 25 bp, Saccharomyces cerevisiae
cgccattttgagaatcgatttggcc

SEQ ID NO: 196777 - DNA, 25 bp, Saccharomyces cerevisiae
gatggtgttactcacgtcgttccaa

SEQ ID NO: 196778 - DNA, 25 bp, Saccharomyces cerevisiae
gatttggccggtagagatttgactg

SEQ ID NO: 196779 - DNA, 25 bp, Saccharomyces cerevisiae
gtggttactctttctccaccactgc

SEQ ID NO: 196780 - DNA, 25 bp, Saccharomyces cerevisiae
tctccaccactgctgaaagagaaat

SEQ ID NO: 196781 - DNA, 25 bp, Saccharomyces cerevisiae
ccttggacttcgaacaagaaatgca

SEQ ID NO: 196782 - DNA, 25 bp, Saccharomyces cerevisiae
tcgatttggccggtagagatttgac

SEQ ID NO: 196783 - DNA, 25 bp, Saccharomyces cerevisiae
cacgccattttgagaatcgatttgg

SEQ ID NO: 196784 - DNA, 25 bp, Saccharomyces cerevisiae
tccaatttacgctggtttctctcta

SEQ ID NO: 196785 - DNA, 25 bp, Saccharomyces cerevisiae
caccactgctgaaagagaaattgtc

SEQ ID NO: 196786 - DNA, 25 bp, Saccharomyces cerevisiae
tttgagaatcgatttggccggtaga

SEQ ID NO: 196787 - DNA, 25 bp, Saccharomyces cerevisiae
gtccgtgacatcaaggaaaaactat

SEQ ID NO: 196788 - DNA, 25 bp, Saccharomyces cerevisiae
atttgactgactacttgatgaagat

SEQ ID NO: 196789 - DNA, 25 bp, Saccharomyces cerevisiae
ttacgctggtttctctctacctcac

SEQ ID NO: 196790 - DNA, 25 bp, Saccharomyces cerevisiae
ctacctcacgccattttgagaatcg

SEQ ID NO: 196791 - DNA, 25 bp, Bacillus subtilis
gtacggtcagtttgcgtaaagaaga

SEQ ID NO: 196792 - DNA, 25 bp, Bacillus subtilis
gaagcgatcttttccgccggaatcc

SEQ ID NO: 196793 - DNA, 25 bp, Bacillus subtilis
tatcccgtcaaaggattccgtttct

SEQ ID NO: 196794 - DNA, 25 bp, Bacillus subtilis
caattcggtcaattgtcactgtcat

SEQ ID NO: 196795 - DNA, 25 bp, Bacillus subtilis
ttcatcagccggattttgttattga

SEQ ID NO: 196796 - DNA, 25 bp, Bacillus subtilis
ttccggcgcataaagtcagcaaggt

SEQ ID NO: 196797 - DNA, 25 bp, Bacillus subtilis
atctcggatacaatagaggcaaaga

SEQ ID NO: 196798 - DNA, 25 bp, Bacillus subtilis
aagaattcagctaacgcttccagac

SEQ ID NO: 196799 - DNA, 25 bp, Bacillus subtilis
gctgaagcagcccgcatattaggcg

SEQ ID NO: 196800 - DNA, 25 bp, Bacillus subtilis
gatttgacagaagcggaactctctt

SEQ ID NO: 196801 - DNA, 25 bp, Bacillus subtilis
tcatcagccggattttgttattgat

SEQ ID NO: 196802 - DNA, 25 bp, Bacillus subtilis
ccaaattttgcgctcggtgcgatac

SEQ ID NO: 196803 - DNA, 25 bp, Bacillus subtilis
gaaaaagggatcggagccatcatcg

SEQ ID NO: 196804 - DNA, 25 bp, Bacillus subtilis
attatctgatgtgatgcctgttgag

SEQ ID NO: 196805 - DNA, 25 bp, Bacillus subtilis
acaaccggtttctcagaagctgatt

SEQ ID NO: 196806 - DNA, 25 bp, Bacillus subtilis
acaccacattttgaccttgtagggg

SEQ ID NO: 196807 - DNA, 25 bp, Bacillus subtilis
acaaccggatgtcttgattgattta

SEQ ID NO: 196808 - DNA, 25 bp, Bacillus subtilis
tcatcatgaccagaagcttgacgca

SEQ ID NO: 196809 - DNA, 25 bp, Bacillus subtilis
tcttgattgatttaacaacgcccga

SEQ ID NO: 196810 - DNA, 25 bp, Bacillus subtilis
ggccatagaccatacatacgatcag

SEQ ID NO: 196811 - DNA, 25 bp, Bacillus subtilis
ctcggtgcgatactgatgatgaaat

SEQ ID NO: 196812 - DNA, 25 bp, Bacillus subtilis
ttagagcacggagtccgtccagttg

SEQ ID NO: 196813 - DNA, 25 bp, Bacillus subtilis
tgaaccggatgtctcggcattaatc

SEQ ID NO: 196814 - DNA, 25 bp, Bacillus subtilis
ctgcggaaattcttgtgcgcacact

SEQ ID NO: 196815 - DNA, 25 bp, Bacillus subtilis
cccacagtgatgatgtcgagatcgg

SEQ ID NO: 196816 - DNA, 25 bp, Bacillus subtilis
gcggaaattcttgtgcgcacacttg

SEQ ID NO: 196817 - DNA, 25 bp, Bacillus subtilis
tgaagattgatcagcttgtgtatgg

SEQ ID NO: 196818 - DNA, 25 bp, Bacillus subtilis
ccgaatgtataatgctgacgttctt

SEQ ID NO: 196819 - DNA, 25 bp, Bacillus subtilis
atgaaggtgttttcgaattccgtga

SEQ ID NO: 196820 - DNA, 25 bp, Bacillus subtilis
gtcatttttttgcgcgacccgctga

SEQ ID NO: 196821 - DNA, 25 bp, Bacillus subtilis
aaagaatcatgatctatacgcaacc

SEQ ID NO: 196822 - DNA, 25 bp, Bacillus subtilis
gaaaattgctttgatcgcgcatgac

SEQ ID NO: 196823 - DNA, 25 bp, Bacillus subtilis
ccgtttatgtgatgtgtattccatt

SEQ ID NO: 196824 - DNA, 25 bp, Bacillus subtilis
atacggccggttttgtgttagcagc

SEQ ID NO: 196825 - DNA, 25 bp, Bacillus subtilis
ttcatttgtatccaaggtgctgaat

SEQ ID NO: 196826 - DNA, 25 bp, Bacillus subtilis
ttgtatccaaggtgctgaatcttgg

SEQ ID NO: 196827 - DNA, 25 bp, Bacillus subtilis
gaaccgggccgttctctcgtgggag

SEQ ID NO: 196828 - DNA, 25 bp, Bacillus subtilis
cgggccgttctctcgtgggagacgc

SEQ ID NO: 196829 - DNA, 25 bp, Bacillus subtilis
tcatgccactgaatacgttgaaaaa

SEQ ID NO: 196830 - DNA, 25 bp, Bacillus subtilis
tattcatttgtatccaaggtgctga

SEQ ID NO: 196831 - DNA, 25 bp, Bacillus subtilis
gtgctgaatcttggaggaggtttcg

SEQ ID NO: 196832 - DNA, 25 bp, Bacillus subtilis
ggccggttttgtgttagcagcggaa

SEQ ID NO: 196833 - DNA, 25 bp, Bacillus subtilis
gttttgtgttagcagcggaaaaaat

SEQ ID NO: 196834 - DNA, 25 bp, Bacillus subtilis
atgccactgaatacgttgaaaaaat

SEQ ID NO: 196835 - DNA, 25 bp, Bacillus subtilis
atcagtcgcaatgattcagctcgct

SEQ ID NO: 196836 - DNA, 25 bp, Bacillus subtilis
gagagctatatacggctgttgcagc

SEQ ID NO: 196837 - DNA, 25 bp, Bacillus subtilis
tacacctctttacgtatatgatgtg

SEQ ID NO: 196838 - DNA, 25 bp, Bacillus subtilis
cacctctttacgtatatgatgtggc

SEQ ID NO: 196839 - DNA, 25 bp, Bacillus subtilis
gcaggcgtttatttctgcagggctg

SEQ ID NO: 196840 - DNA, 25 bp, Bacillus subtilis
ggatgctctctatttagcggagaaa

SEQ ID NO: 196841 - DNA, 25 bp, Bacillus subtilis
ggctttaatacgtgagcgtgctaaa

SEQ ID NO: 196842 - DNA, 25 bp, Bacillus subtilis
ggagaaatatggtacacctctttac

SEQ ID NO: 196843 - DNA, 25 bp, Bacillus subtilis
ggactttctttagatgtcgtatccg

SEQ ID NO: 196844 - DNA, 25 bp, Bacillus subtilis
agcggagaaatatggtacacctctt

SEQ ID NO: 196845 - DNA, 25 bp, Bacillus subtilis
tagaaatcggaggtgtggatgctct

SEQ ID NO: 196846 - DNA, 25 bp, Bacillus subtilis
ctgaacgggccattgaacaagtatt

SEQ ID NO: 196847 - DNA, 25 bp, Bacillus subtilis
cttcggatcacgcccggagtagaag

SEQ ID NO: 196848 - DNA, 25 bp, Bacillus subtilis
tttcgatcttcataacggacaaact

SEQ ID NO: 196849 - DNA, 25 bp, Bacillus subtilis
actgaacgggccattgaacaagtat

SEQ ID NO: 196850 - DNA, 25 bp, Bacillus subtilis
gactacattacaacgggccaggaag

SEQ ID NO: 196851 - DNA, 25 bp, Bacillus subtilis
agtttggtttcgatcttcataacgg

SEQ ID NO: 196852 - DNA, 25 bp, Bacillus subtilis
gaacgcatccactttcatggaaaca

SEQ ID NO: 196853 - DNA, 25 bp, Bacillus subtilis
gcttcttgaagacctatgtaaagaa

SEQ ID NO: 196854 - DNA, 25 bp, Bacillus subtilis
tccattgccatatcggctcgcaaat

SEQ ID NO: 196855 - DNA, 25 bp, Bacillus subtilis
tgactacattacaacgggccaggaa

SEQ ID NO: 196856 - DNA, 25 bp, Bacillus subtilis
tacgcatgactacattacaacgggc

SEQ ID NO: 196857 - DNA, 25 bp, Bacillus subtilis
atggtcatgctgccgcaggatgatc

SEQ ID NO: 196858 - DNA, 25 bp, Bacillus subtilis
ctgtcaaaaattgagtcacgtccga

SEQ ID NO: 196859 - DNA, 25 bp, Bacillus subtilis
gagtcacgtccgactaaaaccggat

SEQ ID NO: 196860 - DNA, 25 bp, Bacillus subtilis
gaccatcccgagctgaatatcgggg

SEQ ID NO: 196861 - DNA, 25 bp, Bacillus subtilis
tcaaaaattgagtcacgtccgacta

SEQ ID NO: 196862 - DNA, 25 bp, Bacillus subtilis
gtctgcattttcttggagaaattta

SEQ ID NO: 196863 - DNA, 25 bp, Bacillus subtilis
ctgtctcccgatgaaaacatatctt

SEQ ID NO: 196864 - DNA, 25 bp, Bacillus subtilis
tccggggcgctgcatagagtgctgt

SEQ ID NO: 196865 - DNA, 25 bp, Bacillus subtilis
atcggggtcattgccaatgatatgg

SEQ ID NO: 196866 - DNA, 25 bp, Bacillus subtilis
gagctctaggcccaaaacgacctta

SEQ ID NO: 196867 - DNA, 25 bp, Bacillus subtilis
cctgtcaaaaattgagtcacgtccg

SEQ ID NO: 196868 - DNA, 25 bp, Bacillus subtilis
ttttccattctacaccatggtaaaa

SEQ ID NO: 196869 - DNA, 25 bp, Bacillus subtilis
gattcagtagcagatgccgttcaaa

SEQ ID NO: 196870 - DNA, 25 bp, Bacillus subtilis
gcagatgccgttcaaaaggtcgatt

SEQ ID NO: 196871 - DNA, 25 bp, Bacillus subtilis
ctggaagcaacgttctttccattca

SEQ ID NO: 196872 - DNA, 25 bp, Bacillus subtilis
gtgacactgtctatcagtacgtcgg

SEQ ID NO: 196873 - DNA, 25 bp, Bacillus subtilis
tgacactgtctatcagtacgtcggc

SEQ ID NO: 196874 - DNA, 25 bp, Bacillus subtilis
aggtcgatttaagtagaagtgcgtt

SEQ ID NO: 196875 - DNA, 25 bp, Bacillus subtilis
gtagctgattctggaagcaacgttc

SEQ ID NO: 196876 - DNA, 25 bp, Bacillus subtilis
tatcagtacgtcggcaatggaagaa

SEQ ID NO: 196877 - DNA, 25 bp, Bacillus subtilis
ggaggataggtcaggtgcgttatct

SEQ ID NO: 196878 - DNA, 25 bp, Bacillus subtilis
tttggaggataggtcaggtgcgtta

SEQ ID NO: 196879 - DNA, 25 bp, Bacillus subtilis
gctcgacaaaatttactcacattca

SEQ ID NO: 196880 - DNA, 25 bp, Bacillus subtilis
gaacatgttgcttaccgcaccattc

SEQ ID NO: 196881 - DNA, 25 bp, Bacillus subtilis
ctacatttacacatctagcagtcag

SEQ ID NO: 196882 - DNA, 25 bp, Bacillus subtilis
ggagtgtatagatgcagccgttgca

SEQ ID NO: 196883 - DNA, 25 bp, Bacillus subtilis
tcggttatttaggtccagcagctac

SEQ ID NO: 196884 - DNA, 25 bp, Bacillus subtilis
aatcgtgggtgaaatgacgttgccg

SEQ ID NO: 196885 - DNA, 25 bp, Bacillus subtilis
atttcttcatcgacattttccttcc

SEQ ID NO: 196886 - DNA, 25 bp, Bacillus subtilis
gttgcaggcgaagttgattttgctt

SEQ ID NO: 196887 - DNA, 25 bp, Bacillus subtilis
ccgaacatgttgcttaccgcaccat

SEQ ID NO: 196888 - DNA, 25 bp, Bacillus subtilis
atatgaatacgccaattctaccggg

SEQ ID NO: 196889 - DNA, 25 bp, Bacillus subtilis
tacatttacacatctagcagtcagt

SEQ ID NO: 196890 - DNA, 25 bp, Bacillus subtilis
acgcgagagacgtgcttccgaagga

SEQ ID NO: 196891 - DNA, 25 bp, Bacillus subtilis
gaaggatatgttccatcagccgtac

SEQ ID NO: 196892 - DNA, 25 bp, Bacillus subtilis
ggattggccgcttgtcgggaaaatc

SEQ ID NO: 196893 - DNA, 25 bp, Bacillus subtilis
gacgtagtcgttgtcattccttttt

SEQ ID NO: 196894 - DNA, 25 bp, Bacillus subtilis
aaagaacagctcgcgcttcatttcc

SEQ ID NO: 196895 - DNA, 25 bp, Bacillus subtilis
tcctcattgctgcgatcatgtccaa

SEQ ID NO: 196896 - DNA, 25 bp, Bacillus subtilis
atgcttgtgcctgagctgtcaaaag

SEQ ID NO: 196897 - DNA, 25 bp, Bacillus subtilis
gacgagacccaaatgatccgcgtcc

SEQ ID NO: 196898 - DNA, 25 bp, Bacillus subtilis
gaagggcgcatatggaacggctctc

SEQ ID NO: 196899 - DNA, 25 bp, Bacillus subtilis
gtgatcggcctgcatgaggatgacg

SEQ ID NO: 196900 - DNA, 25 bp, Bacillus subtilis
gaaggagtttccatatgccgatgcc

SEQ ID NO: 196901 - DNA, 25 bp, Bacillus subtilis
gcatatgcagcccgtgctaacatga

SEQ ID NO: 196902 - DNA, 25 bp, Bacillus subtilis
aactcgctcaagctgtcatgtacgg

SEQ ID NO: 196903 - DNA, 25 bp, Bacillus subtilis
gacggaaactttgacgatgcgctta

SEQ ID NO: 196904 - DNA, 25 bp, Bacillus subtilis
caggccttccgaaaatgcgcggctt

SEQ ID NO: 196905 - DNA, 25 bp, Bacillus subtilis
agcgcctgatgttttagcgatcccg

SEQ ID NO: 196906 - DNA, 25 bp, Bacillus subtilis
gtcaacaggtaacacttccgctgct

SEQ ID NO: 196907 - DNA, 25 bp, Bacillus subtilis
gaaatgcattgtcatcatcccgaac

SEQ ID NO: 196908 - DNA, 25 bp, Bacillus subtilis
aaactgctgccttcgaagtgtgcga

SEQ ID NO: 196909 - DNA, 25 bp, Bacillus subtilis
gtcaacccttaccgcattgaaggcc

SEQ ID NO: 196910 - DNA, 25 bp, Bacillus subtilis
gatgcgcttaaaattgtccgttcca

SEQ ID NO: 196911 - DNA, 25 bp, Bacillus subtilis
gtaacagatcaaacaccggcgctaa

SEQ ID NO: 196912 - DNA, 25 bp, Bacillus subtilis
tatcagctgatcgcccgtgtagaag

SEQ ID NO: 196913 - DNA, 25 bp, Bacillus subtilis
aaatgcctcctgtccatgtgaaggt

SEQ ID NO: 196914 - DNA, 25 bp, Bacillus subtilis
gttcttgcgcgtctatcgcaggagt

SEQ ID NO: 196915 - DNA, 25 bp, Bacillus subtilis
tcagtcggaatggcgctcagcagat

SEQ ID NO: 196916 - DNA, 25 bp, Bacillus subtilis
gccccggctttgattcagtcggaat

SEQ ID NO: 196917 - DNA, 25 bp, Bacillus subtilis
agatccgaacacagcggtcgacatt

SEQ ID NO: 196918 - DNA, 25 bp, Bacillus subtilis
tgaaatccttcacgcatatcagctg

SEQ ID NO: 196919 - DNA, 25 bp, Bacillus subtilis
gataacctgatctaccaagtggcta

SEQ ID NO: 196920 - DNA, 25 bp, Bacillus subtilis
tctgtcactgttcccggaagcacag

SEQ ID NO: 196921 - DNA, 25 bp, Bacillus subtilis
gaacgaagccgacatgctgttctct

SEQ ID NO: 196922 - DNA, 25 bp, Bacillus subtilis
aaatcaagcctgtcacattgccgac

SEQ ID NO: 196923 - DNA, 25 bp, Escherichia coli
gcaaactcgattttctacggttgca

SEQ ID NO: 196924 - DNA, 25 bp, Escherichia coli
gcaaactggggctaaatccgcagca

SEQ ID NO: 196925 - DNA, 25 bp, Escherichia coli
acaacagcaacgtcttgaacaggcg

SEQ ID NO: 196926 - DNA, 25 bp, Escherichia coli
tgccaacctcttacgtgcgcctttc

SEQ ID NO: 196927 - DNA, 25 bp, Escherichia coli
gaacagactcaggcgatgtgcttta

SEQ ID NO: 196928 - DNA, 25 bp, Escherichia coli
tatggcaggcgcaaactcgattttc

SEQ ID NO: 196929 - DNA, 25 bp, Escherichia coli
agactcaggcgatgtgctttatggc

SEQ ID NO: 196930 - DNA, 25 bp, Escherichia coli
caacctcttacgtgcgcctttctgc

SEQ ID NO: 196931 - DNA, 25 bp, Escherichia coli
actggggctaaatccgcagcaaact

SEQ ID NO: 196932 - DNA, 25 bp, Escherichia coli
tttctacggttgcaaactgctgacc

SEQ ID NO: 196933 - DNA, 25 bp, Escherichia coli
gggataacgaacaacagcaacgtct

SEQ ID NO: 196934 - DNA, 25 bp, Escherichia coli
catttcgatcctcgtcaggtgcagg

SEQ ID NO: 196935 - DNA, 25 bp, Escherichia coli
ttcgatcctcgtcaggtgcaggtca

SEQ ID NO: 196936 - DNA, 25 bp, Escherichia coli
ctggatctgctgtttgaagcgcagc

SEQ ID NO: 196937 - DNA, 25 bp, Escherichia coli
tcgcgctacaaaaccgggctggaag

SEQ ID NO: 196938 - DNA, 25 bp, Escherichia coli
tcgatcctcgtcaggtgcaggtcag

SEQ ID NO: 196939 - DNA, 25 bp, Escherichia coli
gctggatctgctgtttgaagcgcag

SEQ ID NO: 196940 - DNA, 25 bp, Escherichia coli
tttcgatcctcgtcaggtgcaggtc

SEQ ID NO: 196941 - DNA, 25 bp, Escherichia coli
gagcggttgatggaagttgaacagg

SEQ ID NO: 196942 - DNA, 25 bp, Escherichia coli
cgcgctacaaaaccgggctggaagc

SEQ ID NO: 196943 - DNA, 25 bp, Escherichia coli
cggcaggatcgacgcgcttctgtat

SEQ ID NO: 196944 - DNA, 25 bp, Escherichia coli
aagccgagcggttgatggaagttga

SEQ ID NO: 196945 - DNA, 25 bp, Escherichia coli
ccggattattgctgcaactggcaaa

SEQ ID NO: 196946 - DNA, 25 bp, Escherichia coli
tgtatgacgctgggcacgttgagtg

SEQ ID NO: 196947 - DNA, 25 bp, Escherichia coli
cggaaagcgtgccaatcaacatgct

SEQ ID NO: 196948 - DNA, 25 bp, Escherichia coli
cacgcacttatcaggaacgcctcga

SEQ ID NO: 196949 - DNA, 25 bp, Escherichia coli
tgccgggatcaaagtctgttctggc

SEQ ID NO: 196950 - DNA, 25 bp, Escherichia coli
gcattgtgggcttaggcgaaacggt

SEQ ID NO: 196951 - DNA, 25 bp, Escherichia coli
gctgggcacgttgagtgaatctcag

SEQ ID NO: 196952 - DNA, 25 bp, Escherichia coli
agatcgcgccggattattgctgcaa

SEQ ID NO: 196953 - DNA, 25 bp, Escherichia coli
cgggatcaaagtctgttctggcggc

SEQ ID NO: 196954 - DNA, 25 bp, Escherichia coli
aaaagatcgcgccggattattgctg

SEQ ID NO: 196955 - DNA, 25 bp, Escherichia coli
ccgggatcaaagtctgttctggcgg

SEQ ID NO: 196956 - DNA, 25 bp, Escherichia coli
accgccagatgaaatcgaacagtcg

SEQ ID NO: 196957 - DNA, 25 bp, Escherichia coli
agtgccatgcgttcgctgaaaggca

SEQ ID NO: 196958 - DNA, 25 bp, Escherichia coli
gtggacgagcgtccgcatgctaatc

SEQ ID NO: 196959 - DNA, 25 bp, Escherichia coli
tattaacgcgttcgcagttgcagcg

SEQ ID NO: 196960 - DNA, 25 bp, Escherichia coli
cgctggtgcagggatcgttacccga

SEQ ID NO: 196961 - DNA, 25 bp, Escherichia coli
gaacggcgtgcattatcaacatcat

SEQ ID NO: 196962 - DNA, 25 bp, Escherichia coli
tcatattcagcccatcacgctgtgg

SEQ ID NO: 196963 - DNA, 25 bp, Escherichia coli
cagcgattgcaactggcctggccgc

SEQ ID NO: 196964 - DNA, 25 bp, Escherichia coli
cggtgccacgcatcttcatgaaggg

SEQ ID NO: 196965 - DNA, 25 bp, Escherichia coli
cacgctgtggtttgatgatgcgctc

SEQ ID NO: 196966 - DNA, 25 bp, Escherichia coli
atcaacatcatattcagcccatcac

SEQ ID NO: 196967 - DNA, 25 bp, Escherichia coli
gtaaatacacccacgtactggacgc

SEQ ID NO: 196968 - DNA, 25 bp, Escherichia coli
acgcgggttgtggacctggctggat

SEQ ID NO: 196969 - DNA, 25 bp, Escherichia coli
gcatggagcaatctcgcagtgcagt

SEQ ID NO: 196970 - DNA, 25 bp, Escherichia coli
atgcagatctacagcgccagagtgc

SEQ ID NO: 196971 - DNA, 25 bp, Escherichia coli
ccagaaggatgccgcagaccattat

SEQ ID NO: 196972 - DNA, 25 bp, Escherichia coli
cacggcactccgcgagctgtatcgg

SEQ ID NO: 196973 - DNA, 25 bp, Escherichia coli
atggagcaatctcgcagtgcagtgg

SEQ ID NO: 196974 - DNA, 25 bp, Escherichia coli
cgccgccaatgcttgttcaggcacg

SEQ ID NO: 196975 - DNA, 25 bp, Escherichia coli
acgttcgatcttgcatggagcaatc

SEQ ID NO: 196976 - DNA, 25 bp, Escherichia coli
ctgccgttagcgactgcgacgttcg

SEQ ID NO: 196977 - DNA, 25 bp, Escherichia coli
aggatgccgcagaccattatctggc

SEQ ID NO: 196978 - DNA, 25 bp, Escherichia coli
ttctgacactttcacttttgcagat

SEQ ID NO: 196979 - DNA, 25 bp, Escherichia coli
gccggtgatactggtagttggtgtg

SEQ ID NO: 196980 - DNA, 25 bp, Escherichia coli
aactcggctgtattaatcacgcgat

SEQ ID NO: 196981 - DNA, 25 bp, Escherichia coli
tgctgggagagatcccctggcttgc

SEQ ID NO: 196982 - DNA, 25 bp, Escherichia coli
aacaactgccggtgatactggtagt

SEQ ID NO: 196983 - DNA, 25 bp, Escherichia coli
acaacacgccggactgactctggcg

SEQ ID NO: 196984 - DNA, 25 bp, Escherichia coli
acttttgcagattgggtaacacagg

SEQ ID NO: 196985 - DNA, 25 bp, Escherichia coli
gtcacgctgaatatatgaccacgct

SEQ ID NO: 196986 - DNA, 25 bp, Escherichia coli
cacaggtaatacaacacgccggact

SEQ ID NO: 196987 - DNA, 25 bp, Escherichia coli
tgacactttcacttttgcagattgg

SEQ ID NO: 196988 - DNA, 25 bp, Escherichia coli
tcacgctgaatatatgaccacgctc

SEQ ID NO: 196989 - DNA, 25 bp, Escherichia coli
gggcagaccgatagaatcattggta

SEQ ID NO: 196990 - DNA, 25 bp, Escherichia coli
acgcaacagtaaatccttacacctt

SEQ ID NO: 196991 - DNA, 25 bp, Escherichia coli
gcagcaggctaccggacggcaggtt

SEQ ID NO: 196992 - DNA, 25 bp, Escherichia coli
cctctggcagcgaaaagaccccgga

SEQ ID NO: 196993 - DNA, 25 bp, Escherichia coli
gtaaatccttacaccttcgcagaac

SEQ ID NO: 196994 - DNA, 25 bp, Escherichia coli
cgcaacagtaaatccttacaccttc

SEQ ID NO: 196995 - DNA, 25 bp, Escherichia coli
ctggcagcgaaaagaccccggaagg

SEQ ID NO: 196996 - DNA, 25 bp, Escherichia coli
cctgcagctggattacgcaacagta

SEQ ID NO: 196997 - DNA, 25 bp, Escherichia coli
agcctgcagctggattacgcaacag

SEQ ID NO: 196998 - DNA, 25 bp, Escherichia coli
cttacaccttcgcagaacccacttc

SEQ ID NO: 196999 - DNA, 25 bp, Escherichia coli
gaatcattggtaatgagcgccggat

SEQ ID NO: 197000 - DNA, 25 bp, Bacteriophage P1
gttaatccatattggcagaacgaaa

SEQ ID NO: 197001 - DNA, 25 bp, Bacteriophage P1
aagatatctcacgtactgacggtgg

SEQ ID NO: 197002 - DNA, 25 bp, Bacteriophage P1
ctgttttgccgggtcagaaaaaatg

SEQ ID NO: 197003 - DNA, 25 bp, Bacteriophage P1
atgatccgaataactacctgttttg

SEQ ID NO: 197004 - DNA, 25 bp, Bacteriophage P1
aaaaaatggtgttgccgcgccatct

SEQ ID NO: 197005 - DNA, 25 bp, Bacteriophage P1
cgctggttagcaccgcaggtgtaga

SEQ ID NO: 197006 - DNA, 25 bp, Bacteriophage P1
aacgaaaacgctggttagcaccgca

SEQ ID NO: 197007 - DNA, 25 bp, Bacteriophage P1
tagctgatgatccgaataactacct

SEQ ID NO: 197008 - DNA, 25 bp, Bacteriophage P1
ccagctatcaactcgcgccctggaa

SEQ ID NO: 197009 - DNA, 25 bp, Bacteriophage P1
ggtcgagcgatggatttccgtctct

SEQ ID NO: 197010 - DNA, 25 bp, Bacteriophage P1
ataactacctgttttgccgggtcag

SEQ ID NO: 197011 - DNA, 25 bp, Bacteriophage P1
gccggtgaacgtgcaaaacaggctc

SEQ ID NO: 197012 - DNA, 25 bp, Bacteriophage P1
tctgtccgtttgccggtcgtgggcg

SEQ ID NO: 197013 - DNA, 25 bp, Bacteriophage P1
gcaaaacaggctctagcgttcgaac

SEQ ID NO: 197014 - DNA, 25 bp, Bacteriophage P1
ttgggccagctaaacatgcttcatc

SEQ ID NO: 197015 - DNA, 25 bp, Bacteriophage P1
gatgttcgcgattatcttctatatc

SEQ ID NO: 197016 - DNA, 25 bp, Bacteriophage P1
gatcgccaggcgttttctgagcata

SEQ ID NO: 197017 - DNA, 25 bp, Bacteriophage P1
cggaaatggtttcccgcagaacctg

SEQ ID NO: 197018 - DNA, 25 bp, Bacteriophage P1
atcgctgccaggatatacgtaatct

SEQ ID NO: 197019 - DNA, 25 bp, Bacteriophage P1
gctgtttcactggttatgcggcgga

SEQ ID NO: 197020 - DNA, 25 bp, Bacteriophage P1
gggattgcttataacaccctgttac

SEQ ID NO: 197021 - DNA, 25 bp, Bacteriophage P1
gcactgatttcgaccaggttcgttc

SEQ ID NO: 197022 - protein, 444 aa, Unknown
  Description of Unknown: Unknown yeast polypeptide
MPSHFDTVQLHAGQEDPSDNAHRTRAVPIYATSSYVFENSKHGSQLFGLEVPGYVYSRFQNPTSNVLEERIAALEGGAAALAVSSGQAAQTLAIQGLAHTGDNIVSTSYLYGGTYNQFKISFKRFGIEARFVEGDNPEDFEKVFDERTKAVYLETIGNPSYNVPDFEKIVAIAHKHGIPVVVDNTFGAGGFFCQPIKCGADIVTHSATKWIGGHGTTIGGIIVDSGKFPWKDYPEKFPQFSQPAEGYHGTIYNEAYGNLAYIVHVRTELLRDLGPLMNPFASFLLLQGVETLSLRAERHGENALKLAKWLEQSPYVSWVSYPGLASHSHHENAKKYLSNGFGGVLSFGVKDLPNADKETDPFKLSGAQVVDGLKLASNLANVGDAKTLVIAPYFTTHKQLNDKEKLASGVTKDLIRVSVGIEFIDDIIADFQQSLETVFAGQKP

SEQ ID NO: 197023 - DNA, 40 bp, Artificial Sequence
  Description of Artificial Sequence: Synthetic primer
gagctcatagcggccatgccatctcatttcgatactgttc

SEQ ID NO: 197024 - DNA, 42 bp, Artificial Sequence
  Description of Artificial Sequence: Synthetic primer
ggatcctatgcggccgcaaaaaaggatattcatttcaataac

SEQ ID NO: 197025 - protein, 4 aa, Saccharomyces pastorianus
DEAD

SEQ ID NO: 197026 - protein, 4 aa, Saccharomyces pastorianus
HDEL

SEQ ID NO: 197027 - protein, 4 aa, Saccharomyces pastorianus
DHHC

SEQ ID NO: 197028 - protein, 4 aa, Saccharomyces pastorianus
DEAH

SEQ ID NO: 197029 - protein, 5 aa, Saccharomyces pastorianus
GRKPG

SEQ ID NO: 197030 - protein, 4 aa, Saccharomyces pastorianus
PWWP

SEQ ID NO: 197031 - protein, 4 aa, Saccharomyces pastorianus
DEDD

SEQ ID NO: 197032 - protein, 4 aa, Saccharomyces pastorianus
GVNK

SEQ ID NO: 197033 - protein, 4 aa, Saccharomyces pastorianus
GLFG

SEQ ID NO: 197034 - protein, 4 aa, Saccharomyces pastorianus
CTLH
